United States Patent Application Publication US 2006/0134663 A1 - sequence listing, part 42

SEQ ID NO: 78611 - DNA, 908 bp, Homo Sapiens
tttcaccgtagtatctaatttataaaatgtcacaatttgtgtcattgtaaagaggttgatctcaaccaggttgtaacaaaatttccacagcttattccaaaagaaaattttaatacaagagatcttaaaaaattaaacacatttgtttaaaaatcctattatgtaaaccttaacataagagggtagttaagataatactacaagtttcagggcgtttccacagacttctagaccttatgtacacacagactatcagactctagatatgcggcctgcttacccttaagggggtgcactgggagccgatcatgggcgccccctagtggggttaccatcgctcctccattcaaaaaagactcgcttctctaagaagtcggtgtcaggtgagtaagcgttctacctgacggctaagccagggatgaagagaggccaacattcttcttaggatgagtcctggataataaaaattccaattagctctacccccatccccttcactctgggaaattaatggtctctggggtcactgagcgtttagtagctctgggtgcaaatgtacgatccaccattccgtgtgctactgtcctcagtcccaatttttgcaagggcatcctctgtcttacctacactgacagtgaaatgagtggtggttcccccttgccgttcatggagaccagcggcagagctgagaaattttgaaggggaagtgggggaacccggggtggaatgggtttttccgggaaggatgggaaaaaaccttacccccccagtaaggaactaaaatccccgggggcctcctttaaaccaccgtggaaatctaagaatccttccgccagccagggctggctcctttaatggccaaaggcccaataatcttaattaaagaaaacccgaatttccctttttta

SEQ ID NO: 78612 - DNA, 822 bp, Homo Sapiens
  misc_feature (45)..(75): n is a, c, g, or t
caaaatcaaaaatagtgttattaattctgatgtctccgaagcacnnnnnnnnnnnnnnnnnnnnnnnnnnnnnnnggaaagaaagaaaccacccttcccacaattcaggccccaggtccaggccaagggggccacacctgcaggcagtgcaggcccaggggctgaggtggtcctggccacaggctccaagtgggaccagcccatggtttggctcttagggcctggctgggaggctgactgcctccatctggggagcccaggccctggactggggatgaaagagatcaggggtcaaggtcagaggtctgggtcactcagttttggtactctggccaaggcagccaaaggtcagggttcagacatgtaggccaaagccactcagttctgtggtccagcagagaggcagcagagcaggtccgttactgaatcctaggaggtggtccagtgggcgccaggtagctcagtactggtgttccagcaggggctgggctgccgggctctcacgctcctcaataggggcaggccagtcgcccagggcacccataggtgtgccactctcaggggcactgctgtccaagcaaggaatgtcctgggaagctctggggggtgaggcctcagtgctgacatcggggctgaggctgaggctgaggctgaggtctagaggcgcctgggggaggggggagaggttggcgggtgagcaggccttagccttctgggacccaaccctcccacaggtgccttacctgagattggggggtacctcctttggggctccctgaggctggctccccgtcagatcctcccagccccttccggaccccc

SEQ ID NO: 78613 - DNA, 2164 bp, Homo Sapiens
  misc_feature (24)..(25): n is a, c, g, or t
  misc_feature (93)..(93): n is a, c, g, or t
  misc_feature (225)..(225): n is a, c, g, or t
  misc_feature (291)..(291): n is a, c, g, or t
  misc_feature (1027)..(1035): n is a, c, g, or t
  misc_feature (2129)..(2129): n is a, c, g, or t
ccgacgttgctgtcgatttcgccnntggatgcctggccagatcgccggggaatcagtttggaactggctatagtgttgtaaatcttccctgtnactaagagactgtcttctgaatggacttgatgaaatggcacccccttcctatttaggatagagtagggctgcctagatgcagtataagactgaccctaatcactcccctaatgaaccctcttccttgttctntaaactcagtctgcaccaacttgagagaaaaaagctctttccatatcaataccatatgattcattnaactgcacctgcagaaatgattgccagaaagcaccagtagcctcctatctgcaagcagagtagtgctctgctctggggaggggtcattggaaaccataatgcagagtgggccccctactccatttcccagcaaaaggctccagctggagggatgggttgtggggcaacctggttcctgctaactgccagattgaatgtgtgggctagaatgcctgcacatttagttaaactgggctcagcatgcttgtcctcaaaatgtccatcctggtcacagcacacaagatggctattggtctgcttttaccctaccctgtactatacatgaaaattccagttattaacacactcaaactggtggagcttgttcaccctaggaaggggattgtatatatggcaggcttccctggtgccgatgtaaagggctacatttgggaacatttgacttccttgggactcttaagtgcatactgatggcatgaagtaaaaggggcctcaatgatgataggaaaatcagttcttttaaaatttcttcaagaaaatccaggctatcacatagtctttctgtgtgacttattaggagataggaagagcattgggaaacttgcacagctagctatgcatctacattttggtttggggttagttatgaaatgttcttaatatgacgtgttcaataacttcacataaacttcctgttctccaaaacctcaaagagatagagttaatgagttgttgnnnnnnnnnaaatgggggtagttttctatctgtcatgggctctagcatctactccgctacccaattctgtcatctccaagctgagtttcctcttctgaggcagaggctggagcagttctttttcagttctcatcctctccatcccaatccagtatatcaatcaactctaactcggagacgtctagctggcaatgtttctaaaactttcactggatttctttagacattgaagcaaacatttttttctaagaattgcttctcagatgatgatatcaaatgtatatgcttttgcaagtttgaaaagttcaaattaaccacttttgactaggtaagtctttctaaaaaccatttaaagctaactgggtcttagcatcctcctgtgtatggaagagacaggtgaccgctccaggttgggtgctcacagaacccttttcctgactctcatggaagatggtggaaggaaaatagactgtctcatcaaccctcctgtgtcctctgaagcaatctcagtttttattaaccacctcttctgtgtttctggtagctatttaacctgtatttaatctgtacttcctatgccagcctcaattttatttgatttttaaaattattctcttctaaccaatgaagtgtttgtcagtatgccccaaagcttgctcttttgtgctcccttttgaataactttctatccagaaaaagagattatttgggacttgagatttgcagtgataccaacttatagcaatgatgtactttaagggaactacccaactatgttgtgatagaagaaagagaaaccttcactttggcattttttttaatcactgtttatttttctgtttgcggcccaggaagcagtgggaggtggtggcagatatgctttgcatatggattgttatgtttttatttgggcaagtttaatcatggaaaactcaaaaagaaggggggaaatggtcagtttaagccaaaagaaactttctaaacaatgtataggtacacagcaaaattaaacaaatccaacaatttctggaagcttagtgtaattttgagtgggtggtttgttatttccattaaatttattccccaaaagtgttttctccccnaggagttgcagttcccctggagttcacttcccgga

SEQ ID NO: 78614 - DNA, 1564 bp, Homo Sapiens
  misc_feature (528)..(530): n is a, c, g, or t
  misc_feature (1423)..(1441): n is a, c, g, or t
gaaagtatggaagttttccattcactggggaaaggagggaaaagtgcatttatttttatacagagttacttaattacctccaaaacacatatgttggaaatcgcttttgctggtgcaaagtatattaatgagcaggaatacatacattgaggttatgaatagagagctcaatttgtacctttgctgtcttgctcaagcttggtatggcatgaaaactcgactttattccaaaagtaacttcaaaatttaaaatactagaacgtttgctgcgataaatcttttggatttttgtgtttttctaatgagaatactgtttttcattacctaaagaacaatttgctaaacatgagaaatcactcactttgattatgtatagattacataggaagaacaatcacatcagtaagttatagtttatattaaaggtaattttctgttggctcataacaaatataccagcattcatgatagcatttcagcattttccaaggtaccaagtgtacttattctgtgtcgtgatgtcgtgtnnnattttagaaggaattcagctctgatgtttttaaagaaaaccagcatctctgatgttgcaacatacgtgtaaaatgggtgttacatctatcctgccatttaaccccacagttaataaagtggctgaaaataatagtagctctggcttggtgcttgacctggttaaatactgtcttaaagctcatacaaaacaaataggcttttccataagtggcctttaagaaaacatggaagacaattcatgtttgacaaatgctgacagggtgaagaaagcccagtgtaaaaatgaatcgcgttttaagtgattcggttaaagagtttgggctcccgtagcaaactaatactagataataaggaaatgggggtgaaatatttttttattgttgaatcattttgtgaatgtccccctcaaaaaaagctaatggaatatttggcataaagggcatttggtggttttatttttgtttgagggggattgtcagaaaatcccttttctctcttacgtctaactgactagggaacaattgttgatatgcatagcattggaatacttgtcattatatactcttacaaataacacatgaagcaagaatgaccaatattctgataattggcactggatcacaaaatgtgataaaactttaaatgtataaaactttatcaaataaagttttattttcccctttaaaatgtatttctttagaggcattacttttttaaaaatattggtcaattcctgacataagatgtgaggttcacagttgtattccagtattcaagatagattcctgatttttcaattaggaaaagtaaaatccaaaatgttagcaaaacaaagtgcaatattaaatgtttgctttatagattatattctatggctgtttgtaatttctcnnnnnnnnnnnnnnnnnnnggtgctgaatatgtccttgtaggctctgttttaagaaaacaatatgtgggaaatgatttaatttttcctattgctcttccttgtggaaaataaagtgttttgtttttttctgttttgtataaa

SEQ ID NO: 78615 - DNA, 2113 bp, Homo Sapiens
gggagaaaccaggcggcgcgttcccggtggcggcgcctggactcccgggcccgcgcatccccgccagccttccttaaggcggatgggtggcccccgagaccccgtcggacccatggtttccagtgcagcgcggagtgggcgatgccagcgtgccaggagccatgtctgaccaggacgtttggaagatcatatccatgccagaggctcttgtgaggagatgagttggtaaagagagaggctgggatgaagatgctgccaggagtgggcgtgtttgggactggcagctccgcccgagttctggtcccactgctgagggcagaagggttcactgttgaggccctgtgggggaagactgaggaggaggcgaagcagcttgctgaggagatgaacatcgccttctacaccagccggactgatgacatcttgctgcatcaagatgtggatctggtgtgcatcagcatcccccctccactcacccggcagatatccgtgaaggctctaggtattgggaagaatgtggtttgcgagaaggcagcaacatcggtggatgccttccggatggtgacagcctcgcgctactacccgcagctcatgagcctggtagggaacgtgctgcgcttcctgcctgccttcgtgcgcatgaaacagctgatttcggaacactatgtgggagcggtgatgatctgtgatgcccgcatctactcaggcagcctgctgagccccagctatggctggatctgtgatgagctcatgggcggcgggggcttgcacaccatggggacctacattgtggacctgctgacccacctgaccggccggagagccgagaaggtgcacgggctgctcaagacattcgtgaggcagaacgctgccatccgtggcatccggcacgtcactagcgatgacttctgtttcttccagatgctcatgggtgggggtgtgtgtagcacagtgacactcaacttcaacatgccaggcgcctttgtgcatgaagtcatggtggtaggctctgcaggacgcctcgtcgcccggggagccgacctctatgggcagaagaactctgccacgcaagaggagctgctcttgagggactcgctggcagtgggcgcaggactgcctgagcaggggccccaggatgtcccgctgctgtacctgaagggcatggtctacatggtgcaggccttgcgccagtccttccaggggcagggcgaccgccgcacctgggaccgcacccctgtctccatggccgcctccttcgaggatgggctgtacatgcagagcgtggtggatgccatcaagaggtcgagccgatccggcggagtgggaggctgtggaggtgctgacggaggagcccgacaccaaccagaacctgtgtgaggcacttcagcggaacaacctatgagcctgcacctgggctccttgccacagggcagagggaccagggaggggaacaggagccagacatgacagggacttggccctagcagagacagtgtctttcatttaatgagtctgggtgaagccagaggtggctctgggacttcgccccctccagtggctcatctgctcctcagacttgcagggtggcaaatgttcctgttgccaggttaccacggtgtgcacagggcagagctgccgccaggcctcctcatggtgatgccagtgagtcggaccaggaaaggctcaccctggggagcccttcagcctgatccgcagtcctaacagggtgagaaagcacaagaggggccagctcggctgaggcctgaggagaaatgatgagaagttttgtttcgttcttgggctggggcatctcaggaacagtgagggcaacaagctgtccctcagggaccctcacctgccctcccatgtgaccaggcccttcccaggtggggactggggcttgctttattaagtgagctcttgggcttttgaagtaggacagagggccctgggtttgggaaaagaaggagggccagggaagggccttttaaaaacatcctgaggaaatggttaaataaacttaattcccgaaaaatagcgcaataccccccgtcgaccaaaaggggggggccggctcctaaaaatatttcccctccaagggggccccaaggct

SEQ ID NO: 78616 - DNA, 1471 bp, Homo Sapiens
  misc_feature (41)..(75): n is a, c, g, or t
cgaacgagcgcagcgagcgatattagcgaggaagcggccgnnnnnnnnnnnnnnnnnnnnnnnnnnnnnnnnnnncagtcgacggtaccggacatatgcccgggaattcggccattacggccggggtattttcaacatctaaaaatcctaggagcttaagggactagaatgaaaaaaaagaacctagattgagtaagaaagtatttcattttggggtgcttggcaaaaatgacaatacaccatttcttttcttgtagttgagggtttaaactagagtatgtgccacgtgacaacctaaatcagcttgcgtgtctttgtccacctttggtatgcagtctgaatctttaaatccgaaaaccttacaaattggaccggaaaacccttaagcagtagggtaacttggagctgtatcttaattcgctaatcaactgactgggaaataggataattcattttatgagctctttaaatgagtttatttgggaatatgcctatcattggaattgaaagcagcatagcttgcttcagtaactccaataatttgggaagcagaaatggaaaaagtaatttgacgtcatgtttgcttctcatgtagtgccgtttaaaattcccctagtaattacctttcatattttattaactaggttaacatcaactgtggttgtaagagtaaatgtttcaccttaagataaacatgggcaatatattaaactctagtctgttttcttgcctgtgaagtgaggctgcacttgattatatttgagttctttggtcggaatacatgggaacgacagctaagtgtggtgaaaaacgcggggatccaaagagctggatttttatctcagatctgccgctaacttttgtatcctataggctacttttatttctatggtctcaatctataacatgaatgggttgggttaaatgactgaagttccttcaagtgctaaaattctttttctacagtcttcattggatttatgtatttcttattcctaatatgtttaactgggatgtctgtcactctagggcggcaagacagacatttaaaagtaacagtcacactgctgaactggcatttctgttaacacaaaagtttagaaaactcacggtaactgttacttgatttaagtgtatataaaattttcagtaaggctgcttttaaaaggaaccactgtccatttaaaggtttcatagttatcttcaatgggttagtattgtttggggcaggacattaaactagaagggattctataggatgaggtgatacctagaaggtaatatattgtaaggcaaaagagattagaagaaatggggaaaggatagtaaaaggcaagtcagattaaaggttgaaacatgaagatattctcaattgtatttctgcctatgtttgcttttttggctcaagcatctgttggaagagacaaaatgtgacttggttcataataaagcaagaattatttactctcgg

SEQ ID NO: 78617 - DNA, 546 bp, Homo Sapiens
cccactgggcggccagctggggtgtagttcatgtgaagccccattcccctcacgcttttgggcccactgtgaatggggccaggaaacggatttttggtgcagctgcattccataatagacctagttccctccacgttagtgtagacatggccttgggggctgagcgcagcagccaggctgccagggctgggggcgggtaggaggcacggtagttggtgggtgggaagagggcctgggtggtggcggtcagttagcctggctgggtgaggttggtgaggttgcggggcggggtggtgaggagagcaggggtcccagggaggcattggggtgctgggtaatgacctcggccctgggtttctcctctccctgcgggacaggagcctcagaaagggccaagggcaaggtgggcttggggggctctgggaatctcagctctagccctgtatggccaggatctgctgtctccgtccctcctgggccccagcagctgtcctgcagctgtcagcaggagggcctggctttaataaagagtggacaaaccaaaaa

SEQ ID NO: 78618 - DNA, 1086 bp, Homo Sapiens
  misc_feature (42)..(42): n is a, c, g, or t
  misc_feature (72)..(72): n is a, c, g, or t
  misc_feature (109)..(109): n is a, c, g, or t
  misc_feature (350)..(350): n is a, c, g, or t
  misc_feature (359)..(359): n is a, c, g, or t
gaattgtgaggatgcttgtcaatctgatgctcatgccagatnttatgttcctaccatggatgagcgtcaatntatgaaagtcattactagagggatgcagtggatggtntgagatccatctacgacagtgcatcctattaacgctgttgcaaccaagtgccatacatgagtactctgaccacagatgctctcctcaataaataattgtctagtattataagggagatctcataacagatgttgaaagaaggagtcacgactggcaattggctggattaagctaaacactggtatcactgattaactgtaaataacaattaaaaacacattttcagtgtttatgatatgtntaaattatntgtcctaaagctttatgttaaagattatcctattttaccccttcgtgtgaaatttactagcaaaattaagctttcatcaaagttcatcacttttgcattcagatacttggtcatttacttaccaaattacaaacgcaatactacagcatttgtatattaagtatcacagttactattgataaactacttttgggttttatttcattgaggcactttttttattgtttgaatgattccggcttgtaatatatcagcctctacaatgaaatgcagaagagttcatttttctaagatctgtttttcattagaaatattgacaaataacacattgtcaacctggatcctttgacaatttacttaactctggcatgttcacaaaaagtagaaactctaagagaccattaccatttattcacagatgtataggggatgtattctaaaaactgacagaaaagagaatctgatagtcaacactgttaacttttactgtgtaattgccaaatacacttttccaaatttgtcccaacagccctgtaagccagctttcttctatatttataaacacgataaatgcatgagaagatctgttattacattagtatattacgttatttattatgatcctagttgatggcctaaataaacacctttttctttcaggccgacacaacacaggaaacggacgcaacggcaaatacaaaggccgacgcaacaaaacacccttgtg

SEQ ID NO: 78619 - DNA, 1956 bp, Homo Sapiens
  misc_feature (1115)..(1115): n is a, c, g, or t
ggtccggaattcccgagatatcgtcgacccacgcgtccgctggcttgacaggcttggtctctgcaagtggctctcagccccttcttctttcctgcctcaccttccaatatcgtttgccgccgccgtcccgcagcctgctgtttccggagttgccccttccaccatgttccggggcaggagtccgcaaagcgaagatccgcccgccggttcctcatcatgtccgaactgactaaagagctgatggagctggtgtggggcaccaagagcagccccggtctctcggacaccattttctgccgctggacgcaagggttagtgtatagtgaatcagagggatctgcattagaacagtttgaaggtggcccctgtgctgttattgcacctgttcaggcatttcttttgaagaagctcctgttttcttcggagaagtcttcttggcgggatggttcagaggaagagcagaaggaactccttggtcataccttggtgtgatatatttagaaagtgcttgtagtgaccactctggatcatactgcttggtttcatggttaagaggaaagacaactgaggaaactgctagtatttctgggagtcctgcagagtctagttgccaagtggaacattcttctgccttggctgtcgaagagcttggctttgagcgatttcatgcattaattcaaaaaagatcgttcagaagtttaccagaattaaaagatgctgtcttggaccagtattcaatgtggggaaataaatttggagtattgctttttctgtattctgtattactgacaaagggcattgaaaacataaaaaacgaaattgaagatgcaagtgaacccttgatagatcctgtatatgggacatggcagccaaagtttaattaatctcctgctgacgggacatgctgtttctaatgtatgggatggtgatagagagtgctcaggaatgaaacttcttggtatacatgaacaagcagcagtaggatttttaacactaatggaagctttaagatactgtaaggttggttcttacttgaaatctccaaaattccctatttggattgttggcagtgagactcacctcaccgtattttttgccaaggatatggctttagnttgcccctgaagctccttcagaacaagccagaagagtttttcaaacctacgacccagaagataatggattcatacccgattcacttctggaagatgtgatgaaagcattggaccttgtttcagatcctgaatatataaatctcatgaagaataaattagatccagaaggattaggaatcatattattgggcccatttcttcaagaattttttcctgatcagggctccagtggtccagaatcttttactgtctaccactacaatggattgaagcagtcaaattataatgaaaaggtcatgtacgtagaagggactgcagttgtgatgggttttgaagatcccatgctacagacagatgacactcctattaaacgctgtctgcaaaccaaatggccatacattgagttactctggaccacagatcgctctccttcactaaattaatttgcctaagcatttataaggaagatcttaataacagatgtttgaaagaaggagtcaagactggcaacttggctggattaagccaaacacctggtactcactgattaactgtaaataacaattaaaaaccccctctccaggggttaagaatatggctcaaatttaatttgtcctaaaagcttttatgcttaaaggattttcctattttttacccccctccccggggaaatttttcctcccaaaaatttatgcttttccttcaaagggttccatcaaatttttgggatttcacaataccttgggggcctttttacctttaccccaacttttccaaaacgggcaaataactcaagagggcattttgggatatatttcaagcctattccccgcggttttcg

SEQ ID NO: 78620 - DNA, 1251 bp, Homo Sapiens
agagaagggtttggcaactttctggtattacttgtaaacactggttccttcaactttctgatattacttgtaaacactggttccttctcaaccaccgtattctgattgggtctataagtagcacccagtccacaccacagcacgcttctggggtccaggagaccgccttcactactgtgctggccctgcctgtgtacgggccccggggccgggccatccagggtgcctgtggtgctcacacccccatggcgctcttctcgctgtctttggggctgggctcctccggagtcttcttcatctcccagcccctgacccaggtgtaggcggaggagccgcccagcaccatcatgttgctcgtccaccagaggaagctcttggtctcctcgtagtagagcacggccagcactgtctgggcacaggccttggccgtgcccgacacattgtgggtcagcggactggtgaacttgatctgcagtcctgtcacgtagccgatggcaaagccaaacaggccgcccagcgtcatcatcccccagaagtgggcactgcccagctgggcaaagtcacgcagggcctgaagctccccgagcagcaggagcaggggcaggaagaggatgcaggcgttgacgttgttgtagaaagtcaggcgccagatgctgccgtccaccgccgggagcaccttcgtggtgtagatggcgttgagcgagacacagaggctagccagcacgccgaagacggtgcccagccacgacagggtgccttctgccccctcctggtccacaccaagccagaagcccccgatgatgataccgcaggtgagcagggcatagaaggaggtggtctgcttgagcagcaggtaggagagcagcacgttgaagacggtggtgagtgagcggcccacattgtagaaggccacaccgacgtacttgaggcagaggttattgaaggtgatcatgccgatgaagaccaccatggagatggaggtgacccagtagagggagaccaccagcgcgatctgcaatgcccgcagcagaaagggcttctccccgttggcctctgcctctgcagaggggtctgaggccccggtcagcgccatgtgcaggatcctggaccgcttcagaggggcccccttccagaaaatactgtttccccggccggtccagccgcatcagctcccgcgtccctgcctgtgtccccgggccgcgaaggcgacctggcgctcacctcctccggtgcactgggcgcccgccccgc

SEQ ID NO: 78621 - DNA, 962 bp, Homo Sapiens
tgtcttaagagtatgaagtcaggcgcgccgaattcggcacgagggggacacaggcagggacgcgggagctgatgcggctggaccggccggggaaacagtattttctggaagggggcccctctgaagcggtccaggatcctgcacatggcgctgaccggggcctcagacccctctgcagaggcagaggccaacggggagaagccctttctgctgcgggcattgcagatcgcgctggtggtctccctctactgggtcacctccatctccatggtgttccttaataagtacctgctggacagcccctccctgcggctggacacccccatcttcgtcaccttctaccagtgcctggtgaccacgctgctgtgcaaaggcctcagcgctctggccgcctgctgccctggtgccgtggacttccccagcttgcgcctggacctcagggtggcccgcagcgtcctgcccctgtcggtggtcttcatcggcatgatcaccttcaataacctctgcctcaagtacgtcggtgtggccttctacaatgtgggccgctcactcaccaccgtcttcaacgtgctgctctcctacctgctgctcaagcagaccacctccttctatgccctgctcacctgcggtatcatcatcggggggcttctgggcttggtgtgggaccaggaggggggcagaaggcacccctgtcgtggctggggcaaccgtcttccggcgtgctgggctagccctctgtgtcttcgctcaacgcccatctacaccaccgaaagggcctccccggcgggggaacgggagcaatcttggcgccctgactttcttaaaaaaacggtccaacggccgggcggtccttcttccctgggcccctgggctcctggctggcctggggggaaacttttcaaggccccttgggtgtgaactttttggcccccagctttggggaagatggcccccgttttttt

SEQ ID NO: 78622 - DNA, 428 bp, Homo Sapiens
  misc_feature (30)..(30): n is a, c, g, or t
  misc_feature (41)..(41): n is a, c, g, or t
  misc_feature (44)..(44): n is a, c, g, or t
  misc_feature (46)..(46): n is a, c, g, or t
  misc_feature (62)..(62): n is a, c, g, or t
  misc_feature (67)..(67): n is a, c, g, or t
  misc_feature (69)..(69): n is a, c, g, or t
  misc_feature (71)..(71): n is a, c, g, or t
  misc_feature (75)..(75): n is a, c, g, or t
  misc_feature (77)..(77): n is a, c, g, or t
  misc_feature (80)..(80): n is a, c, g, or t
  misc_feature (82)..(82): n is a, c, g, or t
  misc_feature (87)..(87): n is a, c, g, or t
agaattcctttctaagggtctgtctctggnacccaaaaggncananaaggaaccctaagatnagcanananccantnatntntcctncccctccccaccccttcttcccctgcttccattccccatggctctctcctctgactgtgaaacacttcctctccagcagtgttgggaaagttctggacctctactggatctagccataaatggtggtcttcagaaaaatggagattgtggctgccagcacccacaagacagcagcctcatgccatgcaggcagcaagccatcctgaacagcgttcctcccagagtctgtttcctcacctgctgttcactggtgagaggaaaagggacttgttctcccttgaccagttttctagttttcctgttcccaccctggtctttgcctgatgacagagaaactttct

SEQ ID NO: 78623 - DNA, 870 bp, Homo Sapiens
  misc_feature (38)..(38): n is a, c, g, or t
  misc_feature (710)..(723): n is a, c, g, or t
atattcctatggtgtgcaccagcttgtagaaatcatanacagacccaacacaccaaagacgttgttagagaatacagcaataacaattggtcgtctgggttacgtttgtcctcaagaggtggcccccatgctacagcagtttataagaccctggtgcacctctctgagaaacataagagacaatgaggaaaaggattcagcattccgtggaatttgtaccatgatcagtgtgaatcccagtggcgtaatccaagattttatatttttttgtgatgccgttgcatcatggattaacccaaaagatgatctcagagacatgttctgtaagatccttcatggatttaaaaatcaagttggcgatgaaaattggaggcgtttctctgaccagtttcctcttcccttaaaagagcgtcttgcagctttttatggtgtttaatctaatacacttaagctgcagtcccaaaattaggggtccttcagtcttggagactataagggagcctctgcacccagggaaaatgttaccctttacaggggggaagggtaaaccagtagggaatacagtacaatcccaaccctactgggaggggcgggagggaggtgttgccgtcactgtattaagtcgatgttgggaaacgttttaacatctggagcctttgtgggtggaaatatgtctccagttacaactccgcagtggatgtgaagaagcnnnnnnnnnnnnnntctattcagtctactcacaaaacagtacattgtggaatattatggggaattgtaccaaaacaagaaccatataaatgatgcctagggacaagaaagaggaacaattctatagcgcacaataaaggaaacctaagaataggagtatac

SEQ ID NO: 78624 - DNA, 703 bp, Homo Sapiens
  misc_feature (362)..(374): n is a, c, g, or t
  misc_feature (536)..(565): n is a, c, g, or t
gtgaatgccgttgcatcatgggattaacccaaaagatgatctccagagacatgttctgtaagatcctttcatggatttaaaaatcaagttggcgatgaaaattggaggcgtttctctgaccagtttcctcttcccttaaaagagcgtcttgcagctttttatggtgtttaatctaatacacttaagctgcagtcccaaaattaggggtccttcagtcttggagactataagggagcctctgcacccagggaggtgttgccgtcactgtattaagtcgatgttgggaaacgttttaacatctggagcctttgtgggtggaaatatgtctccagttacaactccgcagtggatgtgaagaagcnnnnnnnnnnnnntctattcagtctactcacaaaacagtacattgtggaatattatggggaattgtaccaaaacaagaaccatataaatgatgcctagggacaagaaagaggaacaattctatagcgcacaataaaggaaacctaagaatgggagttacaaatagtaaagaagcnnnnnnnnnnnnnnnnnnnnnnnnnnnnnnatgtaagttttcccacatgatggggccttgttttgcatgttgatgaagaactacacaaagaaaactaatatagttaaaagtcagcttgccttcccgtagtagaagcaggttcttggaagttacaatttaaggtacccc

SEQ ID NO: 78625 - DNA, 528 bp, Homo Sapiens
ggcacgagggtcggccggagccgcgccgccgggctcctacgactattgccccagataacacgggccctgtcgcgctcccgccccggtcctgcacagccccgaagttcgccgggcccggccaccctgccccaagggcaagcaaggaatacgttcccccagccccaggggccaccgcggctctccccttccccagccttgaagccatgggggccccctcgccacccccagccccttgggctatcgaagtatccggttccccagtccctggagccaccgcgggtccttccccggccccgagggccaagggggtccccgcccgccagtgccaaagcgcccggtcggaggcggaaggaagtgatatttattgttctccccgagaccgcgtcgcccgcggcccggccggcagttgcagtgtagacagcccgagagccccgcctgcaggcggtgtagatacatgtagatactgtagatactgtagataccgccccggcgccgacttgataaacggtttcgcctcttttggaaaaa

SEQ ID NO: 78626 - DNA, 642 bp, Homo Sapiens
  misc_feature (376)..(423): n is a, c, g, or t
gagcgtattcggcagtacctcccccggaacccctgtccgacgcccccctaccaccaccagatgccacccccacactcggacactgtggaattctaccagcgcctgtcgaccgagacactattcttcatcttctactatctggagggcactaaggcacagtatctggcagccaaggccctaaagaagcagtcatggcgattccacaccaagtacatgatgtggttccagaggcacgaggagcccaagaccatcactgacgagtttgagcagggcacctacatctactttgactacgagaagtggggccagcggaagaaggaaggcttcacctttgagtaccgctacctggaggaccgggacctccagtgacaccggnnnnnnnnnnnnnnnnnnnnnnnnnnnnnnnnnnnnnnnnnnnnnnnnaggtgagggccctgccctggaagactggagggaggccccaagccacggggcatccccctctcccaggaagcagggagggggccgggaggttttcctctcagccccaccctgggggcccgggggcgagggctgccccctcctcccctccccagtgagggacattttttggtaaacctattttcattttggaaaatatttatgaataaatagttttatatg

SEQ ID NO: 78627 - DNA, 432 bp, Homo Sapiens
atgatgtggttccagaggcaagaggagccgaagaccatccatgacgagtttgagcaggggcccacaatatactttgataacggagagtgggggctgcggaaggagaaaggcttctcctttgagtaccgcaacctggaggaccgggaccttcagtgacaacggcccctccctctacccacccccttcccccgcatgctgatccccctgcccaggtgagggccctgccctggaagactggagggaggccccaagccacggggcatccccctctcccaggaagcagggagggggccgggaggttttcctctcagccccaccctgggggcccgggggcgagggctgccccctcctcccctccccagtgagggacattttttggtaaacctattttcattttggaaaatatttatgaataaatagttttatatgaaa

SEQ ID NO: 78628 - DNA, 909 bp, Homo Sapiens
tttagcagtcaccattaagtacttacatgttattaactcatttaatcttcataacaactgcattaggtaggtggtcttccccccatttttacagataagttaattgagacacagaggttcgagtgacttgcctagagtcgcccagctgcactgggctgaaacccaggtaggttggttccagagtgtttgcaagcagcaggaatttcccagtattagaacttgagaagcccattcaaaaaaaatagtttccgcactgagcccctgccctgctgagtgctgggacctggaggtgaagtgggggccatcaaggtccctcggcagcagagcccacagcctggtgcagggacacatactgggaaaatcccacaccccaagcgagtgtgcccagcactgcaaaggggaggcactgggctgggtggctccaggaaggtttctttgaggaagggacatttgggctgagacctacaggaggcctaggagctggccaagtggaggatgagagggcggtgttccaggctgagcagacagccagagggaggagtacttggtcaggctgagggactgcgccagctgaaaggtggaggcaagggagcagaggccagcaggggctgcctggagcctggggactctaccccaaccctagcagcgggaagagagggggcggggccctcacctgctcaaactcgtcagtgatggtcttgggctcctcgtgcctctggaaccacatcatgtacttggtgtggaatcgccatgactgcttctttagggccttggctgccagatactgtgccttagtgccctccagatagtagaagatgaagaagagtgtctcggtcgacaggcgctggtagaattccacagtgtccgagtgtgggggtggcatctggtggtggtagggacgcgtcgaca

SEQ ID NO: 78629 - DNA, 1536 bp, Homo Sapiens
aacataggctaggtacgaggcctggtgttgaattcggcacgagggtcaccaacgaccatgagaaggtggagctcacggcactcaggtatgcgttcaccgtggtggccaacatcaccgtctacggcgccgcctggctcctgctgcacctgcagggctcgtcgcgggtggagcccacccaagacatcagcatcagcgaccagctggggggccaggacgtgcccgtgttccggaacctgtccctgctggtggtgggtgtcggcgccgtgttctcactgctattccacctgggcacccgggagaggcgccggccgcatgcggaggagccaggcgagcacacccccctgttggcccctgccacggccagcccctgctgctctggaagcactggctccgggagccggctttctaccaggtgggcatactgtacatgaccaccaggctcatcgtgaacctgtcccagacctacatggccatgtacctcacctactcgctccacctgcccaagaagttcatcgcgaccattcccctggtgatgtacctcagcggcttcttgtcctccttcctcatgaagcccatcaacaagtgcattgggaggaacatgacctacttctcaggcctcctggtgatcctggcctttgccgcctgggtggcgctggcggagggactgggtgtggccgtgtacgcagcggctgtgctgctgggtgctggctgtgccaccatcctcgtcacctcgctggccatgacggccgacctcatcggtccccacacgaacagcggagcgttcgtgtacggctccatgagcttcttggataaggtggccaatgggctggcagtcatggccatccagagcctgcacccttgcccctcagagctctgctgcagggcctgcgtgagcttttaccactgggcgatggtggctgtgacgggcggcgtgggcgtggccgctgccctgtgtctctgtagcctcctgctgtggccgacccgcctgcgacgctgggaccgtgatgcccggccctgactcctgacagcctcctgcacctgtgcaagggaactgtggggacgcacgaggatgccccccagggccttggggaaaagcccccactgcccctcactcttctctggacccccaccctccatcctcacccagctcccgggggtggggtcgggtgagggcagcagggatgcccgccagggacttgcaaggaccccctgggttttgagggtgtcccattctcaactctaatccatcccagccctctggaggatttggggtgcccctctcggcagggaacaggaagtaggaatcccagaagggtctgggggaaccctaaccctgagctcagtccagttcacccctcacctccagcctgggggtctccagacactgccagggccccctcaggacggctggagcctggaggagacagccacggggtggtgggctgggcctggaccccaccgtggtgggcagcagggctgcccggcaggcttggtggactctgctggcagcaaataaagagatgacggcaaaaaaaa

SEQ ID NO: 78630 - DNA, 818 bp, Homo Sapiens
cacaatgcaaaaacaagacattttattgaaataatttaccaaacaatgaagtatgataggtataattcaattaacacaggcattttagaaattaaattatatgttaagacttaagagaattcacagattcataattgtattaaggagttcaatatctacatttagaaaacaaagtattgttctcaatcactgaaatgcttaaatgcttgattcttcaaggaatcttctcggctgtaaagacttgagaagcttgtctcctggcaagtttctcctctagagaaagagcaccctctactgccaatatctggtattgcttatgttttaaatttcccatagatttccgaagttgcttgagactgctagcctctatgtcttgctttaataatttctgcatttctcgagaaggacatccaggatcaagtattagtaagcataatgttcggttttttttctcttcaattccaataacagttcgactgtgacctatcaaaagatttttaagttatacatacgtcacatctatttacagttatacaaatagtctctgtatgtatgttgtgtgatcatatgtgtgtttagaatataaatacagtcagactctgacacatatgtatctaagttctcctaagacgtaagagtttagttctacttcagttttttcatttaactttagttttctaaaggcttcattaccaaaaaaaacatttttattctgccaaatattttacttttcctttcccaatcctttgatccttcttattcaaattatctcaaatgaaagaacaaaaactgttctagaacaaaactctcatgattcc

SEQ ID NO: 78631 - DNA, 583 bp, Homo Sapiens
atttgaatggatattgaactattattcttcagagggagaagggagtccaaaggtagtgtgtacatctaaacctcctatctatcttcagcatcaaggtcacagtcgaactgttattggaattgaagagaaaaaaaaccgaacattatgcttactaatacttgatcctggatgtccttctcgagaaatgcagaaattattaaagcaagacatagaggctagcagtctcaagcaacttcggaaatctatgggaaatttaaaacataagcaataccagatattggcagtagagggtgctctttctctagaggagaaacttgccaggagacaagcttctcaagtctttacagccgagaagattccttgaagaatcaagcatttaagcatttcagtgattgagaacaatactttgttttctaaatgtagatattgaactccttaatacaattatgaatctgtgaattctcttaagtcttaacatataatttaatttctaaaatgcctgtgttaattgaattatacctatcatacttcattgtttggtaaattatttcaataaaatgtcttgtttttgcattgtgaaaaa

SEQ ID NO: 78632 - DNA, 931 bp, Homo Sapiens
  misc_feature (157)..(165): n is a, c, g, or t
  misc_feature (171)..(171): n is a, c, g, or t
  misc_feature (175)..(175): n is a, c, g, or t
attgggaggggaatcccaacgcccttggtcattgacccggggttttccttggggaaccagcttaggcccaattttccctttccttacgggggccgcgcgcgcacaaacgaaaggttttggaaagcttttgggggggccggagggggccgcacagggnnnnnnnnnggtttngggngtggggggtatgttcatatacatatttatatatatctcatgtacaaagttacattctgaaccccagggattccataatagaaataaatactgaaataactacattgctaaatgagctctttgctcatagaaatgaagctcagcctctaagagacagcaagtgggacattctagaacccatttttcagattatagaggcaagtaaaattctgatagaatgtcttggacaaaaaacgaatttggaacataaaatggttaagatatattcaaatagagaaatgtatgacaaaattaataaaacttaatcttttaagagaaaagacagacatttagtgttacagaatagcataaccctgttagaaaagcatttatgatttccacatttaattttctcttctactcttcccatgttacaaagtgggaccaaatgagtccctttctgaacatgatcaattaagaagagccctaaatctggttgagtcctttggtaacggtcataatactcacaaggaaataaatattcagttccatggcatttgcaagacacatgttctttaggacagttaatattatgacacatctgttttattttgttactaaggcagcctatgttaaagggtctcgtctcaaatgtaggaagacctttacaagaaatgaacaatacagtaactgaaagaattgattttaaccttttctatgcaacacaatctgaaaagttatgtgctgcatattgtgctcaaaatgttttatactctcc

SEQ ID NO: 78633 - DNA, 668 bp, Homo Sapiens
  misc_feature (567)..(584): n is a, c, g, or t
acgacgtgacccacagcgagtccctcatcgtggcagagcgtattgcgggcatggaccctgtcgtgcactctgcgctccaggaagagaggctgctgctggtgcagacgggctccagctccccgtgcctcgacctcagccgcctggataaggggctggccgcactggtgcgggagcgtggcgcggatctggtggtcatcgagggcatgggccgtgctgtccacacaaactaccacgcagccctgcgctgcgagagcctcaagctggccgtcatcaagaacgcgtggctggccgagcggctgggcggccggctcttcagcgtcatcttcaagtacgaggtcccagccgagtgaggcgctgcagctgccggactcttctgcttgtcacttgtcaggaatgtgtttttaccaccacagggaaactgcgttcaaatcaacgtatttatatggtactgctgtgacgcggcacatacaccccagccgcacagatgcgtgtgacccagaggcgagacgcagctttgtcctgggagacgttcatattggaatctatttaactgctaaagaacctttnnnnnnnnnnnnnnnnnnaatagagagatctatacaggtatgtctgacgggacgcagcaccgtgggcacgcaccaaatagagtttttaaaagagaaaaaaaa

SEQ ID NO: 78634 - DNA, 713 bp, Homo Sapiens
acggaaggcctgtttaaggagatatcaggaaatccagtttacgtgtcagggtggagctaaatctgttcatgcaacaagcaccaagacggccctagtctctgcctaggaaatgtgcagtgtagactgagaaatacagtccatgtcagctcccatcctgggagtgcactgagacaggtggtgggaatgggaggaggaaaggagggagatgccaggaagctgggatcaggagccgtttgccaaagcaaggcctgtgaggtgttgattcgggaacaagtgaaagtgtttgtgaaggttttgagctgggaaaagttggaatcagattttgtacttgctgttatccccaagggtaaacaataagcaaacgaaaaaatcagggcgaagctaaagctctagttagggcatctctctgccttgaaaatgacctcaagaaatctaggaacctctgtggaatgcaacttgaagatggaaaggtgcctttgtctgaaggtccctccccttttatgcctgctgccggtgtgagggttggggattgggccctgggactcagtcactcagtcttcttggagagataaacttttagctgaagtgattgattttcccctattttaatatactattttaactaatatgagttacttatgatttttaacagtctgttttaaatatctttcttgtatattcctcacattatatctttttactatctgctttaa

SEQ ID NO: 78635 - DNA, 1343 bp, Homo Sapiens
ggcacgaggatctttcccagttgttccgccccctacccccgcctcccgcaccgcgcccctctccggctgccctctccgcgtggggcaaggctccgagggcagcattcagtagccatttagctttggaaggagaggtgattcgaatggcccggctcctcctgtcaccatgctaggcactttggccgcgcaggtgctgacctgaacctggttcatccctttctgaccaaaactgttcactcaccgtggaagggactaagcatccatatggagacgccaccagtcaatacaattggagaaaaggacacctctcagccgcaacaagagtgggaaaagaaccttcgggagaaccttgattcagttattcagattaggcagcagccccgagaccctcctaccgaaacgcttgagctggaagtaagcccagatccagccagccaaattctagagcatactcaaggagctgaaaaactggttgctgaacttgaaggagactctcataagtctcatggatcaaccagtcagatgccagaggcccttcaagcttctgatctctggtactgccccgatgggagctttgtcaagaagatcgtaatccgtggccatggcttggacaaacccaaactaggttcctgctgccgggtactggctttggggtttcctttcggatcagggccgccagagggctggacagagctaactatgggcgtagggccatggagggaggaaacttggggggagctcatagagaaatgcttggagtccatgtgtcaaggtgaggaagcagagcttcagctgcctgggcactctggacctcctgtcaggctcacactggcatccttcactcaaggccgagactcctgggagctggagactagcgagaaggaagccctggccagggaagaacgtgcaaggggcacagaactatttcgagctgggaaccctgaaggagctgcccgatgctatggacgggctcttcggctgctcctgactttacccccacctggccctccagaacgaactgtccttcatgccaatctggctgcctgtcagttgttgctagggcagcctcagttggcagcccagagctgtgaccgggtgttggagcgggagcctggccatttaaaggccttataccgaaggggggttgcccaggctgcccttgggaacctggaaaaagcaactgctgacctcaagaaggtgctggcgatagatcccaaaaaccgggcagcccaggaggaactggggaaggtggtcattcaggggaagaaccaggatgcagggctggctcagggtctgcgcaagatgtttggctgattaaaagttaaaccttaaaagagcaaaaa

SEQ ID NO: 78636 - DNA, 1675 bp, Homo Sapiens
tgatctccctcttgcaaaagcgagggctacagaacaggcattcaggagtcctgtgctccagtcacagccttttctgttcttcagctaggagacaccaaaccctcaggaagatttactatagctaagagaaaactgcagcagaaagggcgcggctacctacttcttaaattccgtttgtggaccctcagactcttagtcccctactcccagatacagcggccctaccgtggctcctggcaagaagcatggatctcggaatccctgacctgctggacgcgtggctggagcccccagaggatatcttctcgacaggatccgtcctggagctgggactccactgcccccctccagaggttccgggccttcaagagagtgagcctgaagatttcttgaagcttttcattgatcccaatgaggtgtactgctcagaagcatctcctggcagtgacagtggcatctctgaggacccctgccatccagacagtccccctgcccccagggcaaccagttctcctatgctctatgaggttgtctatgaggcaggggccctggagaggatgcagggggaaactgggccaaatgtaggccttatctccatccagctagatcagtggagcccagcatttatggtgcctgattcctgcatggtcagtgagctgccctttgatgctcatgcccacatcctgcccagagcaggcaccgtagccccagtgccctgtacaaccctgctgccctgtcaaaccctgttcctgaccgatgaggagaagcgtctgctggggcaggaaggggtttccctgccctctcacctgcccctcaccaaggcagaggagagggtcctcaagaaggtcaggaggaaaatccgtaacaagcagtcagctcaggacagtcggcggcggaagaaggagtacattgatgggctggagagcagggtggcagcctgttctgcacagaaccaagaattacagaaaaaagtccagggagctggagaggcacaacatctccttggtagctcagctccgccagctgcagacgctaattgctcaaacttccaacaaagctgcccagaccagcacttgtgttttgattcttcttttttccctggctctcatcatcctgcccagcttcagtccattccagagtcgaccagaagctgggtctgaggattaccagcctcacggagtgacttccagaaatatcctgacccacaaggacgtaacagaaaatctggagacccaagtggtagagtccagactgagggagccacctggagccaaggatgcaaatggctcaacaaggacactgcttgagaagatgggagggaagccaagacccagtgggcgcatccggtccgtgctgcatgcagatgagatgtgagctggaacagaccttcctggcccacttcctgatcacaaggaatcctgggcttccttatggctttgcttcccactgggattcctacttaggtgtctgccctcaggggtccaaatcacttcaggacaccccaagagatgtcctttagtctctgcctgaggcctagtctgcatttgtttgcatatatgagagggtacctcaaatacttctgttatgtatctgtgattttatttcttctttgggtatagggttgaggggaaataagttttgagtgagaaataaacgttttagctgaaattgtaaa

SEQ ID NO: 78637 - DNA, 949 bp, Homo Sapiens
agtgcgaggctgggtgtgaatcggcccgaggggcggtcaacgggctatgctggcttgacagggctgggctcttcagaacagaagcatggatctcggaatccctgacctgctggacgcgtggctggagcccccagaggatatcttctcgacaggatccgtcctggagctgggactccactgcccccctccagaggttccggtaactaggctacaggaacagggactgcaaggctggaagtccggtggggaccgtggctgtggccttcaagagagtgagcctgaagatttcttgaagcttttcattgatcccaatgaggtgtactgctcagaagcatctcctggcagtgacagtggcatctctgaggacccctgccatccagacagtccccctgcccccagggcaaccagttctcctatgctctatgaggttgtctatgaggcaggggccctggagaggatgcagggggaaactgggccaaatgtaggccttatctccatccagctagatcagtggagcccagcatttatggtgcctgattcctgcatggtcagtgagctgccctttgatgctcatgcccacatcctgcccagagcaggcaccgtagccccagtgccctgtacaaccctgctgccctgtcaaaccctgttcctgaccgatgaggagaagcgtctgctgggggcaggaaaggggtttccctggccctctcacctgcccctcaccaagggcagaaggagagggtcctcaagaaggtcagggaggaaaatcccgtaacaagcagtcagctcaggacagtcggcggcgggaagaaagagtacattgatggggctggagagcagggtggcagcctgttctgcacagaaccaagaatttacagaaaaaagtccaggaagctgggagaggcacaaacatcctccttgggtagctcagcttccgccagctgccaaacgc

SEQ ID NO: 78638 - DNA, 821 bp, Homo Sapiens
ccaaggtgcccatctgggggagtatccgaggcccctcacttcgtgggcaagggattggtgggcactggaggccttcaaaagggaacagccgccggggggcccttgccgagaatccaggccccccataagtggctgggactcccagtggattaaggttggaggggggataaaggcctaccaatggggcccagtttcccccctgcatccttttgcagggccccttgcttcataagacaacctcatagaccatagggggaactggttgccctgggggcagggggactgtctggatggcaggagtcctcagaagatggcgtggtctctgccaggagatgcttctgagcagtacccctcatggggatcaatgaaaaggcttcaagaaatcttcaggctcactctcgggaaggcccggaacctctggaggggggcagtggagtcccagctccaggacggatcctgtcgagaagatatcctctgggggctccagccacgcgtccagcaggtcagggattccgagatccatgcttactacaaaagtggatgccaccttgccaggagccacggtagggccgctgtatctgggagtaggggactaagagtctgagggtcccaaacggaatttaagaagtaggtagccgcgccctttctgctgcagttttctcttagctatagtaaatcttcctgagggtttggtgtctcctagctgaagaacagaaaaggctgtgactggagcacaggactcctgaatgcctgttctgtagccctcgcttttgcaagagggagatcatggcagggttgtaaacaaaggcggaaagagtccc

SEQ ID NO: 78639 - DNA, 1014 bp, Homo Sapiens
  misc_feature (935)..(935): n is a, c, g, or t
  misc_feature (946)..(946): n is a, c, g, or t
  misc_feature (949)..(949): n is a, c, g, or t
  misc_feature (956)..(956): n is a, c, g, or t
atccattatgaagtgcaattagatagatgtaggttcctgccgtttggagagaatgactagcatttatcttcttttccttccatgccaaaggttggagtctgctggtgcggtgtttacacaccaggcagggctgtctgccaccttgtgtggcttgaccccctgtggaggggagtgcctggttggatcccacactggcagagatggggccaccccttccttccaggcacatctcacattgccatgtacagaggcaggagtcacgtttggtcaccatggaagcttttattgctcccacatggtcaggtctcaccctgcttgaagcgcagaaggcacagccttactgaccagcacgcccactgactggcatctgccggctttgtgcaggcagccccgacggtttccacagcgagcgccagctccggccagcctgggacagctcatcccagccgactacacctgcttctggtcctgtccacattttgatacgcagatcacttgagcttgtcaattagggttctgccattctgaaataaatgaagtttctaaagcagagtcggcctcagaagccaaaaactgaccagaagatggtgctcaaacctttaagacttcatctccatgtgaagggctcactgtttctaccaaggctgtgcctgtattaaggcttttccgtcctgggaactgtcagtctgggagagctcttgatctgcaggtggcaaaatggcactgaatatccccttggcagcagagaaaacccactgaaagatcgtagagtggcacatgcttacagggcattggtgccaagtccagtggatgagaatccagcccctcacaagctgtgggatggggcttgggagttgcagtgaatgtcattaaaatttcttccaaaacaaaactagaaataattgctgagggcttatagggaagtgatttaaaangaaaaaacaancancatcaanaaaaactcttcggagtaaagagggctgtaaatttttgaattccagtgtcaagatcctt

SEQ ID NO: 78640 - DNA, 718 bp, Homo Sapiens
  misc_feature (394)..(423): n is a, c, g, or t
ggcacattacagcaccaagaacccccgggcaatttattaaaatgttgttggttctgtaagagcaactgctctgtctagtttggcgctctgggttccaggtgaataactaacaaggtggtgggtctttacccacagcgcaaacacaatgcccaccttggggctctgttgtttgagttgcccacatactgcagttattctgttaggaatgattccctgggtgcctgaaagtgctctgacacgacacttgttactttgcaggccatctgtgatggcaaggaaaaagcaactatgttcacagtgaaatattcgtggaataggttaggccatttcagtagacattgcagttagttagcaagaaccacattgtctctttatttgttagcattaaacaaannnnnnnnnnnnnnnnnnnnnnnnnnnnnngatgaagccgagcaactctgtccaaaaaggtttagtttgtactcggaaaccacaaagtagtctcaaagtattttagagggaatcgatattgatggcaaaagaaaatttgcagctatgcatttgcttctaacggttccctctctgtgaaacattatttttggtgatctaaagaaagcattgcctttcttatttgagattttacagctatactttgttgtgtaatgttatggttccctttctgtaaaatgttatttttggtgatctaaataaagcctgtcttgtttgaaagaaaaaa

SEQ ID NO: 78641 - DNA, 501 bp, Homo Sapiens
catcttagtcatttaatattgagatgtcagatatatcccaagagtatggactttaatatgaggtgaaggagataaaccatttaatgttcacaagaagttgccttcacaataaattgtataccgtaattttcatgcttaggaatttttttataacaatagtattcgcttagcatactactaacagtaatagtgatactgtattaagtgttgggcattgtagcagaccacccaggcctagttgctaaaaagtgcctaacattgtcaagggaaagcctttttatggaagcagcaaaagagacaaagtgaattcaagggcagatgtgccaacgtggctacagattttgttagaggtgttttctcctgagttgggatcttccctgacaaggtggagctcagtatctccacacagctgtgccactcttggcttggcccactttggagaaaaaaattgaggagaaaagaatatgcaagacttgcttatcaccccaaccatttccatat

SEQ ID NO: 78642 - DNA, 941 bp, Homo Sapiens
  misc_feature (370)..(432): n is a, c, g, or t
  misc_feature (498)..(557): n is a, c, g, or t
cttgacccgctcttagatgatggtgatgtttagctccctgttctcggcagcccgaaaagaatggcatgcagcctctcctgctcctcctgccgcctctcctgtaccaacagcttctccactcaagcctgggtgctcctggggagtccaccctgcttgtccgcacatccaagctccttgtgggaatggggctccaggtactggtctggctgctgctgcagactcggagcctcttggctcttcagctccacccgacttctccagctcctttacttgctgctccaactgcagtgtgctcttgttctcgttgttcagctcctcgaagccgctgcgtggctcggcccgctgctcgtacagggcttcccaccccagnnnnnnnnnnnnnnnnnnnnnnnnnnnnnnnnnnnnnnnnnnnnnnnnnnnnnnnnnnnnnnnagtctcctgctgccacagcctctcatcctgttgccgaagcctctcctgctccaggagctcctccannnnnnnnnnnnnnnnnnnnnnnnnnnnnnnnnnnnnnnnnnnnnnnnnnnnnnnnnnnngttctaacagcttcgccacctcttccagcagcctctcctgccctggcagcttctcctgttcacacagcctctcctcctgttcacatagcctctcctcctgttcacacagcctctcctcctgttcacgtagcctctcctcctgttcacgtagccctatcctcctgttcaagcagcctctcctcctgtctcctgttcaggagactcaacatctgattgttttccacctcagcctggagctgtcttcccacactctccagctccttccttaggtggttggtctcatcttggagctgctatatcctcagagggccctgctgggggctctggggccaggggttcagctgacaaaggaagcagacaataagggcctctggactctcaaaa

SEQ ID NO: 78643 - DNA, 1042 bp, Homo Sapiens
ctctctgtctaaagagttcactacctgcctaacaactgctggggtcaaagaaatggcagatgtccttaacccattaatcactgcagtatttctagaggcatcaaacagtgcctcctacatccaggacgcctttcagctactcttacctgtgctagagatctctctcattgagaacaagattgaatcacacagacatgagctgcagggccagaaacctttgttagaacattgaagaatggagacgttttgacctgggacttgtgacggccaaggaatgccaccttattctggctactcctgcagaaatgaaggagtggggttattttagtatataaaaattcaggcaggagagatggtttaaagaggaagattgttgccttcagtgtttgattgaagtattcaggttctcacagtattctttccagttgttgtaattcataaattatttgaaaagaaacttttgtagaaagtccaagaataataactctagataaagattagtgggacactcaggcaaaaatgttggtctttctttgacatgttgcaaaatgttatcaattttgtcatggatataatttgcagcccatggatataactggttgataagccagagaaaaataatttagtgttctaaaattcatggcatgtgtggtttattaatgccatgtactttctcctttctggaataaaatctatggctttaagaaaactgagcatatgtaaactctgtgatgattaccctttatcacatgaattcttggaaatagaaagtttcatctgcttttttaaattcttagtagatatttggcattgaggagaaacttgtagactattatagccatgtgaattaactgtagcaaagtgccctttttcttcaaattgctccccctccccaggatgacacacttcatgtcatagctgaaccctactctactggattcaaggccagtaaatgcaatttagagaagcagttttatgtttgcagatattctgagtctcttcaagatgggtttccgtgtctaccatatatggcaggataaac

SEQ ID NO: 78644 - DNA, 1272 bp, Homo Sapiens
ccctcctgccagcgcaggtcatttatgtattcggcgtaggtgataatgtgtggacagagacaactcagctagaggtggctgtgtcaggggctgctggtgccaacctcaacgggatcatctacttactagggggggaggagaatgatctggacttctttaccaaaccttcccgactcatccagtgctttgacacagagacagacaaatgccatgtgaagccctatgtgctgccctttgcaggccgcatgcacgcagctgtgcataaagatctggtgttcatcgtggctgaaggggactccctggtgtgctacaatcccttgctagacagcttcacccggctttgccttcctgaggcctggagctctgccccatccctctggaagattgccagctgtaacgggagcatctatgtcttccgggaccgatataataagggggatgccaacacctacaagcttgaccctgccacttcagccgtaactgtcacaagaggtattaaggtgctgcttaccaatttgcagtttgtgttggcctaaggctgtggggaggggaggagaactgctcactccttttccctccccatacaaactcaaagtcccctgggccccaattcagagttatgttttttttggcacatactagaaaggcagtgcctcagcccttccctgaatccatggaggtgttctgtttggggctttttagactgctgctgctcagctggttgcttgaactgacagtaggccagcctgttctctgccattccctagtcatcctgtgcctcaccacagcttgcttagagcaagccttttctcagaccttaggcacagcctctcctctttacctgatcaatgttaaatgtaagcacccctgatcccaggacataaggaaagatgcccaattgtacttttgttctatagcctgtgaaatggctagttgatcatttttccacaaagaattaggtgttaagagttttccttcaggctttacttaggagaatggactaagctgaaggtgtacttcaccagcaagagtcaactctagaattcaggatgttccttctattgttttcttagccatctgtcaggaaatgtaactttggttttatttttggcttattccaaggggtaagccagaaaatagaaatgattatttctgattaatagcagaaactttttcaatctcaaatatataaggtgtctgctcttttaaaagctctaagctaagtcaagagctaggaactgttgatacaaataaaagtttttgaagggaaaa

SEQ ID NO: 78645 - DNA, 678 bp, Homo Sapiens
ccggtgtgcctgcgggccttcccctacctctccgacctggagcgccacagcatctcgcactcagtgctgaagccgcaccagtgcaaggtttgcggcaagaccttcaagcgctccagccacctgcggcggcactgcaacatccatgccggcctgcggcccttccgctgcccgctgtgcccccgccgcttccgcgaggcgggcgagctggcgcaccaccatcgcgtgcactcgggggagcgcccgtaccagtgccccatctgccggctgcgctttacagaggccaacacgctccggcgccatgcgaagcgcaagcacccggaggccatgggggtacccctgtgtgcaccagatccagggtctgaacccccgtgggacgaggagggcatcccggccacagcaggggccgaggaagaggaggagacagaggggaaaggggagccggcctgacccacacccccggccatcgctccctgggccaggtttagagcagggagtttggctggtgctgggcctgagccagggggccgggacacccttgtttccggtggtcttcccgttgtgggagcaggtggagggtggagacctaaactttggggtccagctgccttcagcccccctcccccagactaacagacccttggaggcaggggctgtggaaataaatctctgcctgctggc

SEQ ID NO: 78646 - DNA, 1351 bp, Homo Sapiens
cagtcgacggtaccggacatatgcccgggaattcggccattacggccgggtccaagtccggatttacatcctacaatttaccatgctaaggggctgttgcaatacttggctgcagtgaagcgtttacccttggtttattgtgattatcatggccattcccgaaagaagaatgtatttatgtatggttgcagcatcaaagagacagtgtggcataccaatgataatgcaacttcatgtgatgttgtggaggatacgggatacaggacattgcctaagatactgagccatatcgccccagcattttgcatgagcagctgtagcttcgtagtggaaaaatctaaagaatccacagcacgtgttgtagtttggagggaaataggagtacaaagaagttataccatggagagtactttatgtggctgtgatcagggaaaatacaagggtttacagattggtacccgagaactggaagagatgggagcaaaattttgtgttggtcttttacgtttgaaaagactgacctctccattggagtataatctgccttccagcctgcttgactttgaaaatgatttaattgaatcaagctgcaaagtaactagccctaccacttatgtcttggatgaagatgaacctcgattccttgaagaagttgattacagtgcagaaagtaatgatgagttagatattgagttggctgaaaatgtaggagattatgaaccttctgctcaagaagaagtactttctgactctgaattatcaagaacatacctaccttgagcccgctgccatctcttgttaactgcaaagaataaatgaaatatcttggtttttatttcccaggaagcttgagagaaatgagtttatacagagctgactcaaaaagacaaaaagtaacttgggccagtttggtttcaagataataaatgtgttattaattaatgataaaaattggcgcttgttttattttcgatattcaatgcactttatgtagcattgaatgatcaaatattggatttacctttgaaacaacagcctgagtatcattgcatgaatttttatctccctatggttatatcctgcatcaagtggataattttgaagtgtgttcagaatataaaattgaaattttagagttgttgaaaatcctgacttgttgaaaactaatatatatgtacatggatttctatagatgtgtttgtttagaagtgggtagatattgcagataagactgttcttcagaatcatgttaactattgggttgtgactgaagtagtccagggtttgccttgaaaccattacattctacatttaccaaattaaacaaataaaaactgtattaaatgttaaa

SEQ ID NO: 78647 - DNA, 911 bp, Homo Sapiens
attcccgggatatcgtcgacccacgcgtccgccacaggcgcgcgcgccgctgcttctggccgggcgcgggtcgtggtgcaccacgggagcgccgcaccggccggcatggaggagcgcggcgattccgagccgacccccggctgcagcggcctgggtccgggcggtgttcgcggctttggcgacggcggtggagctccttcgtgggcccctgaggacgcctggatgggcactcaccctaagtatctagaaatgatggaattagatataggagatgccacccaagtttatgtagcgttcttggtttacctggacctcatggaaagcaaaagctggcatgaagtaaactgtgtaggattaccagaactccagctcatctgccttgttggtactgagatacaaggggaggggttacagactgtggtgcctacccccatcactgcttccctcacccataacagaatatttctcttagaacatgacatccatgtttcctgatgcttgctttattcatacaagatcggatttgagacccatcagactgcttcatcttttatctcagaaatcgggccgacgtacctagtgagggttgacttccccattccataaaggtttcattctgaacagtaaaacttccccaggtacaagactttctccttcttaaaaaatatagggtgatttctttaaaactttgttatccagagacagttcaattaccgttatataccggcttttgtccacgatggcactcagatgggtggccacctgcgggcctgccttttgtcctcctaacctccacagtggctcttttgtttcctgcccgccccctgcccgcttatttgtttgaaaccggccattttctttccccctccccaggttcccccccatggcccttttggcccctggcagcttca

SEQ ID NO: 78648 - DNA, 626 bp, Homo Sapiens
ggcacgaggtgcaccacgggagcgccgcaccggccggcatggaggagcgcggcgattccgagccgacccccggctgcagcggcctgggtccgggcggtgttcgcggctttggcgacggcggtggagctccttcgtgggcccctgaggacgcctggatgggcactcaccctaagtatctagaaatgatggaattagatataggagatgccacccaagtttatgtagcggtcttggtttacctggacctcatggaaagcaaaagctggcatgaagtaaactgtgtaggattaccagaactccagctcatctgccttgttggtactgagatagaaggggaggggttacagactgtggtgcctacccccatcactgcttccctcagccataacaggataagggagatcttgaaggcatctcgaaagttgcaagaatatttctcttagaagatgacatccatgtttcctgatgcttgttttattcatacaagattggatttgagacccatcagactgcttcatcttttatctcagaaatagggttgacgtacatagtgagggttgacttccccattccataaggttttcattctgaagagtaaaacttccccaggtagaagactttctcct

SEQ ID NO: 78649 - DNA, 2028 bp, Homo Sapiens
  misc_feature (1943)..(1943): n is a, c, g, or t
  misc_feature (1946)..(1946): n is a, c, g, or t
  misc_feature (1949)..(1952): n is a, c, g, or t
  misc_feature (1956)..(1956): n is a, c, g, or t
  misc_feature (1960)..(1965): n is a, c, g, or t
cctagtagggctggttggaatcggcacgaggtgcacacgggagtcgcgaccggccggcatggaggagcgcggcgattccgagccgacccccggctgcagcggcctgggtccgggcggtgttcgcggctttggcgacggcggtggagctccttcgtgggcccctgaggacgcctggatgggcactcaccctaagtatctagaaatgatggaattagatataggagatgccacccaagtttatgtagcgttcttggtttacctggacctcatggaaagcaaaagctggcatgaagtaaactgtgtaggattaccagaactccagctcatctgccttgttggtactgagatagaaggggaggggttacagactgtggtgcctacccccatcactgcttccctcagccataacaggataagggagatcttgaaggcatctcgaaagttgcaaggtgatccagatttgccgatgtcttttactttggccatagtggagtctgattctacaatagtctattataaacttactgatggatttatgctgccagaccctcagaatatttctcttagaagatgacatccatgtttcctgatgcttgttttattcatacaagattggatttgagacccatcagactgcttcatcttttatctcagaaatagggttgacgtacatagtgagggttgacttccccattccataaggttttcattctgaagagtaaaacttccccaggtagaagactttctccttcttaaaaaatatagggtgatttctttaaaactttgttatctagagacagtttaattacagttatatacaggtttatgcctaggatgtattcagatgggtgggacctgtgtgctgcttttgtcatcccacactcaaagttgtctctttgtttcttgctgccactgccagctcattgttgagactgccatttctttctcttactcagctctccccagtgccttttggccactgcagctaccgtagaatggcattttatatgtaccttgtcacccacttctgtttactttttcctctcccagtaaaaagtaaaagatttctttcaattggtcttcccattgcagttactgttatttctcttttttggttaactttaaatcaaaactcaaaatatgttcatccagagtgtgtcttaagtaacttacgtgtcttaagtaacagggaccagagacatgttacctacaagagttctgggctatccttttcattcttatcacatatcatagcttgaatattacaacagtgtgggagagaatcaaccgtaaaaatgtcttcattaattagacccagttattccacttttgttaatgtctctcaaattgtacaaagtataaaaaattatatgcacaaagatgttccaagtgacattacttttagtagcccaaattataaaccactttaaagtttggggtaaagattggcaaactttttctataaagggccagaaagtaactattttaggtttttaaacctactgtctctgtcataacttgtcaacactgctgtatgaagcacaaaagcagccatagacaatacataaacaatacgggcgtggctttgttccagtaaaactttgtttacaaatgtggtgccatagtttgtcatccctgggtctaggaaatagtcaataaacagatatatacaaatgatacataatgtacttattaaaaattagtaatgaatattattaaaaacatgaaaatattaccttaagtaaaaattgcaagacggaaaagtgtataagtgggtgtaatcatggctgaaataacagaccaagcatatgataaaaagataacaaagtaaatcaaattactaactggttatagtgggataggaggcagaaaatggatgactttgtcttttctcaatgtttttatttgtattttataataaaaatgttttaaaatcaaaaaanaanaannnnaaanaaannnnnnccctggtcggcccgcctcggcccctcgaaaaagcttttcttagaccaattcgttttgggcgcg

SEQ ID NO: 78650 - DNA, 1089 bp, Homo Sapiens
  misc_feature (128)..(128): n is a, c, g, or t
  misc_feature (423)..(436): n is a, c, g, or t
  misc_feature (818)..(931): n is a, c, g, or t
  misc_feature (977)..(985): n is a, c, g, or t
tgataaaaatgtcattaacctgctgtcttaagatgttcacacaaatatggagagtaattctacagtataaaaatatttattttaatactgagtttcagttaagtcataaacagtgttaaaactcttgngaaggtgtaggggttttttgtttgtcatttttaaaattgaaactgtgtcatacagtgtttcacgtctctgaaattgggattataatagcactattttgatgtagctctaccgatactatgtggtaatgctattttgttttactaacaagctctggaatatttagcagtcattttcactggcacaagagccttttgtatgttattcaatttaaacttttaaaccaaaaattttatggtccagtgtctttggcaaaaagatgctggagggaatgtaacatacaattaatatgtggtnnnnnnnnnnnnnnaaaagacacaaattgccatgttatggttctgccttgaaacagcacaatgaagtgtatcagtatattctgtgattatgaaacttatatgttgtgttgttttgtgtcttctgttgcctgtcctttgggccagatgtgggccagttaaatgcagttatcatctcattaaatacagatgcagataaaatatctttagtgctgcaacattttacctaactttttgtatgttttcatgactgtgtgttattttccaaagctgttcctacctcaccatgaggctttatggattgttatgtattataaatgttctatatgagacagactactgtgtttcttctcatttattaaaagttaagtagaaaaataaactaattttaatatctannnnnnnnnnnnnnnnnnnnnnnnnnnnnnnnnnnnnnnnnnnnnnnnnnnnnnnnnnnnnnnnnnnnnnnnnnnnnnnnnnnnnnnnnnnnnnnnnnnnnnnnnnnnnnnnnnttgggggggcccccctcgccccccaaaaaaattttttataaacccnnnnnnnnngggcggggggccgcccctgggggaaagggaaactggggccaaaggctgtttcccccagagaaaaccccggggacataaaaaagggggctgggattcccccccac

SEQ ID NO: 78651 - DNA, 1037 bp, Homo Sapiens
tcagtgtttaggaacccatacaacccagctgtgtggcgggaccctgaggtatacgacccctttcgatttgacccagagaacatcaaggagaggtcacctctggcttttattcccttctcggcagggcccaggaactgcatcgggcagacgttcgcgatggcggagatgaaggtggtcctggcgctcacgctgctgcgcttccgcgtcctgcctgaccacaccgagccccgcaggaagccggagctggtcctgcgcgcagagggcggactttggctgcgggtggagcccctgagctgagttctgcagagacccactctgaccccaataaaatgacccctgattcatcaaaagtgaagcctagaattaccataagaccctgttccacagtcctgtattccatcctagatatctactcaaaataattgagacaagtgttcaaacagaaagacgcttgtgcgtgaatgttcatggcagccctattcacagtagccaaacgatgaaaacaaccccaagctatatattaccagatgaaaggataaacaaaatatggtccatccatacaatggagtattacacagccataaaaaggaatgaagcagtgatccccactacactgtggatgaaccttgaatgcatgatactgaatgaaagacatcagatgcaaaaggtcacatagtgtactgtccttttatatgaaatttccagaacaggccaatctgaagagatgtatagtggattggtggctttcagcagctgtggggaggtgggactgaggagcgactgctaatcaggatggggtttcctcctgggatggtgaaaatgttccggacctagatagtgatgaaggtagcacgacactgtgagtgcactaaatgctattgaattagacactttagaatggttgaaatagtgatttttatgtgaattctacctaaacatgctattacagctcatatatactttttccatctggattcttcacaaaagaatatgttgtgagcatctttccatgatattaaatcatcttaggaaacatt

SEQ ID NO: 78652 - DNA, 1205 bp, Homo Sapiens
  misc_feature (1031)..(1031): n is a, c, g, or t
ctgatgaggacataagagcagaagctgacaccttcatgtctgagggccatgacactacagccagtggtctctcctgggtcctataccaccttgcaaagcacccagaataccaggaaaagtgccggcaagaagtgcaagagcttctgaaggaccgtgaacctatagagattgaatgggacgacctggcccagctgcccttcctgaccatgtgcattaaggagagcctgcggttgcatcccccagtcccggtcatctcccgatgttgcacgcaggactttgtgctcccagacggccgcgtcatccccaaaggcattgtctgcctcatcaatattatcgggatccattacaacccaactgtgtggccagaccctgaggtctacgaccccttccgtttcaaccaagagaacatcaaggagaggtcacctctggcttttattcccttctcggcagggcccagaaactgcatcgggcaggcgttcgccatggctgagatgaaggtggtcctggcgctcaccatgctgcacttccgcatcctgccgacccacactgaaccccgcaggaaacccgagctgatattgcgcgcagagggtggactttggctgcgggtggagcccctgggtgcgaactcacagtgactgccctacccacccacccacctctgtagagtcccagaaacaaaaatatgctgacacctctgcttgagcctcgttgacagccagcatggggctcctggggactggcgggatctaagacaaggaggtgagtgggtggaggcagggtgacctctctgaacccaaaaccctgacggcctctctggctgagcacagggcatctagggcccttagtgggttcttcccagaagcccagtaaaaactttatccctgcgggcacaaaggaacccctggggaggggtttggagcaagggaaggcaccgggcattaacaatggggcaataagggacaaaggatggggaattttgggttcaaaccaggaaacaccccttcacgcgggatacccgcctaccaacggcnccgaccgaaccgaactccccaaaacaaggcaagaccaacagggggacaaagcaatggggaacagggcggggaccctcgtatccacaccgtggcaggcgtcctttccgcaaacaccagggggcggcacgtggcatcccccccggtgctattcgcccacggcccgggccaccccct

SEQ ID NO: 78653 - DNA, 999 bp, Homo Sapiens
tgatttgtccaagacttttggggtcattctggccaggttgggggaatagtgggctgttgtggcttggttctgggcagggtcgcatttggagcccaggtgctgggctcttgtgagtggcctccttggcctcggccctgggttccctccgtcttgctctgggctcaggatactgttgtctatccccagaagcccagcccctcaacccctctggatgctacatggggatgcttggactggctcagcacctgttccaaggattttaggggtgtctgagattgcctccccgtagagacctgaaattcaccagctacagatgccaaatgacttacatcttaagaagtctcagaacgtccagcccttcagcagctctcgttctgagacatgagccttgggatgtggcagcatcagtgggacaagatggacactgggccaccctcccaggcaccagacacagggcacggtggagagacttctcccccgtggccgccttggctcccccgttttgcccgaggctgctcttctgtcagacttcctctttgtaccacagtggctctggggccaggcctgcctgcccactggccatcgccaccttccccagctgcctcctaccagcagtttctctgaagatctgtcaacaggttaagtcaatctggggcttccactgcctgcattccagtccccagagcttggtggtcccgaaacgggaagtacatattggggcatggtggcctccgtgagcaaatggtgtcttgggcaatctgaggccaggacagatgttgccccacccactggagatggtgctgagggaggtgggtggggccttctgggaaggtgagtggagaggggcacctgccccccgccctccccatcccctactcccactgctcagcgcgggccattgcaagggtgccacacaatgtcttgtccaccctgggacacttctgagtatgaagcgggatgctattaaaaactacatggggaaacaggtgcaaaccctgg

SEQ ID NO: 78654 - DNA, 830 bp, Homo Sapiens
  misc_feature (29)..(29): n is a, c, g, or t
  misc_feature (549)..(647): n is a, c, g, or t
gagagcgcttatgctcaccaacccaaggntttttcatttctctgccatacttcaatatggcccatacattgtgaacttcaaagtccttcaaacaaacgaatgcagaatgtcaccaatacagcaattgctctaagttctctcatttatttaatatctgcactctttgggtacctcactttctatgacaaagtggagtcagaattactaaaaggttatagtaaatacttatcacatgatgttgttgtcatgactgtgaagttatgcatactatttgctgtgcttttgacagtccctctaatccacttccctgccagaaaagctgtaacaatgatgtttttctccaattttccattctcatggattcgccattttttgatcactctagcactcaatattatcatcgtttcacttgcaatatatgttcctgacattagaaatgtatttggtgtagttggtgccagtacatcaacatgtttgatttttatattcccaggactattttatcttaaacttagcagagaggattttctgtcatggaaaaagcttggnnnnnnnnnnnnnnnnnnnnnnnnnnnnnnnnnnnnnnnnnnnnnnnnnnnnnnnnnnnnnnnnnnnnnnnnnnnnnnnnnnnnnnnnnnnnnnnnnnnaaaaggaagagataccatggagatgtgcacccagaggaaaggccacgcaaggacacagcaagaaggcaactgtttacaagccaagggaagaggcctcaggagaaccaaacgtgtccacaccttgatcttgcacttcccaacctccagaactgtgagcaaataaatgatgttgtttaatcaccc

SEQ ID NO: 78655 - DNA, 965 bp, Homo Sapiens
  misc_feature (165)..(165): n is a, c, g, or t
ttcgttctaatcatgccgcagttccgatgagcgcatggagaaccaatattgattctcctcatagcacgcagcataccttatctccgctgtatgtgtgtgaattgagcgatacattcacacagaacactatgcatgattcgattaatcgctccctataggaattgncctcgagccaagaatcgcacggagtgtgaacatatccgggaataattgaaaaaaccaggcaatcaaatgtcctctcataaatcaccatcacttcagagcagaacttaagagtttggtgtgcaagccacaccaaatagtgtgagcgtggccctctaccatttcctcctgctctgagcccagaggttcacctagtggactgtagcaatggattcccttgcccctggcttcctgttgggttcagccagagagcagcaccagtgggagcctacagagggaggaaagtgaggtcaaggtgtctgctgcctcctccctgcctgccaggccactgtgggtagactacacctcaggtggccctccccatgtgtagccatgcttgccaggttctgggttctggaaacctccacctcctcttgccccttcagtcatagggtggtagcccccttcattgctattagctgttatgcactcaattgtgttccaaccccaaattcgtaggttgaggccccaatccccaggacctcagaatgcaactgtatttggagatagggtctttaaagaagtaattaaattaaaatgaggccattaagccctaattcaatgtgactggtgttcttgtaagaaaaggaagagataccatggagatgtgcacccagaggaaaggccacgcaaggacacagcaagaaggcaactgtttacaagccaagggaagaggcctcaggagaaccaaacgtgtccacaccttgatcttgcacttcccaacctccagaactgtgagcaaataaatgatgttgtttaatcaa

SEQ ID NO: 78656 - DNA, 880 bp, Homo Sapiens
agtggctcccaagaatgaaacctaaggtaaactatgaactttagttaataataatagttaatattgactcatcaaatgtaacaaatgtaccacatgaacgcaagagttaataataggggaaactgtatgttggggtaaaacggtatatgtgaactctgtactttctgttcagtatttctgcaaacataaaactaccataaaaatattaatttaaaaaacaaaagatcaacccaatatatttaagagcatttcgagtttgtttctttttttgattaaaactgctacactcttacttccccatacccactgccattttgttctgcttttctgttaataatttttattaaaatgttatttttcatccagggtgtcttccggaataattcattcttgcaactaggggtatattattcttgtaagaagtaggaaaatatttcttttatttattaatccaatcaaaaatgatgagtgctaaactaaaattcccaaccaaaattccaaagatgagcaaaacgaatgccccaagctttttccatgacagaaaatcctctctgctaagtttaagataaaatagtcctgggaatataaaaatcaaacatgttgatgtactggcaccaactacaccaaatacatttctaatgtcaggaacatatattgcaagtaaaacgatgataatattgagtgctagagtgatcaaaaaatggcgaatccatgagaatggaaaattggagaaaaacatcattgttacagcttttctggcagggaagtggattagagggactgtcaaaagcacagcaaatagtatgcataacttcacagtcatgacaacaacatcatgtgataaggattgactataaccttggagtaattctgactccac

SEQ ID NO: 78657 - DNA, 667 bp, Homo Sapiens
  misc_feature (547)..(547): n is a, c, g, or t
  misc_feature (591)..(591): n is a, c, g, or t
  misc_feature (627)..(627): n is a, c, g, or t
gcaaatgaaaacagaagcatttaatagatgtgtggacaagaacgggcagagaaggtgctgcggggagggggtaagtgcaggagcagtctggagaggcacatttgcaaggcaggggagtcccacttccaggagtgctctgggccactcagcctgcctactgtctcccaacagctgagacgggaggctggcccatccctacctttctcgcctgtagcctcaggaggaagtaattccttccactaagttgcaggctggagcagcccagaagtggcagcagctgcggacacaggctcacggatgtgggagcccttacacctgctcacagcccttcagtctgtccttgcagcatgtggagggatggtggggaggggctgctctcaggatagggataaagcaatagcccagtgtgcagggccagtgaccagtgtgaagcaactaagacgagtgtgggggcagagaggggaactgggggcagcgaggccacctgccaggctgtcctgggccataggccacgttcagaagacgaaggaagaggtggggcccgcanagctgagtacctgctccgcctgggccaggctgtcgctggcctgncggtccaggtcccagcactcctgcagtgtgtcctgnaactgccggcaggcctcctccaggatggagctgctccggc

SEQ ID NO: 78658 - DNA, 1164 bp, Homo Sapiens
  misc_feature (107)..(107): n is a, c, g, or t
  misc_feature (166)..(166): n is a, c, g, or t
  misc_feature (262)..(262): n is a, c, g, or t
ttccccagggtacagctggatttcgcccccccatttccacattttttgatgggtggccaggttcctaaggcgatgggtagtattcaaacaggtggttgaccatccanggccaccttgaggccaggtgagcttcacaacaagatccacattgaggagctctggcccncgacgaaagggcatttttgcggggcagacttcgctcttcagaccccccaggagttgtcgatctgggtgtgcgggaccacagcattctcatcaaaangggggttcaggtgggaaggcgatgtggtccccagagcacaggttaatgtggaacctctgagcactggccaggacagtccctgacaggaggatggacttgaatgggtacacccctcccagaatggtggtgatgaaaggcatcggataggcggggtgggggtacatcataggtgggatggcgggagtagagaacatctgtccaggggcgctctgcactgtgtggatgactgtctgggtaatgggagccgggttggcaggccacacgccgggaggtttttgtctgcgccccctgggcctgggtgggaaacagacaggctgggagaacggcaccgtggagaaggcaggctgaacagggactgtgcgggggttctggaagctgatgtaggacagctgcacagagccattgacggagatggtgtccacacggtggaagggcacgcggtggaagtactgcacgaagaggatcccgttcaccatcaccttgaaatctgagctctgcaccaggaagcagaggtcaaagggcatccccttctggaaaggcatgtgtgtcttcctctcctcgggcccccagcttccgttctgcctcgtgttgcacaccacgtaccctccatcttcaaaccgagggttgaagtggaaggcaatgtcatttccactgaagccagtctgaaagttcacagcaaacctggttccactggagctgagaacggtcccattgacagtgatctgaagtccgtcctggagacctccttgaatagtcccagaaaaggggacagctggactcaggtagggagcctgggaaccgctgaaggccatctctccgccgcctctgtggccaccgctgcctttcacacccactaggaagtcctttgtagagggaacgacttaacaaagaaaaagaaaaag

SEQ ID NO: 78659 - DNA, 1622 bp, Homo Sapiens
cgttccctctacaaaggacttcctagtgggtgtgaaaggcagcggtggccacagaggcggcggagagatggccttcagcggttcccaggctccctacctgagtccagctgtccccttttctgggactattcaaggaggtctccaggacggacttcagatcactgtcaatgggaccgttctcagctccagtggaaccaggtttgctgtgaactttcagactggcttcagtggaaatgacattgccttccacttcaaccctcggtttgaagatggagggtacgtggtgtgcaacacgaggcagaacggaagctgggggcccgaggagaggaagacacacatgcctttccagaaggggatgccctttgacctctgcttcctggtgcagagctcagatttcaaggtgatggtgaacgggatcctcttcgtgcagtacttccaccgcgtgcccttccaccgtgtggacaccatctccgtcaatggctctgtgcagctgtcctacatcagcttccagcctcccggcgtgtggcctgccaacccggctcccattacccagacagtcatccacacagtgcagagcgcccctggacagatgttctctactcccgccatcccacctatgatgtacccccaccccgcctatccgatgcctttcatcaccaccattctgggagggctgtacccatccaagtccatcctcctgtcaggcactgtcctgcccagtgctcagaggttccacatcaacctgtgctctgggaaccacatcgccttccacctgaacccccgttttgatgagaatgctgtggtccgcaacacccagatcgacaactcctgggggtctgaggagcgaagtctgccccgaaaaatgcccttcgtccgtggccagagcttctcagtgtggatcttgtgtgaagctcactgcctcaaggtggccgtggatggtcagcacctgtttgaatactaccatcgcctgaggaacctgcccaccatcaacagactggaagtggggggcgacatccagctgacccatgtgcagacataggcggcttcctggccctggggccgggggctggggtgtggggcagtctgggtcctctcatcatccccacttcccaggcccagcctttccaaccctgcctgggatctgggctttaatgcagaggccatgtccttgtctggtcctgcttctggctacagccaccctggaacggagaaggcagctgacggggattgccttcctcagccgcagcagcacctggggctccagctgctggaatcctaccatcccaggaggcaggcacagccagggagaggggaggagtgggcagtgaagatgaagccccatgctcagtcccctcccatcccccacgcagctccaccccagtcccaagccaccagctgtctgctcctggtgggaggtggcctcctcagcccctcctctctgacctttaacctcactctcaccttgcaccgtgcaccaacccttcacccctcctggaaagcaggcctgatggcttcccactggcctccaccacctgaccagagtgttctcttcagaggactggctcctttcccagtgtccttaaaataaagaaatgaaaatgcttgttggcacattcaaaaaa

SEQ ID NO: 78660 - DNA, 993 bp, Homo Sapiens
  misc_feature (42)..(42): n is a, c, g, or t
  misc_feature (53)..(53): n is a, c, g, or t
  misc_feature (72)..(148): n is a, c, g, or t
  misc_feature (164)..(164): n is a, c, g, or t
  misc_feature (177)..(178): n is a, c, g, or t
  misc_feature (197)..(197): n is a, c, g, or t
tatgtgatagtcactcctagcaccccagcttacattatgctnccgctcgtatntgttggaatgtgagcgatnnnnnnnnnnnnnnnnnnnnnnnnnnnnnnnnnnnnnnnnnnnnnnnnnnnnnnnnnnnnnnnnnnnnnnnnnnnnnaaggaatcgcaccganggagaaaatgtanngaaattcattctggattantgacattgtgaggaatagttgtcttgtgtctataagaatgatcaagctgcaaaggataatccaactacaaagtcttcagcgaaaaagaaccatgtccaaggttgcccatcagcttgtatacgatgagctacacaaggttcattacttatctggtgggaatccaggaaaatctggctctccaaagatgagattagatgacttctggtcactgaagttgtgtagaccttcaaaagattatttactgaggcattgcaagtacctcataagaaaacacaggtttgaagaaaaggcccaagtggatccccttagtgctctgaaatatttacaaaatgatctttatataactgtggatcattcagacccagaagagacaaaagagtttcagctcctggcatcagctctattcaaatctggttcagattttacagctctgggcttttctgatgtggatcacacctatgctcaaagaactcagctctttgacaccttagtaaatttctttcctgacagcatgactcctcctaaaggcaacctggtagacctcatcacactgtaactgaagagtcactggacacagaaatggaaaacaggagtcgattttccgtcttttggattgcagctccactgactgacagtaaagctgcagtgattgaggactgcaccagagttctgaagggatcttaaccatcacaagtttttaccctcttccttcatgcctgacctcaaccccgctctcctcatcctattcctaaattaggctaataaagtgaaattggtatactttccagttaaatat

SEQ ID NO: 78661 - DNA, 1157 bp, Homo Sapiens
  misc_feature (51)..(52): n is a, c, g, or t
cttcaatagagtccacccagaagataaatccctccatgtttccatactctnntgattagcctatggggtgggtgggtgtgatttgaaattactttttagaaataaattttatgtgtattttcaggtcctccccaaacattttcctgtggtcaccgtcaatcatattttgaaagatgtagtaaccagctatctacaagtagaagaatatgaaccagagctctgtagacagatgactaaaaccatttctgaggttattaaagcccaggtcaaggacttgatgattccacggtataaactaattgtgattgttcacattggacaactgaacaggcagagcataattattggaagcagatgcctctgggatcctaaaagtgataccttttcatcttatgttttcagaaattcttctctcttcgctcttgcaaatgtctatgcagtttaccttgagtgattgaaaataagaaatctagctcttacttttgaaaattctgaggcaggctgtatgtctgtacacaaaagttttactgccaaaaactttgagaaagaaacaacactgatatttcaaacaactggaagcttttgaattttttcatattctagtaaagatttggggaggggagggtagccacagaaagaatcttgtttatctaaagcaggaacttgatcttggttttgctggattgctttccatagacatagattcttattaaatatttgttttggtactaattattttaattattctttaattagagtgttacaatttcctgcattgttttttaataaaaagaagctttagaaaaactatggctatataccctgaccaataaatgatagtagaatattcaacatggtatacacaaatgataaataatgtgcctcagtgctgcatataaaagaatactggttttcattttgtacttaataaattgagcagcattcattaagtgcaattattgttacatgtacctgacagttgaaactgctgaggtagaattaatggcttcataacaattatcgtggtcccacgggctgcaagctaaaactagaagctcttgtggcttgcctgcactttacacaattgtgggagaaccgaaagttggctcttcagtaatggaaactataaagtgaataaaggctttttgggaccactg

SEQ ID NO: 78662 - DNA, 510 bp, Homo Sapiens
gggccgccggtgaatgaagcctgggacgcgggagcgccggcgagtgtctgcagtaccggagtctagggaggctccgggcgaactcccctgctgcaggttatgatgatgtcagacaatgctaaaggcagacagctcattcatggaagaaaagagggagtatttcttctctaagtaatcatgaattttggcgaaaggaaattcatgggcgcatcaaagattctatgagtactgtgtcttatatggatgaacccagtcagcgtgatgatatctctcgccttacagttcagatggaaaacacctatcagttgggttattaaagcccaggtcaaggacttgatgattccacggtataaactaattgtgattgttcacattggacaactgaacaggcagagcatacttattggaagcagatgcctctgggatcctaaaagtgataccttttcatcttatgttttcagaaattcttctctcttcgctcttgcaaatgtctatgcagtttaccttgag

SEQ ID NO: 78663 - DNA, 895 bp, Homo Sapiens
  misc_feature (65)..(225): n is a, c, g, or t
  misc_feature (235)..(347): n is a, c, g, or t
ggtccggaattcccgggatatcgtcgacccacgcgtccgcattttccttaaaatatttgtactannnnnnnnnnnnnnnnnnnnnnnnnnnnnnnnnnnnnnnnnnnnnnnnnnnnnnnnnnnnnnnnnnnnnnnnnnnnnnnnnnnnnnnnnnnnnnnnnnnnnnnnnnnnnnnnnnnnnnnnnnnnnnnnnnnnnnnnnnnnnnnnnnnnnnnnnnnnnnnnnaatttatacnnnnnnnnnnnnnnnnnnnnnnnnnnnnnnnnnnnnnnnnnnnnnnnnnnnnnnnnnnnnnnnnnnnnnnnnnnnnnnnnnnnnnnnnnnnnnnnnnnnnnnnnnnnnnnnnnttaacaacaaaacccatgagcggcagccccccagtcctggatggtggtaaagaatcctcaagatcaaacccacgcagtgctgagagcttggcctgattctagggctggggctggagaaactgctagagatgatgccgatagccagtgtgatccccctgccctgatggtcaagggcagagtgcagactggaaccctcccctccccaaagattcagacctgtggggctgagtgggctcatagtgtccccaagtcctgagaggctggtgtctggcttcagcctccagcttctcaggttctgatgcagtcagctgagttccctgcctattcttgcaagcactaggaggagggtggtgggttgctgggaacagcaccgagcgccctccccacccagattcacagagcacactccccggggggatactttaatccggaggccgtgacgcctggctccgccccgagacgagctgaatccaaatacggatctaggcttgagcttggttgggtttgcttttttcttcttcttctttataaacaattctttgtaactt

SEQ ID NO: 78664 - DNA, 1649 bp, Homo Sapiens
  misc_feature (19)..(19): n is a, c, g, or t
gctggtaccggtccggaanctcaagatatcgtcgacccacgcgtccggtcttctccttgcttctgggggtcgtggccttgctcccgctgtgcgggaaaagaatccaggcccttccacgcgcgtgtgggtgcgggggccccgaagtgctcgtggttccccgctaggtctccgctggggcaggaaccggaatcatgggtgggaccaccagcacccgccgggtcaccttcgaggcggacgagaatgagaacatcaccgtggtgaagggcatccggctttcggaaaatgtgattgatcgaatgaaggaatcctctccatctggttcgaagtctcagcggtattctggtgcttatggtgcctcagtttctgatgaagaattgaaaagaagagtagctgaggagctggcattggagcaagccaagaaagaatccgaagatcagaaacgactaaagcaagccaaagagctggaccgagagagggctgctgccaatgagcagttaaccagagccatccttcgggagaggatatgtagcgaggaggaacgcgctaaggcaaagcacctggctaggcagctggaagagaaagaccgagtgctaaagaagcaggatgcattctacaaagaacagctggctagactggaggagaggagctcagagttctacagagtcaccactgaacaatatcagaaagctgctgaagaggtggaagcaaagttcaagcgatatgagtctcatccagtctgtgctgatctgcaggccaaaattcttcagtgttaccgtgagaacacccaccagaccctcaaatgctccgctctggccacccagtatatgcactgtgtcaatcatgccaaacagagcatgcttgagaagggaggataaaaactttcagaatgagcaaaacaccatcaacgttaattccagagatggaacattttttttcctagtgagaaaacaacccatttgaagagaagaccactaatgagaagaccactaaagagagacatcaagaatggattcagcagaatcatttcacgttttgaacagcagcagtttgaagggccaaagccttgatcagggatcagtcattaaaggacactcttgagtattagtaaaccctcttatgatgattaaaagagaagggcagccctctccaccttttggtactttctattcaacttgcactgaccataaaatgtttctcttctgaacaagccccatcatttggtgaacctccaccctaacaaagtaggatggggttgggggctaaattaattggagtggggcgaggagagagccagaaaacatagatccgagggcagcagtgctgggtggagagagccagaaaacagatctggaggcagcagtgctggatggaattgtctaggctgtggcatgttggttttgtctttcttttctcctttgattatgtaagagctatttcattataacttattatggtgattatacaggcaagaagacaaaaaggagagaaaatgtacctcttctactggaataatgtttatgattacaagtgagataaggtatttttatcaatatgaaggcaaccttggctgataaaacctctatagtgaatactcacatctttacttcactcactatcaataataaatatattttctgacaaagactggc

SEQ ID NO: 78665 - DNA, 1021 bp, Homo Sapiens
  misc_feature (56)..(56): n is a, c, g, or t
  misc_feature (879)..(956): n is a, c, g, or t
caaaaagacaataacgggcatcttcaggccaacaaccccagcacagactggccctntgagaagaaacaggttgggagagtctgggaaaggtggagactagggctggagtgagagtcagccttaccagtatggacccctatgcgtagcctcagctggtcatggggtcggtggcggatgcgaaaggaagaaactgcatctagtaatgctagggccatacgagcaatttctggtgcatggcgttgaccatttcggcctgggaggccagataccaccatgtaagcatccccaatcgtctccacctgattgagagggggattaaaaggtcacctctatttatatccatggggatgggaaaaagtagagggagacaagcttgacaccatcattaatcatcctgacatgctggagaccagaatattgactagaaaataagtgccatggtcctgagtctaggggagaggagatgtctagggaatctttaagtcttctttctccacccagcacctggtgaatactcagtaaacatttgcggaatgaatgaacaccctgtctgcagcaggacatggacaaataggctctgccatcaggaaatgggaagcaagaaaacggtaactcaagaggacagaggctggtgaggaggtaaagcaggcccagtgaaatggacctgacagcccaaactgtcagagaggaggaaagcaggcatttgattttggtaattgtgccaaagctatgtaagagaataaatgccattgttttaaggaaatacacagtgaagtttttaggaaatacacactaagtatttagggataaagtagttatccctaaatagtagtctgccacatgccaaacaatgttaggtactttccatacaacgaatcnnnnnnnnnnnnnnnnnnnnnnnnnnnnnnnnnnnnnnnnnnnnnnnnnnnnnnnnnnnnnnnnnnnnnnnnnnnnnncaagccaatattcaaatccagatgatttttactcccaaggacaataaatccaactcaataacttc

SEQ ID NO: 78666 - DNA, 795 bp, Homo Sapiens
  misc_feature (93)..(93): n is a, c, g, or t
  misc_feature (105)..(105): n is a, c, g, or t
  misc_feature (132)..(132): n is a, c, g, or t
cagcagaagcaccccattgaaggtagtgacactcttaatgacctgtatactggctttgatgccataatgacaactttgatgtctacaagttgnagccgtttgggnatgcttacatggtggtatctggcctcncagcccgaaatggtcaacgccatgcaccagaaattgctcgtatggccctagcattactagatgcagtatcttccattcgcatccgccaccgaccccatgaccagctgaggctacgcataggggtccatactgggccagtctgtgctggggttgttggcctgaagatgccccgttattgtctttttggagacacagtgaacactgcttctcgaatggagtctaatggtcaagcgctgaagatccatgtctcctctaccaccaaggatgccctagatgagctaggatgcttccagctagagcttcggggggatgtggaaatgaagggaaaaggaaagatgcgaacatactggctcttaggagagcggaaaggacctcctggactcctgtaaacccccattctttccaagtcagatagtcttctgctgctggtacctgggtgggcaatggccaccatgtctgcacacaccagaaatggacattttcatatgcaatggaaaacagccacaaaaaaacctaccttatatggaagttgtagccctctgcagctcagccctgtacatatacctgtccctctctggcttggtccccttcctccctactttctgtaaatatctgtatctaaaccagaatattttggtcaaatataaaacaataataaaaaaa

SEQ ID NO: 78667 - DNA, 1049 bp, Homo Sapiens
  misc_feature (79)..(79): n is a, c, g, or t
  misc_feature (106)..(181): n is a, c, g, or t
  misc_feature (188)..(198): n is a, c, g, or t
  misc_feature (895)..(895): n is a, c, g, or t
aaccaccatggcttcttaaaaattcaaaaatttggccgggtgtggtggtgcatgcctgtagtcccagctacttcagganggctgagccaggagaattgcctgaacnnnnnnnnnnnnnnnnnnnnnnnnnnnnnnnnnnnnnnnnnnnnnnnnnnnnnnnnnnnnnnnnnnnnnnnnnnnncaaaggnnnnnnnnnnngggaatacaaaagagacggagaaagcagtaaacagtagtataatttaagaagctgaccccagaatatattctgtattcccatgtttcttctatggggttttacttcctttcagcaatttcttcaaagaggtagtttattctgcagtacacttgttaagtctcctctgaacatcctagaaaggtttttccatcagagcctctatccaactggttccattcattagtttagtggtggcaatgacatattctgtacctccatcttccaactgggagagaaatcgcagggcagcaatttcagcgaaggttacgcccccaaggaaaaatatcagagtcactcggttttctcccggttgacgtttcttctgcagtcctgtgggcagtggctgccgctcctcaaagtggggccctgggaggatgcggaggacctcctcgatgctccgccagccaggccgggaaagcagctgggccagccgcacactgagcggggcatacccactgtacacatacgatatgtccgtggggttttgctcattaacatcatccatccagaggcgtaatgttttccgtatagttgggtaattgtttctgccccccgtctgcggtttcagcaggccggccttctccaggttgtgtaaggtcaatatgtgctcatagccgtatgtctggagaatctctcttttgtaataatccaaaactnttttgtttgagcccactattacacacggattggaggcaaactagtcttaacaccttgatcaacgagtgcttttgggcgatacaatcctcaatgtaattgttgaccttatcagtgtctattccagacataaactcctgttccacggttaatttat

SEQ ID NO: 78668 - DNA, 1082 bp, Homo Sapiens
tccttctttcatcctctcaggagacccctaccagcttctccagggagacgggactgccctgatgcctcctgtgcccccacatcaaccccggggtgtttttggctcatggcaggattactacacatggcggggcctcagcttggactcccccatagccgtgcttctcacctacccgctgaccgtgtactacgtcatcacccacctggtgccccagtccttccctgagctcaacatccaaaacaaacagtcactgaagatccacgtggtggaggccgggaaggagtttgaccttgtcatggtgttttgggagcttttggtcctgctcccccatgtggccctggagctgcagtttgtaggtgatggcctgccccccgaaagcgacgagcagcattttaccctgcagagggacagcctggaggtgtctgtccggcctggttccggcatatcagcacggcccagctctggcactaaggagaaagggggccgcagggacctgcagatcaaggtgtcagcaaggccctaccacctgttccaggggcccaagcctgacctggttattggatttaactccgggtttgctctcaaggatacgtggctgaggcctctgccccggttacagtccctccgagtgccagccttcttcaccgagagcagcgagtacagctgtgtgatggacggccagaccatggcggtggccactggagggggcaccagccctccccagcccaaccccttccgctccccctttcgcctcagagcggccgacaactgcatgtcctggtactgcaatgccttcatcttccacctggtttacaagcctgctcaagggagcggggcccgcccggcggccgggcccccccacccccatccccaactccctctgctcctcctgcccccacccgaaggcgccgaggagaaaagaaacctgggcggggggcccgccggcggaaatgaatgctgataccctagtagtccccagctcccaaacactgaaaggaaaacgtgaaaacactcaaggcctagggggaggacaggttggtaaaacatgaaaaggtaaataaaattacttgtttgaaaccaaa

SEQ ID NO: 78669 - DNA, 1005 bp, Homo Sapiens
  misc_feature (12)..(12): n is a, c, g, or t
  misc_feature (36)..(36): n is a, c, g, or t
  misc_feature (86)..(86): n is a, c, g, or t
  misc_feature (189)..(189): n is a, c, g, or t
  misc_feature (196)..(196): n is a, c, g, or t
  misc_feature (246)..(246): n is a, c, g, or t
  misc_feature (252)..(252): n is a, c, g, or t
  misc_feature (295)..(295): n is a, c, g, or t
  misc_feature (305)..(305): n is a, c, g, or t
  misc_feature (326)..(326): n is a, c, g, or t
cacactgcctcntccgagtctgatacagtggaccantctcaaaaggattgaggactttgtcgcggacaaatcgattgatactcatncaaagagatttcatatgacccactgaagcatcagatacaggaccgtgacttcaaaagagacattcggagatcgccagggccctgtatcccggcagcgcgagtntggagtncagtggaggctctcgcatcatgcatgtactttcatactcaagactacccntcatcntgcatccctcacccccctgcagaaacttgggcttgaattcatntaaaaacatntcggtttcagaagcttctttntattatgaagctgccaaggagatcttagaatgaaaggcatttttagagatgagaaagaaggaagccaggccaaggccgggccggctctcagctgtgggtctgtaaaggtgacacgtgggacatggccacctgcagaccctgcaggcggctgggcagaggcacccacagggacctgggtttgaatccctgctctgccagtcatttccacagcgatcttgggggaagttgtgtaacctctgggccctgcgacgccctttcctggagcctggagctggaacgaagccccttggagccctgacatcagaggtgacgttagtcttcgcaggcaatgactcggcggaatgtgatgccactccctaacccgtgtccggactggcagagtgtgtgccgcctcccaccaggtggtctggctgctttgatggatctcctaacttctctgcaccccagagccctcagtgctggccagaccttcactcactcctgggtgacaaccccgttctcagatagtgggtcccacaggctggcctgtggcgccccctgctggtgactgcagggagaaggatgccctaagccaaaggaagtccttcctggggtctaatctctaccttttgcatgatgaggcagctgaggtggctcgctttctcctccaccccagaaaataaagtcatatggagtccaa

SEQ ID NO: 78670 - DNA, 817 bp, Homo Sapiens
  misc_feature (45)..(45): n is a, c, g, or t
gcaggctggtacggtccggaattcccgggatatcgtcgacccacngcgtcgcgcttcttccttctggatgggggcccagggggcccaggagagtataaaggcgatgtggagggtgcccggcacaaccagacgcccagtcacaggcgagagccctgggatgcaccggccagaggccatgctgctgctgctcacgcttgccctcctggggggccccacctgggcagggaagatgtatggccctggaggaggcaagtatttcagcaccactgaagactacgaccatgaaatcacagggctgcgggtgtctgtaggtcttctcctggtgaaaagtgtccaggtgaaacttggagactcctgggacgtgaaactgggagccttaggtgggaatacccaggaagtcaccctgcagccaggcgaatacatcacaaaagtctttgtcgccttccaagctttcctccggggtatggtcatgtacaccagcaaggaccgctatttctattttgggaagcttgatggccagatctcctctgcctaccccagccaagaggggcaggtgctggtgggcatctatggccagtatcaactccttggcatcaagagcattggctttgaatggaattatccactagaggagccgaccactgagccaccagttaatctcacatactcagcaaactcacccgtgggtcgctagggtggggtatggggccatccgagctgaggccatctgtgtggtggtggctgatggtactggagtaactgagtcgggacgctgaatctgaatccaccaataaataaagcttctgcagaatcagtg

SEQ ID NO: 78671 - DNA, 416 bp, Homo Sapiens
aaaaaataacctagactatgcaaaacatcaaagtgaattttccatgaatgtttttaatattctcatctcaacattgtgatatatgctactaaaaaccttttcatatacatcttacctcatttcaagtgaattattttaatcttttcctctctttccaaaaatttacaggaatgtttagtgtaattggatttcgctatcagttcccatccttaagttttgatattcaatatctgatagatacactgcatctttggtcatctaagatttgtttacaaatgtgcaaattatttagagcatagactttataagcattaaaaaaaactaatggaggtaaaacctaaatgcgatgtgaaataattttagtgttgatactgtatgtgtatttttattctaataaacttttgtgttccagattg

SEQ ID NO: 78672 - DNA, 993 bp, Homo Sapiens
  misc_feature (51)..(51): n is a, c, g, or t
  misc_feature (55)..(55): n is a, c, g, or t
  misc_feature (59)..(59): n is a, c, g, or t
  misc_feature (143)..(143): n is a, c, g, or t
  misc_feature (155)..(155): n is a, c, g, or t
  misc_feature (185)..(185): n is a, c, g, or t
  misc_feature (192)..(192): n is a, c, g, or t
  misc_feature (203)..(203): n is a, c, g, or t
  misc_feature (211)..(211): n is a, c, g, or t
cgccagtatgcgagttgtgtgacaccctggtgcctctgcagccgtacagcntagntgcntgagaaatgattgggagtgatggaccctcgctgccttaaacatactcctagttctgcagcggagagggagacactccgcagacntgcagagtatcntatgcgccagagatccagagcctgcacgcntgccccntgggtgcctcntgtacccncagtggaaggcagacagcaggcagcgccaagtgcgtgccgtctgagtgtgacaggccagtggggccctgtggaatgagtgtgcatggaggccctcctgtgctgggggaatgagcccagagaacagcgaagtagcttgctccctgtgtccacctgtgggtgtagccaggtatggctctgcacccctctgccctcattactgggccttagtgggccagggctgccctgagaagctgctccaggcctgcagcaggagtggtgcagacagaagtctcctcaatttttgtctcagaagtgaaaatcttggagaccctgcaaacagaacagggtcatgtttgcaggggtgacggccctcatctatgaggaaaggttttggatcttgaatgtggtctcaggatatccttatcagagctaagggtgggtgctcagaataaggcaggcattgaggaagagtcttggtttctctttacagtgccaactcctcacacaccctgaggtcagggagtgctggctcacagtacagcatgtgccttaatgcttcatatgaggaggatgtccctgggccagggtctgtgtgaatgtgggcactggcccaggttcataccttatttgctaatcaaagccagggtctctccctcaggtgttttttatgaagtgcgtgaatgtatgtaatgtgtggtggcctcagctgaatgcctcctgtggggaaaggggttggggtgacagtcatcatcagggcctggggcctgagagaattggctcaataaagatttcaagatcctcc

SEQ ID NO: 78673 - DNA, 2063 bp, Homo Sapiens
  misc_feature (1825)..(1900): n is a, c, g, or t
cgaccgctgaggccgcggagagtgacggctggcccggccgacgggatgccggggcggggcggcggcccagcgaaggagcgcgcgggcgtgtctggccccgccccctccccgcccgccttcccggtgaccttcaggggcccgggtggcgggcgcaggcccctgcggcggcggcgggatgttcgtgcaggaggagaagatcttcgcgggcaaggtgctgcggctgcacatctgcgcgtccgacggcgccgagtggctggaggaggccaccgaggacacctcggtggagaagctcaaggagcgctgcctcaagcactgtgctcatgggagcttagaagatcccaaaagtataacccatcataaattaatccacgctgcctcagagagggtgctgagtgatgccaggaccatcctggaagagaacatccaggaccaagatgtcctattattgataaaaaagcgtgctccatcaccacttcccaagatggctgatgtctcagcagaagaaaagaaaaaacaagaccagaaagctccagataaagaggccatactgcgggccaccgccaacctgccctcctacaacatggaccgggccgcggtccagaccaacatgagagacttccagacagaactccggaagatactggtgtctctcatcgaggtggcgcagaagctgttagcgctgaacccagatgcggtggaattgtttaagaaggcgaatgcaatgctggacgaggacgaggatgagcgtgtggacgaggctgccctgcggcagctcacggagatgggctttccggagaacagagccaccaaggcccttcagctgaaccacatgtcggtgcctcaggccatggagtggctaattgaacacgcagaagacccgaccatagacacgcctcttcctggccaagctcccccagaggccgagggggccacagcagctgcctccgaggctgccgcgggagccagcgccaccgatgaggaggccagagatgagctgacggaaatcttcaagaagatccggaggaaaagggagtttcgggctgatgctcgggccgtcatttccctgatggagatggggttcgacgagaaagaggtgatagatgccctcagagtgaacaacaaccagcagaatgccgcgtgcgagtggctgctgggggaccggaagccctctccggaggagctggacaagggcatcgaccccgacagtcctctctttcaggccatcctggataacccggtggtgcagctgggcctgaccaacccgaaaacattgctagcatttgaagacatgctggagaacccactgaacagcacccagtggatgaatgatccagaaacggggcctgtcatgctgcagatctctagaatcttccagacactaaatcgcacgtaggtggcgttgttccactcggctatcaggccacagcagccccctggtgcggcccgagaccgggcagagtggacctcacctggaaactcaccttcagcgcctcagccctggactgttagaggtgctgcagcggctcctgctctctgatcttattgcttataaactttggtgacggtagtgtgtaaggccgtatttttagcatctgacaggtgtttacaaaaaagtggttgtcgcactgggaagtggagtgatggcctcgtctccagtgctcctctgggctcttgagttgctgcttgaattgccgtgtagacatttgcttggagagtccacttgttatttgacggaggtaggtttcaacccagagttaatgtcaagcatgctaatttaactagtcactcacagatgacttttctttaataaagtcccttttcctannnnnnnnnnnnnnnnnnnnnnnnnnnnnnnnnnnnnnnnnnnnnnnnnnnnnnnnnnnnnnnnnnnnnnnnnnnnccttgtcggccgccctcggccctcgaaaaagttttctaaaccatctcttttggcgccggcgggccccagtaggttaagggaaacagtggccaataccgtgttctccaaggaagaatcctgtggccagtgaacatagggcctgtggaatctctcccacccaaat

SEQ ID NO: 78674 - DNA, 642 bp, Homo Sapiens
  misc_feature (630)..(630): n is a, c, g, or t
tttgagttgttttgtttttatttttaaatgaagtttccatctgtacacgttaagaaaataaacaaaacaacaggaagccattctctgtgtatcctccttggaggcaggaaggatggatctgccgataggcacacaacagcacacagccagggctcatgggagtgagtgcccgtcacctcacgaaggtcatgggcctaaaacatacggaggctccatagaaaatgctccagctggctttgcagtcatgcataaaggtgaggacacttaattcaaggcatctgggggctggtgtcaccgcacatgaagagtagtgcccatgctgtcccacgagcttccttgggaaaagggaaaaacaaatcttttcctcaaatagaattgtcgcaggaaagagccatgacattttattcactgtttaatcatcgggtggcaggatttctttgaagtagaatctggtagtacccctcccaatctttgctggatcacttctaaatggtgaatatactctgtcaaggaatgttctggatcttgagaagcagtcagggatctttctaatcttgaatttggggatggagtggctcttcccccactgtgtggggaggctgctgctgcagtctgcgccctctgcaggtnccctgtgtgccc

SEQ ID NO: 78675 - DNA, 1509 bp, Homo Sapiens
  misc_feature (58)..(92): n is a, c, g, or t
  misc_feature (1402)..(1402): n is a, c, g, or t
  misc_feature (1475)..(1475): n is a, c, g, or t
  misc_feature (1487)..(1487): n is a, c, g, or t
ccgctcggctcttaatgcgaacgacgagcgcagcgagtagtgagcgaggaagcggcgnnnnnnnnnnnnnnnnnnnnnnnnnnnnnnnnnnncagtcgacggtaccggacatatgcccgggaattcggccattacggccggagagggcgagggcggctgcggcgcagtctgcagcatggcgtacccggggcatcctggcgccggcggcgggtactacccaggcgggtatggaggggctcccggagggcctgcgtttcccggacaaactcaggatccgctgtatggttactttgctgctgtagctggacaggatgggcagatagatgctgatgaattgcagagatgtctgacacagtctggcattgctggaggatacaaaccttttaacctggagacttgccggcttatggtttcaatgctggatagagatatgtctggcacaatgggtttcaatgaatttaaagaactctgggctgtactgaatggctggagacaacactttatcagttttgacactgacaggagtggaacagtagacccacaagaattgcagaaggccctgacaacaatgggatttaggttgagtccccaggctgtgaattcaattgcaaaacgatacagcaccaatggaaagatcaccttcgacgactacatcgcctgctgcgtcaaactgagggctcttacagacagctttcgaagacgggatactgctcagcaaggtgttgtgaatttcccatatgatgatttcattcaatgtgtcatgagtgtttaaatcaagaggaagctgcatgaatgtaatcaacattccaactggagctctcctttgcttgtcctctttgccttcggtaatatgtataaacttacatcacgactttctcttaacagctgttgtaaagtttattactttatgtacaactgaagttttgttttagttttgataataaattctttggaacttccccaaaacctacccacaaccacccccccgcccgtgcctggcttgcctccgtacactcagagaattttccctagacccattccgtttgcgcgcgccgggccccccctagggtaagtcgaaccttggtccataacttgctttccctaagaagatcccctggccgatgaactacgggctttgggattctccacccaacaaaaaaaccgtctccggggcgtttatgcacgctgttttttcacccaactcccatattggccgctccccaaccgccctttatctgcggatctatcccacccccggagcgcccatattcccatccccgcaatattcccccctttatttctccgcccccccctggcccatctcctatcggcgagaccaatgtgcgttggtaaaactctcatctagaagccactttccggccccggaccaatggggcgagtntcccctctcgtccataaattcgctgcgttggaaccgcgataacttcgcgaaatgtccgccgccacgatggtgncatatcctcgantcgcacgatccgcgtgtgcgcg

SEQ ID NO: 78676 - DNA, 664 bp, Homo Sapiens
atgtgttgtcgtgcaggtagaggcttatcatctactagaggccatttacttaaggtgaaattttaagatggagctaaagtaagatcactggtttttagaaccaaattgctatacatatgtgcctcatagaacttataaaaggagtcaaagtttcaaagcaagatagttattaagcaaaaggaaaaatggtaatgatagaaagtcagttaaaaatagatgattgttcttcattctgtttgttggctctgtgttctcctgtgcttcagattccttatgtgttgttgttttaaaagacaatttgcagggggttgggagaaggactgaaaaggtacattaagtgtgctgtaaggaaaagtcttagaaacataataagctaaaatcccattcacacatggccaggctatccaaaaagaaaggagccatgttctcatgtggtttaccataccaaagcttgctttctctggcatgggaaaaataaatttaagcaccaaacctttagtattctgagtattcagtttttagacatagtcatgtagccattgctgaaactgtgctttgcactattaaaggtagggaatgtcctgcttttaaaagtcatccctttaactttaaaataaaaggctaaggtacaataaaacagatgtaaatccatttaccatttttc

SEQ ID NO: 78677 - DNA, 665 bp, Homo Sapiens
  misc_feature (91)..(91): n is a, c, g, or t
  misc_feature (113)..(113): n is a, c, g, or t
ggcagatattttttgacactgggaactgggctgtctagccgggtataggtaacccacaggcccagtgccagccctcaaaggacatagactntgaaacaagcgaattaactatntacgctgcctgcaaggggccacttagggcactgctagcagggcttcaaccaggaagggatcaacccaggaagggatgatcaggagaggcttccctgaggacataatgtgtaagagaggtgagaagtgctcccaagcagacacaacagcagcacagaggtctggaggccacacaaaaagtgatgctcgccctgggctagcctcagcagacctaaggcatctctactccctccagaggagccgcccagattcctgcagtggagaggaggtcttccagcagcagcaggtctggagggctgagaatgaacctgactagaggttctggagatacccagaggtcccccaggtcatcacttggctcagtggaagccctctttccccaaatcctactccctcagcctcaggcagtggtgctcccatcttcctccccacaactgtgctcaggctggtgccagcctttcagaccctgctcccagggacttgggtggatgcgctgatagaacatcctcaagacagtttccttgaaatcaataaatactgtgttttataaaaaa

SEQ ID NO: 78678 - DNA, 1084 bp, Homo Sapiens
  misc_feature (493)..(493): n is a, c, g, or t
cggcaggctgcatcccctccaacattgtctgggaccttctggccagcatctgcccagccaaggccaaggacgtctgcgtggtcagactgtgcccacatggggcccgggacacccagaactgccgcctgctctactcatacctcaatgataggcagcgccacgggctggcctctgtggagcacatggggatggtcctgctgcccctgcctgccttccagcccctgcccaccaggctgcgccctttggggggcccaggtctggaggtcactcactcaagtctgttgctggctgtgctgctccccaaggaagggcttccagacacagcagggtccagcccctggttggggaaggttcaaaagatggtctccttcaacagtaaggtggagaagagatactatcagccagatgacaggaggccgaatgtgcccctgaagggcacccctcccccaggaggtgcctggcagcagagccagggcaggggcagtatagctcncaaggggaatctctgcttggcagaggccccccagaggcagggggaggctctggccagagcctgaaaactggcagcatcctgggcgagggcagtggcccccagagccaggcttgcgccagtcccagcatccctattcagtagcaccagctggtcatggctttggccgtggccagcacttccacagggactcctgtccccaccaagccctgctccggcacctcgaatccctggcgaccatgagtcaccagctccaagccttactgtgcccccagaccaagagctccatcccccgccctctgcagcgtttgtctagcgcccttgcagctccagagccccctggcccagcccgtgactcctctttggggcctacagatgaagctggctctgagtgtcccttccctagaaaggcctgaccctccttacccaccagaacaggggttttgatgccctcactagtgttgaagcctgttccagagagaggtgggactgcaaggagaggatggtcagccctacccacctgccctgtttgagcttcctgtttgacaatgtttgctgttgattttttgttcaataaagaatttggtaaaattg

SEQ ID NO: 78679 - DNA, 1706 bp, Homo Sapiens
  misc_feature (57)..(57): n is a, c, g, or t
  misc_feature (79)..(79): n is a, c, g, or t
gatgaattgcattctctggactccgagttctataaaaacctcacctccatcaagcgntatgatgcggacatcactgacntgggcctgacgctgtcttacgacgaggacgtcatgggtcagcttgtttgccatgaactgattcctggagggaagaccaatcctgttacaaatgaaaataaaattagctacatccatctgatggcacattttcgaatgcacactcaattaaaaaaccaaacagctgccctcattagcggattccgttccattatcaaacccgagtggatccgaatgttctcaactcctgaactgcagcgtctcatctctggcgacaatgctgagattgatctggaagatttaaagaagcacacagtctactacggtggtttccatggaagtcacagagtcatcatctggctctgggatattctggcctccgacttcacaccggatgagagagctatgtttctgaagttcgtgaccagctgctccagacccccgctcctgggattcgcctacctcaagcctccattctccatccgctgcgtggaggtgtcggacgatcaggacaccggggacactctgggcagcgtcctccggggcttcttcaccatccgcaagcgggagccaggcggccgcctgcccacctcctccacctgcttcaacctgctcaagctgcccaactacagcaagaagagcgtcctccgcgagaagctgcgctacgccatcagcatgaacacgggctttgaactctcctagctcctgtcccagccctgcctccagggctcctgggctgccagggaccttcagctcccagaggcagtgtggtcctgggaatgtgaccaacatgccaggtgacattggcccctagaccctctctatagccatgagactccttgtggcctcaagaaatttagacgcccacgacagcactacacagcatctccaggtgatgcccaaggcacagggctgcagaaaataaacctccagattccaccaacacgggtccattcttcctggtgatggcagaggggcttcttttagctagtttgatcttttgggagtctgtctttccttagccgtctgagtgagctgtgtatgaacaagtcccaggagttccaagagtctagagtggtttttgcagcatgggttgagtgtacaaagcctactgtgcgtgagatcctctccttccgtttctgaaatctcttactcaggtaaggcctcgccaagcctctatgcaaccccacaaagtttctgcctccatggctgtccacagcgcctcttcccagacagccaggccatctgctgcccaggaagcgcaggcgcgtgtagggacgctatggacaccgtgagtcaaggcgctgtcctgctttgaagccacgcgctcacacgcccgggccttccccattttctgcgtcctcagcgggctgagctgcagagagccttccggacttattccgtctgtgccttcacattggcatccggttgcggcagaaaaaccacgggccttacaagagcccggttccgatgtgtgctgtccccaagctgttgtccgcggaggacggggctttgacccttatggctcaccggctccatgcgcgaaccattaacctagggacaccacacggggcgggtcctcgctctccacacacaatcggttgcccctcctccagagagcggccacaacgaccccctgttaaatctcg

SEQ ID NO: 78680 - DNA, 516 bp, Homo Sapiens
gcggccgcctggctcccgcttgcggatggtgaagaagccccggaggacgctgcccagagtgtccccggtgtcctgatcgtccgacacctccacgcagcggatggagaatggaggcttgaggtaggcgaatcccaggagcgggggtctggagcagctggtcacgaattattttcatttgtaacaggaatggtcttccctccaggaatcagttcatggcaaacaagctgggggagaagatgggagtaattaatagggaggactctaatggggaaataaagcttcccggagatgagagggcccagcacaaacatccatgataatgatggaattaagatggcacatgcttgggaaccatcctttctcataaaaagtcaaggctgaaatatcaacaagcagaccctgcatgatcaatacaaaaggtttttttctcacccaatccttgttcaaacatttgtattaagacttcgggatgtcatggaggggaatgtgttggcatttcggagtagagtaggacgg

SEQ ID NO: 78681 - DNA, 683 bp, Homo Sapiens
tgcctctgggagctgaaggtccctggcagcccaggagccctggaggcagggctgggacaggagctaggagagttcaaagcccgtgttcatgctgatggcgtagcgcagcttctcgcggaggacgctcttcttgctgtagttgggcagcttgagcaggttgaagcaggtggaggaggtgggcaggcggccgcctggctcccgcttgcggatggtgaagaagccccggaggacgctgcccagagtgtccccggtgtcctgaaggcacacatcgtggccttgaattgggaagggcctagtttgggagcccaggctgatgccaaggccagggagcccagggaggggatctggccagtccctggatgctgggcagagtgcagggcgctgccctggcaccactacccgaggtcaagccccagacacaagacgactggcttccagagaaggaaccccttctccctggggcctgcacagagaattcctgcactaagtaagcttttggaaatggggccttccggttcacagcgaattactggttaaccaattgacaaaaagtagaatgctgtaaaaactgttaggtgcccaaacatttctgaatgcactcctccctcctcaccggtgctgtggccggtgcagaccatgacttggcctcgtgccgattcacaaccaggcctcgtactagctac

SEQ ID NO: 78682 - DNA, 517 bp, Homo Sapiens
gctccggcagctgcttctagcctgggaccggtctcaaccgccgggaggtgagcgacggcccaggggcgggcgcgaggcggcggcgcccggcgacccgggagaggcctgaccgccactccccgcgcagagcgccccggggcttggacatgagcgcccaggagcccccgcagggtcggagattccccattgaggccggagactcccgtggccttgccgccgcccccgagtcccaggacagcccggaggcggtagcgacggagcacaacccggtcaggccgcttcgtcgctgccctggatgccactgcctgacgctgctgcacgtgcccatcgacgtctacctcgccatgggcgggagcccccgggcccgcgccacgtgagtgcgcctgctccctgcggctccgcgggagctgggcgggaacgaggccccccagcgggccaccacgctgaggtcgcatgcgccgagcacgagacaatgatgcacattttaaaataaaagaatgatgcacattttaaaaaa

SEQ ID NO: 78683 - DNA, 1033 bp, Homo Sapiens
ggaattcccgggatggacacagcggcgggtggtggggagggacagggccagacatttttaaactccggtgcaattgtgatgtagatgctgtgtgacccttggccaaaatgggcagtgcccctacctgccctcactaccaccaccaaactcagcccggattaagtcaccgccgagcccgcccccgtgccaggcattgagttgtagtcccgcctgggagggcgctccgccgcgtctgtgtggaccgggaatgcgcggctcctcggcgtggacgccgcctcgcggcgggttgccctggcctgctgcgcccccctcgggtgtccggggtctgcgcgaccccgtctccaggcgccatggccagaggcctccagtccccgattctggcccgcgctgagtgccaggggcggcagggggcaccgttgggggttctccagtgggaggaacgtgctctgtgaggtcagcgcgccgcggcccgggtcacaatgctgccctcctcgacgcccgggcccgggcacgccacagagacctgcccggctccgcctggaccggagcgttctcccccggccagggctccggcagctgcttctagcctgggaccggtctcaaccgccgggagagcgccccggggcttggacatgagcgcccaggagcccccgcagggtcggagattccccattgaggccggagactcccgtggccttgccgccgcccccgagtcccaggacagcccggaggcggtagcgacggagcacaacccggtcaggccgcttcgtcgctgccctggatgccactgcctgacgctgctgcacgtgcccatcgacgtctacctcgccatgggcgggagcccccgggcccgcgccacgtgagtgcgcctgctccctgcggctccgcgggagctgggcgggaacgaggcccccagcgggccaccacgctgaggtcgcatgcgccgagcacgagacaatgatgcacattttaaaataaaagaatgatgcacattttaataaagcacagcacaaactgttctttccaaaaaaaa

SEQ ID NO: 78684 - DNA, 1123 bp, Homo Sapiens
ggtagtacgaggccgtgttaatcggcacgaggtgcgcacagcgaatggcggcgcggcgcgggccccgcgggggttagaggtcaccatgctgagggtcgcgtggaggacgctgagtttgattcggacccgggcagttacccaggtcctagtacccgggctgccgggcggtgggagcgccaagtttcctttcaaccagtggggcctgcagcctcgaagtctcctcctccaggccgcgcgcggatatgtcgtccggaaaccagcccagtctaggctggatgatgacccacctccttctacgctgctcaaagactaccagaatgtccctggaattgagaaggttgatgatgtcgtgaaaagactcttgtctttggaaatggccaacaagaaggagatgctaaaaatcaagcaagaacagtttatgaagaagattgttgcaaacccagaggacaccagatccctggaggctcgaattattgccttgtctgtcaagatccgcagttatgaagaacacttggagaaacatcgaaaggacaaagcccacaaacgctatctgctaatgagcattgaccagaggaaaaagatgctcaaaaacctccgtaacaccaactatgatgtctttgagaagatatgctgggggctgggaattgagtacaccttcccccctctgtattaccgaagagcccaccgccgattcgtgaccaagaaggctctgtgcattcgggttttccaggagactcaaaagctgaagaagcgaagaagagccttaaaggctgcagcagcagcccaaaaacaagcaaagcggaggaacccagacagccctgccaaagccataccaaagacactcaaagacagccaataaattctgttcaatcatttctttctgtcttgaaaatgataggagagatgatggggctcttttggcctgaagaggagaagggatttatgctttcattcagctctgagatccgagttttctgaggcagagtcctgctcaccaccagaggttcccttcttgaatggctccccaatcttaacagtccggccccgtgtggttgtccgggggcaagctttgtcccggggtggcccggtgaacgctggccccgggccgggggcaaaaagggcc

SEQ ID NO: 78685 - DNA, 927 bp, Homo Sapiens
attctctcggtcttcgtctgctccggtattgcaactgcctcgattggtcgatcctgggccagcatggcggcgcccatgtaacccggtccgtgccgcaaagcgaacggcggccgcggcgcgggccccgcgggggttagaggtcaccatgctgagggtcgcgtggaggacgctgagtttgattcggacccgggcagttacccaggtcctagtacccgggctgccgggcggtgggagcgccaagtttcctttcaaccagtggggcctgcagcctcgaagtctcctcctccaggccgcgcgcggatatgtcgtccggaaaccagcccagtctaggctggatgatgacccacctccttctacgctgctcaaagactaccagaatgtccctggaattgagaaggttgatgatgtcgtgaaaagactcttgtctttggaaatggccaacaagaaggagatgctaaaaatcaagcaagaacagtttatgaagaagattgttgcaaacccagaggacaccagatccctggaggctcgaattattgccttgtctgtcaagatccgcagttatgaagaacacttggagaaacatcgaaaggacaaagcccacaaacgctatctgctaatgagcattgaccagaggaaaaagatgctcaaaaacctccgtaacaccaactatgatgtctttgagaagatatgctgggggctgggaattgagtacaccttcccccctctgtattaccgaagagcccaccgccgattcgtgaccaagaaggctctgtgcattcgggttttccagaagactcaaaagctgaagaagcgaagaagagccttaaaggctgcagcagcagcccaaaaacaagcaagggggaaggaccccagaccgccctggcccaagcccatacaaagacccttcaagacagcccaataaattct

SEQ ID NO: 78686 - DNA, 160 bp, Homo Sapiens
ccgcctactactactactactatacggctgcgagaagacgacagaagggccttaaaggctgcagcagcagcccaaaaacaagcaaagcggaggaacccagacagccctgccaaagccataccaaagacactcaaagacagccaataaattctgttcaatg

SEQ ID NO: 78687 - DNA, 820 bp, Homo Sapiens
  misc_feature (60)..(60): n is a, c, g, or t
  misc_feature (179)..(179): n is a, c, g, or t
gagacaagccatccggaggcgtctgccatcataatatgtgtccaaagtggcagccgcccntggtgccccaggtgcccattcagtcccaccagcagagactgggccatggactcatcatctcctgtcctggggcccggccagagcatgcagtggcctgggacaaagaccgccagcacctntaccgcacacagtacctgaagggtgtcaacaggtccatgagggtgttcattgaccacggcaaccagctccacatccgcttcacccagctggatgaccggggcatctactattgctggaggcagggtgtgctagttgctggcttccggctgggtgtgacatctcatgggcactacccagcctcgttctcagatcctgagactcgctcggctgtggagctcaccctgataggctacctgctcatcacagcagtctttgtcaccattcacttctgtcgttgctgctgctacttatttcactgttgtcccagcttctccccctaggagctctcttcagctctgaagaccagttgtccttcaatgtgtttgttaaatgataccagatgtctctgggtgggtaccctgggttgggacaggtggtaggaacatgtggacaaatctgttacagcctgctccccattttcatgggcaggtctgggacctgatctgagaagtggaggggcctgaggctggtgggagattggggactgagctcaggatggaagtagggcacatgtgtttcctgacttcacatttaggtcagagaaggaaagtgtgaactcagatttatccaagtggtaaacactgatcagtgttgaatcatg

SEQ ID NO: 78688 - DNA, 722 bp, Homo Sapiens
  misc_feature (12)..(12): n is a, c, g, or t
  misc_feature (604)..(604): n is a, c, g, or t
tttttttggatntttggtctgttaaactgtttaatgaatgcataaaaaggcagaaaaatatataaagccaaaagctcataataaaattaaatcatgatacaaccaccacaggcaattaccatcaaatacattcccatgatttacaaatgtatcgcttatacagaggaagttgcaaaatcactgccagtacagacacatccagtctaattaactatcgtctattcatacaacagcaacaactgcagctcctgagaccacagaaggacacagtgagcagctggtgactgagccagggtagcctccgatcaataactgatcagagtaatgagacttcgagaggaatgcctataagaaatctcaaaaggtatttgtttgggtgcagaaacaaatgcaccctccacatttggattttctctagaagaatctgtggccaaatctcttatccaatggaggtactgagtggctggatcagttaccatgcaagctcacgatgaatgagattgaatttggttctgtgtgcacactgggctctggggagggaggacacccctgtgtgttgctgctgccttccgtgctgtctactgtatccttcatgtgtctccanatggtacacgccccatgggattacagaacacagctacagaattaggatctcatggtaacaatgaggaattaggttactgtagaactaaaatatgtttaatgaaattaaaatgcaatgg

SEQ ID NO: 78689 - DNA, 1324 bp, Homo Sapiens
  misc_feature (37)..(37): n is a, c, g, or t
  misc_feature (46)..(46): n is a, c, g, or t
  misc_feature (57)..(57): n is a, c, g, or t
  misc_feature (59)..(59): n is a, c, g, or t
  misc_feature (86)..(86): n is a, c, g, or t
  misc_feature (150)..(150): n is a, c, g, or t
  misc_feature (168)..(168): n is a, c, g, or t
  misc_feature (271)..(271): n is a, c, g, or t
  misc_feature (711)..(724): n is a, c, g, or t
ctcactttctcgttattccaatcgatatagtacatgncaggactcnttgatgacatntnacagtgagcatagttaaaagagtctcnatccccctgtctccagacacctcaaaacaactggatattagcaagattcaggcttcagcagccntaagtgcctgaaacaatntctgaacaagactgatccaatcgatgagcaatgatatcgaaaaagttctcttgaaaaacaagccaagcatctgagagagaaagcggacaataaccaggcaccnccgggctccatcgctcaggactgcaagaaatcaaactcggccgtctagcagctcccagaacccgcggctgccaccgcatccttataaacctgtcagcacgcatgagggtgtctgtgttcagggaaatgaatgactaataccattatttgagtcttatgtgaagacaacactattctaacacgagagataatatacatggtactgtttattcaactggggaaaaataaaactttgagcatttcccttggaactcgagatcagatcataactcatttgcctagaggcagcagaaatctgatcctgctactggagcttaaaataacaagtaaagaaaagtgttagaaacaaagctaaaattttaacatgattaataatagagaagttgggtttggttctgttgttatgaatgttttgtcgtggtgcttgtgttcagttatatnnnnnnnnnnnnnnatttcaaatactgcttgacaattcgaaaatgaaccaatgatgtgctgtggaatgtgatggttgtcttcatatagagtcacatggtttctctttttatgcagatatttataatcttcatcctatatcagtaggaataactataaggtgcactacaaaaagatgtatgcaaacaaacatgttttaaatcaggtcagatatctgatgaaaaatacgaactaatgttaagagcaagtagtttcaacatactccaggaactgagaaacaaaacaaagcaattgtgggttttgagctccatatactcttagcaagtaagggggcgtcttgcccctatatatcatcttcccggattccactccctgttgtgggaatcgcgcccacccccatccgtgtgttgtagccactcacggtttgcatcaagagtgttttttgtaactgcctctggacttgggacagtgagtaggatcaaaaataaataatgtacatgacggggaagggaaaaacctgttggagttgcttccagccagccacgctccgggccagcatgttggaatccagcgtggagcagatgcagtaaaaatgtggttggtttccgggttgaaa

SEQ ID NO: 78690 - DNA, 1007 bp, Homo Sapiens
gggctaaggtacgaggcctgggtgttgaattcggcacgaggggtaggcttacgaggctgtgtcgggtagaaagggtccttcctggaccgggaccctctgccacgaccatggaccgtaggaaaaagccttggacgtcacggcctcctcgttggtagatcttaaggctgaactcttccgaaagcaagaagaattcaaacaagaaaaacttctaaaagattctggagtttttggaaaaccaaaaacaactaacaagaaaccaagtatctggagcaaacagaatgtaggcgtttcaaatcgagctgagaaggatgctgaacagaagattgaagaacagaagactttagacaaagcaagggaaaaattggaagaaaaagccaaattatatgaaaaaatgactaaaggagactttatagatgaagaagtagaggatatgtaccttgtggatttcacacagaagatcatagacaagcgcaaagaaatggaggcatctggtgcccatagagattctcaaaaggcaggagaaagggacgacgatgaggaaaaccttcctgagggagagatccctcctccccaagaccccagtgaagaatgggtggattacgtggactctttggggcgttcccggcgctgtatgagaaaggatttgccagatctgctggagatggataaaaatcttcaggggagactttttattagtcctgctaatgaaaaaaccctattatctgaagatatgagaaaagaacttcagcgccagcaatgggaggaagaagaaagagaggccctgaagaggcccatggggcccgtacattatgaagacattcgggaaaatgaggcccggcaacttggtgttgggtattttgcctttgcccgagacaaagagttgagaaacaagcagatgaaaaccttagagatgctgcgtgaacagacaacagatcagagaacaaaacgagaaaacataaaggaaaagcgaaaggctatcttagaggcaagacttgccaaacttagac

SEQ ID NO: 78691 - DNA, 972 bp, Homo Sapiens
ttttttaaacaagcagctcagcgatttgggaggttggttagtacaatacagagaacacagagagaaagtataaaatggcactgaacactaatgccaatacttatctcattgtggttataacgaaggatattattatttgtgttatttttgtctggaacataaatcaatgccattaacttgaacttgaggtatatacacaatacacacacaaccttaagcaaaatacttttcataagtaacattacattttaaaatattggaaacattcgaatatctgtgctgatttgtattctgacttaatggaacaagaagaaaataacattcaactagggagggttaaactgataataaagctcttaaaattcaaaatgtcttcctctccctttgtacttaccataggctacacaatgtcctgagaggattcattatgagaaaaatgtcaatcacagcttcaataacttactttggaaaaaactaatgagaaagcaaactggaaggtgagacttcatctttgttttcaaataagtggtcttaatttttcttcttatagaaaaagtttaaatcagtttattataaatatatctaaaccattaatttttgcagctttcaggtaaagtccagcacttcatttatacaaaatctatgagaagaggtcagtagagatcatctaatcttaagtcgtgacatcatccattcaagtccttggcacaatccctcgccagttagagcacagcatgcctggatatgccactggtgatctttaatagaagttagcttcaaaaactgggagatttctgctacagtcatgcattctttaacatcttgtttattagcaaaaatcagcaatccagcttttcttaggtcctcatgcgctaactattttatagagttcttctctagttacagaaatcctctctctgtctgtactggccacaacaactattacaactctgtgttagtatagtaagtgtt

SEQ ID NO: 78692 - DNA, 1121 bp, Homo Sapiens
  misc_feature (94)..(128): n is a, c, g, or t
gagaagagaaaaaaactataatacctcatatggcgcatcgcggcctcatccgaacgaccgagcgcagcgaagtagtgagcgaggaagcggccgnnnnnnnnnnnnnnnnnnnnnnnnnnnnnnnnnnncagtcgacggtaccggacatatgcccgggaattcggccattacggccggggaaaatgggatatacagactgtaaaaatgcaacaggagagagtagcagcagcaaagaagatgacactgatgaggaaagtactggtgatgagcaggaatctgtcacagtgaaagaggagccccaggtttcccagagtgctggcaagggtgacacaagttcaggacctcacagcagggaaactctatctaccagtgattgcttagctagcaagaatgtgaaggctgagataccattgaatgagcaaaccactttaagtaaggagaattacctgttcactagaggccaaacatttgatgaaaagaccctagccagagatttaattcaggcagcacagaagcagatggctcatgcagtgagaggtaaggcaatccgtagcagccccgagcttttcagttctactgttcttcctctgcctgcagacagccccacccaccagcccctactccttccacccctgcaaaccccgaagttgtatggaagccccacccagatagggccaagctatagaggcatgatcaatgtctccacctcatctgacatggaccataactctgctgtaccaggtagccaggtatctagcaatgtaggtgatgtcatgtcattttcagtgactgtcactaccatccctgctagccaagctatgaatcccagcagccatggccagaccattcctgttcaggcgttctccgaagagaacagcatagagggcacgccttcgaaatgttactgccgcttgaaagccatgatcatgtgcaaaggctgtggcgctttctgccatgatgattgcatcggcccctccaaactgtgcgtctcctgccttgtcgttcggtaatgagactagaaagagatacactgtaaaggagggggaagggaagggttgacccagttgggttttttgcgtccttttggaatcacagaaataaacaagtaggtttcagttgtc

SEQ ID NO: 78693 - DNA, 611 bp, Homo Sapiens
  misc_feature (416)..(425): n is a, c, g, or t
caaggaagagaaggagaagatgcaagcacagaaggaagaagttcttagccacatgaatgatgtgctagagaatgagctccaatgtattatttgttcagaatacttcattgagcaaagagattgttctgaagaccgtgctctaagggcatttgaaagactgccaggtagtgcgagcctgagatggtctggaggattctctctagccgtgactccgctgctctgaaggtcaactgagaagtcttgtgggacagagacttgagttaggaagccctcagtcacttgccttccacggtggccagccctgctgccatcattggctgaagcaccaccaggattcacggcacccaactgcttcagggtacttcgtagactctgcctcactacatgtcgaaagagttatttgagttctcttctgnnnnnnnnnnaatttgttgttgttgttactgttttgatacctcggaaacacctccgttgacagttgttttggataggttgggtgtaccccatggctgcctctgaaggcagtgtctattttgagaggatggcttacctcttctttgtgaaaatactatctcatttcctggaaataaaatgtaaaacctgaaaaaaaa

SEQ ID NO: 78694 - DNA, 755 bp, Homo Sapiens
tcatacactgacgataggaatgtgaaatggatcaactactttggaagacaattgggcagtttctttcaaagtaaatgtgaagatgccatacgattcatccattccatttctaattattcaagagaaatgaaactgtatatccacaaaaaagacttgtacacaaacattcacagcagctattatttattggtaatagctaaaaactgtaaacagctcccatatccatcaagtgtatggataaacaaatttggtgtatttatacaatggaatactactcggcaataaaaagaacagttgatactctcaacaacctagatggacctcaaaataattcggtttaatgaatgaagccaaacttaagaagagtacattgtatgtacttggagaactaacttcttgcaatagatttttaagcactattaggagcatatgacttaaacagtttttaaaagtcagggagtaagtatgcttaaataaaatacaatctgtgaaacaaatctctgaattattatcacttcactggacactctaacttgaccatatttctgactttaatgtaactcactcttattccgtagtcacatgtttgcttgctcattggttcacattacatttattcagcatctgcttgagccaaggcactgtaactacatgttttttttagttacctacttttgtaaggtcctgtttctttggctacatctgattacagtaaacataggaagtttaataaaacaattttcatgaccaagaaa

SEQ ID NO: 78695 - DNA, 1528 bp, Homo Sapiens
  misc_feature (38)..(38): n is a, c, g, or t
  misc_feature (47)..(47): n is a, c, g, or t
  misc_feature (117)..(151): n is a, c, g, or t
  misc_feature (1470)..(1470): n is a, c, g, or t
ggagcatcgtaatacgaactccaactaattaagggggncgcctcagncgggcctgttttaagataaagacccgaaaaacgacgagcgcagcgagtcagatgagcgaggaagcggcgnnnnnnnnnnnnnnnnnnnnnnnnnnnnnnnnnnncagtcgacggtaccggacatatgcccgggaattcggccattacggccggggcttccagcggacggcagcgcgcgagaccaggccaggcgtcaaagcaagtcacccatccgacctaaacccctctaagaccctggagtcacgtctccctccggggatcctcgtgaggtcttgggggtcccaccgccctgcgagccgcgcccgcgccccgccagacccggaactgcgtcgctagaacgtcgggacctggttccctctttaatcacacccccgggggcgcttcgtgtgaggttccacgggggaaggcgagaggcgcaggctgccacacacgcactgtttggaagaggggaagggctgcacttcctgctttcatccagaccaagttcggatcaagtgggagttcttcaaagagagagtttgcattgccccccctgcaccacctcaccaagatggctactttgggacacacattccccttctatgctggccccaagccaaccttcccgatggacaccactttggccagcatcatcatgatctttctgactgcactggccacgttcatcgtcatcctgcctggcattcggggaaagacgaggctgttctggctgcttcgggtggtgaccagcttattcatcggggctgcaatcctggggacccccgtgcagcagctgaatgagaccatcaattacaacgaggagttcacctggcgcctgggtgagaactatgctgaggagtatgcaaaggctctggagaaggggctgccagaccctgtgttgtacctagctgagaagttcactccaagaagcccatgtggcctataacgccagtaccgcctggcgggacactacacctcagccatgctatgggtggcattcctctgctggctgctggccaatgtgatgctctccatgcctgtgctggtatatggtggctacatgctattggccacgggcatcttccagctgttggctctgctctttttctccatggccacatcactcacctcaccctgtcccctgcacctgggcgcttctgtgctgcatactcaccatgggcctgccttttggatcacattgaccacaggactgctgtgtgtgctgctgggcctggctatggcggtggcccacaggatgcagcctcacaggctgaaggctttcttcaaccagagtgtggatgaagaccccatgctggagtggagtcctgaggaaggtggactcctgagcccccgctaccggtccatggctgacagtcccaagtcccaggacattcccctgtcagaggcttcctccaccaaggcatactgtaaggaggcacacccncaaagatcctgattgtgctttataacattccttccccgtggaggccacctggacttcc

SEQ ID NO: 78696 - DNA, 663 bp, Homo Sapiens
ctggctgggggcgcagcgaggcccaggcccgaggggtgaggcccaggccactccggagcgcgcgctgttcccgcgaagcgagtcgccgtctcgtacagcagcgtgcagggtcaaagacagccggccccccatgtcagtggtctaggatggccagtgaaggcaccaacatcccaagtcctgtggtgcgccagattgacaagcagtttctgatttgcagtatatgcctggaacggtacaagaatcccaaggttctcccctgtctgcacactttctgcgagaggtgcctgcagaactacattcctgcccacagtttaaccctctcctgcccagtgtgccgccagacctccatcctgcccgagaaaggggtggccgcgctccagaacaatttcttcatcacaaacctgatggacgtgctgcagcgaactccaggcagcaacgctgaggagtcttccatcctggagacagtcactgctgtggctgcgggaaagcctctctcttgcccaaaccacgatgggaatgtaagtggctgggatggcagatactgcccgggagcatgactactgtggccttggggaggctttgggtacatcagagattacagattgaaacagaactccatgtggaaaaatcagtaattaaaaaagatttttaccagccctcaga

SEQ ID NO: 78697 - DNA, 717 bp, Homo Sapiens
  misc_feature (35)..(35): n is a, c, g, or t
ccatggaggacagccatcaaaacttgtgaagaggngacctggaaggaaacctaaagtagaagttaataccaatagtggtgaaattatacacaagaaaaggggtagaaagcccaaaaagctacagtatgcaaagccagaagatttagagcaaaataatgtgcatcccatcagagatgaagtacttccttcttcaacatgcaattttctttctgaaactaataatgtaaaggaagatttgttacagaaaaagaatcgtggaggtaggaagcccaaaaggaagatgaagacacaaaaattagatgcagatctcctagtccctgcaagtgtcaaagtgttaaggagaagtaaccgaaaaaagatagatgatcctatagatgaggaagaagagtttgaagaactcaaaggctctgaaccccacatgagaactagaaatcaaggtcgaaggacagctttctataatgaggatgactctgaagaggagcaaaggcagctgttgttcgaagacacctctttaacttttggaacttctagtagaggacgagtccgaaagttgactgaaaaagcaaaagctaatttaattggttggtaacttgtaccaaaatattttacttcaaaatctataaagcaggtacagttaaggaataagtagaactaaggcttctgcttccttgctgctgtggtggagtagggaatgttatgatttgatttgcaaaaaaa

SEQ ID NO: 78698 - DNA, 835 bp, Homo Sapiens
  misc_feature (17)..(17): n is a, c, g, or t
  misc_feature (38)..(38): n is a, c, g, or t
  misc_feature (132)..(132): n is a, c, g, or t
  misc_feature (196)..(196): n is a, c, g, or t
aaaggagatgagtgtgnctatgcaaatgggatccggtngatgagcatgacgcacacaggagagccaggattcatgctctacatccccatagagtacgccctgcatgtatacaatgaagtgatgagtttgccnagaaatacggaatccggaatgctgggtattacgctcttcgcagtctccgaattgagaagttttntgccttctggggtcaggatataaataacctcaccacgcccctggaatgtggacgagagtctcgggtgaaattagagaagggcatggatttcattggtcgcgacgccctcctgcagcagaagcagaatggagtgtataaacgcctcaccatgttcatcctggacgaccatgattcagacctagacctttggccttggtggggagagcccatttaccggaatgggcagtatgttggcaagaccaccagcagtgcctacagctacagcctggagcgccacgtttgcctgggctttgtgcacaatttttctgaggacacgggggaagagcaagtggtgacagcagatttcatcaaccggggagagtatgagattgacatcgcgggataccgcttccaggccaaggccaagctctaccctgtcgcctccctcttcacccagaagcgccgaaaggatgacatggagctgagtgacttacatgggaagtgatgccaccagggcagcctcacctcctccccatcatcttgtcctagagtgggcgtcaccttggagcttctcttccttccgcctctgttcctcttctggagcctttgcctcccatctcttatctccttgatataattttgaacttgacctactttaaa

SEQ ID NO: 78699 - DNA, 669 bp, Homo Sapiens
  misc_feature (594)..(612): n is a, c, g, or t
  misc_feature (648)..(648): n is a, c, g, or t
cagaaaatcaacacatttttaaatgactaacttctaaaagccccaacacatgacgccatctgaagacccgcaacggagtgggggtggcggccgccccaccctccccacccggggaagccatcacagctcatctgcccgcggctgcgtgaggacagcaggggtttttcttcagagtctattttttcagcgacaaggacccaggtcttcctgctgctgccagggagagcagggacagtgccgcgtgcgagatgagctcgaacactgcccgccttactgccgcctaccccgcccgccacgccgccgtcgatgccagcgctgtccccacgggtaccaggaagtgcagagccgcacaggagctgccccggagctgaggggacggtcttcggctcctctgcaccccgtgattctgcccacgctcctccaccacgaggcactgacctgcgtcgggtggtgaccgtggctggcggtcacgccctcagcccctccgggcacacgtgccgcctgaccgggcgacccttttcagttcggcaaacgtcgctcccttcattttgggactgaggctgcagcattggaacaaaagagcattatttcaannnnnnnnnnnnnnnnnnngttcgttcatttaaacgtatatttagaactgcactntgtccacaaccttcccttctc

SEQ ID NO: 78700 - DNA, 2276 bp, Homo Sapiens
  misc_feature (38)..(38): n is a, c, g, or t
  misc_feature (57)..(57): n is a, c, g, or t
  misc_feature (64)..(64): n is a, c, g, or t
  misc_feature (71)..(71): n is a, c, g, or t
  misc_feature (79)..(79): n is a, c, g, or t
  misc_feature (100)..(100): n is a, c, g, or t
  misc_feature (109)..(163): n is a, c, g, or t
  misc_feature (166)..(166): n is a, c, g, or t
  misc_feature (178)..(179): n is a, c, g, or t
  misc_feature (187)..(189): n is a, c, g, or t
  misc_feature (197)..(197): n is a, c, g, or t
  misc_feature (220)..(221): n is a, c, g, or t
  misc_feature (241)..(242): n is a, c, g, or t
  misc_feature (312)..(312): n is a, c, g, or t
  misc_feature (314)..(314): n is a, c, g, or t
  misc_feature (329)..(329): n is a, c, g, or t
  misc_feature (359)..(359): n is a, c, g, or t
  misc_feature (902)..(925): n is a, c, g, or t
  misc_feature (1258)..(1288): n is a, c, g, or t
aagcggcagtgacgcacgacaatatgtgagtagctcantcattaggcacccccagcnttacacntatgctnccggctcngtatttgtttgggaatttgancggatacannnnnnnnnnnnnnnnnnnnnnnnnnnnnnnnnnnnnnnnnnnnnnnnnnnnnnnttntagggaaattgnncctcgagnnnccaggaantcgggacgagggtgtaccatctnngatgttggagcgccgcgctnngtagcgcgggaggccgggagacgctgcagacccgcgacccggagcagctcggagcgtgggatatagctcntncaagtctgcaataanaaatgcctccaaccaaaactacattgcaanaaatgggaaaaaaacagaatggaaagagtaaaaaagttgaagaggcagagcctgaagaatttgtcgtggaaaaagtactagatcgacgtgtagtgaatgggaaagtggaatatttcctgaagtggaagggatttacagatgctgacaatacttgggaacctgaagaaaatttagattgtccagaattgattgaagcgtttcttaactctcagaaagctggcaaagaaaaagatggtacaaaaagaaaatctttatctgacagtgaatctgatgacagcaaatcaaagaagaaaagagatgctgctgacaaaccaagaggatttgccagaggtcttgatcctgaaagaataattggtgccacagacagcagtggagaattgatgtttctcatgaaatggaaagattcagatgaggcagacttggtgctggcgaaagaggcaaatatgaagtgtcctcaaattgtaattgctttttatgaagagagactaacttggcattcttgtccagaagatgaagctcaataattgttcacattgttctttnnnnnnnnnnnnnnnnnnnnnnnnaaaattgggtcttagattttgatttactagtgtgacaaaataactacatcctaatgaaaatcaagtttgatatgtttgttttgaaagtagcgttggaagagttgttgggggttttttgcatccatagcactggttactttgaacaaataaataaaagctttctgtagttgcttcctttatcagaaaagaacatttgataccatggtatatcatttcctcttcattaaagaacagcttttctaaatgttgggggaaatgtccatagtcattactcagtcaaaacttgtgttctcatgagcctaaggaccattctagatttattacgtgtttttnnnnnnnnnnnnnnnnnnnnnnnnnnnnnnnatccataaaatgcatatgtaaatttttaagggtattttaagcattcacccaaacaaaaaaatcacaggtaaacccatgtttctgagatgccattattccaagcaaaataagagataatcccttcaagttaaattgaaaattttcctgaaaccatacatttcaagtgaaataagtaattctagataggacaatttaaattggataattttaaagtgtctataattgcagtggtttatttgcaaaattcctaaaaggaaaaattttatcactgccatcacagcaggtttcctcatccagatgaggaaactagacaaatgctagtgtgttttaactagctaaacaaaactaagttaaatgaacatttaaaagtttccctagcgggccattccttagcaaaatgttggaatccctgttgctacattgactaaaaggtcatgatgaatggaatatgtaagacttggctcatagaaacctaatcagatggttagaggtgttggcagtttaggacctgctgtcataaatgtgtgaacaaccttttgtaacctaacctattgacctgcatgttttttctttaccccaattcattacatggaggctcaatcttgagtttgctttactggttcagcaaaagccaggaagaacaactttgtagtaatcaaaatgttatccaactgtatattgtttactttattgtaaatactggtgaacagtggttaataaatagttttatattcctttatgcaattattagactttttttctttatttgatatgcctttacagtagaaatagaaatgcccacactcattggattatctttgtttataagttagatgataccagtaaggcattacagtacatatcctagatcttttgagcttacgagttttaaacttgaatatgtatttccacaggaatgtttccacagttgggaaataaaagtttcatgtgatgcctagggtcaattgtctcattaaaatgaggtttt

SEQ ID NO: 78701 - DNA, 718 bp, Homo Sapiens
  misc_feature (65)..(110): n is a, c, g, or t
  misc_feature (639)..(662): n is a, c, g, or t
gctgcagacccgcgacccggagcagctcggaggcggtgaataatagctcttcaagtctgcaatannnnnnnnnnnnnnnnnnnnnnnnnnnnnnnnnnnnnnnnnnnnnncagaatggaaagagtaaaaaagttgaagaggcagagcctgaagaatttgtcgtggaaaaagtactagatcgacgtgtagtgaatgggaaagtggaatatttcctgaagtggaagggatttacagatgctgacaatacttgggaacctgaagaaaatttagattgtccagaattgattgaagcgtttcttaactctcagaaagctggcaaagaaaaagatggtacaaaaagaaaatctttatctgacagtgaatctgatgacagcaaatcaaagaagaaaagagatgctgctgacaaaccaagaggatttgccagaggtcttgatcctgaaagaataattggtgccacagacagcagtggagaattgatgtttctcatgaaatggaaagattcagatgaggcagacttggtgctggcgaaagaggcaaatatgaagtgtcctcaaattgtaattgctttttatgaagagagactaacttggcattcttgtccagaagatgaagctcaataattgttcacattgttctttnnnnnnnnnnnnnnnnnnnnnnnnaaaattgggtcttagattttgatttactagtgtgacaaaataactacatcctaatg

SEQ ID NO: 78702 - DNA, 158 bp, Homo Sapiens
gggccccttcggatgtggcttgagctgtaggcgcggagggccggagacgctgcagacccgcgacccggagcagctcggaggcggtgaataatagctcttcaagtctgcaataaaaaatggcctccaacaaaactacattgcaaaaaacagaaaagcgg

SEQ ID NO: 78703 - DNA, 480 bp, Homo Sapiens
  misc_feature (75)..(143): n is a, c, g, or t
agggccggagacgctgcagacccgcgacccggagcagctcggaggcggtgaataatagctcttcaagtctgcaannnnnnnnnnnnnnnnnnnnnnnnnnnnnnnnnnnnnnnnnnnnnnnnnnnnnnnnnnnnnnnnnnnnngttgaagaggcagagcctgaagaatttgtcgtggaaaaagtactagatcgacgtgtagtgaatgggaaagtggaatatttcctgaagtggaagggatttacagatgctgacaatacttgggaacctgaagaaaatttagattgtccagaattgattgaagcgtttcttaactctcagaaagctggcaaagaaaaagatggtacaaaaagaaaatctttatctgacagtgaatctgatgacagcaaatcaaagaaggaaaagagatgctgctgacaaaccaagaggatttgccagaggtcttgatcctgaaagaataattggtgccacagacagcagt

SEQ ID NO: 78704 - DNA, 1581 bp, Homo Sapiens
cagtcgacggtaccggacatatgcccgggaattcggccattacggccgggcatcggtggctctaacgccaacagctccttctagaacaggctctgtgcagacacctccagatttggaaagttctgaggaagttgcatgcagctgaaggagccccagaagttgtaggacctaataatctgaagtggaagaagggctatggaaagagctcccatcaagtgccagctgctgaggaaatgcataaaaatgtggagctaagatgagttgcagcaagtcatacgggagattaaagagtctatagtctggggcaaatcagacgggaaattgtaagtggacttttggcagcagtatcttcaagtaaagcgtctaattctaagcaagattatcattaaacagaaattataggttggcatggatcctattagctgtgtaatactggaattatcaatgatatgcactggtggaggtgttatttgtgctttagaagatacttgctgttgagctgggctactgtatacagtgtacaatgtgtatttcttcaaccatatattttaaaaagacgtacatagaaacttaggcactttgctatttcttttctaaactatcaaaaactctagcagtttgaaaagcctaatatttatttgtatgtcaatatttttcatttgattccctattagaattaattttaaaacttgaagacttccagacttatccaacttataaataacatatttcttcagactaacatcttaaaacactgacctctatgaggtatttactgtgcaataactgattcatttttttcagagcttgaagcatccaatgatttttccctccactgctgttaattaatgtcacttccaagaagaaaaactgttctgttgtaaaaaatataattgctcttaattcttggggaggttactaatagcagtaggatagaattttatgaggttacctacaactacttaatgtacttacactgtaagccttgttgctttacccaagacaaatgtaattttatcattgcttatgtagtatttttctttgggaaatgtgccttatgttaaacactatgtacttttactttttgcattgtccagacttctttattagatggagatgtttctttttctgtcttctagactaaatagagtatcatccaaataatggggcctatgacttgaatgaatagaaatgaataagctggtgtttgttttttcaaaatggaagtaatttagatttgttctcctcatacataaaatgattttagttcagttttaaccagtgaaaactttgtttttatgaaaaaaaaggaaaatggtttcccatttggttttatatgtgttaaataaatgtgtaaagtaaccaccaaatgttattagaatttttcttctagcatttataattttttcaactcctattgtgtttctttgtgtgtgatattttaatcaaaagtggttgagttgttaacagtgttctttgaaagaatctctaaaaggcttataaatgtttgaaatatcacacaaaggctgatttctaaaatatatatatattaaaacaataaagtatttattttgcctaaaa

SEQ ID NO: 78705 - DNA, 693 bp, Homo Sapiens
ttttcctcaattgaggaagctgatgttattaattcacaggctaaattcggtaaacaccactgcccctaccacgggtaatgagaggtcactcacttgaactttgccattccaggcattctcagagtggcgaggggccacctgcaagtggagcacaacttggtgctcttactgtgtccttcagaaagaataggtgtacagaaaggaaatggcaatcttatgtgtgctgaacaaagttttcaacaattcctagttgtgccttttaaaccatgcaatattcaggatagtttgaatcaaagaagtaagaagctgctatttgggtaacttatttctctgtgggaaggggcagggagagtcaccaaacaatctacctccaactctcttctcttttgtctagagacattacaaagtgcacttgaggctgcccccaacctctgacatttgttcttgcatgtgatgatagaaagtcttcagatggacttatacattctgtgctttggaagcacaagaagaacaaaatatgtgtatatttcctttaatgtttatacaaaagtttatatggagcagtattgttatgtttgtatgaatttgcaaaaattaaagtgtacaaagagattttgattttgcatatataaaataaatcattttattgattttcacaagttcattaatgctggataaatttctacttaaaaa

SEQ ID NO: 78706 - DNA, 939 bp, Homo Sapiens
  misc_feature (54)..(54): n is a, c, g, or t
  misc_feature (60)..(61): n is a, c, g, or t
  misc_feature (83)..(83): n is a, c, g, or t
  misc_feature (87)..(87): n is a, c, g, or t
  misc_feature (95)..(95): n is a, c, g, or t
  misc_feature (131)..(131): n is a, c, g, or t
  misc_feature (176)..(176): n is a, c, g, or t
  misc_feature (197)..(197): n is a, c, g, or t
  misc_feature (245)..(245): n is a, c, g, or t
  misc_feature (258)..(258): n is a, c, g, or t
  misc_feature (261)..(261): n is a, c, g, or t
ttgactgctgacggcccccgacactgggagctgttgcgcgcctgcgcggtgccnggagcnncagatgcccagaccgctgctcnggcntgcgcgtntggactctcatgtacgcagaccgccctgcaggcacntacagcggaggaacaaacgcaagctgcgacggcccctgcgcctgntggggacccacccgtgtgttnttggacgagccgaccacaggcatggaccccagcgcgcggcgcttcctntggaacagccttntgnccgtggtgcgggagggccgttcagtgatgctcacctcccatagcatggaggagtgtgaagcgctctgctcgcgcctagccatcatggtgaatgggcggttccgctgcctgggcagcccgcaacatctcaagggcagattcgcggcgggtcacacactgaccctgcgggtgcccgccgcaaggtcccagccggcagcggccttcgtggcggccgagttccctggggcggagctgcgcgaggcacatggaggccgcctgcgcttccagctgccgccgggagggcgctgcgccctggcgcgcgtctttggagagctggcggtgcacggcgcagagcacggcgtggaggacttttccgtgagccagacgatgctggaggaggtattcttgtacttctccaaggaccaggggaaggacgaggacaccgaagagcagaaggaggcaggagtgggagtggaccccgcgccaggcctgcagcaccccaaacgcgtcagccagttcctcgatgaccctagcactgccgagactgtgctctgagcctccctcccctgcggggccgcggggaggccctgggaatgagcaagggcaaggtagagtgcctaggagccctggactcaggctggcagaggggctggtgccctggagaaaataaagagaaggctggagagaagccgtgctggtg

SEQ ID NO: 78707 - DNA, 1684 bp, Homo Sapiens
taggctagtacgagctggtgttaatcggcacgagggcgggctggcgatagtcgggttgcgagcggccggggcggggcggcagggccgctgcaggacgagaccctgggtgtggcgtccgtgccctcgcagtggagggccgtccaggcatccgcggggagacgaaaagttgccagacggccagcattgccactgccagtgcatccgcccaggccaggaatcatgtggacgcccaggtgcagacggaggcccccgtgcctgtcagcgtgcagcccccgtcccagtacgacatacccaggctcgcagcctttcttcggagagtggaggccatggtcatccgagagctgaacaagaattggcagagccacgcgtttgatggcttcgaggtgaactggaccgagcagcagcagatggtgtcttgtctgtataccctgggctacccgccagcccaagcgcagggtctgcatgtgaccagcatctcctggaactccactggctctgtggtggcctgtgcctacggccggctggaccatggggactggagcacgcttaagtccttcgtgtgtgcctggaacctggaccggcgagacctgcgtccccagcaaccgtcggccgtggtggaggtccccagcgctgtcctgtgtctggccttccaccccacgcagccctcccacgtcgcaggagggctgtacagtggtgaggtgttggtgtgggacctgagccgtcttgaggacccgctgctgtggcgcacaggcctgacggatgacacccacacagaccctgtgtcccaggtggtgtggctgcccgagcctgggcacagccaccgcttccaggtgctgagtgtggccactgacgggaaggtgctactctggcagggcatcggggtaggccagctgcagctcacagagggcttcgccctggtcatgcagcagctgccacggagcaccaagctcaagaagcatccccgcggggagaccgaggtgggcgccacggcagtggccttctccagctttgaccctaggctgttcattctgggcacggaaggcggcttcccgctcaagtgttccctggcagctggagaggcagccctcacgcggatgcccagctccgtgcccctgcgggccccagcacagtttaccttctccccccacggcggtcccatctactctgtgagctgttcccccttccacaggaatctcttcctgagcgctgggactgacgggcatgtccacctgtactccatgctgcaggcccctcccttgacttcgctgcagctctccctcaagtatctgtttgctgtgcgctggtccccagtgcggcccttggtttttgcagctgcctctgggaaaggtgacgtgcagctgtttgatctccagaaaagctcccagaaacccacagttttgatcaagcaaacccaggatgaaagccctgtctactgtctggagttcaacagccagcagactcagctcttggctgcgggcgatgcccagggcacagtgaaggtgtggcagctgagcacagagttcacggaacaagggccccgggaagctgaggacctggactgcctggcagcagaggtggcggcctgaggggtcccgggaggcgggtgcaagccttcgctgtgccgagccttgtgtttctgacgcaagccaaatgaagaaaagcaaagctttgggggaagtcaaaa

SEQ ID NO: 78708 - DNA, 1032 bp, Homo Sapiens
  misc_feature (757)..(757): n is a, c, g, or t
gaccctagtgctaggtacgaggcctgggtgtctgaattcggcacgagggagcggcccggggcctggggcggcaggccgctgcaggacgagaccctgggtgtggcgtccgtgccctcgcagtggagggccgtccagggcatccgcggggagacgaaaagttgccagacggccagcattgccactgccagtgcatccgcccaggccaggaatcatgtggacgcccaggtgcagacggaggcccccgtgcctgtcagcgtgcagcccccgtcccagtacgacatacccaggctcgcagcctttcttcggagagtggaggccatggtcatccgagagctgaacaagaattggcagagccacgcgtttgatggcttcgaggtgaactggaccgagcagcagcagatggtgtcttgtctgtataccctgggctacccgccagcccaagcgcagggtctgcatgtgaccagcatctcctggaactccactggctctgtggtggcctgtgcctacggccggctggaccatggggactggagcacgcttaagtccttcgtgtgtgcctggaacctggaccggcgagacctgcgtccccagcaaccgtcggccgtggttggaggtccccagcgctgtcctgtgtctggccttccacccatgcagcctcccacgtcgccaggagggctgtcagtggtgaggtgttggtgtgggacctgagccgtcttgaggacccgctgctgtggcgcacaggcctgacgggatgacnaccacacagaacctgtgtccaggtggttgtggctgccgagctggggcgcaagccaacgcttccaggtgctgagtgtgggcctgacgggaagtggctaccctggcggctcggggtagcggctggggtccagaagggtcgcctgtctgcggtgcccggcccacttcaaagatcccggggacccgggggcccgcgcgggcccactggccggggtttggcggaggggccccgttcgcgggagggcgcctgggtctcgccgggcgaattccccgggttgt

SEQ ID NO: 78709 - DNA, 1042 bp, Homo Sapiens
taaaacttatggctaggtacgaggcctgggtggcgaattcggcacgagggcgctggtgttgcggcgctggcgacagtcggggttgcgagcggcccggggccggggcggccaggccgctgcaggacgagaccctgggtgtggcgtccgtgccctcgcagtggagggccgtccagggcatccgcggggagacgaaaagttgccagacggccagcattgccactgccagtgcatccgcccaggccaggaatcatgtggacgcccaggtgcagacggaggcccccgtgcctgtcagcgtgcagcccccgtcccagtacgacatacccaggctcgcagcctttcttcggagagtggaggccatggtcatccgagagctgaacaagaattggcagagccacgcgtttgatggcttcgaggtgaactggaccgagcagcagcagatggtgtcttgtctgtataccctgggctacccgccagcccaagcgcagggtctgcatgtgaccagcatctcctggaactccactggctctgtggtggcctgtgcctacggccggctggaccatggggactggagcacgcttaagtccttcgtgtgtgcctggaacctggaccggcgagacctgcgtccccagcaaccgtcggccgtggtggaggtccccagcgctgtcctgtgtctggccttccaccccacgcagccctcccacgtcgcaggagggctgtacagtggtgaggtgttggtgttgggacctgagccgtcttgaggacccgctgctgtggcgcacaggcctgacggatgacacccaaacagaccctgtgtcccaggtgggtggttggtgccgagcctgggcacagcaccgttccaggtggctggtgtgtgcactgacgggaaaggtgctactctgggcagggctccgcgtaagccagttggagtccaagaggctttccggtctgctgaccgtgcacggagaccactctaaaggtccccgcgagaccactgggcccaccagggactccacctgaccacgggcatcgcggaaggtcccca

SEQ ID NO: 78710 - DNA, 1000 bp, Homo Sapiens
gtcggcacgagggcgcgcagccggggccactcagccaggcgggaagcgctggtgttgcggcgctggcgacagtcggggttgcgagcggcccggggccggggcggccaggccgctgcaggacgagaccctgggtgtggcgtccgtgccctcgcagtggagggccgtccagggcatccgcggggagacgaaaagttgccagacggccagcattgccactgccagtgcatccgcccaggccaggaatcatgtggacgcccaggtgcagacggaggcccccgtgcctgtcagcgtgcagcccccgtcccagtacgacatacccaggctcgcagcctttcttcggagagtggaggccatggtcatccgagagctgaacaagaattggcagagccacgcgtttgatggcttcgaggtgaactggaccgagcagcagcagatggtgtcttgtctgtataccctgggctacccgccagcccaagcgcagggtctgcatgtgaccagcatctcctggaactccactggctctgtggtggcctgtgcctacggccggctggaccatggggactggagcacgcttaagtccttcgtgtgtgcctggaacctggaccggcgagacctgcgtccccagcaaccgtcggccgtggtggaggtccccagcgctgtcctgtgtctggccttccaccccacgcagccctcccacgtcgcaggagggctgtacagtggtgaggtgttggtgtgggacctgagccgtcttgaggacccgctgctgtggcgcacaggcctgacggatgacaccacacagaacctgtgtccaggtggtgtggttgccgagctggcacggcacgttcccagtgcctggtgtggccctgcggagggttctccggcggtcgggtgccgtgggtccagaggttcccctgttttatgccggcccacccaaactccggggcccggggcccgggcctcccctgccccggcttggcgagggccccctttccgggggcgc

SEQ ID NO: 78711 - DNA, 1319 bp, Homo Sapiens
  misc_feature (914)..(914): n is a, c, g, or t
  misc_feature (932)..(932): n is a, c, g, or t
  misc_feature (982)..(982): n is a, c, g, or t
ctggtaccggtccggaattcccgggatagcgctggtgttgcggcgctggcgacagtcggggttgcgagcggcccggggccggggcggccagggccgctgcaggacgagaccctgggtgtggcgtccgtgccctcgcagtggagggccgtccagggcatccgcggggagacgaaaagttgccagacggccagcattgccactgccagtgcatccgcccaggccaggaatcatgtggacgcccaggtgcagacggaggcccccgtgcctgtcagcgtgcagcccccgtcccagtacgacatacccaggctcgcagcctttcttcggagagtggaggccatggtcatccgagagctgaacaagaattggcagagccacgcgtttgatggcttcgaggtgaactggaccgagcagcagcagatggtgtcttgtctgtataccctgggctacccgccagcccaagcgcagggtctgcatgtgaccagcatctcctggaactccactggctctgtggtggcctgtgcctacggccggctggaccatggggactggagcacgcttaagtccttcgtgtgtgcctggaacctggaccggcgagacctgcgtccccagcaaccgtcggccgtggtggaggtccccagcgctgtcctgtgtctggccttccaccccacgcagccctcccacgtcgcaggagggctgtacagtggtgaggtgttggtgtgggacctgaacccgtcttgaggacccgctgctgtggcgcacaggcctgacggatgacacccacacagaccctgtgtcccaggtggtgtgggctgcccgaggcctgggcacagccaccgcttccaggtgctgagtgtggccactgacgggaaggtgctactctggcaggcaatcggggtaggccagctgcgccttcncagagggcttcgccctgntcatgcagcagctgccacggagcaccaagctcaagaagcatccccgcggnggaaccgaggtggccgccacggcaggggcttcctcagctttgaccccaggctggtcattctgggcaccgaaagcggcttcccgctccagtgttcctggcaactggagaagcgccctcacccggatgcccagctccggggccctgcgggccccagcccatttttacttctcccccccagggggtcccttttactctgtggagctggtcccccctccacaggaatttctttcctgaaacctgggactggacggcttgttccaccggtaactccaggggggggaggcccctcccttggatttcccgggcacctccccctcaaggatttcggttggccttg

SEQ ID NO: 78712 - DNA, 767 bp, Homo Sapiens
  misc_feature (20)..(20): n is a, c, g, or t
  misc_feature (121)..(121): n is a, c, g, or t
  misc_feature (150)..(150): n is a, c, g, or t
  misc_feature (556)..(589): n is a, c, g, or t
acacacccactaagctatanccaaaaagtcagacagtacctagtgatggaggagttatgggaaaaccttcacatattgctgatgagaatataaaatagaacagccacattgtgaaattgtntggcagtttcttaaaaagctaaatagatntgccatacaactcagcgattctactaagtatctacccaagagaaatgaaaacatatattcatgcaaacacttgtatagaaatgttcatagcaacatcattcataatagccaaaaactggagacaacccaaatgttcatcaactgatgaatgaataaacaaaatgtagtttatctatatacaatggactattattcagccataaaaaggaatgaagtactgacacatgctacaacatgggtgaactttgaaaacattatgctaagtgaaagaagccagtcacaaaaaactgtatagtgtatgatttcatttatatgaaatgaccaggaaaggaaaatttttagagacagcagatcagtagttgtctgaaactgaaggtaacaagtgaggattgactgcaaattctcnnnnnnnnnnnnnnnnnnnnnnnnnnnnnnnnnnactgcacattctcacaagtaattttctgggtgttagaaatgttctaaaactggattgtgacagtggttgcacaaagctatcaatttactaaaaattattcactgtacacttataatgggtgaagtcttatggtacataaaatatatttcaataaaactaagaaaaagtctcatgaaaa

SEQ ID NO: 78713 - DNA, 1403 bp, Homo Sapiens
ggggatacagttccggtgggagaacgcggctgcgaggttttcggctttggctcctgatatgcagcgacagaattttcggcccccaactcctccttaccctggtccgggtggaggaggttggggtagcggaagcagcttccggggaaccccgggcgggggcggaccacggccgccctcccctcgagacgggtacgggagtccgcaccacacgccgccgtacgggccccggtctaggccgtacgggagcagtcactctccgcgacacggcggcagcttcccggggggccggttcgggtctccgtcccctggcggctaccctggctcctactccaggtcccccgcggggtcccagcagcaattcggctactccccagggcagcagcagacccacccccagggttctccaaggacatctacaccatttggatcagggcgtgttagagaaaaaagaatgtctaatgagttggaaaattatttcaagccttcaatgcttgaagatccttgggctggcctagaaccagtatctgtagtggatataagccaacaatacagcaatactcaaacattcacaggcaaaaaaggaagatacttttgttaacatttctgaaattcaactggaagcttcatgtgtcaggaacatcttggacaaaactttaagttgtgttgatataaatttacccaaagatgatgactttgattggataattagtaaggtctttttgttatttttcatcgtatcaggtattgttgatattagagaaaaaagtaggataacttgcaacatttagctctggaagtacctaccacattttagagatttaccgtttccatatatttaacattcctggttacataatggacatttgtcttttaatgttttttcaatgttttaaaataaaacattttgtcttccaaaaaccggcccgcgccacctgtgattagccccttgccggcccggccccggccccctccaaaaaccttttcttagacaccttctgttgtgggggccgccgggtgccccccaagggttaacgtggaaaccccggggcccaataaccgcgccctttccctaaaggagaaatcccctgcgcccctggacattaggggcgcttgggacatttctttccaccaataacaaataaaccggccccgcgggggggcacccccgaaccccgctgtttttgaaacccatatttcacacaaagggcaagcttctggcgaggcgccctatacctggggactccgagtccacccggggaaatcgccagccgcgaggcttctgataataccaacattgacagcccccggggcgggtggcgcgagtccttttaccaggcacgcggggtgggaaacccctcttcacacacgcgttcctttgcgccccacgccggcgaagccccacc

SEQ ID NO: 78714 - DNA, 1597 bp, Homo Sapiens
  misc_feature (79)..(113): n is a, c, g, or t
  misc_feature (750)..(750): n is a, c, g, or t
  misc_feature (1281)..(1331): n is a, c, g, or t
atgataactcactatagggcctagctcttcgcagccgaacgacgagcgcagcgaagtagtgagcgaggaagcggccggnnnnnnnnnnnnnnnnnnnnnnnnnnnnnnnnnnncagtcgacggtaccggacatatgcccgggaattcggccattacggccgggggtgacttacaccacatgtaatgacgctatgactaattctgctcccaagcccttgtatcttgggcttcattttaggctcatgtgtcagatctgcatgcattgcttgcatttttctggtatctgaatgttggttccttgttccaggaattcaacattaatttccaaaagtatcatgggacttgtgacaatacaagacatgaatctatgtataaaatttatcggcctttctcatttacctgctctagtattattgtattgtgtgtgcgtgcgtgtgtgatgtcaggctgccacgtaaaacttcagagaaaaatcttaaaagcagaccatccttttttgcatgctctattctaagtagaatgttcaatgtaactgactaaaattgcatgttaaagatatttaggtataccacagtgtctctcttttattcctcattcggttctcagtttcctgtatatttgcttactgtgccgttttagtggttttaggataaaaatgcactggtgaagcaaatgtagtgccaacagaaggtgattttccagttgtaaatgtcatgcagcatttgaagggactgtgttttcttaaaaaanaatcacagttacttctaaaccagatttcatttcttttattgttttatgtgccaaaccacgaagtgcattgggcttcaatctctgaacactgtagacccattagaagactgttccgattgttacaaattgtagtgcctgaaaacactcttaagctgattgtcttaacaaaatgaaagttctccaaagacaaaacagaacaattattataacaaaataattatggttgaaatgtctgtggttccttggaaatgctgcgctctttgtgtttttccatcattagtgcagttggaatgaatgtgtataggtcagaggtcttcgtgttcacattttaaaattaggtaaatgacctcatctttcaagcttgaattcatttttaattttaattttattttatacaatgtgtagacagttccctgttctctgcatttagaagtatacacaatataaatctgttaattctgtaagtaatttttataattatgatgtaactctatcttatccttaaaacatttaaaataaaccctttatgtnnnnnnnnnnnnnnnnnnnnnnnnnnnnnnnnnnnnnnnnnnnnnnnnnnngagaagagagatagaaagcaaaaagacgcagaggggggcgagcacaaagatgactacgcaggagacgagacaaataatgagcaagacggacaatcagtgacaaagaagggccccaataagacgggctgaactaaataatacacacgacacagcgcgacggcaaatagacacaacgaggagcagcagcgaacaaatccgccctcgcggaaaacttcaggaaaagaacccaccaaggggggaaggaaacacagcgggccaaaccacag

SEQ ID NO: 78715 - DNA, 1391 bp, Homo Sapiens
  misc_feature (1313)..(1347): n is a, c, g, or t
tttgggaataacattttttgtactgcaactttataaaggtttgcctagatcaagaagcagcgcacacacacacctcatctatgcaaactaaaaatgtatataaacagcacaatactgtgatactggatcatgatacattacctgtacacataactactactgttattaataaacctttgggacactcagttttatgcccaataagacatcattaagtctttaaaatcttctcttcctctttaatgggagagtatttctagacactaattttcccatctaatattcaaatataggaaacagattccacaaggtgctttaattgatgagacctcaagtgctgttttctctcttgaacttttggatagtaaacagtccatagggaccacacacaatgctatgacagaagagttgttacattaagtcttttcatgggacttgattggtgaagctttatgacatgcttgagcaacgcactgaaggggatcccatctgagttaatactttgtccaaccactgtagaggtccattcagatgaagttcaatccagcaaggagtacttgttaccgtctgccttcggtattctgctccccaccctttcacaaaactcattcttatggtgcacattctagttagctgatagacggcttcaaaaccctgattaacagactgagccagaagagcagcaaattcctggttgttgaagatcttcagattacagcctggtggaattttacacactgttgcagggtgccagccatatctctgattacaattggggctctgcacaaagattgcactatcacttaggcactcagcaaaaacttccccacctatgtagtataagcgcactcctcttcctatatgccttcttgtcatttctaccgtggcatttcggttaacattggagagtaaacctaagcagaacctctctgaatttgatgggtctgtaaagccatctacagtgagtgagggctgtgatgcatggaaggtttctccaaccctctgatttaattcataatatgctatcgaacaccaaaatgcaggttctgagtaagtaactggctgtaaatccaagctatgattaacaggggaaagagtagtaggagatagttctgctggagagcctgtgtccatactttgattcaactgttggtcacttgtttctccatcttcactgatatatccaggaggtggcgtttctggaatataattactctgtggctcaattcctgctgggaagttagtgttttctggaatggagtcccggccgtaatggccgaattcccgggcatatgtccggtaccgtcgactgnnnnnnnnnnnnnnnnnnnnnnnnnnnnnnnnnnncggccgcttcctcgctcactgacaacgctgcgctcgtcgttcgg

SEQ ID NO: 78716 - DNA, 981 bp, Homo Sapiens
  misc_feature (216)..(216): n is a, c, g, or t
  misc_feature (257)..(257): n is a, c, g, or t
ccctctgcatgggtcaatacatgagttggcgctctgcagagtatcaggcactgttcatgcatggatgtctctgagtgtctgatgcttgattcagcaaagtacataagtagccatttgtcctagatctgtcatatgcacagccagtagcttcgattaactcaggcccaatcatgcagatccacgctgtaccacagagctcatctgtggagatcattnagattatagcccatggtgatgctgatgtgatggtggctganggtacagattcttgtattagcccttattctcttgctgggttttccagagcccgggctctgagcacaaactcagatcccaagttggcatgtcgaccatttcatccaaagagagatggttttgtaatgggagaaggtgcagctgtgctggtgctggaagaatatgaacatgctgttcaaagaagagcccggatctatgcagaagttttgggctatggactctcaggtgatgctggtcacataactgcccctgatcctgaaggagaaggtgccttaaggtgtatggctgctgctttaaaagatgcaggtgtgcagcctgaggagatatcctatatcaatgcacatgctacttccacaccattgggagatgctgctgaaaacaaagctatcaaacatctcttcaaagaccatgcatatgcccttgcagtttcctcaactaagggagcaacaggacatctgctgggagctgcaggggcagtcgaggcagcttttaccacattagcttgttattatcaaaaactaccacctactttaaacctggattgttcggaaccagaatttgatctcaactatgttccactaaaggcacaggaatggaaaactgagaaaagatttattggcctcaccaattcctttggttttggtggtactaatgcaacactttgtattgctggactgtagaacatataatttgtaattaaatactgatttttaaatgctaaaaaaa

SEQ ID NO: 78717 - DNA, 1135 bp, Homo Sapiens
  misc_feature (159)..(159): n is a, c, g, or t
  misc_feature (193)..(193): n is a, c, g, or t
  misc_feature (214)..(214): n is a, c, g, or t
  misc_feature (334)..(334): n is a, c, g, or t
  misc_feature (387)..(387): n is a, c, g, or t
  misc_feature (1002)..(1039): n is a, c, g, or t
tgaacaccttctccatccgtgcccatccagagcagagaaatggattgagttcccggttgtacagtaggaaggatgtaaaacgaactagatttgatttgaagagtgtataaccagaatgtgctatgtagtgttgtttgaagaaaacataccagattgtcntgtttttgaaacagcttccccagtgtccttttcntaccagctggtggtctgtgcnccctgacagctgagtgctgctttacggacacgcagtaatgccgaagattgcggggggaggacatagggctgtccccgggattcacctgctggctgtgtctctgcccactgcttctgtccntggaaagcagggcaggaggcagcatccccaggggcctctatgtgggagggagngacacctggggtcacaacccagggagggagggtcacagcccagggaggctgggagctgctccaaggccctggaactctgcctcagtcgcggcatgctggagaggggtacggacttactttcttggagttgtcccaggttggaatgagactgaactcaagaagagaccctaagggactggggaatggttcctgccttcaggaaagtgaaagacgcttaggctgtcaacacttaaaggaagtccccttgaagcccagagtggacagactagacccattgatggggccactggccatggtccgtggacaagacattcctgtgggccatggcacaccgggggggatcaaaatgtgtacttgtggggtctcgccccttgccaaaagccaaaccagtcccactcctgtcattggacgtttcttcccattccctcctcccaaatgcacttcccctcctccctctgccccctcctgtgttttggatttctgttcactcagaattgtaaatgtttagttgtgaccatgacgtattgtttgggtcaatgtccctttccaatgcatactaatatattatggttattatatatgaatatatttaatgacatggaaaaagttgtggannnnnnnnnnnnnnnnnnnnnnnnnnnnnnnnnnnnnnttggttagagttgtaatggacccagatggaacttgtaacgtgggccccacatgatagaactaaattcagatatcattaaataaactcttgtacact

SEQ ID NO: 78718 - DNA, 676 bp, Homo Sapiens
cacgcctttgagtatcttgacgatattgtcccagaaaactattcccatgagaactcccagggttccagccacgctgccaccaagccccagggacctgctgcgtccaccaggaccggaagccagcggcaggagggaggccaggaggctgcagcacctgccagacagggccggaagaagccggctgggaagtctctggcctctgaagctccatctcagcccagcctcaacggaggcagcccagagggagtggagagccaagatggcgtggaccacttccgggccatgatagtggagttcatggccagcaagaagatgcagttggagtttcctccttccctcaattcccacgacaggctgcgggtccaccaaatagccgaggagcacgggctgaggcacgacagttctggggaagggaagaggaggttcatcactgtgagcaagagggccccgcgaccccgagcagccctgggacccccagcagggaccggtggcccagcccctctccagccagtgccccctacccctgcgcagacagagcagcctcccagggagcagcgtggcccagaccagcctgatctgaggacgctgcacctggagagactgcagagggtcaggagcgcgcaggggcagcccgccagcaaggagcagcaggcctcagggcagcagaaacttccag

SEQ ID NO: 78719 - DNA, 1363 bp, Homo Sapiens
gacattgaagaaaatgaaaacagtgggaaatttcttcgaaggtacttcatactggataccagagaagatagtttcgtgtggtacatggataatccacagaacctaccttctggatcatcacgtgttggagccattaagcttacctacatttcaaaggttagcgatgctactaagctaaggccaaaggcggagttctgttttgttatgaatgcaggaatgaggaagtacttcctacaagccaatgatcagcaggacctagtggaatgggtaaatgtgttaaacaaagctataaaaattacagtaccaaagcagtcagactcacagcctaattctgataacctaagtcgccatggtgaatgtgggaaaaagcaagtgtcttacagaactgatattgttggtggcgtacccatcattactcccactcagaaagaagaagtaaatgaatgtggtgaaagtattgacagaaataatctgaaacggtcacaaagccatcttccttactttactcctaaaccacctcaagatagtgcggttatcaaagctggatattgtgtaaaacaaggagcagtgatgaaaaactggaagagaagatattttcaattggatgaaaacacaataggctacttcaaatctgaactggaaaaggaacctcttcgcgtaataccacttaaagaggttcataaagtccaggaatgtaagcaaagcgacataatgatgagggacaacctctttgaaattgtaacaacgtctcgaactttctatgtgcaggctgatagccctgaagagatgcacagttggattaaagcagtctctggcgccattgtagcacagcggggtcccggcagatctgcgtcttctgagcatccccccggtccttcagaatccaaacacgctttccgtcctaccaacgcagccgccgccacctcacattccacagcctctcgcagcaactctttggtctcaacctttaccatggagaagcgaggattttacgagtctcttgccaaggtcaagccagggaacttcaaggtccagactgtctctccaagagaaccagcttccaaagtgactgaacaagctctgttaagacctcaaagtaaaaatggccctcaggaaaaagattgtgacctagtagacttggacgatgcgagccttccggtcagtgacgtgtgaggcagaagcgcacggagcctgcctgcctctgccgtcctcagtttcctttcatgaggcttctagccaaagatgataaagggggaaatggtttttagtgcgtatattatactgcctcttaggtgtactctttataagctggtaaaccaagaatctagggagtggccaaactaaatataatttctttaaaaaa

SEQ ID NO: 78720 - DNA, 1117 bp, Homo Sapiens
  misc_feature (50)..(71): n is a, c, g, or t
  misc_feature (79)..(198): n is a, c, g, or t
  misc_feature (997)..(1048): n is a, c, g, or t
cacaggcatgagccactgtgcccggccagaacactctttaatacgagaannnnnnnnnnnnnnnnnnnnnngagatggnnnnnnnnnnnnnnnnnnnnnnnnnnnnnnnnnnnnnnnnnnnnnnnnnnnnnnnnnnnnnnnnnnnnnnnnnnnnnnnnnnnnnnnnnnnnnnnnnnnnnnnnnnnnnnnnnnnnnnnnatgtcactgtgcccagccgtgcaggagaagatctgatctggaaaaatatgcgaaaacaactcttaaaaattaactttacaatgtcaactccaactctgaggcagaaaaaaggtggcgcagcccattctctacccagttaaagaccccaacgtgaagccagaacagctctgacttggaaaatgctataaagtgttagccaatgtacacggttattacagtatgaaaatctccaaagcaatgctacaggtttgtctctataaagactgaggctacaatctcatgtctttaaaattcactgaaggtaaaatctatgccaaaagcattcctctataaagaccgctcaacttcttcaagtaagtcttcacaggtcattgaaatctaggtaatgcaaggaacccctggcgctgtgattctccggctccatgccacttgaggaccagcaacaccagcagtacctgcaaatcgcagaggcgcatctttatccagcgcgatcagtggggggtcgaggagcacggtgttgtcgttctctgtgactatgccgtggtaggtgggctccagccagggcttgtgcttgttaactcgcgcggcccagaccccgccgccgcacagcagcccggccagcagcagccgggcggccggggccagcgcgggagcggggcggcgcagcatcgccagcccggggcgggagcggcagggaggcgcgcgggacgccgagcggagctctcggagctctcggggctctaggggcctggggccagctgctccgcggcgcggggagctccgggggtccaaggaggannnnnnnnnnnnnnnnnnnnnnnnnnnnnnnnnnnnnnnnnnnnnnnnnnnnctccccgcctcagagcagcgtcttgctgaaggcagccctcgtgccgaattcgccacccaggcctcgcta

SEQ ID NO: 78721 - DNA, 1073 bp, Homo Sapiens
  misc_feature (109)..(172): n is a, c, g, or t
tcctccttggacccccggagctccccgcgccgcggagcagctggccccaggcccctagagccccgagagctccgagagctccgctcggcgtcccgcgcgcctccctgcnnnnnnnnnnnnnnnnnnnnnnnnnnnnnnnnnnnnnnnnnnnnnnnnnnnnnnnnnnnnnnnntgctgctggccgggctgctgtgcggcggcggggtctgggccgcgcgagttaacaagcacaagccctggctggagcccacctaccacggcatagtcacagagaacgacaacaccgtgctcctcgaccccccactgatcgcgctggataaagatgcgcctctgcggatatgcaggtgagatttgtggatttaaaattcacgggcagaatgtcccctttgatgcagtggtagtggataaatccactggtgagggagtcattcgctccaaagagaaactggactgtgagctgcagaaagactattcattcaccatccacgcctatgattgcgggaaaggacctgatggcaccaacgcgaaaaagtctcataaagcaactgttcatattcaggtgaacgacgtgaatgagtacgcgcccgtgttcaaggagaagtcctacaaagccacggtcatcgaggggaagcagtacgacagcattttgagggtggaggccgtggatgccgactgctcccctcagttcagccagatttgcagctacgaaatcatcactccagacgtgccctttactgttgacaaagatggttatataaaaaacacagagaaattaaactacgggaaagaacatcaatataagctgaccgtcactgcctatgactgtgggaagaaaagagccacagaagatgttttggtgaagatcagcattaagcccacctgcacccctgggtggcaaggatggaacaacaggattgagtatgagccgggcaccggcgcgttggccgtctttccaaatatccacctggagacatgtgacgagccagtcgcctcagtacaggccacagtggagctagaaaccagccacatagggaaaggctgcgaccgagacacctactcagagaagtccctcc

SEQ ID NO: 78722 - DNA, 387 bp, Homo Sapiens
gtccccctttaaattaccattatgggtaaatcattgtttccctttaaaacaaaaaacaaatcagtacccctgcctacagaaaagaagagggaacatttatttaaaggatggaaagactgggagttaggcactcccagcctcactgaggggcatttttgcctttgagaagtcctcccaggtatcctggtatagcacaatgtggcaatccgtagtgggaatgaagattaaacaggagagactttgtattagacctgtgagacgagttaggaagccctgcctggcatggggaatgcaaacagggaacattcaataaatcggggaacttgcttttctccccaagaccccagatggggcctacccatcgttaacgtgtaacaaaacgtgtaa

SEQ ID NO: 78723 - DNA, 685 bp, Homo Sapiens
aggtttatcaatatgtgaagctgaaacatcatcttatgaggtttagttttaggaagataaataaatatatcaaagtatttcataaagttgtatcaatgttccttctaacattagaagacttactgactgaggccatctgtgaacgactaggtgatctcagaatccttccagctctaataccctctgactaacactcacccagaattgctgtctgtgctggctgtgatctgcctccaggagcatacgccatcctgcgtgctgtgtccatcacagtgtctgtgctcggtgccttaccactgtccgtgtccttggacgctgactggacagagaggagcctgtctctcagggcacatgagtcgtcgtggcaggaggagacgggcctcagtcacagtgtcacagacccttgtcacagtggacactagtcattcctgccatgtccttgcagcccaggaggactaaaaagattttaatgaagtctgtgttactcattctgaagaaaagaacttacctgagaggagtaatatttttttaatatatattgggtcagggacagggatggagtggttgttttatgtttacatttttaataagtaaaatagaagatttaagaactaatatttatggtattgaactttaagtgtgatatattccttagaaaaacacaactttaataaaaatggaaact

SEQ ID NO: 78724 - DNA, 1507 bp, Homo Sapiens
  misc_feature (930)..(930): n is a, c, g, or t
aatgagtgcatatccagtagtacctttaaagtaacactttgtacataacaaatactcagcaaatgtgaaactttatttgctcttacttcaaaattagtccaaaatgttggaaataaaatataagacattgatctagatatgaggtttttctccttcattctcagctgtcgaagaaatcaaagtagcatatgcacaaggttaaaaaccacatatacaaatactatagaacagcttataatgaaaaccttgcctgcctttataaaaaatgtgattatcttcttctgttaatgtcaataaaagatggtttgtcctagaaggtctataaatggtattatgttctggaggaaacctagcaaaaactttgctagtttagtacttgtctctaaattgatgttcacccatttcaatattgcacttattaatggtctttatttttctagcatagaaacccaatgattcttaaaattcatatatggaggtaattcttgctttctaaagaaaggaatatggcacattggaaccattttattcaccagtggatttacccttagagtatttttagatctgagctgatgacttgtgagagaaaaagggaacagagtaaagccatggaagccatgaacagtaagagactgccgcctggcatggtttcttcttctgcagaagatgaaactgaggagaaacaagacaacatccttcataccaggaatggtcaagataatgcaagaagaaaaaagctttcaaacaaatcagaaggcagtcaacaaacagaaagggggacattccttccctggcagttactcaaaactgaaattgcttattgtgtacaccggggcttgtacttggggaatttaataaaaatgctcattaccaagctccagagagatgtggtttaaagtcttaagtagatccaaggaataacctacattntaaacaaatacccaggagaatcagaggctaggggttagttgtaatcggatactaccttttaatgattcttcctctgaaccctcagattggggtgttgatttagaatttataagcatcttgaggtctcattcaaatagtgattcttctctattgacagagaccacacttaatagaatcatcatgggtaaatcagctttttctactgtcacttgaagaaatattccacgtcgttaaatcagtagaactggagagttctgtctcagcagaaattgatcaataaagatgtcttttgcccttggaaggccatagaatatcaagttgaaatttgcaaaaactctaaaatgatcaaggtcacattttcatcttttaattgagaactcattgtggacataatttgtcactgcttgtaaagtgtaaaaagaaacaaccaaaacagactttaaaagaatggtttatatgaggaagccctcctccccccgagaaaagggctattaagatgaaagtgaaagaaggagttggaggcagcaaaggttattgttgatgttggacaaaggaaggaataaactgtatgacacca

SEQ ID NO: 78725 - DNA, 348 bp, Homo Sapiens
agctttcaaatgaatcagagacttttaatttgattttgtgaaaaaagcttataagcaatcagacaggctgcttttctcctttgtgtttgttacctatgagtttcatatggtgcaaacattaattaggaagaatctgtaaccatgaaatgctatgtaattcaggaagacatcttttccatatggttaatgaaagacaaatccttcccatatcatttaacactcacaaaaagtatataacaaacaaaactgaaatttgaatcggagtttatttgaacagaaaagcactgcaagtctgttcattttttttcttgaaaccaattataaaaagtggtcccaatttcaacaatt

SEQ ID NO: 78726 - DNA, 1102 bp, Homo Sapiens
  misc_feature (410)..(613): n is a, c, g, or t
  misc_feature (693)..(705): n is a, c, g, or t
  misc_feature (1022)..(1042): n is a, c, g, or t
gcgcacgctcaccaagtaatagggagatagagtgccccatacaaacctctccagaggttggagttattatacactgccaaccagttccacgtgaaacgggcgtgaggaacgaagtaattgagtagctatatatagcaccccgaagtcgacaattatgctccggttcaaatattgttgaatgtggagcggtgaccactttccaccggaaacagctagcactgattccgactttataggactcacttaaggaattagcccctcgaggccaggaattcggcatgagggaaccgcccacgcttgtggaactattatatataatttgctgtatgttatgagagagagtcttgctatgtctccctgactagggtgtggtggtgtgatattggctcacgacagccttgccctccctnnnnnnnnnnnnnnnnnnnnnnnnnnnnnnnnnnnnnnnnnnnnnnnnnnnnnnnnnnnnnnnnnnnnnnnnnnnnnnnnnnnnnnnnnnnnnnnnnnnnnnnnnnnnnnnnnnnnnnnnnnnnnnnnnnnnnnnnnnnnnnnnnnnnnnnnnnnnnnnnnnnnnnnnnnnnnnnnnnnnnnnnnnnnnnnnnnnnnnnnnnnnatagctcctgtgttttgtttttgttttgtaactttggttgatgttaaggccctccattttggaaagcaggaaaacaggannnnnnnnnnnnnatcttgttccctggaggatccagggatgaggatagagtggcctgagagcagtgcttggattcagcctcctgctgggtccttctgctggatacaggcaccaagaggcgggggtggagcagggagctgcgccttcctggggtgcccggtggtgtgtagagaaaagctgcttgtttactccttaagtcaatgtattggtgactgttgatttgttggacaattcaggaatcaagggctgtggagaaactccctcatgttgttggcaacaggtgaatgaacctagagcggtgacatgaaaataaagctcactgttactcgcnnnnnnnnnnnnnnnnnnnnngcctacagccgcggccgcaagctttttcccttgtagtgagggttaattcgagcatggcac

SEQ ID NO: 78727 - DNA, 760 bp, Homo Sapiens
  misc_feature (95)..(107): n is a, c, g, or t
  misc_feature (480)..(495): n is a, c, g, or t
ctgtatccagcagaaggacccagcaggaggctgaatccaagcactgctctcaggccactctatcctcatccctggatcctccagggaacaagatnnnnnnnnnnnnntcctgttttcctgctttccaaaatggagggccttaacatcaaccaaagttacaaaacaaaaacaaaacacaggagctagctgggcgcggtggctcacacccgtggtcccaacattttgggagaccaaggtgggaggaatgcttgagttgtaggagttcaaaccagcctggcaaatatggcaagaccccatctctctaaaaagtaaacaaaaatcagccgagcatcatatcacatgcctgtagtcccagctactctggaggctgagatgaagactgcttgagccagggagggcaaggctgccgtgagccaagatcacaccaccacaccctagccagggagacagagcaagactctctctcaaaacaaacaaccnnnnnnnnnnnnnnnncccacatcatctgcaaagctatgttgggagcacagccatttcccataggctttctttttccttgccccattgccttccgggaagttttccccttacccatcatcacgatttttcccatctttcacgatggtgcaattcaacaggatgaattaactgaactagaaaaggataaaaaaaatctaaccctatgaaaactctgccttcaacataactccagggagatgaatattatactactggcacctctgacccacacctcgtgccg

SEQ ID NO: 78728 - DNA, 1636 bp, Homo Sapiens
ttttaggtacattggggctgacagtgacctactgttgccggggagaggaagaaaatatgatgatgagaattgcccagaaatgtaatatcaaccttctccttttaccagatcccattccttctggtctgatggaagaatgtgtggattgggatgtggaagttaaagctgctgtgcatacatatggtatagcaagtgtacctaaccaacccttaaaaaagcaaattcagaaaatagagagaacccttcaaattcagaaagctcatggtgaccacatggcttcctctagaaataattctgtatctggactatcagtcaaatcaaaaaataataccaaacaaaagcttcctgtgaaaagccactcagaatgtggaatcatagaaaaagcaacgtcaccaaaagaactgggctgtgacaggcaatccgaagagcaaatgaagaattctgttcagactcccgttgaaaactccaccaacagtcagcaccaggtcaaagaagctttacctgtgtcactcccccagattccttgtctgtcttcctttaaaatccatcagccatacacgttgacttttgctgaattggtagaggattatgaacattatattaaagaggggttagagaaacctgtggaaatcatcaggcactacacaggccctggggatcagactgtgaatcctcaaaatggttttgtgagaaataaagttactgaacagagagtccctgtattggcaagtagtagccaatctggagactctgagagtgacagtgattcttacagctcaagaacctcttcccagaagcaaaggaaataagtcatacttggaaggctcttcctgataatcagcctgaaagactctgaatctacgcctgtggatgatcgtatttctttggaacaaccaccaaatggaagtgacacccccaatccagagaaatatcaagaatcacctggaatccagatgaagacaagacttaaagaggggctagccagagagctaagcagagccggagaaacctacccaggcggtcttccttcagattgcagactgaagcccaggaagatgattggtatgactgtcatagggaaatacgtctgagtttttctgatacctatcaggattatgaggagtactggagagcttactacagggcatggcaagaatattatgctgccgcttctcattcatattattggaatgctcagagacatccaagttggatggcagcttatcacatgaataccatttatctacaagaaatgatgcatagtaaccagtgattataggatatacctgagaccatcaggaactgtcaacaaatgatacctttggatatccatcctcctcgacttatagtacagtggtgtatagtggcatttctgataaacttgaaaagacttgagtctttccactgggacacatccatttttcagattgttttgatttaggccaggtatattatcttcatttttaagagtttctttaagaaacttcatcagattgttgaaagataatttttgggacatagagctgaaagtttcagggtgccattttctataagatcttcccaaaagaaacatttaaaaagatgacatataccaccacttacttaaaaacaataaaagcaatagatttgattagta

SEQ ID NO: 78729 - DNA, 1117 bp, Homo Sapiens
ttagctctttctcctactcccttcctacaaacacccacaccctttcctcaggaatggaactgagatctccagaggggaatggtgagaaaggagaatgctagataggaaatgagaactgaagatattgattttgttgctacctgggctgaaagatacagccacaggcagaaatcaagacggtaaatcctctgggggtctatgaagaaagaggaccagagaaagccagtctatgtttatttcaggtcctgctggtcaatctttgtgaaggaaccttcttaatgtcggttggtgatgaaaaagacatcctgccaccgaagcttcaggatgacatcttagactctcttggtcaggggatcaatgagttaaagactgcagaacaaatcaacgagcatgtttcaggcccctgtgtgcagttctttgtcaagattgtgggccattatgcttcctatatcaagcgggaggcaaatgggcaaggccacttccaagaaagatccttctgtaaggctctgacctccaagaccaaccgccgatttgtgaagaagtttgtgaagacacagctcttctcacttttcatccaggaagccgagaagagcaagaatcctcctgcaggctatttccaacagaaaatacttgaatatgaggaacagaagaaacagaagaaaccaagggaaaaaactgtgaaataagagctgtggtgaataagaatgactagagctacacaccatttctggacttcagcccctgccagtgtggcaggatcagcaaaactgtcagctcccaaaatccatatcctcactctgagtcttggtatccaggtattgcttcaaactggtgtctgagatttggatccctggtattgatttctcaggactttggagggctctgacaccatgctcacagaactgggctcagagctccattttttgcagaggtgacacaggtaggaaacagtagtacatgtgttgtagacacttggttagaagctgctgcaactgccctctcccatcattataacatcttcaacacagaacacactttgtggtcgaaaggctcagcctctctacatgaagtctgtggacatgtaaggacgagagtaaagaggaaaatcttattttta

SEQ ID NO: 78730 - DNA, 832 bp, Homo Sapiens
  misc_feature (773)..(791): n is a, c, g, or t
tgcccagttggggtcatagacctcagtattcatttaaccgatgccattgagggctttacccagtgccacactttgagacaagcatggtgtcctgaaaagaaagtgttgccaagaaaacatgaacccaccattggactctcaactcaaaccttactgaagtcagtggctatagctttatctgcaaaggaccccaaagtgaggatcccacattgttactgctggctcttcatcccaccctctggagatgctaaggaagctcttgcccaccttttctagtgatggagtaggaactttgcataggacaaaccttcatgataggttactctagtatattccctcataaagtccaataggtaaattagtcttggcagcagaaggaacagcaggagaagtaagtgattcatcatctagaatccagaaaatttgcaccaacagatggcaggtggttataacacaacagatcttgccctgagaatatctggggacccagccaacagccttcaaggcagggcactcctgcggaagagatggcttgtgaacatgactgtggacccagagtcaccccagagctcccatataaaatgcttcacagagaaactaagagcagccttggggcattcattccaattaataaccttaaagactagagccagatccacctgcattacaaaagcaggcattcgaggaactaaactttgcttttgttcatgctcttacctgccgttttaaatgggtttctaatgtcaaataaagccaccctgcctcttgggacnnnnnnnnnnnnnnnnnnngcctacagccgcggccgcaagcttattccctttagtgaggg

SEQ ID NO: 78731 - DNA, 551 bp, Homo Sapiens
gcacgagggctgagatgaggttagaatgactgggcccggctgaacattccaaattggatttcaccatctgctgagaaagtttaaggaaggcaaagcttgccaggtcacagaagctcccaagcccagctttccaaaggcctcagcctgtgcctgtgtcgagctcagtcctgggagataggggagaacctgcaggcaggaacaagcccccctactcctgaccaccctccatcagcagtctcccctccgtggtcgtctttgttgacaaaggtgcagtttctcctctcctgggcacctgtaacatgtgatgcgctgcctgctgggaggttaggtcggggctgccccggcgagtggagcatgagcagaaccgccgagggtcacttctgggcagaagctttgagagcctgggtccaggttgccacatagaagcagctctccagttgaaaccctcctctgccagcctggggtcctaagcgatgagcagaatcccccactcccaccccacctaacccacaatggatatgtagtgagcaagaaataaacctttgttgttt

SEQ ID NO: 78732 - DNA, 1164 bp, Homo Sapiens
tgacactatgaaccagtgtgtaaaaaaagcaggctggtacggtcggaattcccgggatatcgtcgacccacgcgtcggcaaggacgctgtaagcaggaagagaagccacagcgcttcagaaaagagtgggacagggacaagcatatctaagaggctgaacatgaatccacagatcagaaacccgatgaaggcaatgtatccaggcacattctacttccaatttaaaaacctatgggaagccaacgatcggaacgaaacttggctgtgcttcaccgtggaaggtataaagcgccgctcagttgtctcctggaagacgggcgtcttccgaaaccaggtggattctgagacccattgtcatgcagaaaggtgcttcctctcttggttctgcgacgacatactgtctcctaacacaaagtaccaggtcacctggtacacatcttggagcccttgcccagactgtgcaggggaggtggccgagttcctggccaggcacagcaacgtgaatctcaccatcttcaccgcccgcctctactacttccagtatccatgttaccaggaggggctccgcagcctgagtcaggaaggggtcgctgtggagatcatggactatgaagattttaaatattgttgggaaaactttgtgtacaatgataatgagccattcaagccttggaagggattaaaaaccaactttcgacttctgaaaagaaggctacgggagagtctccagtgaggggtctccctgggcctcatggtctgtctcctctagcctcctgctcatgctgcacgggcctcccctccaccctggacccgctctgtttctgcctggtcatcctgagcccctcctggcctcagggccattccacagtgctcccctgcctcaccgcttcctcctcgctcttccagactcttcctgcagaggctcctttctgcctccatggctatccatccacccccacagaccccgttcctccagcctgcgtgcccctaacctggcttttcccatctccccagcataaccaaatcttactaaactcatcctaggctgggcatggtgactcacgcctgtaatcccccagcaatttgggaggcaaaggtgggagaatcgcgtgagcccaggagttccagaccaggctgggtcacatgacaaagccccatctctac

SEQ ID NO: 78733 - DNA, 968 bp, Homo Sapiens
  misc_feature (108)..(224): n is a, c, g, or t
  misc_feature (248)..(248): n is a, c, g, or t
  misc_feature (260)..(260): n is a, c, g, or t
  misc_feature (322)..(322): n is a, c, g, or t
ccgctctccccgcgcgtgccgatcattaatgcagctgcacgacagtttcccgactgaaagcggccatgagcgcaacgcaataatgtgattagctcactcatagcaacnnnnnnnnnnnnnnnnnnnnnnnnnnnnnnnnnnnnnnnnnnnnnnnnnnnnnnnnnnnnnnnnnnnnnnnnnnnnnnnnnnnnnnnnnnnnnnnnnnnnnnnnnnnnnnnnnnnnnttgccctcgagcccaagattcgcnacgagttaatanccactgactgacagacttgcttttccataagtttaagcttttatcactgagagcccatctgntgccatccctcagaaagtcaagtacttgtgtagatggagtgcatgcacagagtatgttcctgaaagtatctcatgttttcaacatgaaattttctgtttctaagaccaagtaaagaaaataatttgcttttacacccgttaggggagcaaaattatgtgtggttaaaacccagcggaaggcaaaacaagctgagactctaactcaggactacatcatcacccctcatgccttgcctatgttccgtgagccccgccaacggagtacaaggaaacagctggagaaggacagactggatcccctgaagtcgcataaacctgaacctcctgtagcaggcccaggtcgtggtggccgagttggaacccacgggggcactctctcttcctatattgtgaagaacattgctttggacaagaccgatgacagtaatcctcgggaagccattttgcgtcatgccaaagcagcagaagacagcccatattgggtttctccagcatattccaagactcagcccaaaaccatgtttgcccaagttgaatctgatgatgaggaagcaaagaatgagccagaatggaaaaaacgtaaaatttgaagaatctcatttgagagctgtttgcatgagtgggaggggtatgggacaggtttggg

SEQ ID NO: 78734 - DNA, 1098 bp, Homo Sapiens
  misc_feature (41)..(75): n is a, c, g, or t
aacgacgagcgcagcgagtcaggtgagcgaggaagcggcgnnnnnnnnnnnnnnnnnnnnnnnnnnnnnnnnnnncagtcgacggtaccggacatatgcccgggaattcggccattacggccggggagataaagacagagcagcctgtctttatcggaggttcctctgccagtaggaggggcccggagaaaaccagaaagagggccagagccagagaaacatgaagcaccccggggcctcccacaccagtgcctgagcaggaatggggaggggccatgattcacaaggccctgggaggtcactttaaagagggctgctcaactgcaaggacgctgtaagcaggaagagaagccacagcgcttcagaaaagagtgggacagggacaagcatatctaagaggctgaacatgaatccacagatcagaaacccgatgaaggcaatgtatccaggcacattctacttccaatttaaaaacctatgggaagccaacgatcggaacgaaacttggctgtgcttcaccgtggaaggtataaagcgccgctcagttgtctcctggaagacgggcgtcttccgaaaccaggtggattctgagacccattgtcatgcagaaaggtgcttcctctcttggttctgcgacgacatactgtctcctaacacaaagtaccaggtcacctggtacacatcttggagcccttgcccagactgtgcaggggaggtggccgagttcctggccaggcacagcaacgtgaatctcaccatcttcaccgcccgcctctactacttccagtatccatgttaccaggaggggctccgcagcctgagtcaggaaaggggtccgctgtggagatcatggactatgaagattttaaatattgttggggaaaactttgggtacaatggataatggagccattcaaggccttgggaagggatttaaaacccaacttttcgacttctgaaaagaaggctacggggagagcctcccagggagggggtcttccctggggccctcaggggcctggtcccccccaaagcctcctgggctctggccggcacggggccttccccctccaccccgggaacccggttccggtttct

SEQ ID NO: 78735 - DNA, 845 bp, Homo Sapiens
  misc_feature (306)..(352): n is a, c, g, or t
aacgtatgtgacatatagaccagtgtgtaaaaaaagcaggctggtacggtcggaattcccgggatatcgtcgacccacgcgtcgggcgagtacttcaggtgatgagcagatgcggttccgggcccccctgctatatgagcagtacatcgggcagtatctcacccaggaggagctcagtgcccgcaccccaacccaccagccccccaagcccgggtcccccgggagacctgcttgcccgctctccaacttgctgctccagtcctacgaggagcgggagctacagcagctgtcgtgctccaacagacnnnnnnnnnnnnnnnnnnnnnnnnnnnnnnnnnnnnnnnnnnnnnnncagtgacgaggaagaccagaggtcaggcaaggactcggaggcctgggttcccgactcggaggagaggctgatcctgcgagaggagttcaccagccgcatgcaccagcgcttcctagatggcaaggacggggactttgactacagcacagtagacgacaaccccgacttcgacaacctcgacatcgtggcacgggatgaggaggagaggtactttgatgaggaagaacctgaggatgcgcccagcccagagctggatggggactgatggccgccacccttcccaccgcctgccccatccccatccccaacaaggcagctgattccaggcctgctcagtgaccctttctctagggggacatcagggcagtgccccacaacccacacacaccaccatctcactgggtctagtctcatctcagacaacccctacccccactgtttctggggttccctttctcatctctcccacccagtgtcctgcctcataatgatc

SEQ ID NO: 78736 - DNA, 1610 bp, Homo Sapiens
  misc_feature (574)..(591): n is a, c, g, or t
aaaaaatgataagaaaaatacagaagagaagaagaacagcaaacagatgagcacctctgaggagttggatgaaatgccagtgccggattctgaaagtgtattcattatccctggaagcgttcttctatggcgaatagccccacggcctccaaattctgcccagatgtataattttactagttttgcaatggttttgaatgaagtagacaaagacatggagagtgtgattcccaagacagactgcaggttacggcctgacatcagagccatggaaaatggagagatagatcaagctagtgaagaaaaaaaacgacttgaggaaaaacaaagagcagcccgcaaaaacaggtccaagtcagaagaggactggaagacgaggtggttccatcaaggtcctaatccctacaatggagcacaggactggatttactctggcagctactgggacagaaattacttcaatttgcctgacatttattaaaatgcatacaagtcagggtgtttggctaatctacaaataagtcttaaacctatgtttttaaatttttttcccttggtttctacttatcttttnnnnnnnnnnnnnnnnnncactcatgagataactgcatttcacccaacaaaagcagggtataaggcgatattggtgatgaaagtcttaggaaaaatgcataattttgctataaaatgtacttatttggaatactattttatatagaggtaagagaacactgctggggaatatgctttttatggttgctgttgccatatatactgaaggtttatacctaaatgtaactttagctttatggaactatatagtaatcccaaatcaagttattttgaatatttttatgctgtcatgcttgaatgttttagatgtaacctttgacatatttagaactctcctcctatacaatgtttattctcagatatagaggttatgtcattttataaagacttcattgataagatggcttttattcatactaatcctcccaatgttaccccttccatcttccaagaagaaaaaaaatgcctgaatattcagaatagatatttctgatttgaaaattctaaagaattaaactggaaaagtatttcatttacttagtgctctgaatttacttttacagttttctgcagtcagtatcattaaaatggttaagtttacatttgaactgaaaatatgtataaaatctagcaattcacaaaaatgccctagaaatatagattttaatcaccattacataatgacaaaccttgttaaatgcttccacttccagtggcaaatgccactagggaaagtaagttgcactcatgtaagtatcaaactatataaaaggaggccttgtgcatttcaagtttgcaaagtacctgtgtacttaaaatatgtgtggagacctactgtacagtagttttgcccctttaattggggcacattcatcttaaatcttatagtatttatccacccaaaccccagactgagatactgctcccaggggcctaggtagctgccagtccgtgattttaattgctgtcttgaagttaacaagtgttataatgaaataatctacctgatgctaaataaaggctttagaatgttcccc

SEQ ID NO: 78737 - DNA, 1598 bp, Homo Sapiens
  misc_feature (27)..(27): n is a, c, g, or t
  misc_feature (70)..(70): n is a, c, g, or t
  misc_feature (181)..(181): n is a, c, g, or t
  misc_feature (230)..(230): n is a, c, g, or t
  misc_feature (1431)..(1439): n is a, c, g, or t
  misc_feature (1536)..(1544): n is a, c, g, or t
ggctgcgatatatcatgcagaagttcngatgaagcgcgtagccaccatatgtgatgctcatcttagcacncagttacattatctccgctgttgtgtgtgaatgtagcgatacattcaacaggacagcttgacagatacgattatagactcacttaggaattgccctcgagccaagatcgcnacgagttaaacactagagatctcagaaaaatgagataaaatgaaccatntcagcgattgggctgaaatatttggggactttgaaaaaagaatcctcgtgaagagatgttacaaatgcaagatattgtactaaatgaagttaaaaaagtggattctgaatacattgctacagtctgtggcagtttcagaagaggtgcagagtccagtggtgacatggatgttctcctgacccatcccagcttcacttcagaatcaaccaaacagccaaaactgttacatcaggttgtggagcagttacaaaaggttcattttatcacagataccctgtcaaagggtgagacaaagttcatgggtgtttgccagcttcccagtaaaaatgatgaaaaagaatatccacacagaagaattgatatcaggttgatacccaaagatcagtattactgtggtgttctctatttcactgggagtgatattttcaataagaatatgagggctcatgccctagaaaagggtttcacaatcaatgagtacaccatccgtcccttgggagtcactggagttgcaggagaacccctgccagtggatagtgaaaaagacatctttgattacatccagtggaaataccgggaacccaaggaccggagcgaatgaggcctgtatcctccctggcagacacaacccaataggagtcttaatttatttcttaacctttgctatgtaagggtctttggtgtttttaaatgattgtttcttcttcatgcttttgcttgcaatgtagtcaataaaacctcatgtactattaaaccaaccgcactacagcaatgggcgaataaacattgcggccgccctcgggccctcgagaaactttctaaaaccatttcgttttggcccccccggggcccctgttagggtaaaggggaaacatggggcccataagcctgtgtttccctaacgaaaaactccctggggcccttggaactaagcggctcttgggaatctctcccgcccgacattaagaataaagcccccccgcggcccgcgccaaacccgagagtgggatcttccttgagaacaaaaaatcccccaaaaatgggaaggtttctcttgagagggtcctatttacttgggggggtgccaattacaaaccggggcaaattccccccgggggggaagcgcttcccataatttctaaagatttaaggggcacccacgggcgcgctggggggagcttacatatgggacggatacccnnnnnnnnnaaaagttccaatttaaaagcaatttctgtcgcccccaccattgaaaacacccgcaccacaacaaaacgggcccttgcatgggaaccccctgaaaatnnnnnnnnnggggggttcattcacccacaccccatgggggggccgcttgtggcagtgaaaaaa

SEQ ID NO: 78738 - DNA, 797 bp, Homo Sapiens
ttttaatagtacatgaggttttactgactacattgcaagcaaaagcatgaagaagaaacaatcatttaaaaacaccaaagacccttacatagcaaaggttaagaaataaattaagactcctattgggttgtgtctgccagggaggatacaggcctcattcgctccggtccttgggttcccggtatttccactggatgtaatcaaagatgtcttttcaactatccactggcaggggttctcctgcaactccagtgactcccaagggacggatggtgtactcattgattgtgaaacccttttctagggcatgagccctcatattcttattgaaaatatcactcccagtgaaatagagaacaccacagtaatactgatctttgggtatcaacctgatatcaattcttctgtgtggatattctttttcatcatttttactgggaagctggcaaacaccctaaaatgaacattttaaaccaagtttaaagatgttctaaacttaaggcttaattttaatcaagtaaaacacaaggccatttttgtttttaatgttagcagctctagaattctgagcacttttaacttagcagcttctgtgagcaatacactatccctacctttctattacacttcacgataattagagaactacacaaaactgcaaataaggattctcattatgaggatttggtctttgtgtgattctaagcaagaaactaatcaaaaaaaaccctgaacacgaaacacagacatcaaaataaacagaagagagcaacgtggaagaaacgatgattatgcag

SEQ ID NO: 78739 - DNA, 1173 bp, Homo Sapiens
gggattgttccgccggtcgcgccggagctgggttgctcctgctcccgtctccaagtcctggtacctccttcaagctgggagagggctctagtccctggttctgaacactctggggttctcgggtgcaggccgccatgagcaaacggaaggcgccgcaggagactctcaacgggggaatcaccgacatgctcacagaaaagcagcatctgttatagcaaaatacccacacaaaataaagagtggagctgaagctaagaaattgcctggagtaggaacaaaaattgctgaaaagattgatgagtttttagcaactggaaaattacgtaaactggaaaagattcggcaggatgatacgagttcatccatcaatttcctgactcgagttagtggcattggtccatctgctgcaaggaagtttgtagatgaaggaattaaaacactagaagatctcagaaaaaatgaagataaattgaaccatcatcagcgaattgggctgaaatattttggggactttgaaaaaagaattcctcgtgaagagatgttacaaatgcaagatattgtactaaatgaagttaaaaaagtggattctgaatacattgctacagtctgtggcagtttcagaagaggtgcagagtccagtggtgacatggatgttctcctgacccatcccagcttcacttcagaatcaaccaaacagccaaaactgttacatcaggttgtggagcagttacaaaaggttcattttatcacagataccctgtcaaagggtgagacaaagttcatgggtgtttgccagcttcccagtaaaaatgatgaaaaagaatatccacacagaagaattgatatcaggttgatacccaaagatcagtattactgtggtgttctctatttcactgggagtgatattttcaataagaatatgagggctcatgccctagaaaagggtttcacaatcaatgagtacaccatccgtcccttgggagtcactggagttgcaggagaaacccctgcccgtgggatagtggaaaaagacatcttttgattacatcccagtggggaataaccgggaaccccaaggcaccggagccaaatgagggcctgttattcctcccctggcagacacaaaccccaataaggagcccttaattttttttcttaaccctttggctatgg

SEQ ID NO: 78740 - DNA, 707 bp, Homo Sapiens
  misc_feature (26)..(26): n is a, c, g, or t
  misc_feature (76)..(76): n is a, c, g, or t
atctttacctcagaccgcctcctgtnacaccagagaagttgtaaaactcatccttatgggccaaaatatcagaatntgaatttagggagtaaaggaggcctaaaagagtacactaattccaagcagcaaaggaacagggcagcacccagtgtaactgataaggtaattcatgccacacaagacgcattaggtgaacctggtggtgccctctgcctgtaggggaacaagagaaaactatccccagaatcagccacctcagcccctagtattttttctatcaatgccttgtatcagcctcaaagcagcctgttcaagttaactccctgttgaactccagggcctatacctctcttggctgaatagatataagaacatccttgcctgatgggttcatattcctcttcaattctgctgtctaaaagaagaagagatggacttctttcttccctgatccctgatacaaataatccctgggagagacagtaatttgaaaatgagtcattaatgctgtgtctacattacagagatataattcccattccaacagccaatatttattgccggtttattttagtcatctaccttaggaattcatttttggcaatgctgggttatgctgagtttatcttactaaaatagaatctgtgtcaaaaacccccaatgactttagcaacaattaaacactgaagcacttgcaaaaatacaaa

SEQ ID NO: 78741 - DNA, 1013 bp, Homo Sapiens
  misc_feature (54)..(54): n is a, c, g, or t
  misc_feature (108)..(108): n is a, c, g, or t
  misc_feature (167)..(167): n is a, c, g, or t
  misc_feature (195)..(195): n is a, c, g, or t
  misc_feature (231)..(231): n is a, c, g, or t
ttttgatgtgacgatacattcccaggacagttgactgtacgattatcgctcctntaggattgcctcgagcaagaatcgcacgagccccttgatcagattggcatgtcntgtcaccattcctgtacaccagagtgccggatcatctccactcttcgcgtcggtgatgntgcataccgctcagacgtctccagatgntgacacactgtctcctctaccccctgctatttgctntgcagagcagaagcagctgctggaggtggaactctacgcagactatagagagaactcgtacgtgccgaccactggagcgatcattgagatccacagcaagcgcatccagctgtatggagcctacctccgcatccacgcgcacttcactgggctcagatacctgctatacaacttcccgatgacctgcgccttcataggtgttgccagcaacttcaccttcctcagcgtcatcgtgctcttcagctacatgcagtgggtgtgggggggcatctggccccgacaccgcttctctttgcaggttaacatccgaaaaagagacaattcccggaaggaagtccaacgaaggatctctgctcatcagccagggcctgaaggccaggaggagtcaactccgcaatcagatgttacagaggatggtgagagccctgaagatccctcagggacagagggtcagctgtccgaggaggagaaaccagatcagcagcccctgagcggagaagaggagctagagcctgaggccagtgatggttcaggctcctgggaagatgcagctttgctgacggaggccaacctgcctgctcctgctcctgcttctgcttctgcccctgtcctagagactctgggcagctctgaacctgctgggggtgctctccgacagcgccccacctgctctagttcctgaagaaaaggggcagactcctcacattccagcactttcccacctgactcctctcccctcgtttttccttcaataaactattttgtgtcagcttcaaaaaaaa

SEQ ID NO: 78742 - DNA, 1457 bp, Homo Sapiens
taggccgggttatcggcacgaggccgtctcacggttgccctggcagcgcgcgaggctggtgagtcggcagccctgtggcagccggcgggctggtttccatggttgcacgattaggaaccaccagctgctgcatcccatggccaggggtggcgtccaggtggcagagcagctaggaacgcaaggcctgaacctggggccagacaccctgctctcccggccatggtcaacgaccctccagtacctgccttactgtgggcccaggaggtgggccaagtcttggcaggccgtgcccgcaggctgctgctgcagtttggggtgctcttctgcaccatcctccttttgctctgggtgtctgtcttcctctatggctccttctactattcctatatgccgacagtcagccacctcagccctgtgcatttctactacaggaccgactgtgattcctccaccacctcactctgctccttccctgttgccaatgtctcgctgactaagggtggacgtgatcgggtgctgatgtatggacagccgtatcgtgttaccttagagcttgagctgccagagtcccctgtgaatcaagatttgggcatgttcttggtcaccatttcctgctacaccagaggtggccgaatcatctccacttcttcgcgttcggtgatgctgcattaccgctcagacctgctccagatgctggacacactggtcttctctagcctcctgctatttggctttgcagagcagaagcagctgctggaggtggaactctacgcagactatagagagaactcgtacgtgccgaccactggagcgatcattgagatccacagcaagcgcatccagctgtatggagcctacctccgcatccacgcgcacttcactgggctcagatacctgctatacaacttcccgatgacctgcgccttcataggtgttgccagcaacttcaccttcctcagcgtcatcgtgctcttcagctacatgcagtgggtgtgggggggcatctggccccgacaccgcttctctttgcaggttaacatccgaaaaagagacaattcccggaaggaagtccaacgaaggatctctgctcatcagcccagggcctgaaggccaggaggagtcaactccgcaatcagatgttacagaggatggtgagagccctgaagatccctcagggacagagggtcagctgtccgaggaggagaaaccagatcagcagcccctgagcggagaagaggagctagagcctgaggccagtgatggttcaggctcctgggaagatgcagctttgctgacggaggccaacctgcctgctcctgctcctgcttctgcttctgcccctgtcctagagactctgggcagctctgaacctgctgggggtgctctccgacagcgccccacctgctctagttcctgaagaaaaggggcagactcctcacaatccagcggtttcccac

SEQ ID NO: 78743 - DNA, 1468 bp, Homo Sapiens
caggtgaggccgggtgttaatcggacgaggctagagtcctctgctgtacgactgcactcccgcaccctcccctaaatcccccctcttcggcctgtttaccttttaacttggcttcgttgcacgttgtgtgtgtgtgtttgctcttcgcagcctcttgagcgtctgttgtacttaattcttacactgtggacgctctctcgcgcccgccatcccccgacccctctgatctccgatccttgacgatgtctagcctgcattgattggcccttttccctgggtatggcagatctattgcttgatgatcctctcccccccaagaattctaacacaggagctgtcctgaggctctggatgactttattcttcaaatggctttaccctcccagtagctccagggaccctccattttccatatccaggaaaatgtgatgcgccacaggtatcagcgtctggatcgccacttcacgttttagccacaagtgactcagtggaagatccagagtcaacagaggctcgtcaggaagatgtctacagaaaaggtagaccaaaaggaggaagctggggaaaaagaggtgtgcggagaccagatcaaaggaccggacaaagaggaggaaccaccagctgctgcatcccatggccaggggtggcgtccaggtggcagagcagctaggaacgcaaggcctgaacctggggccagacaccctgctctcccggccatggtcaacgaccctccagtacctgccttactgtgggcccaggaggtgggccaagtcttggcaggccgtgcccgcaggctgctgctgcagtttggggtgctcttctgcaccatcctccttttgctctgggtgtctgtcttcctctatggctccttctactattcctatatgccgacagtcagccacctcagccctgtgcatttctactacaggaccgactgtgattcctccaccactcactctgctccttccctgttgccaatgtctcgctgactaagggtggacgtgatcgggtgctgatgtatggacagccgtatcgtgttaccttagagcttgagctgccagagtcccctggtgaatcaagatttgggcatgttcttggtcaccatttcctgctacaccagaggtggccgaatcatctccacttcttcgcgttcggtgatgctgcattaccgctcagacctgctccagatgctggacacactggtctccttctagcctcctgctatttggctttgcaaaccaaaagcaactgctggaagtgggaactttccccggacttttgagagaacttgtaccggccgaccagtgggaccaatctttggaatccccgcgaaggcattccgctgggttggagcgttacttcgcgtttgacgcgcgtttttcgtgggcttgagaccctggctagccaccttccccgaagacctgccgcttttttggggtgtgccaaaaattgtcacgtggttctgcgt

SEQ ID NO: 78744 - DNA, 1315 bp, Homo Sapiens
  misc_feature (1146)..(1186): n is a, c, g, or t
attaaggctagtgagagccctggtgtggaatcggccgaggctcttccagcgttatggatgcaggtccagctgggcggattgatcaactaggcaacatcatgtccggatatgagttcatcaacaagttgactggagaagatgtatttggaatcaccgttcctctaattacaagtacaactggagcaaagctgggaaagtctgctggcaacgctgtttggctaaacagagataagacatctccatttgaattgtatcaattctttgtcaggcaaccggacgattcagtggaaaggtacctgaagctgttcactttcctgccccttccagagattgatcatatcatgcagctgcatgtcaaagagccagaaaggcggggtcctcagaaacgactggcagcagaagtaacaaagcttgttcatggacgagaaggattggattctgctaaaaggtgtacacaagccctttatcacagtagcatagatgcactggaggtcatgtctgatcaggagttaaaagagttgtttaaagaagctccattttctgaattttttctcgatcctggaacaagtgtcctagatacttgccgcaaagcaaatgccattccagatggtccccgagggtatcgaatgataacagaaggcggagtcagcataaatcaccaacaagtaacaaatcctgagagtgttttaattgttggacaacatattctcaagaatggactttccttacttaaaataggaaaaagaaatttctacattataaaatggcttcagttgtgatgaaaagtccttctggttgtccaaataaacttacccatcattcattctcaagacctctgaagggttggctccagaacttagacctttgcttatgcaaatcagaaaaacagaatggactaggactcagtgtgagtaacttcattatttttatgggccggttaataaatatttgtttaataatgggatgttttattttctgatgtacaaagcttgattaccatagaaaaccatgattttcagggttaatctctttttaaaattatacttcagaagagaaagaaatgctgctttcctatcttacccttcctgctctcctttttgtagtgatgaggaacaatgaaaaagaggtagtgtaaggaattgtgannnnnnnnnnnnnnnnnnnnnnnnnnnnnnnnnnnnnnnnntgtttttctttcagctcctccagtactttcatactattctaataaatatattttgttggtatgaagctatgaagcaaaagtagctattaccaatgcatacatacagtacactggttttaagttccactc

SEQ ID NO: 78745 - DNA, 690 bp, Homo Sapiens
  misc_feature (91)..(91): n is a, c, g, or t
caagagagatctcccggagtggcgggggcagcggcgacgaagcgagtgcggccacgcccccgtccagcagacgtgtctggtccccacccangagtccacaaggtggagatgggcttcggtggaggtggaggagcaaactgaaggggcaggctactggggtggggtagctttcgggaaagggaataaggagcacgatgcaagggcgctgtggcccccgggtgatctcccaccacacttactgtcttcctttatctctgtggacttgtatatattctggaaggggaaccacagtttcaccatcacccgcccattctactactcaacccctcccccccaaggtatttccagaactaaacccttcctttccctctgatgggtacactgaagcccctgctccacagagtagattgcacatggagggagggagagggggcgtgttgaacatcctgcagtcacagggtcaggggtcaggtggttgtagtctgtgcctgaagtctgtgtttgtgttgtcgtggagacaaggcctttgagccccacccttgtcctagaacctaccccctctcaaggatgcgctctttatttctaccctgtttctccccgccacccccgacttcccgtggaaattcccaactcggttctcatggaggagtgggtggagacaaggagggagtaagtcgtaggagtacaagg

SEQ ID NO: 78746 - DNA, 1330 bp, Homo Sapiens
  misc_feature (1119)..(1131): n is a, c, g, or t
gggaagatggattaggggatgataaagaccccaacaagaagatgaaacgaaacttaaggaaaattctggatagtaaagcaatagaccttatgaatgcactaatgaggctaaatcagatcaggcctgggcttcagtataagctcctatctcagtctggccccgttcatgccccagtcttcacaatgtctgtagatgtggatggcacaacatatgaagcctcaggaccatccaagaaaacagcaaaacttcacgtagcggtgaaggtattgcaggcaatgggatatccaacaggctttgatgcagatattgaatgtatgagttccgatgaaaaatcagataatgaaagtaaaaatgaaacagtgtcttcaaactcaagcaataatactggaaattctacaactgaaacctccagtaccttagaggtaagaactcagggccctatcctcacagcaagtggcaaaaaccctgtaatggagctcaatgaaaaaagaagaggtctcaagtatgaactcatctcagagactggtggaagccatgacaagcgctttgtaatggaggtagaagtagatggacagaaattcagaggcgcaggtccaaataagaaagtggcaaaggcgagtgcagctttagctgccttggagaaactgttttctggacccaatgcggcaaataataagaaaaagaagattatccctcaggcaaagggcgttgtgaatacagctgtgtctgcagcagtccaagctgttcggggcagaggaagaggaactctaacaaggggagcttttgttggggcgacagctgctcctggctacatagctccaggctatggaacaccatatggttacagcacagctgcccctgcctatggtttacccaagagaatggttctgttacccgttatgaaatttccaacatatcctgttccccactactcattcttttagcaaatgacagaagctaattcctattgaacaacaatacagtacaacacagaatgttagagaaaaagcctttttatcctgctttctttgaacacatacttgatcaaaattatttgtaaagaacatctttcctactttttgattttaacaaatgcaaatttagttctctaaaacttgnnnnnnnnnnnnngaaaccagttctgtgaaaacggtacctcatttctggaaaataacttataccagcccttctgttctagggaaataaaagtctagcagttcaaagtttaagttttaagagacgtatcagattatgtaaaattaaatttgtgaaggatgtatagagtctcaaacactgatcacaaataaactgatttgatgtaacacaaaaa

SEQ ID NO: 78747 - DNA, 742 bp, Homo Sapiens
  misc_feature (41)..(41): n is a, c, g, or t
  misc_feature (426)..(484): n is a, c, g, or t
gtgaggcagtgatctgcctccatcctgtttccccaaagccncagggcaccatccttaggggagaaggtctacagttatcattattttaattccattactttcagtctggaaaactaagctagtcagaactgtcatcttgcttcccaatctaagaacctgtggccctggaacacttttcaagaattggttcattttgctttacacagtagatctgttccaacagttctgtgtaaaccaaatgctatttttcaatgcatttggactgctgaccatttaaaagcagcctatgattgcttctttttgtaaagcaagcaacctccctccactttagctgttttgactatttgaattttcacatattgggcttacccagagtggagcacacctccagggcatgtggctgacactgggtcaatgtctgcatcnnnnnnnnnnnnnnnnnnnnnnnnnnnnnnnnnnnnnnnnnnnnnnnnnnnnnnnnnnngccactccccaggctggtgctctcctcctgtgcccagtgactgcccagtggcagctcagctgcccttcactcccacctgctgccaaagtccctgtgctaatgggattacaaatacaaaaagtggaaaaaaattttcgtaaactttgttttatattaaaagaaaaatccataagtctgtgtgtgttaaacatgaggttctgcctctgtggctgtgtttgaaaaaataaagttttattagaataatccattttcccaagc

SEQ ID NO: 78748 - DNA, 516 bp, Homo Sapiens
gtccaacagtctgtgtaaaccaaatgctattttcaatgcatttggactgctgaccatttaaaagcagcctatgattgcttctttttgtaaagcaagcaacctccctccactttagctgttttgactatttgaattttcacatattgggcttacccagagtggagcacacctccagggcatgtggctgacactgggtcaatgtctgcatctgtgctgtgtgtgtagtgtggttggccagtaggtgagtatccctgtgtgtgtgagtgaagccactccccaggctggtgctctcctcctgtgcccagtgactgcccagtggcagctcagctgcccttcactcccacctgctgccaaagtccctgtgctaatgggattacaaatacaaaaagtggaaaaaaattttcgtaaactttgttttatattaaaagaaaaatccataagtctgtgtgtgttaaacatgaggttctgcctctgtggctgtgtttgaaaaaataaagttttattagaataatccat

SEQ ID NO: 78749 - DNA, 943 bp, Homo Sapiens
ccgatccagaccttagaccagggaaaggtaaggagactgggcctggtctgctttcccgggcctgaaagcttccccgaggtttgcagggtcagggaagaggaaacggtggggctgagcagtcactgcctgttccccactgcctgtgttcgcaggagccacgggacagaagacggtggcctctgctgccgggccacgttagtccgcagctcacccgaacagaggacaaccctgaggtgtggcatatgggcacctggcactgggagtcgggggagcacgtccaggcgtggtgcatcctggggcagaacgccatggctcctccccgctctcttggcttctgcctgttggggtctcattcctttctgttccccacgtgccccggggcggcattttactgctcagaatttggagggagggagcagtaccttcccggagtccacgcatgtgagttgggtcaagtgcattggacctagggaaagagaaagaaagaataaaagctggagagagagtgaagtgaatgcaagatacaaagtgggatggaagaattaaatccagagttccaggcaatcaaaatgagtgcaggttgaaagaaaacaggtgaattttagtggcatatggatgataaagctgtaaataaaattcttttgatgaaactctccggttatgagacaaagactgtaactgaacaggagctggtgtgactgttaccagacagaggcaactgatgaaaaagccctgtgaaagataggatgtgaggtgagcatgagcttgagctgagagacagacacaacagtatctgaaaagaatacatactctttccatgcatatatggaacatggatggaaactgaccacctactttgtccagaaaagaagtcttaagatatttcaaggaatcagtgtcgttatctgaccgtatcccaatgtcattaaaaaaaatttgagct

SEQ ID NO: 78750 - DNA, 1374 bp, Homo Sapiens
  misc_feature (632)..(644): n is a, c, g, or t
gctggaccggtccggaattcccgggatatcgtcgaccacgcgtccgcttaaagtttgcagtattctcccctgattggaatggttgagtgagggtaagggaaagaatatcttatttcttttatgattggtgcaaattggctaaagtgcatttttaaatttcctctacttaatttgtttttcagagataaggaaaaatattttgcacagatttactccactatggaaaagggatgctgtaggttgaaccattatagcctcagattcgatcttttcctaactaaaaatattaaagcctcatgtgtgaaataaatttttaaaaagatttatctggatttagagaattttagatcaacagatacctctcagtgtgtttgctaattaataaaaatcagtttcttacaaataaagtttgtaagaaaatgttcattttaagtgatagatagtggagaaaatttatcacctaaaatatacccatcagtataaggcaagcaaaagtcttaacatggcagccattctgcctttgccgtggccctgtcctgtttagttcttagtgggttaatttttgtacttttgcagaagaaacttcagcaagctagaactggaaggtactttaatttttcatatatatttgnnnnnnnnnnnnnaatgaaggctcatttacttgaaatgtaaaaactttcactgaatacaaatagaaaaagtgatgtgttttatatcatattgctttttgtccatctttgtggtttagtttatttactcacttcatgtttttcacctataaaattgtcaagctagcaaaaaaactcttgtttttttaattgggagagaagagacctgccagattatcagacctcttcatgttaaaagaccatctcctgtaaaactgacctagtggacaagctgaatttgaaatagactgtgaagtaagctgtaacttgtcattttaattttgtttaacacggttactgacttagatgatgtattaaataccaagataaagaaaaatgcacctaaaatctaattagaattctctgggtcaacaagtcaaggtggtattgatctgtgttaatctgagtaacttattgcctagcctataaataaattccaaaatatccaattcatttcttcttgaaatggtgcttgttttgttttctttccattacacaattagactcctacagtttaaaacaaactttaaaccactatcttgcactgctaacttttttctacctttgtaaatagaaacatttctgcataaaagtcatacatatgaagcaagggctgaatcataatcacaaggcttaattttgataaacgaatccagtgacctaaggattttctgcaaaatttgactgggagttgtgataggtggta

SEQ ID NO: 78751 - DNA, 572 bp, Homo Sapiens
tgtaaacatacacattactgaaatgacagcaacccacattgcagaggagaaaagtctattagctgtacagtttacatttcaatgcccaaacttatttatatatttacataaagatgctaccttgattaatcaatgtctatttgcatttccacatgtgaatttcttcagttttgatattccatatgaaggagctacagtgaaaacacttttgaataaagcagtgaaccctaagaatcttatcttgagatgagatgtgtgaaccaccatttgaatgttatttctccctgctgtgtacattagtctggctgggtgttggtcacagacatggatgcactgacggctattcccataaccgagccaggcgggaagggggaaaaggaagacattatttgtcaccaacaacccagtatcccaagtcaaaattctcaactatggccaaaaaggcctaaactcgacccacaggaactggctttctaactggttgacaaacacgtaagctgccctcctgcaaaagccaaccagagaacaggcaggtggcaacaggacccagcctagagcagagcacttcagaa

SEQ ID NO: 78752 - DNA, 796 bp, Homo Sapiens
  misc_feature (19)..(19): n is a, c, g, or t
  misc_feature (738)..(761): n is a, c, g, or t
  misc_feature (796)..(796): n is a, c, g, or t
tagcagatagcggccagcnggttggaatgacaccacctgtgtctcactaaccccaaaactgcgctcgacccggctgcgtccagggtctctagtccccccactagagactgagaagttgcctcgcaaacgagcaggggccccagttggtgggagtcctgggctggcaaagcggggccgcctacagcccccaagtcccctggggcctgagggttcagtagaggagtctgaggctgaagcctcaggtgaggaggaggaaggggatgggaccccacgccgacgtcctggcccccgccggcttgttgggaccaccaaccaaggggaccagcgcatcctgcgcagcagcgcccctccctccctggctggccctgctgttagtcacagaggccgcaaggccaagacgtgagtgggctgcccctccacctaggctttccaccgtggccactccctccatgaccaggcctgactctgttaaccactacttgaagtcttgagggggaaagcctccagggagacataggggccttctcccttcttcccaccaaagtagggggtaggcaactggttgtcatggaaatggggatcatcacagtccccttccccttcaccccacgtggctgggcagtgttaagggtggcaagatagtctctgtccccacccccttgtacttgattccccagctgtctttcacacagccccccacccttaggggaagggggaggggcttctctacaatgaggnnnnnnnnnnnnnnnnnnnnnnnnaagaagaaaaaataataaacttagtttctgtatgn

SEQ ID NO: 78753 - DNA, 1809 bp, Homo Sapiens
cagtcgacggtaccggacatatgcccgggaattcggccattacggccgggggagcagaggggtcggaaagggaaaacaactacggctgcggtgtggttggtggtgagatgacgaccttagtgctggataatggagcttacaacgccaaaatcggttacagccatgaaaatgtgtcggttattcctaattgtcagttccggtcaaaaacagcacgtcttaaaacttttactgccaaccagatagatgaaataaaagacccttctggactcttttacatcctcccttttcaaaagggctacttggtgaactgggatgttcagagacaagttcgggattacctttttggaaaagaaatgtatcaggttgattttttagatactaatattattatcactgaaccatactttaacttcacttcaattcaagaatcaatgaatgaaattctatttgaagaataccagtttcaagcagtattaagagtaaatgctggggctctcagtgcacataggtatttccgagataatccttccgaattatgctgtatcattgttgatagtggatattcctttacacatatagttccttattgtagaagtaaaaagaaaaaaagaagcaattattcggataaatgtgggaggaaaactcttaaccaatcatctaaaggagatcatatcttacaggcagctacatgttatggatgaaacacatgtgattaatcaagtgaaagaagatgtatgctatgtgtctcaggaatttcatagagacatggatattgcaaagttgaaaggagaagaaaatacagtaatgatagactatgtcttgcctgacttcagtacaattaaaaagggcttttgtaagccaagggaagagatggtgttgagtggaaaatacaaatctggggaacaaattcttcgtttggccaatgagagatttgctgttccggaaatactctttaatccttctgatataggcattcaagaaatgggaattccagaagctattgtctattcaattcaaaatctacctgaagaaatgcagccgcatttttttaagaacattgtcttgacaggaggaaattcccttttcccaggatttagggatcgggtttactcagaagttcgatgtcttactccaacagattatgatgtttctgttgtgctgcctgaaaaccctattacttatgcctgggaaggtggaaaattgatatcagagaatgatgattctgaagatatggtggtaacaagagaagattacgaagaaaatggacatagcgtctgtgaagagaaatttgatatttaagcaacatttttgaatgaaagttgtgaccataaggtttaatttcaaagttccttttaaaagaggttaaggaactgtgttaccttttgtcctaagaaaaaggcttgaatttatgtaaatactttgatcgattgctaattttcaaaggcttcttaggtaggttactacagtaaactgtaactcagtccacattttcatttaggagctagactaccataacaatgcttatgctgtttccaagggtaggttatttttcattaaaagaagaatgaatgcattttaagtttaattcttcatagctgaaagcacaaatttaacggcttcactggacagttttccttagaaggtagttttgtgtgactgtgactaaactattttattttaaaatgtcattcttatttatacattctaaagttggaaagactgatcttatatgtgtataatgtttattttgtacctagagtacatttaaaagggtggagactaagctaataaagtttttttggccactac

SEQ ID NO: 78754 - DNA, 611 bp, Homo Sapiens
  misc_feature (28)..(28): n is a, c, g, or t
  misc_feature (53)..(107): n is a, c, g, or t
cccttgtacgtccacagagactctgagnccaagagtagtagcagctgctactnnnnnnnnnnnnnnnnnnnnnnnnnnnnnnnnnnnnnnnnnnnnnnnnnnnnnnntcctccagttttcagtcactcagtaggtgtctgtactatcatatccatcatatgaatatatcacatatgataggtaccaactatctgagtgaaaactggaagaaatgttctaaaatgacagtgttctcgttttatacttgaagaaacaaacagatttgcacaaggtcctcagctactaaatggtagagctgagactgaacccagacagtttggttccagagctgagagaggagtgaaagagttgggtaacagcaacaaccatcctgtacatggagatttgagtgattaaaatggattttcatatcttttatcttggacctcataatatttcaaattttttttaaaattatgaagtatatcatacatataggaaaatacccaaaacaagtatacagttcattaacacaaagcaaacgtgaataaccacattcagtaaagaaattggaacactgtcaacacttcacagcctcctttatactcctcccaatcactgctacttccttt

SEQ ID NO: 78755 - DNA, 770 bp, Homo Sapiens
tgaggcagggtctcgctctgtcatccacactgggagttaagtggcaaagtgtgaatttaaggagtgagtcgtttgggatcacgagggaacatggaggtctgacgaacattatgcaatcccagaaacagcatagtaactcgttccaatccaatgcctccaccagcatgaggaggggctccaaagcggaaggaatcaatgtaagccttaattttctccaaatcaattccatgatgtaaagctctctctgttagcagttgaggatcatgtattctttgagctcctgacaatatttcttctcctctcatgaacatatcgtaagagttggactgtttgggatttcttgggtcaggcatggtatagaaaggtcttacagccaatggatatttatcaagaatataaaaatctgtatcatacttttcctttaccaaatgacccaacagcttttcatttggtgtgctcagatcgtcttcatctcccatttcgactccagcttccctaagcatagccaatgcttcacaatattctagtcttagagttggctccaaaaatttgaatggctcacatgggaactgtttattcactgtttgaatttcagtctgaaacctttcttgaagtcctttgaatatttgtaccatggtgtcagcaatttcttccataacttcgtggtaatggtaattaaaagcacatttcaatgtcctaaccaacaacctcagttagatgtctatgggtattagagtcttccgctctgaatactggtcctatagagaaaa

SEQ ID NO: 78756 - DNA, 887 bp, Homo Sapiens
  misc_feature (712)..(712): n is a, c, g, or t
acttcaaaagccacatttaattcaaaataaaatgagcatttctgacagatgacaacagtatgaaactgatttttttctttcctagatacaaaaatgatatggggcatttcttaacagtttagtaatcgtctaagaataattgtagaaataaccccaattccaccatcccagccactggtataaaacaaataccttccatgaaactgtctttcacataactaaaatatcctcacttacttggaacaatttcatgcttacacatgatcacaaacatttatttttagatgttgtggaattactggagctgagatttctgaaacaatatctgaatcttagcagagagataataatcctttcactatacattgcttgggcttccttaaccaaatctgagtaactactgtaataataatgctggtggtagtccatgatactctcaaatttttccctttaagaaatatataatccatgtaactctagcaaatatgttacattgtacactttcttaacaaggaatggctgttttcaggccttattaggaaaacaaacaaacaatggcagttactacctgttttttatcactgataagctaaaataaagctcaaatatggacagtttaactgtgtgatattaagtaaaaaatgaaaaccattatagttttaccaaaagaaacacaaaaaatatgggaaggagtgaaatgaacatggcatanggtcccaaagattacactatgattctgaacagcattttcaaaacaaagggtatctacatacaatttctgtgaatatttcttatactagatagatcaaaagcaaatgtaggctcagccctaccttgcccggccgtaatggccgaattcccgggcatatgtccggtaccgtcgactg

SEQ ID NO: 78757 - DNA, 1933 bp, Homo Sapiens
agacgagcgtggcggccgcggctgctcggggccgcgctggttgcccattgacagcggcgtctgcagctcgcttcaagatggccgcttggctcgcattcattttctgctgaacgacttttaactttcattgtcttttccgcccgcttcgatcgcctcgcgccggctgctctttccgggattttttatcaagcagaaatgcatcgaacaacgagaatcaagatcactgagctaaatccccacctgatgtgtgtgctttgtggagggtacttcattgatgccacaaccataatagaatgtctacattccttctgtaaaacgtgtattgttcgttacctggagaccagcaagtattgtcctatttgtgatgtccaagttcacaagaccagaccactactgaatataaggtcagataaaactctccaagatattgtatacaaattagttccagggcttttcaaaaatgaaatgaagagaagaagggatttttatgcagctcatccttctgctgatgctgccaatggctctaatgaagatagaggagaggttgcagatgaagataagagaattataactgatgatgagataataagcttatccattgaattctttgaccagaacagattggatcggaaagtaaacaaagacaaagagaaatctaaggaggaggtgaatgataaaagatacttacgatgcccagcagcaatgactgtgatgcacttaagaaagtttctcagaagtaaaatggacatacctaatactttccagattgatgtcatgtatgaggaggaacctttaaaggattattatacactaatcgatattgcctacatttatacctggagaaggaatcgtccacttccattgaaatacagagttcgacctacttgtaaaagaatgaagatcagtcaccagagagatggactgacaaatgctggagaactggaaagtgactctgggagtgacaaggccaacagcccagcaggaggtattccctccacctcttcttgtttgcctagccccagtactccagtgcagtctcctcatccacagtttcctcacatttccagtactatgaatggaaccagcaacagccccagcggtaaccaccaatcttcttttgccaatagacctcgaaaatcatcagtaaatgggtcatcagcaacttcttctggttgatacctgagactgttaaggaaaaaaattttaaacccctgatttatatagatatcttcatgccattacagctttctagatgctaatacatgtgactatcgtccaatttgctttcttttgtagtgacattaaatttggctataaaagatggactacatgtgatactcctatggacgttaattgaaaagaaagatggttgttataaagaactggtttcttggaaagcaggcaagactttttctctgtgttaggaaagatgggaaatggtttctgtaaccattgtttggatttggaagtactctgcagtggacataagcattgggccatagtttgttaatctcaactaacgcctacattacattctccttgatcgttcttgttattacgctgttttgtgaacctgtagaaaacaagtgctttttatcttgaaattcaaccaacggaaagaatatgcatagaataatgcattctatgtagccatgtcactgtgaataacgatttcttgcatatttagccattttgattcctgtttgatttatacttctctgttggctacgcaaaaccgatcaaagaaacagtgaacttcagctttacaatctgtatgcctaaaagcggggtactaccgtttattttactgaccttgtttaaatgattcgcttttgtaagaatcagatggcattatgcttgttgtacaatgccatattggtatatgacataacaggaaacagtattgtatgatatatttataaatgctataaag

SEQ ID NO: 78758 - DNA, 1420 bp, Homo Sapiens
  misc_feature (1305)..(1339): n is a, c, g, or t
ttttaaatgaatatcctttttattggattttttccaattacaaatgaaatttcattttacatctataattagaaacaacacttacaatgggactgtacaaatttaggtcaaaataaaaatatatgtatcttgtgacttcataaaacatcctttactatatttttaaagaaagcagaagtaacagcaatatatgtaaaagtaatgatttaatgactataagcaagacaaagcaatagaattgtgcttcttttgcagactggggacaatgaaatgtttagctacaattttcccatacaaacatgaaacaatattcatatagaataaacaccctcacaaataactgatgggtgatgaacacacaccaagttcgaccaaagcaaaaaataaactgaaaattgttgggtggggttattcatattttaaattcaacatgcttgctctatttaaaaatacctgtagaagctcataataaatagcttctattttcagacatagcagagaaggcatattccattgttaactgtaaaagcaactcttaaatttaaaattactgctataccacctattaaaataactttagataaaatgccttcttttagcaacctgctggtttatttaaaaaattgttttagaattatagtgatcaatatgcatttttaaaatacaatattaattccatcatagccaatggaaaattaagacggtttccatatttctcagttaaaggtttttcttcactgcaacaatttttaaagtaaacatgtattactggagaaaagtatataaagtatagaaagatgtgccaattgcttctaatggaacagactttagaattagatatccacattaaaaatattctttgctggtaagcaaggctcaacataggttatgggtatctgcaaaggctcgaaccagttgggagaattttaacaatcatttctgaatgcatgaaacacaatatttctttatagcatttataaatatatcatacaatactgtttcctgttatgtcatataccaatatggcattgtacaacaagcataatgccatctgattcttacaaaagcgaatcatttaaacaagtcagtaaaataaacggtagtacccgcttttaggcatacagattgtaaaactgaagttcacttttctttgatcggttttgcgtagcaacagagaagtataaatcaaacaggaatcaaatggctaaatatgcaagaaatcgttattcacagtgacatggctacatagaatgccccggccgtaatggccgaattcccgggcatatgtccggtaccgtcgactgnnnnnnnnnnnnnnnnnnnnnnnnnnnnnnnnnnncggccgcttcctcgctcactacttcgctgcgctcggtcgttcgctcgacgagctagcgccctatagtggatgatcagtctt

SEQ ID NO: 78759 - DNA, 1260 bp, Homo Sapiens
cggctggaccggtccggaattttccggatgcgtcttggcccgggcagcattggcggcagcgcccgagagagggaaccaacagtgtttgtaatgaagaacatcagactctgagctgtaacctgaattcttgtccaaaattcagcacactggcaacgagcacatcaaacagattgccacttgtcctgtcggcgtctttgagacacacttgcccatctaggaaagcacagtgcaggtatctgtgttctgccaccgtgtgccagcccggaccagctcacagacagccctgcctgtcttacttgggctgctcggcttcactgtctcagggcccctgaacctcccagagccctccgtgattgttggaatggtgagcttgtcggccacagactgctacattgtgcatgagatctacaatggggagaatgcccaagaccagtttgagtacgagctggagcaggccctggaagcccagtacaagtacattgtgattgagcccactcgcattggcgacgagacagcccgctggatcaccgtgggcaactgcctgcacaagacggccgtgctggcgggcaccgcctgcctcttcaccccgttggcgctgcccttagattattcccactacatttccctgcccgctggtgtgctgagcctggcctgctgcaccctctatgggatctcctggcagtttgacccttgctgcaagtaccaagtggagtacgacgcctataaactgtcgcgcctgcctctgcacacactcacctcctccaccccggtggtgctggtccggaaggacgacctgcacagaaagagactgcacaacacgatagcactggccgccctggtgtactgtgtaaagaagatttacgaactctatgccgtatgatttcagtagaacagggagcgaagcaaaaccacccggcccacaagagacaacagagtattcagatcgccacactctgtgaggcagcagagcctgggcaggtgtttggcttagtatttgttatttttaaaaaataacagatcacgggtgtacccagggtttttcagctcattacactaagatgtggatttccataacccaagaggggggtctgaggctgtggaagtccgactgggcagtggaatgctgatggaggcagacgctgccgagggggtgtggacgtgctttgggggaggtctttaagtctattgtttaactgtaccatccagagcccaccagaagctattgatcattaaaattatgagaatttcaactccaaaaaa

SEQ ID NO: 78760 - DNA, 1025 bp, Homo Sapiens
  misc_feature (37)..(37): n is a, c, g, or t
  misc_feature (73)..(73): n is a, c, g, or t
  misc_feature (95)..(96): n is a, c, g, or t
  misc_feature (114)..(114): n is a, c, g, or t
  misc_feature (123)..(123): n is a, c, g, or t
  misc_feature (170)..(170): n is a, c, g, or t
  misc_feature (172)..(172): n is a, c, g, or t
  misc_feature (181)..(181): n is a, c, g, or t
  misc_feature (229)..(229): n is a, c, g, or t
  misc_feature (290)..(290): n is a, c, g, or t
tcaccttggtttaaacacaatggggaggagcgcaggnacatcgcggacgcctccgggtgaccggtccctgctntgctgtccctgccccacaccgnnatccagaaaaaggcgccntgaagctgnttgagtcttgcgcgcttccgagctgacacacaccgaagtgtggagcncngacgcctcntgctggaaaaagggacacaggagcgctcgcgatcgccctcctcctctngacacgggactccaaaacgaccgttgagaagagtcagatgtagggatcagcaatagtgcantgtggacaagacagacaagacgcagacaatgaaaacccctaagggcctgggcaagaaaaaggagaaatcatgggaattggccaagaaagaggagaagttggggtctgggcagtcacccacacaaggaacccctaagaaggaagatgccacaaaggcaggcaaggggaaggtaaccatccctgaacagaagccaagcagggcaaaagggatcaagatcgggagcagagagaagcgcagcatcctcctggagtccgagctggttgttgaggctactgaggtggtcaaccctctcctggagcctgtggagcaccgagatgggaaagttttcatgcctgggaacaaggtccttttgcacctcaacctcatccggaaccgcatcacagaggtggggctggagggcttcctcgccacggtgcagtatcagatgcagttctccaaggccaagagtgcatccaagggtccagtggggctgctgtggctgtccctggctaaaaattgcttcgccccacaatgtcctgcgtacgccataatccaggagctgatgttgccaagggatcccatcaaggccaaactcagggaggatgaggccatggcattcttcccctagccccctcccacctgcttgcctctaagactcggggctacagaagcacctcctgtccctgtgtggggtgacctccctgggggagatctcagaccaataacaaagtctgttgctatacttttccttgaaaa

SEQ ID NO: 78761 - DNA, 689 bp, Homo Sapiens
aaatgtggccaccactgaagttgctgatacagttggactggttgattttgtccaagaagtaaatgtttatggagtgcatgtgccagatcatgagggtcgcattggcatggcctccatcaaaatgaaagaaaaccatgaatttgatggaaagaaactctttcagcacattgctgattacctacctagttatgcaaggccccggtttctaagaatacaggacaccattgagatcactggaacttttaaacaccgcaaaatgaccctggtggaggagggctttaaccctgctgtcatcaaagatgccttgtatttcttggatgacacagcaaaaatgtatgtgcctatgactgaggacatctataatgccataagtgctaaaaccctgaaactctgaatattcccaggaggataactcaacatttccagaaagaaactgaatggacagccacttgatataatccaactttaatttgattgaagattgtgaggaaattttgtaggaaatttgcatacccgtaaagggagacttttttaaataacagttgagtctttgcaagtaaaaagatttagagattattatttttcagtgtgcacctactgtttgtatttgcaaactgagcttgttggagggaaggcattattttttaaaatacttagtaaattaaatgaacaccaacatgtgagatggc

SEQ ID NO: 78762 - DNA, 1025 bp, Homo Sapiens
  misc_feature (69)..(69): n is a, c, g, or t
  misc_feature (82)..(82): n is a, c, g, or t
  misc_feature (105)..(105): n is a, c, g, or t
  misc_feature (114)..(114): n is a, c, g, or t
  misc_feature (119)..(119): n is a, c, g, or t
  misc_feature (159)..(159): n is a, c, g, or t
  misc_feature (176)..(176): n is a, c, g, or t
  misc_feature (181)..(181): n is a, c, g, or t
  misc_feature (193)..(193): n is a, c, g, or t
  misc_feature (208)..(208): n is a, c, g, or t
  misc_feature (254)..(254): n is a, c, g, or t
  misc_feature (260)..(260): n is a, c, g, or t
  misc_feature (298)..(298): n is a, c, g, or t
tttttagtggtcaatcccgggattttagccattcagatccccaaatgggttagttcagttgagttttgnttttatccccatngggtcccgacccagctctggtcntggtcatgntgatnaacgccgagtcggattggctccagctgcagactcttctcnagcatgtgttgtcctcntagtntgctcctcatgnagagggtcaacaccntgccccagccaagattttgctcatgtcctacaaggaggagccaaanccaagntgagtgctggagccacattcaaatgtggttgataatcntggggcaggccagctctgatgtggatgaaagctgagccaactgtcgccacagctgcccagctgggtccgctgctcccctggctggctgttcagctgtctactaagcccaaaaaaaagtactatgcctcactagcagaggctagacccagaaagagggaacaatgaggacccctcccctcccagaggaaagagctgagccactctccccatccagggaacagtaggtccaggctggatgctggtatgatgggaactgcccttttcacctgccagggagttcctaaagctgatcttcctggggttctgaaggttgcgacctaggttaatgagaccaaattctaggaaccactgcccaggccaaccaccgccagtgctgcagagatcaaagaaatccacagccacaggaaaaggagcttctttggacatgcccagctccaaactgtcccagggggaactggcacagcccttacatagcccaccccctcttggcctcaccgtggcctggaaattggccagagggtccacatcctgcccaaaccactctcctctcgtcccaaggcaaaggtgatgccctgaggcctagggctggataaagcccagctctggatgctgctaacccactctgctgccccaccccatcctccaatttttatactaggctctttgccattgtgacgtcccatgacatagtctgatgcacgataaaacaattatttctttatcttgc

SEQ ID NO: 78763 - DNA, 1144 bp, Homo Sapiens
atggtttattgtggataactagatatgttaactagggttttaaagactgtttgaacagagattctcgaaggcaactgtcttgcgtccttaagagtgtatagtgctcacctatgaccaggcacgctggactattatgagggaacacaaatcatcaacagtaaattagacatgacagtgaaagattgatctgagaatttctggaataagcccctggtttgttttactcgctgaaatcaaagattggaaacttctgtagacacatggtagaaacatacgtgaagataacagggaaaaatttaagtgcattaaagaagaaagtgaaaccacccaggactttgatcactgaagatgggaaagccctaaatgtgaatgagccctaaaattgacttctctttgaaagataacgaaaagcagatcatcctggaccttgctgtctataggtatatggatacctctttaatcgatgttgatgtgcaaccaacttacgtgcgagtaatgatcaaaggaaagccatttcagcttgtccttcctgcagaagtgaaacccgatagtagttctgctaaaagatctcagacaacgggtcatttggtcatctgcatgcccaaggtaggagaagtaatcacaggtggtcagcgagcattcaaatctatgaaaactacctcggacaggagcagagaacaaacaaatacaagaagcaagcacatggagaaactagaagtagaccctagcaagcactcattccctgatgtgactaacatagttcaagagaaaaaacacacacccagaagacgacctgaacccaaaattataccaagtgaggaagacccaacctttgaagacaaccctgaagtgcctccgctgatttgaaacatctggctgcgttgccattggctgagacccaccaggtccagttttggttggtgtagagaccatatgcatattattcctgggataaacacagagttatttgtcaatatcgctgctccagtgttttaactcttactttgcatagtaatatccttaagatagcttaaaattaaaatgtatgtcttaaatgctataactcatcatttacctataataaagggttggtattgaaaatgtttagtaagatcatagaactattgcataaaacactgattat

SEQ ID NO: 78764 - DNA, 860 bp, Homo Sapiens
  misc_feature (685)..(686): n is a, c, g, or t
  misc_feature (688)..(688): n is a, c, g, or t
  misc_feature (693)..(693): n is a, c, g, or t
  misc_feature (721)..(737): n is a, c, g, or t
  misc_feature (759)..(760): n is a, c, g, or t
  misc_feature (762)..(762): n is a, c, g, or t
gcaacccccgggacgttgtggtctccctctatcattactccaaagatcgccgggcagttaaaggacccgggcacacccgaccagttcctgagggacttcctcaaaggcgaagtgcagtttggctcctggttcgaccacattaagggctggcttcggatgaagggcaaagacaacttcctatttatcacctacgaggagctgcagcaggacttacagggctccgtggagcgcatctgtgggttcctgggccgtccgctgggcaaggaggcactgggctccgtcgtggcacactcaaccttcagcgccatgaaggccaacaccatgtccaactacacgctgctgcctcccagcctgctggaccaccgtcgcggggccttcctccggaaaggggtctgtggcgactggaagaaccacttcacggtggcccagagcgaagccttcgatcgtgcctaccgcaagcagatgcgggggatgccgaccttcccctgggatgaagacccggaggaggacggcagcccagatcctgagcccagccctgagcctgagcccaagcccagccttgagcccaacaccagcctggagcgtgagcccagacccaactccagccccagccccagccccggccaggcctctgagaccccgcacccacgaccctcataataaaaacgtcgattctgaaaaaccnnanccaanttatccccccccacttatcattattttnnnnnnnnnnnnnnnnnttataaacctatattaaattcnnantaaacatgtgtgggccccctccggccccccaaaaagtttttctaaaaccattcctttttgggcggcgggggcccccgttagggaaaggtgcacactgc

SEQ ID NO: 78765 - DNA, 718 bp, Homo Sapiens
gaacgttcccagggaagtgacagttgataccactttggctgggtaccacctgcccaagggtaccatgatcctgaccaatttgacggcgctgcacagggaccccacagagtgggccacccctgacacattcaatccggaccattttctggagaatggacagtttaagaaaagggaagcctttatgcctttctcaataggaaagcgggcatgcctcggagaacagttggccaggactgagctgtttattttcttcacttcccttatgcaaaaatttaccttcaggcccccaaacaatgagaagctgagcctgaagtttagaatgggtatcaccatttccccagtcagtcaccgcctctgcgctgttcctcaggtgtaatattgttaagaaagaaaggggcaaggaaagtaagaagacatggcacgtgttctgaaaccactggtgtctgctcagatgtgttgggacaaaatgaaagtgactttcaagaaagatcagaggaatttgactcagagaaaactagatccaaatcccagctctactgtctcgtccgaattagccttgggaaaatcatttatatgctaaataatttacctttttatctaggagatgaaaagaggataatgtttccttccataaagaaagttcttgtaagaatcaaaagaaatggtgagctttaagtggtttgtaaaccataaaacacatcataaaagttctatctat

SEQ ID NO: 78766 - DNA, 717 bp, Homo Sapiens
  misc_feature (17)..(17): n is a, c, g, or t
gaacatgatataagctntgtgacaaaaacaaatgccattgtgtcccttatttagtcataaaaccttaggattcagctgaatatatattcacacatgtatattacacatatatcactatacagttaacacatgcaccttgcactattagtgacaaataatactgctaaacaaaataggcttcatgcaatctattgccattgctagaagaataaataggcctagcagatgggcaacttgggttgttagaataaggtcattcttgcagaatatggcacttaaattatctccagctgtaatgtcctaccatataatccagaggttgcatagaagcagagttgtcacagtctctgtagcacgtttgtgagaattctctaggcaggcccagcccttctctagaagtttgaatttcactcccaccttgttgctggggtaccttcttcagggtacatctaaacacagtggccttatacagaaatgttgttcaacccacacagtgctttaaaaaattaattgccaacatttaaaaatcagggagtttcacataaaattcagacttcttgtttccctttaaaaatgagaagctaataacatgagttgaattcccacaagtcaacaatgagctggaatctaatatggatggtcctcttatctttaccagtgcacatggtgaaaaaattcaaacagtataataaagtcttctttcaagtcaaaatatag

SEQ ID NO: 78767 - DNA, 867 bp, Homo Sapiens
gtcaactgtaaggtgaggaggacgacctgtactgcctggatccggaacacgctgcaccccgaggaccctgaggtgcgtgctgccgcaggaggcctttccgtctgcgccacgagatcgtggacacgcctcccgggcccgagcacctgcaggacaaggccgactccccgcacgtgagcggcagcgaggcggatgtggcctccctggcccccgtggactcctccttctcgctcctgtctgtctcacacgcgctctacgacagccgcctgccgcccgacttcttcggcgtgctggtgcgcgacatgctgcacttctacgctgagcagggcgacgtgcagatggctgtgtctgtgctcatcgtcctgggtgaacgggtgcgcaaggacatcgacgagcagacccaggagcactggtacacttcctacatcgacctgctgcagcgcttccgcctctggaacgtgtccaacgaggtggtcaagctgagcaccagccgcgccgtcagctgcctcaaccaggcctccaccaccctgcacgtcaactgcagccactgcaagcggcccatgagcagccggggctgggtctgcgacaggtgccaccgctgcgccagcatgtgtgccgtctgccaccacgtagtcaagggtctcttcgtgtggtgccagggctgcagccacggcggccacctgcagcacatcatgaagtggctggaaggcagctcccactgtcccgcaggctgcggccacctctgcgagtactcctgacggggcatctgctgggcttgcccgggcggccgcgtgcagaaccccgcctggtcttgtgcccgagacgggcggaggctggaacttgagacctcaataaaggaagtagagccgc

SEQ ID NO: 78768 - DNA, 1149 bp, Homo Sapiens
  misc_feature (216)..(216): n is a, c, g, or t
  misc_feature (1037)..(1055): n is a, c, g, or t
gcggcaaccggaaacattgtaatatgacccagtgtgtacaaaaagcaggctgtacggtccggaattcccgggatatcgtcgacccacgcgttcggtttagtcagaggcaggcaggattttggagctggaagaatctgctctccggtggctgccctgtgaacagagggctcccggtcagcttcccaggcccttcgccctatgcccagagggcagacntgcctctccctgggccggggtgcgctgggtgccaggaggaggggagcataccccacaccctccctgccaccgttgccgttccagaacctcggtcagtgtttccctgtctgggggcagggcccagagcgagcacgcgtctggcggctgctgtcgttgtgttctaccccgtactgacccaacaccacaagggctttctctggtcccctgtccctaagacaataatcgctttctgacaaaggagcctgcacatttgggtgagcagacccaagctgtttacagctctttcttgtcctgccatccagtagcagttagtcttcatccccacgtgaacaaaatgggaaggagccgtgaggagaggagtgaggcaacaggcacccgaagtccctcgtccttccctctgtgtgctctgaatatgtccttgtccttcctgacccatctctgaccagctgggaacctgcttggggtccccctcaaacctgtgtctggggtgtgggctcacagatccctatcagcctggttcgtgggagggctcttcctaaagggacccccatctctaagtcactctgaaagggagttgtggagaggagacgcctccagactctcagaagttttgaggactgaactgggtcactcgggatctgtgttcgaatcctccccacccctttctttgtggagtttcctaacctgctgctgaagcacaatgttttggtgctttcttttctcatttgttaaaggcagtgtccaaaagccattccagatgccaagaccaggggcttatttctagggaaggtaggtcggtttccatgtttccctcccgttannnnnnnnnnnnnnnnnnngcctgagacaagccgagtatgaggtggtttgatttaagaaaaatcaatgaaattgtttactactgttttaaaataaaaccgtaaactctgaaaa

SEQ ID NO: 78769 - DNA, 1209 bp, Homo Sapiens
  misc_feature (328)..(368): n is a, c, g, or t
cagtcgacggtaccggacatatgcccgggaattcggccattacggccggggctgttaaaacttctagattgaaatttgacagccaggttacatattggggacttttaaagtgtctttccaaagagatttcattaaccgtttagattagaatatctttcccaattgttacagtgacatatatgctgcaatatttaacaactggagtattagccacatgggttattttttcaatctgtgttttgaatttttttattgtgtgttatttaaaatattacatatgcagctgggagaactacacctttgtgcacatagatttatatattaattnnnnnnnnnnnnnnnnnnnnnnnnnnnnnnnnnnnnnnnnngtgccttgttcatcaggaaaacttttgttttgtattttgacaagaaaggcaccttcagagtttctttttaagtatagttgacaagtgtataaatgttacacttactttcagagttctttttagatctaaagaagtcagttcaaaaatggaaatcaacaatgttaggagaaatctgaattctgttaagttagtaagtattatgtatagcatctgtttttaaccatttccattcttatccctagtgtatcagttgatcacactaagaaagcttaaagattgagcatttgaaataaatgctctttataaatgattagatttttgaagggatattgaaatcattgcgctgtgatttcatctgtgatgtgaaaaatcaatttattatccttggtgctttcccccccaccaatgcacaaataattgtgaacagcttgaaatgacttaaactgtaatccaaatgggacaatctgataagaatttcatgcattggtagttaaataacttaaattgctaaagctttagcttgaaatttatgtttagaaaaactattgatttcccatggtatgaatataactattgtaattcttcaaatgagactcttctcaccttaaatagtcatatattaattaacttataggaaataagcatactatatgttagctgttttaaaaggtaccagatgtaagagtcataaatatatgcaattaaagaagttcatagatttcacatgaatgtaaatgtgttatatggagacatgtcttgtaaacagttgaatgtatgtaagttttctgtttgtgaaaatgtagttaatgtactccactgtggaggtcataagggaagctac

SEQ ID NO: 78770 - DNA, 677 bp, Homo Sapiens
  misc_feature (116)..(116): n is a, c, g, or t
ggggtaagtggctggctggactcacccctgctccccgtacacctgtgcctgtgactggcggtccaagctccccacacacacatcttgctggtgcctttccctgaagtcaccacccnaggggctggctgtcatcagcccattcttgtcccagccagggtaccggagggaatgataaaacagaatgtgtttgaattacacacaaaaatgttccctgcagcaggtcataaactctgtgaactaatgaagctgacaaacagagctggagtacgtttcccctcacccttcctttcctcctagctcagcaaggggtgctcaggttcaggatgttgtttgttgattcaggctcaaccaggctccgcaagaaaaccttatcaggagattttattttcatgaacaggtgccagtcttcccgccagccacgtccagctggcgtcaataagcatctttggggatgtcctgcctcctccaggaccagccatgagtggctcttatggccaaaggcggtactgcaggccaagcaaacggctctgggctggaatagccctacctgagtgccctgtttgactccgccactatctgccatgtgagttgggcaaattgttgaccacctctgagccttgaaaaagtaggaggttactttgttagagcaaaataataaaatttaattttaaaaaaga

SEQ ID NO: 78771 - DNA, 647 bp, Homo Sapiens
cttaatggaagaccaaatggtttttatatgtgtatgtacaaagtttctattaacgctgcccgtctcccttataacctggacgtgagctgtcagagcagaagccactaggccactgcgcgtctgaggctcagaccctgctgtggttggcttggggtggccaatgggctgggaccctccatgagagttttggacacttgggtcacctgacccgtgcctctctgacacatgtctccggggggcagccacctggccaatgtgcatttttgcacatgctggaaccttccatgggggtctgggctattggctggagccaggacatgagtcaggggcaccatggacctcacgtgccagggagacttgaatgtggctgtcactcttccggacgccaagggctgcaggaggctgcttttggcactacccaccccgtgtgacagaataggagccagcgactcaggactgctcacgggtcaggagggcaacgcctgaagtcagacctccctataggtcaacagggacaacctggggatctctggagcagggccctcctctctcaggcttggcccactcccccagacacctggacacgtggccacaaatctgggacaaggggcccccgcacagcatgaaataaaaagtgcctgagaaaa

SEQ ID NO: 78772 - DNA, 1060 bp, Homo Sapiens
  misc_feature (981)..(1000): n is a, c, g, or t
gcagtgaggccgggtgtgaatcggcacgaggcgtggagtggccggcgacaagatggcagcagcgtgtcggagcgtgaagggcctggtggcggtaataaccggaggagcctcgggcctgggcctggccacggcggagcgacttgtggggcagggagcctctgctgtgcttctggacctgcccaactcgggtggggaggcccaagccaagaagttaggaaacaactgcgttttcgccccagccgacgtgacctctgagaaggatgtgcaaacagctctggctctagcaaaaggaaagtttggccgtgtggatgtagctgtcaactgtgcaggcatcgcggtggctagcaagacgtacaacttaaagaagggccagacccataccttggaagacttccagcgagttcttgatgtgaatctcatgggcaccttcaatgtgatccgcctggtggctggtgagatgggccagaatgaaccagaccagggaggccaacgtggggtcatcatcaacactgccagtgtggctgccttcgagggtcaggttggacaagctgcatactctgcttccaaggggggaatagtgggcatgacactgcccattgctcgggatctggctcccataggtatccgggtgatgaccattgccccaggtctgtttggcaccccactgctgaccagcctcccagagaaagtgtgcaacttcttggccagccaagtgcccttccctagccgactgggtgaccctgctgagtatgctcacctcgtacaggccatcatcgagaacccattcctcaatggagaggtcatccggctggatggggccattcgtatgcagccttgaagggagaaggcagagaaaacacacgctcctctgcccttcctttccctggggtactactctccagcttgggaggaagcccagtagccattttgtaactgcctaccagtcgccctctgtgcctaataaagtctctttttctcacnnnnnnnnnnnnnnnnnnnngaccgcgtatgcggccgcaagcttattcccttgtagtgagggttaattttagcttagcac

SEQ ID NO: 78773 - DNA, 1036 bp, Homo Sapiens
ggcctttgtactatgaccagtgtgttaaaaaagcaggctggtacggtccggaattcccgggatatcgtcgacccacgctgtgcggtggccggcgacaagatggcagcagcgtgtcggagcgtgaagggcctggtggcggtaataaccggaggagcctcgggcctgggcctggccacggcggagcgacttgtggggcagggagcctctgctgtgcttctggacctgcccaactcgggtggggaggcccaagccaagaagttaggaaacaactgcgttttcgccccagccgacgtgacctctgagaaggatgtgcaaacagctctggctctagcaaaaggaaagtttggccgtgtggatgtagctgtcaactgtgcaggcatcgcggtggctagcaagacgtacaacttaaagaagggccagacccataccttggaagacttccagcgagttcttgatgtgaatctcatgggcaccttcaatgtgatccgcctggtggctggtgagatgggccagaatgaaccagaccagggaggccaacgtggggtcatcatcaacactgccagtgtggctgccttcgagggtcaggttggacaagctgcatactctgcttccaaggggggaatagtgggcatgacactgcccattgctcgggatctggctcccataggtatccgggtgatgaccattgccccaggtctgtttggcaccccactgtgaccagctcccagagaaagtgtgcaacttcttggccagcaagtgcccttccctagacgactgggtgacctgctgaatatgctcacctcgtacaggccatcatcgagaaccattctcaatggggaggcctccgggtggatgggcctcggattcgcctgtagggggaagggcagaaaaaacggccctggcctccttaccgggcggaaccacccgcgggggaacccgtaccactgtattgctacagaggcccgtgtgcgaaagagctttttgacacacaaaaaaggcgggcgaaactctgcacgcagccacctttaggcacggg

SEQ ID NO: 78774 - DNA, 607 bp, Homo Sapiens
  misc_feature (31)..(31): n is a, c, g, or t
  misc_feature (74)..(74): n is a, c, g, or t
ccagatggtcccaggttggggttgtccacancctgaatcctaagttcccagcggaagccctgctgaagcttctnaattcccaggaaccaacccggataaaactcttgttctcagtgtccttgatggaaatggcaatgaactttttgcaaattggaccatctcaggggaatcccaaagatcggaaactattttctttctcaaaatcttccacaaagcattgagccttaggaatttctaagaaggatctggaatgaaaaaaaatcttttgaaaaggtatttgtatagcttcagttcagcaagattcatggggggtgttaaagtaagtgctggtgttaagccaaaccatgtttttcaaagactcatctggcctcaacgttggcaggatcagagtggcctcccaggatctatcacatcctcaaaagagttggttcaactggcatgtacccagatctctttgagctagtatgatactcccttgagtcaaaggctgccacatcacatctcctttaagtccccctaagtacgaccccagaagtattgacaaaatagtgcaattcctgaagatttcaggaggacataaatgaagagactaaactgcaaggtacca

SEQ ID NO: 78775 - DNA, 795 bp, Homo Sapiens
  misc_feature (25)..(25): n is a, c, g, or t
ttcagctgctgatgttgggcccttnccaatacgccttcttgaagataacgctgaccctggtgggcctgtttctcatccccgacggcatctatgacccagcagacatttctgaggggagcacagctctatggatcaacactttccttggcgtgtccacactgctggctctctggaccctgggcatcatttcccgtcaagccaggctacacctgggtgagcagaacatgggagccaaatttgctctgttccaggttctcctcatcctgactgccctacagccctccatcttctcagtcttggccaacggtgggcagattgcttgttcgcctccctattcctctaaaaccaggtctcaagtgatgaattgccacctcctcatactggagacttttctaatgactgtgctgacacgaatgtactaccgaaggaaagaccacaaggttgggtatgaaactttctcttctccagacctggacttgaacctcaaagcctaaggtggatggcttggacaatgaaaggatgctgtactcattagaatacaagattcctttactgtccctcaaccttgaccaaatgggaagcattcccccttgtcaacacaagctggcagatacatttgactctacagatgaaggtgaacaatgttagaataaaattgctttggatcttgcctggaaggtgttttaagttttgtaataaacaagatgatgtctgaaaatgtgtaactgggcaccttgcctctgtccatgtcactattaacccttcaaggttgtatattgctggctaggtgcgaca

SEQ ID NO: 78776 - DNA, 692 bp, Homo Sapiens
  misc_feature (36)..(36): n is a, c, g, or t
  misc_feature (73)..(73): n is a, c, g, or t
  misc_feature (127)..(127): n is a, c, g, or t
gcccaggggctgctgcaaacctccaggctcgaagtntaggccccacaggcagggggcccaaggccacagggcncaggtaacccagccctctccaaaggaaccagaccgaattaagccatctgctttntatgccagaccccagcagaccattcagccaagaagcaagctccccacactctcattcccatcaggagttataggagtatatggagctccccaccgaaggaaggagacagcgggggccctggaagtagcagatgatgaagacactcagacagaggagcccttggatcagagggcagcacagatagtggaagaggccttgtccctggaaaaccagcctggggctggggctgctatctcagcctacagcccccagctctgccatcttgagagccagcagctccagagggcaactggggaccactactctggccaccttttgtccttagcctccagcagcttgttcctcaggagccagcacctccgctgggctcacagggtacactgcggcctcctcagccctccccgttctcctgctcctaaacccacagcccagccttcccttcctctgagcagagcagccctggctgtgggggctatttccttatgggattctctggccagagaaaggagtagctgactaagcctgggagagggtttgtcacaataaaagaatacttactaacctc

SEQ ID NO: 78777 - DNA, 902 bp, Homo Sapiens
catatactcctataactcctaaagaggggaggcagcactgggtgatgcccaggctggaagagccctcagcattcctgccctggaccttcatgctagcccctttccctcccctgaacctggttctgcattccccaccacctcccaggatggcaaggaagtgagaggtgggcctttggtcccacccccatcccctctatatcccacccctgaagtcttatcgctttaagcactgccctttccaggtgcttcttttcatgtgatgaggccctgtgaagaagggacaggatatacagacgggggcagctggagacagttatgatgagtgccggctttgtgtctgagcattctgctcccatggacatccccaacaacagcagggaccaacctatgtcactgtcaaagggcagctgagaagggcctgagccccagggacccctcacctgatgggaatgagagtgtggggagcttgcttcttggctgaatggtctgctggggtctggcatagaaagcagatggcttaattcggtctggttcctttggagagggctgggttacctgggccctgtggccttgggcctagagaagggacactgggcttggaccctgattgctggccattcttacctttcctactccccagttcaggcttcagagagcccctgacgcctgcaggaacatggcagaggagacaccgtctgtcttcacaaagtacgtcctccctccttgctgcctcttcccaccagcctgacttatccagggacagagcagtagatgcctggcactcctcgatgcccagtgaaaccagactgtgcttccccacccccaccaccatgccccatgctcactggctcatttcttgggagggcttagagctggataatataagatcccttggaaaaaaa

SEQ ID NO: 78778 - DNA, 391 bp, Homo Sapiens
tgggggccagcctccctctccctcctccattcctctctccctgcccttttcctgcctgaagagcagaggtgaggacctgggacccctgaggggcaggccaggaggagctcgggcgcaggccaggcccccttggtgaagcagaggctgaaggaaaggggtctgggtcttgtccctaggaattctcctccctcaggagattgggggttgggggaggcagcgggtgatggctctgaagctgaacccagggcctggctgtggtcttcttggtcttgctgccccctgtgacccaaaggcatgggatggacagagatgcctgcccccgtgaagctggttggggagggcagttcaccagcatccatagagtaataaagtcactgtgtgtagacccgga

SEQ ID NO: 78779 - DNA, 1294 bp, Homo Sapiens
  misc_feature (1251)..(1251): n is a, c, g, or t
gggagagagtatgaagtcgacggcgcgccgaattcggcacgaggtcaggcgcgcgcgggcagtggtccccattgcctgctgcgcacccggacgtgcggctcccctcggcctcctcgccatggacgcggacgactcccgggcccccaagggctccttgcggaagttcctggagcacctctccggggccggcaaggccatcggcgtgctgaccagcggcggggatgctcaaggtatgaacgctgccgtccgtgccgtggtgcgcatgggtatctacgtgggggccaaggtgtacttcatctacgagggctaccagggcatggtggacggaggctcaaacatcgcagaggccgactgggagagtgtctccagcatcctgcaagtgggcgggacgatcattggcagtgcgcggtgccaggccttccgcacgcgggaaggccgcctgaaggctgcttgcaacctgctgcagcgcggcatcaccaacctgtgtgtgatcggcggggacgggagcctcaccggggccaacctcttccggaaggagtggagtgggctgctggaggagctggccaggaacggccagatcgataaggaggccgtgcagaagtacgcctacctcaacgtggtgggcatggtgggctccatcgacaatgatttctgcggcaccgacatgaccatcggcacggactccgccctgcacaggatcatcgaggtcgtcgacgccatcatgaccacggcccagagccaccagaggaccttcgttctggaggtgatgggacgacactgtgggtacctggccctggtgagtgccttggcctgcggtgcggactgggtgttccttccagaatctccaccagaggaaggctggggaggagcagatgtgtgtcaaaactctcggagaaccgtgcccggaaaaaaaggctgaatattattattgtggctgaaggagcaattgatacccaaaataaacccatcacctctgagaaaatcaaagagcttgtcgtcacgcagctgggctatgacacacgtgtgaccatcctcgggcacgtgcagagaggagggaccccttcggcattcgacaggatcttggccagccgcatgggagtggaggcagtcatcgccttgctagaggccaccccggacaccccagcttgcgtcgtgtcactgaacgggaaccacgccgtgcgcctgccgctgatggagtgcgtgcagatgactcaggatgtgcagaaggcgatggacgagaggagatttcangatgcggttcgactccgagggaggagctttgcgggcaactgaa

SEQ ID NO: 78780 - DNA, 2765 bp, Homo Sapiens
  misc_feature (2162)..(2217): n is a, c, g, or t
  misc_feature (2483)..(2491): n is a, c, g, or t
ggagtctggaaggctactgcatagcgtttgccttagtagaaaatggaccatttttgaagcctaggtccctgcaggcctcctggctaactcagctgtcaaagccccttttctctgctttctgagctgtttccaggactgagtgggtgctccctctgtttctctgctttctgagctgtgtccggggctccctctgtttctcttccagccaccagaggaccttcgttctggaggtgatgggacgacactgtgggtacctggccctggtgagtgccttggcctgcggtgcggactgggtgttccttccagaatctccaccagaggaaggctgggaggagcagatgtgtgtcaaactctcggagaaccgtgcccggaaaaaaaggctgaatattattattgtggctgaaggagcaattgatacccaaaataaacccatcacctctgagaaaatcaaagagcttgtcgtcacgcagctgggctatgacacacgtgtgaccatcctcgggcacgtgcagagaggagggaccccttcggcatttgacaggatcttggccagccgcatgggagtggaggcagtcatcgccttgctagaggccaccccggacaccccagcttgcgtcgtgtcactgaacgggaaccacgccgtgcgcctgccgctgatggagtgcgtgcagatgactcaggatgtgcagaaggcgatggacgagaggagatttcaagatgcggttcgactccgagggaggagctttgcgggcaacctgaacacctacaagcgacttgccatcaagctgccggatgatcagatcccaaagaccaattgcaacgtagctgtcatcaacgtgggggcacccgcggctgggatgaacgcggccgtacgctcagctgtgcgcgtgggcattgccgacggccacaggatgctcgccatctatgatggctttgacggcttcgccaagggccagatcaaagaaatcggctggacagatgtcgggggctggaccggccaaggaggctccattcttgggacaaaacgcgttctcccggggaagtacttggaagagatcgccacacagatgcgcacgcacagcatcaacgcgctgctgatcatcggtggattcgaggcctacctgggactcctggagctgtcagccgcccgggagaagcacgaggagttctgtgtccccatggtcatggttcccgctactgtgtccaacaatgtgccgggttccgatttcagcatcggggcagacaccgccctgaacactatcaccgacacctgcgaccgcatcaagcagtccgccagcggaaccaagcggcgcgtgttcatcatcgagaccatgggcggctactgtggctacctggccaacatgggggggctcgcggccggagctgatgccgcatacattttcgaagagcccttcgacatcagggatctgcagtccaacgtggagcacctgacggagaaaatgaagaccaccatccagagaggccttgtgctcagaaatgagagctgcagtgaaaactacaccaccgacttcatttaccagctgtattcagaagagggcaaaggcgtgtttgactgcaggaagaacgtgctgggtcacatgcagcagggtggggcaccctctccatttgatagaaactttggaaccaaaatctctgccagagctatggagtggatcactgcaaaactcaaggaggcccggggcagaggaaaaaaatttaccaccgatgattccatttgtgtgctgggaataagcaaaagaaacgttatttttcaacctgtggcagagctgaagaagcaaacggattttgagcacaggattcccaaagaacagtggtggctcaagctacggcccctcatgaaaatcctggccaagtacaaggccagctatgacgtgtcggactcaggccagctggaacatgtgcagccctggagtgtctgacccagtcccgcctgcatgtgcctgcagccaccgtggactgtctgtttttgtaacacttaagttattttatcagcactttatgcacgtattattgacattaatacctaatcggcgagtgcccatctgccccaccagctccagtgcgtgctgtctgtggagtgtgtctcatgctttcagatgtgcatatgagcagaattaattaaacatttgcctacaactccnnnnnnnnnnnnnnnnnnnnnnnnnnnnnnnnnnnnnnnnnnnnnnnnnnnnnnnngagagggggcggcgcccagccatcaaaatatatcccgccggcggaggggccgccagttgatgaaccgacgacacccgaccgttcttgttgtggcaacaaggaggggcacccataaaatgggaggacgcatcttataatacaaagcgcgagcagcggcagcgggcccgctttttaaaacaagccgtgtgagtacggggggaaaaaacagcgcgcagaccgtcgggaaccttcctgtggaggagaagaacacctccatcactcgcgannnnnnnnnagcaaaaatagtgggcgcaacaacacaacacacacgaagcgaatatttttcaccggcccgccgctgaggggggcctaattatatatacaacatctttttagacagaggggggctaaagcagcgggggtgaataaacaccctgcctggcgcatattatggttgctgccggcgtggcgagagaagaaatcttttggtgcactaacgcgggcattatggtagtctctcctgcagagccaattatttttacacccggggggcttgttgtaattatacc

SEQ ID NO: 78781 - DNA, 1473 bp, Homo Sapiens
gtctagtgagtttcaacatttttaaagttttcaaaaagccatcggaatgttaaattaatgtaaagggaacagctaatctagaccaaagaatggtattttcacttttctttgtaacattgaatggtttgaagtactcaaaatctgttacgctaaacttttgattctttaacacaattatttttaaacactggcattttccaaaactgtggcagctaactttttaaaatctcaaatgacatgcagtgtgagtagaaggaagtcaacaatatgtggggagagcactcggttgtctttacttttaaaagtaatacttggtgctaagaatttcaggattattgtatttacgttcaaatgaagatggcttttgtacttcctgtggacatgtagtaatgtctatattggctcataaaactaacctgaaaaacaaataaatgctttggaaatgtttcagttgctttagaaacattagtgcctgcctggatccccttagttttgaaatatttgccattgttgtttaaatacctatcactgtggtagagcttgcattgatcttttccacaagtattaaactgccaaaatgtgaatatgcaaagcctttctgaatctataataatggtacttctactggggagagtgtaatattttggactgctgttttccattaatgaggagagcaacaggcccctgattatacagttccaaagtaataagatgttaattgtaattcagccagaaagtacatgtctcccattgggaggatttggtgttaaataccaaactgctagccctagtattatggagatgaacatgatgatgtaacttgtaatagcagaatagttaatgaatgaaactagttcttataatttatctttatttaaaagcttagcctgccttaaaactagagatcaactttctcagctgcaaaagcttctagtctttcaagaagttcatactttatgaaattgcacagtaagcatttatttttcagaccatttttgaacatcactcctaaattaataaagtattcctctgttgctttagtatttattacaataaaaagggtttgaaatatagctgttctttatgcataaaacacccagctaggaccattactgccagagaaaaaaatcgtattgaatggccatttccctacttataagatgtctcaatctgaatttatttggctacactaaagaatgcagtatatttagttttccatttgcatgatgtttgtgtgctatagatgatattttaaattgaaaagtttgttttaaattatttttacagtgaagactgttttcagctctttttatattgtacatagtcttttatgtaatttactggcatatgttttgtagactgtttaatgactggatatcttccttcaacttttgaaatacaaaaccagtgttttttacttgtacactgttttaaagtctattaaaattgtcatttgacttttttctgttaaaa

SEQ ID NO: 78782 - DNA, 1040 bp, Homo Sapiens
  misc_feature (138)..(138): n is a, c, g, or t
acattcacagtctcaatgctgcagcaaaagcagttcatggacgggccatgcttctgggtcagcaaattgcaacactttcactacatgaccggaaggagaggcaccacgagaaagatcacaagcgaaatcatagcatgngacacatttctagcaagagcagtgacaaactgaatctagttaccaaaaccaaaacggaccctgctaaaactctgggaacgcccctgtgtcctcgaatggaagatgttcccttgttagagccgctgatatgtaaaaagatagcacatgagagactgactgtactaatatttcttgaagactgtatagtcactgcttgtcaggagggatttatttgcacatggggaaggcctggtaaagtggtaagttttaatccttaatgctgcaccagatctagaacttgaataggtagtgacttttttctttttcgtgggaggggtggggtgtacaatgaatgtgaatgacacttcttattcttaatgtaaatctcaatgcatcagagccataattttggatactgcatgccatgtaattctgaatcatttgataatttaccttagagcatttaaaaaaatataatcaaactaattgccagccaagtcagtcatcctcctgggagtatatagagtcccaaggttagcgctcctgtattagactatttcaattttaggaaaatcatgaccatgtggggaaacaatgactttaaaatgctgaaattaaaatttatgctttaactggaatattttttgcttaactactcaattagaatattgtacacctgatcaatgtgtgttcagcacagatggccatgaattgtcatttatagtccaattttttatcttaatcataaaatgtttaggaatctatgaaatttaactttaggaacaaaacatttagcagggttgattgatattatttttacattgttctggcaatccacagaaagagaagagccttaatttttaaaacccattttagtcattttatgacaattaaagttgtttaataaacatcttttttcaaag

SEQ ID NO: 78783 - DNA, 1835 bp, Homo Sapiens
  misc_feature (776)..(790): n is a, c, g, or t
  misc_feature (1405)..(1405): n is a, c, g, or t
aaaaacttaggctaggtacgaggctgggttggaattcggcacgagggttccgaggaagcagagccggagccgtggcctgccgggccggcgacatggatcccctgttccagcaaacgcacaagcaggtccacgagatccagtcttgcatgggacgcctggagacggcagacaagcagtctgtgcacatagtagaaaacgaaatccaagcaagcatagaccagatattcagccgtctagaacgtctggagattttgtccagcaaggagccccctaacaaaaggcaaaatgccagacttcgggttgaccagttaaagtatgatgtccagcacctgcagactgcgctcagaaacttccagcatcggcgccatgcaagggagcagcaggagagacagcgagaagagcttctgtctcgaaccttcaccactaacgactctgacaccaccataccaatggacgaatcactgcagtttaactcctccctccagaaagttcacaacggcatggatgacctcattttagatgggcacaatattttagatggactgaggacccagagactgaccttgaaggggactcagaagaagatccttgacattgccaacatgctgggcttgtccaacacagtgatgcggctcatcgagaagcgggctttccaggacaagtactttatgataggtgggatgctgctgacctgtgtggtcatgttcctcgtggtgcagtacctgacatgagccagccacgctcagtggctgaacagcattcccacagcctgcaannnnnnnnnnnnnnnaaagagagaggggggcccagaggccgccttttgaaatgtttgcctgtctgaactgtgaagacacttgggagtgattgtggtctaatttccaacctgctctgttttctgtgacatcttggagggggagctagtgccaccaccatgcgcggtgcttaggaaatgaaagaagtcccgggtctgtctctctcactctcgctctcactgggggagggaaagaatggctttggtggctttgttcacacagctgatgcgtgccctgggaaggtgtccacagtgagccctgtgtgcaggactgtccacacggttcacaccttgtcaccatcaggcctttctggctcctgatagggtggagcaaaagtggaaaggaaaggaaagaggccttttctcacagccattatattaaatagtaggtcgattcacatcctcgtgctcctggccaccctcccctgtgcctcagtgacatgtagatgactgactgccaatacttgtcaccattccctggaagcagctacctaggggaaacaagatgtagtgctattgccgataacaagtaagattttccacactacagctgggtgtttctcttttctaaagtgaggccagtgttatttcccngggagtgttcagtcttgaccctagtcactgattttttctagttgttaatagagtggttggcttttaaggttcagagactgtggcttggcacctgcgcccaggctttgtgggcctttgccccttagaaagtagctgtaggcaaagatttgtgattttccaattacagtctcagctctagttttagtatctctaattctttggttcccttctcttccctgaaatatattagcacctgccagccaggccctcattttgcccagccagtgtgggcagatcccaccgtggagacatctgtagtgtgtatgtccttgtaacactctgttttcagggactacaacctttttccttctgtgaccagccccggattcaggctgtactaataccaggtatattgtggaatttagtataaaggccaatctgtcctgaaaaa

SEQ ID NO: 78784 - DNA, 611 bp, Homo Sapiens
cccagacccctcccagccctgtcctcatgttcctcctgtagcatctttgttgggctacgcagaagccccggacatggcagccccaccccatgccacgccccttcctacattgttccctggaccatacacaggctgaagcagaggaaatcccaaagcgggtgcccatccagcccaggtcccaggatccctgcacccatttttgtgacctggggccccaaccgtgctgtgctgctcatcccagcagagggacctccctcgtccagcgacttccctttggccatagaaagaaatggtgagcatgagactggacacagcctgagggcgtgggcagcttcccaccctccctgggccttggaatcccccaaggctggttttcttcctggagacccccatgggcaacttggcaggagagatggtgccgtaggaggtcgtggatggttgatgccaagagaggccctcgcacccgtggtgggcaaatgtccaggcctgggctggcagcccagggctgtttctgggtgctccctggccccagggtggcgtctggttaccatggctgtgtgtgtccatgtctgcaagcagttcttcaataaatggcctgcctcccccaaaaa

SEQ ID NO: 78785 - DNA, 899 bp, Homo Sapiens
  misc_feature (722)..(722): n is a, c, g, or t
  misc_feature (728)..(729): n is a, c, g, or t
  misc_feature (740)..(742): n is a, c, g, or t
gggactccaacgctgggtgacattgagctcaccagcgccaccgtccccggcgaagttctgcgctggtcggcggagtagcaagtggccatggggagcctcagcggtctgcgcctggcagcaggaagctgttttaggttatgtgaaagagatgtttcctcatctctaaggcttaccagaagctctgatttgaagagaataaatggattttgcacaaaaccacaggaaagtcccggagctccatcccgcacttacaacagagtgcctttacacaaacctacggattggcagaaaaagatcctcatatggtcaggtcgcttcaaaaaggaagatgaaatcccagagactgtctcgttggagatgcttgatgctgcaaagaacaagatgcgagtgaagatcagctatctaatgattgccctgacggtggtaggatgcatcttcatggttattgagggcaagaaggctgcccaaagacacgagactttaacaagcttgaacttagaaaagaaagctcgtctgaaagaggaagcagctatgaaggccaaaacagagtagcagaggtatccgtgttggctggattttgaaaatccaggaattatgttataacgtgcctgtattaaaaaggatgtggtatgaggatccatttcataaagtatgatttgcccaaacctgtaccatttccgtatttctgctgtagaagtagaaataaattttcttacatgganaaaacnnaatgatattgnnntgccttgtcggccgcctcggcctccagagcttctagacattcgttggcgccgggccaatagaaatgacatggcatactggttctaggaatctggcatgctaggcttgatcccccataaaacgcggggaacgaggttgacatcaaagagttgagcctt

SEQ ID NO: 78786 - DNA, 688 bp, Homo Sapiens
atttgaaaaacttttattttgcataaaacagacccattccctttgtgggtcagatgttaccacctttaaaaaaatgttttttaactctcctttctgtcccactgaaaaatttattttgaaagggttaagaagagtctatcattgctggtcaaaatcggcctgaggatggccgccagggacagaggcctgaaggcatcatctgggcaggcctggaagcccacggggtgcagcatcctcaagcccaggggcgggagcgcctccggcctgccctccagggaagctgcatgtggacctccacggtattcagcctccagtttagtcagccttgagtctgggctgctcccgcacctggtgttttatgcgtgtgatatatgtgtatccatcctgcttccctgccttcaagggaagacttaactctccgagagaaaacctgcctggagctgcgcacattctcacagcttgagaacgcttgacgcaggaagtcaccagagtactcaagtcaaccgcaaactagtggttacaaaatgggagctttaaaaaaagtgctctactagaactgggtgtcctcacagtcgggagcagaaggctggggcgcaggcctgcggctctgcggcgcctctctgcaaaggctcgggtccaccttcagactgcaggctgccatgtgtgctgtggaggatgcacagtgtta

SEQ ID NO: 78787 - DNA, 728 bp, Homo Sapiens
  misc_feature (53)..(53): n is a, c, g, or t
catagcacatagtcacagttggcagcaacgtctccttttgggtgtggattatntgttccccaatgcaactgtgagcaccatgagtgcaggaaagtgcctgtttctgatcatggtatttccttggtgtgacttcatgtacagtcaagaggagaaactctgagtgggagcactagggaatagttgaagcttaatcttcattttggagaagagggagtgttattatccacgttcattattcacagtagcaaatttcacagtagcaaaaaggtgacagacactcaattgtccatcgacagataaatggataaacaaaatgtgccatatccatacagtagaatattactcagacataaaaaggaatgaaattccgatgcgtgctacatgtagacaaaccctgaaggcatgatgctatgtgaaattaaccagttacaaaaggacaaacactggatgattccattcataggatgtgcctagagcagtcaaggtcatagaggtggacagtagaatagtggttgcctggggctgtgaggaggaggaaatggggggttcatgtttactgtgtacagaagttctgtttggcaagatgaaaaaattctggagctggatggtggtgacagttgacaataatgaacttaatgctactgatctgtgtacttaaacatggttaaaacaatacattttatgtttgttatattttaccacaataaacagctacttaaaagtcaaaa

SEQ ID NO: 78788 - DNA, 664 bp, Homo Sapiens
gagcaatacacaaaaccaccacaaaattagatttatagactcaaaatgaaaacatcagcttactggtttgtagttcataccagtcatacattccaaaacatgttttgagtcttactctgtgcctgaccttgtgcttgataacagggatataatgggaagcaacactccagtggtcagatgctcacagtcttatggaggagcccaaataatatctggggaagttaaagtccatataatgactgataagagtacaatacaggtgccatgggaacacgtgacatcactgaagactgcctggaaggggccgcgcgtgtgttcatgcctatacgataaacatgatacataatgaaaatgcttatctttaggagaaaggagagcctagagtagcaggatcaaggatgaaagctggacttcaaatatgccttgttagtgtaaatgtgactgtggaactgtatgagtattttaagattatggagtaaagtaagttttaaaaagcagtccctaatcatcaaaagtaaaaaactcttgatgtagtcatataaccacactaagaactcttccaggtgacttcaaaacataggacagtacatctctagtagaatatgccctgagaatgaaaagaatgtaacagtgttagtattttgaataaacatgttattactaa

SEQ ID NO: 78789 - DNA, 887 bp, Homo Sapiens
ctgatgctccggcagggtcccagcggagctggttcctccgccagatggaactggataccaccttcctccgggagctcaacgtgctggattacagcctcctgatagccttccaacgtctccacgaggatgagaggggcccgggcagcagcctcatcttccgcacggccagaccatgaaatggaggctcagggggtgaagggactgatcaagatcattcagcaataaatgctggaaccaggactcaaccatggcttttggattccggagcctgtattcttaaccaccagctcctgcagcttggtcctcatgatctgggcaaggggggaggctgaaggctgcagccctcttgtcatccagatggggaaactgaggcccagagactttaaggggcgtaagcacgggtaagtggcaaggtcggccctgagtacccaggcctcccggccccctgctcctggcctgatactctagggatgcaggtgggagaagcaggggtcctgggggctgcctggagctctgggaggcattctgaacggggtctactactgatctcaggtgagctctgccctcctctgaaagtcacttttctcatcagttaaatgggggcaagggtccgtggtccgaccaaggtcttggcttcacagacatcaccaggagcctgcatgcccctgatcactccttctccttcctccaggaaactccagcctggcctctgaccccagttcaatccgaccatgcccaagcccaagcgggcctttcctccagaactgctccggggcctggctgtgtgactggagcaaggtgctaaacctctctgtgcctcgctggtctaatctgtaaaatgaaggaatggaaacagacctcattaactcattaaatatttgttgagc

SEQ ID NO: 78790 - DNA, 969 bp, Homo Sapiens
  misc_feature (183)..(202): n is a, c, g, or t
  misc_feature (958)..(958): n is a, c, g, or t
aggggtgtatggttttatttttttaaaaatgtatatgctcaataacagtttacttggaaattttcactagaagaaataacatgaaagaacaccagcataaatacataatacatactttaattgtggctatattaaatgtatcttaatgtaataccgctgtaacatggtatcatctcattgttnnnnnnnnnnnnnnnnnnnngaacatagggaagtgaaactaaaaaactatagaatcctggattctgtggcagatggagtacccttatttaagctagaaaaggagccctgtaaggtagaaagagaaaagaggcaagcaatctgaaaccatcatgttaaccaactgtgagtttttaaaaatgtggttaaaatgaatctaagaatgccttttaacacagctcacactttaatgaacaccagagaattcacagcaagactgtaaagctaggaatgtaaagttattgtggggttttagccacgaccctcacctcactctactatatgcaaaagaagaaagaaaagtctttagtcatgatttgcaccttaatcagcatcaattattctcagcagcccaaaaccctataaatgcagcagagcacacaggtctttaactaagtctaaaagcctagttaacatcaaaaaaattcatattgggaaagagccatacacatttaacgactgtgaaaagtcctttaacagagttttggtaaccatgagagaattcaaaccgaagagaaaccccaagtgtaaaaaatgcaacaaggcctttaggtatcactcaaccattagcaaaatccataggggagagaaaccttttatgtgtagctgaaatgataaagtcttaagtagtgacccattccttaattcaatatcagaacttctgtaagaaagaaactttatcaatgtgcggaatacgcaaggtatataaccaaaggagagaaatttgaagacacacctngtgccgaaatc

SEQ ID NO: 78791 - DNA, 454 bp, Homo Sapiens
tatagctcttcacatattaaaaagagctttcatgtacatttacgtgtttaatttacccaacaatcttgtgaagttgatataattaatatctttactgttttaaaggtagagaactgaagttcagatatattgaaactttcttaggacatgtagcaagtaaacagtggagcccaggtcccctgactccatatcttacattcttttactaataacatgtcatgctgagattcagaaggcccatgcttataatttaaaaatgagactatttcagtatttctttgggttggtttcctactattcctttctgagctatgttttagagaaaacaatttgatatgcttcaattttgtaaaatcaaattacatatatataaaaaaacctatctgtattagacaaaaactgtttttatttatttctgtaagatatcaattaaataaatattttagtggaaatg

SEQ ID NO: 78792 - DNA, 1520 bp, Homo Sapiens
gaagcttcgcactccgctttcgaggccagcggaggcggggggcggggatggacacgccccctccctgtctcccaccgatgattggcgcacggaactccgccttgggtttggaaggctcgcctgggagctcatacctggctggggccgaggattggctgttccggggctagtggagcgctttctcccgggaaccgcggctgtgacccaagtggcccggaccagtttggggctgcgtgcggcctgcctcaagcaaccaggtacgtaggtcggcggcccagctcggcgctgcggtgggagccggagggcgacagtcagagccggggtgccagcgggacgcgaccgccagatccacttaggaccccgtcgttctgcgaagcggccacgtctgagtcccggggcctcctcgtgctgcagatgtcgccttaggacctcggccaggataccctctgccatgctcttgtgctgcccgtgatcaccgactggcccttgtaagcaccttcgcagcaggaagcccagagctgcgcctgccctttctgaaggctgtggaagaggttggagtgggcgcatcttagcttgccccatccccatttgaggtctgtcggagctgcccttcagtgtgagcatccacaatgggtaccccagcctcggtggtcagtgagccacccccttggcaggccccgattgaggcccggggccgcaagcaggcctcggccaacatcttccaggacgccgagctgctgcagatccaagccctgtttcaacgcagcggggaccagctggccgaggaacgggcacagatcatctgggaatgtgcaggggaccaccgtgtggctgaggccctcaagaggctgcgcaggaagaggcccccaaggcagaaacccctgggccactcgctacaccactgcagccgcctcagaatcctggagccccactctgcactggccaacccacagagtgccacagagacagcctccagtgagcagtatctgcactctaggaagaaaagtgccaggatccgccggaactggaggaagtcaggccccacaagctacctccaccagatcagacactgatccagggaaagagccaggaatggcagtgtcttccctcttgccaaaaggcctggggaggtgaaggaagagagactttaggcaagcagcccaaaggggtaaatgaaagcaagaggctgctgccactgacctgctccattcagaacaagactggatgcttctgttgagctctccattatgtgggacccattcctcaccaaaatgaggagagacagtgactgttcctgccacagtccttcccagtctaacactattcctgggctgcatgatattcccctgggagcaaagtgacaggcacttagatgcagcatttcaccactcatgctactaatcatctacctgctactactgtaaaccatggttccagcagcctgttccacacccccacaccatcaggatagcacagggaaactgtagtttaagtggcaaataaaaacatttgcatcaaga

SEQ ID NO: 78793 - DNA, 930 bp, Homo Sapiens
tgcggccgcctcgcggctacccggcttgccggtcccgagcggcagccccggggtggcgatggggtcgcgccgaggcagcggaggttctgcgggcgactggaggttggcagtgggcgggagaaagaggaaggcaggcgcggctgggcctcggcctctggcgccgcggtaccctttgtctcggcagcctgacggccccgccgggctctccggagaggggaacgggcggcgagggtggcgggtcctgggcgccctgtgctgcggggccgagaggcgctcgggtcgcggcgggatcggccggaccagacagggttaatggaagagcctggccagtcccgcgcggggcccccgcagcgacagccttggccgcggggactggagtcctgagggggagaagcctgccgttctgaaggctcgggacttctgccccaaagacttcgccgccgagaactgcgggtgcactgcctcagggaagaagttgagaattttgccaggtcatctctgccagggcacagttcatcactgtgtgtttagtgtgtttcggtgaagctctccaagtgtgttgaatcagcgtgcctagcctcaagggtgcatcgtgaaaactgaaaccaaaggaatgatacaggcctgctttgtgtgtgtcttcccactttaagcttgttttcagtacaaatactcttgctttaaacctgattggactgtggcgagcggacatctgttcaaaggaggggccgagaccacagtacttctgaagggggcttgataatgtggaaacattttaagttttctctccggactgttttgctctctcaattcaggcaagttactgaagtacgttttttatctagaaaaaggtttgatgtagtctgtaaatggtccttgtaaagtacattgccatctcagaattaaaagatccactctcatttattatgc

SEQ ID NO: 78794 - DNA, 1506 bp, Homo Sapiens
accgaggaccctgtgaaatttcatgaagcttggcagaagctatgcaaagctgatggtattcttgtgcctggaggctttggaatcagaggaacattgggaaaactccaggcgatttcttgggcaaggacaaagaagttccttttctgggagtttgtcttgggatgcaactagcagtgatagagtttgcaagaaactgccttaacttgaaagatgctgattccacagagtttaggccaaatgccccagttcctctggtgattgatatgcccgagcacaaccctggcaatttgggaggaacaatgagactgggaataagaagaactgttttcaaaactgaaaattcaatattaaggaaactttatggtgatgttccttttatagaagaaagacacagacatcggttcgaggtaaaccctaacctgatcaaacaatttgagcagaatgacttaagttttgtaggtcaggatgttgatggagacaggatggaaatcattgaactggcaaatcatccttagtttgttggtgtccagttccatcatgagttttcttataggccgatgaagccttcccctccgtatatggggctgttacttgcagcaactgggaacctgaatgcctacttgcaacagggttgcaaactgtcttccagtgatagatacagtgatgccagtgatgacagcttttcagagccaaggatagctgagttggaaataagctgaaatgaatacatgactgggaataatggggactgcctgtgaggcctcttgaaataattgaaggcaagatgaaggaactatctgaagaaatcactacactcttagagaatccctctgttctccagcaaacatgggatgtaaagcctcacagggaatctgataatacatacttctgtcaaccagaaccagaggggtagttttcttttccctccagaggcagcctttggtacttaaaatatctgtaactgattaaatttttcccaacaacctcactggggagaaagtgtgttcatgttttgtccagcggatcaggatgttaggatgacgagcaagagtccaggtcactgtgcctttgctgtgttgtatggaaaggatggcagggaacatgctgtaagtaattttgagtaagaaaatgagtcactgtgttacctggaactcagccacagatttgtgtgtggtccaagatcattgcagtttctcaccctgtttatttcctggtaaaagtaaaattgaataggtcccagacttgggggtggcaagtaacgctttgcctcacgcacaaaatttaaaggggctccaaaaaactcaggaatccagatcagcaatacagtcctgagtatccccttatggtgaaatgcttggggggctaagaaatggttttttggaaatttccgcaaatttttgggaaaaatacgcgcccataaacccagcggggaaaattattggggggcgggggagcgcaaaccaccccccccaacacaaaaataacccccgggcggtgcccgcccca

SEQ ID NO: 78795 - DNA, 804 bp, Homo Sapiens
gcctcactggggtctgaaaccaataagaaatacagcaatgtttcaatattacttacagaacagattaatttatatcttaagatggaaaaaaagccaaataagaaagaacagcttactctagtaaacaatgtattaaagctgtccaccaagttgttgaaagagctggacacaccatttagactctatggactgacaatgaatcccttaatctacaatatcacaagagtagttatcctttctgctgtctcaggtgttataagtgatcttctaggatttaatataagactgtggaaaattaaatcataagctgagttaaatgcctggactctcccctggctggtatcaaaacttacctatcaaggaaagtgatgactgcagaaaccagtgagatacccacctgcttgttcacatgcacaggtgctctcagctctgccaaagcgaatgaatggtgtttccggaggagcaagtccttttccaactgggtgtgcatgctaaaaacctgtattttcatgcttttcaaacaacatgaatagtcagctgactaaagactgtgtgtgttgtggtaacacaaagacaattttgtaagtttgcgcttcagtactgtgacagttatgtttactggacatagtcttttgggcaactatgatagatgcccaaagcatgaagcaaatatcttttattggaaatatgcaaattcaatacttttccattatagtctatagaactggagatttcatttctctatcaaagagagatcaagcgaactattttaggttaaatccgaataaaagaactttactggag

SEQ ID NO: 78796 - DNA, 1082 bp, Homo Sapiens
  misc_feature (43)..(126): n is a, c, g, or t
cagtcgacggtaccggacatatgcccgggaattcggccattannnnnnnnnnnnnnnnnnnnnnnnnnnnnnnnnnnnnnnnnnnnnnnnnnnnnnnnnnnnnnnnnnnnnnnnnnnnnnnnnnnnagtgggtggctcacgggtccggaggttatgtcttcggtgtctcagccctaaaagtccagttcccccgtgcggccagcttttccacataaggtgtttttgatttgattaccggaaaggactcttgattcttctcttttaaactgaataccataggggaaatgaattttaaaatattgcccccggaggggttttccgtggctggattcctgcgagttgctttcagtcattcagggaaacagaaagacgttttccaacatgtagaactgctttttaactggaggaaaaatacttcaggaggcttagcatattgcttggattctacgtgcagcgggttctctgcctccgtgaagacaagctgggctggggaggacggtgtctaggagggatgaccccactcagctccaggcagtgttctgccgagaccccaagaactcggggtgtcagagggcaaaggaactacctgcctttcacggctgctgacttctcagggctgcaagcagcacagaatgttatccttacgtcctgagccggtttaagtctgtggaaaaggaagcacgggagaaatccacgtaacctttgctttctttttaagggaagcggttccgccgtgaacttggaaccctcagctccgggtgttctcggcagaagggcagctggaagggacacagtggggcaggctttggggttgctccctgttctgccccgaggccggggacgcagggcagcccacgcctccgtgggctccattctgtagcattgccagcgttctcttcacgtctctaacaatcctttgcttttcctcactcacgtggaaatgtgaactgtcccggctctgtcttcatttttatttttaagccatcgttcccctcctgaacggttgccccttatttaatgctgtaaagttggactgttgttcaataaaccagagcaatgcattagctcctcattcatttgtc

SEQ ID NO: 78797 - DNA, 478 bp, Homo Sapiens
  misc_feature (46)..(46): n is a, c, g, or t
gccaccctagaattgagagtcccagtgcccctagtgtcgactttcntatgtacatcctaggggtgagggagtgcggggcaatgggtaggatataaagcgtaaaggacaaattgccgcagtcttctaattgatgcttccaaactcaggaagggcttatccagtgtaaaatagccccaagcccagcaaccttttagagggctctggctgggcagatagcttttgtttttgagtctccagccctcagtcaaggaaaatataccatagctgctttcttgtcagtggcctttgagagaaagagaaaacaaatctagaattctgttcatctgatagaccgggggagctttgctatggtaggaggtttaggaagggcctttcacgcatagaaaccattgttgatattgccactcccctctcctctgcctcacagaactcctgattctgtcttctttctctctctatatatatattttaaaatgtt

SEQ ID NO: 78798 - DNA, 1332 bp, Homo Sapiens
  misc_feature (1034)..(1163): n is a, c, g, or t
  misc_feature (1172)..(1190): n is a, c, g, or t
ttaggtacgaggctcggtgtttaattcggcacgaggcttgtgagatgcgatgccggccaacagcttgcaagcatgctccgctggaccgagcctggaggctcccgcgtgagggactcggcccccacggccctagcttcgcgagggtgcctgtcgcacccagcagcagcagcggcggccgagggggcgccgagccgaggccgcttccgctttcctacaggcttctggacggggaggcagccctcccggccgtcgtctttttgcacgggctcttcggcagcaaaactaacttcaactccatcgccaagatcttggcccagcagacaggccgtagggtgctgacggtggatgctcgtaaccacggtgacagccccaacagcccagacatgagctacgagatcatgagccaggacctgcaggaccttctgccccagctgggcctggtgccctgcgtcgtcgttggccacagcatgggaggaaagacagccatgctgctggcactacagaggccagagctggtggaacgtctcattgctgtagatatcagcccagtggaaagcacaggtgtctcccactttgcaacctacgtggcagccatgagggccatcaacatcgcagatgagctgccccgctcccgtgcccgaaaactggcggatgaacagctcagttctgtcatccaggacatggccgtgcggcagcacctgctcactaacctggtagaggtagacgggcgcttcgtgtggagggtgaacttggatgccctgacccagcacctagacaagatcttggctttcccacagaggcaggagtcctacctcgggccaacactctttctccttggtggaaactcccagttcgtgcatccaagccaccaccctgagaatatgcggctcttccctcgggcccagatgcagacggtgccgaacgctggccactggatccacgctgaccgcccacaggacttcatagctgccatccgaggcttcctggtctaagagttgctggcaagaagatggccgggcgtggtggctcatgcnnnnnnnnnnnnnnnnnnnnnnnnnnnnnnnnnnnnnnnnnnnnnnnnnnnnnnnnnnnnnnnnnnnnnnnnnnnnnnnnnnnnnnnnnnnnnnnnnnnnnnnnnnnnnnnnnnnnnnnnnnnnnnnnnntctgtctcnnnnnnnnnnnnnnnnnnnggaggcacaaaaccccaggcttcaagtctctgcagcctgctccacatttgggcacagaaggactcagacaggcactgtgtgggcacgaggttttacaggggtggtcagacctcaggctttaatgaataaagacactactccc

SEQ ID NO: 78799 - DNA, 877 bp, Homo Sapiens
ggacgcgtgggcgcgtgagggactcggcccccacggccctagcttcgcgagggtgcctgtcgcacccagcagcagcagcggcggccgagggggcgccgagccgaggccgcttccgctttcctacaggcttctggacggggaggcagccctcccggccgtcgtctttttgcacgggctcttcggcagcaaaactaacttcaactccatcgccaagatcttggcccagcagacaggccgtagggtgctgacggtggatgctcgtaaccacggtgacagcccccacagcccagacatgagctacgagatcatgagccaggacctgcaggaccttctgccccagctgggcctggtgccctgcgtcgtcgttggccacagcatgggaggaaagacagccatgctgctggcactacagagggtgatacacccaaggtgccccggatggtattgtagaccaggacctgtcaagggaagagtggcacccccagaccgcacaaggaacctccccctaactgctgcacccccacaggacatggccgtgcggcagcacctgctcactaacctggtagaggtacacgggcgcttcgtgtggagggtgaacttggatgccctgacccagcacctagacaagatcttggctttcccacagaggcaggagtcctacctcgggccaacactctttctccttggtggaaactcccagttcgtgcatcccagccaccacccctgagattatgcgggctcttccctcgggcccagatgcagacggtgcccgaacgctggccactgggacccacgctgaccggccacagggacttcatagctgccatcccgagggcttcctgggtctaaaaagttggctggcaagaagaatggcccg

SEQ ID NO: 78800 - DNA, 1057 bp, Homo Sapiens
  misc_feature (41)..(41): n is a, c, g, or t
  misc_feature (216)..(216): n is a, c, g, or t
  misc_feature (244)..(244): n is a, c, g, or t
  misc_feature (251)..(251): n is a, c, g, or t
  misc_feature (253)..(253): n is a, c, g, or t
  misc_feature (271)..(272): n is a, c, g, or t
  misc_feature (298)..(298): n is a, c, g, or t
  misc_feature (978)..(997): n is a, c, g, or t
gaaacactaggttcctcccttggtggttaggcccccagacnttatacccgcttgcttcggcccagctttatgagtgagagctggttggtcgcctccttatcatcacagagagaggtgacctgttttgataggtggttggccatggggcccgtagcttaaaggttccaggtaggatcatgagctgggaaaggagtcttgcccaagggcacagctgcntgtgaccacctcagagttgtcaccactntttttcncnacagcatggacgctgccnncaggaatctggcccctccatgacctnccacactggatcctctttccctgcagccccttccacctgcctcgtatccctgttgctgactccgtccaccctgttcctgttagatgaggatgctgcagggtccccggcagagccctctcctccagcagcatctggcgaagcctctgagaaggtgcctccctcggggccgggccctgctgtgcgtgtcagggagcagcagccactcagcagcctgagctccgtgctgctctaccgctcagcccctgaggacttgcggctgctcttctacgatgaggtgtcccggctggagagcttttgggcactccgtgtggtgtgtcaggagcagctgacagccctgcttgcctggatccgggaaccatgggaggagctgttttccatcggactccggacagtgatccaagaggcgctggcccttgaccgatgagggtcccacgctgaccttggccctgacctcaggagccacgctgtagacattccctctcctggtctctgggtctggcttccaggctctggctgtggatgtcttcagcctctgggtgctggccagtgaggtcccaaatgacccagggcttaagggagaggcgagagaatgatctggcctcaggggacaggccacctggtcaggaggaatatttttcctgcactttttctcaggtatcaataaagttgtttccaactcnnnnnnnnnnnnnnnnnnnngaccacgtatgcggccgcaagcttattccctttagtgaggttaattttagtttggcactg

SEQ ID NO: 78801 - DNA, 464 bp, Homo Sapiens
gtattatgcaatagctgaatttccctgcaatggtcagtttaaagaactgttaacttagcagaggcgacgtctcgtggccaaggcccttagggtccactccatggaatcaggaccccttgctgctgctttgcgagtgttcatggaggaagaaaaatcacttggtgttctttttttgcatggaagagtcataataactgacttcagatacagagaaagtgggaagagtgagaaagaaggaggtgaggccagaggatttggaaggctaccagagagaagcagccgaggcctgattgtggaaatgatgcttagacttgctttcagcaggagtgatgaagccagaatgagggaggcccagacgcccgggagaggtacaggggataggtgccatgtggtttgcaccaccgcagcaggctttgggtcccaaagacgcgaatggaaatagaagaaaatgcagttttaaatag

SEQ ID NO: 78802 - DNA, 439 bp, Homo Sapiens
  misc_feature (37)..(37): n is a, c, g, or t
agcagacagagccggacagactccattttagtttctntgcttgcagccctctttatccccctaagggagtaactagtgcaagctgactccaagcacatccaggaattcacctgctgataagatattgaggcaagctgtaccagcagctcctgggaatgtgctcggtggaaggtacctaaagcccccgcatttatctcttagtgatagtttaagcccctgtacctggaactgtttattttttgtaactgcttctataaccaattaacttttttaactttttgcctattctgcttctgtaaaactgcttcagttaaacccccctcccctatttagaccttagtataaaagaaaatctagccccttcttcagggccgagagaattttgagcgctagctgtctcccggttgccggctaataaaggactacacaatttgtctcc

SEQ ID NO: 78803 - DNA, 739 bp, Homo Sapiens
tagtatgagtaaagtggagtagcccgggcttgactgtgctgttgcccctggcaactccagttacgagactcagtgagcagaagtgctaggatttctgctcctgataataggcaacagatgccacttgcgcacaggaaccagccccctctccctgttcccagctccctgcactgccctcttctcaggacccctgagcagcatagccttaagtaccccccaatcccgatttcccagtgggtgtctcttaggaccccagaaaaacgcttccttacctattgcctccatgttactctcctataaaatggggcaaactattgccccaactattaatgatcattacttcggggaagtaggattgagattgacttttcacttaatttcttgatttctttattttactttagattgttgattgcagtaagccggcatgattttggtggttaaaagatctaaagatttttcccactgctcccactcgtggggcatgctagaaaacaaatgcaccctccctcatctcctgcatccttctttcatccccctgtctgtgcgtgtcccctgcaactgttactaagcaacgctctccaaagaaacaccgagagtcagcctcagcccaaggggctggctgcgctttccttcactgtttcaagcaggagagctagtcctttctgcacatctgagcaaaatacttgtaaagccttgacttgtattcacttttaccaataaactagatggaacacag

SEQ ID NO: 78804 - DNA, 1450 bp, Homo Sapiens
ggtccggaattcccgggattgacgagaattctgcgagatggtgaagtccaaccggctgtgcgaacggaagctcttcattcagttctgctgccgcacgtgcctcctggccgggtaagggtgcctagctgcccacagagggcaggcactcccatccatccatccgtccaccttcctccagactgtcggccagagtctgtttcaggagcggcgccctgcacctcacagctttatctccccaggagcagcatctctgagcacccaagccaggtgggtggtggctcttaaggaggtgttcctaaaatggtgatatcctctcaaatgctgcttgttggctccagtcttccgacaaactaacaggaacaaaatgaattctgggaatccacagctctggctttggagcagcttctgggaccataagtttactgaatcttcaagaccaaagcagaaaagaaaggcgcttggcatcacacatcactcttctccccgtgcttttctgcggctgtgtagtaaatctccccggcccagctggcgaaccctgggccatcctcacatgtgacaaagggccagcagtctacctgctcgttgcctgccactgagcagtctggggacggtttggtcagactataaataagataggtttgagggcataaaatgtatgaccactggggccggagtatctatttctacatagtcagctacttctgaaactgcagcagtggcttagaaagtccaattccaaagccagaccagaagattctatcccccgcagcgctctcctttgagcaagccgagctctccttgttaccgtgttctgtctgtgtcttcaggagtctcatggcctgaacgaccacctcgacctgatgcagagccttctgaggagaggcaacaggaggcattctgtggccagccaaaaggtaccccgatggccaagcaattcctctgaacaaaatgtaaagccagccatgcattgttaatcatccatcacttcccattttatggaattgcttttaaaatacatttggcctctgcccttcagaagactcgtttttaaggtggaaactcctgtgtctgtgtatattacaagcctacatgacacagttggatttattctgccaaacctgtgtaggcattttataagctacatgttctaatttttaccgatgttaattattttgacaaatatttcatatattttcattgaaatgcacagatctgcttgatcaattcccttgaatagggaagtaacatttgccttaaattttttcgacctcgtctttctccatattgtcctgctcccctgtttgacgacagtgcatttgccttgtcacctgtgagctggagagaacccagatgttgtttattgaatctacaactctgaaagagaaatcaatgaagcaagtacaatgttaaccctaaattaataaaagagttaacatcccatggcaaaaaa

SEQ ID NO: 78805 - DNA, 1370 bp, Homo Sapiens
  misc_feature (715)..(747): n is a, c, g, or t
ctttaggtaaaaaatttacttctgtcattaattacacttcaactggtcaatatagtggcagcataaagttttatttcagaatatcaatacagttttgtcttcatttttcaacagtaatttcaattggttcatacttaaatactacacagattttgagttttatggttctcaaagcaaggtttccatcttaagatttttataaacacaaagcctttgcaaaattggattaaattccacctatcttaatgtgaattaaaaaccaccatttataataataatagcgccatattctaagttgagtaaatgcatcctaccattcaaggttatcatataatttaacaaaattgtacaaccttaaggctcttcacagtataaattaatttttcaaaccagagctgttcacatgaaaatattccttagtagaatgtatatttaagaaataaaacaacaaaggggaactatatcacccatgtaagttatagagttaattacaagttctaccattcttgataattctttgagatgctaagtgtttcagttcatatttaatgatacttaaatcgtgggaattttaatgtttgttccaaaatagcagaaattgtaaaaattatgaattattggagaaaatgccattacttgtatatctgacatttaattttttaattatggagactacatgcttttgtagtataatattaatgattattctcttgtnnnnnnnnnnnnnnnnnnnnnnnnnnnnnnnnntttagttgatgttacctgcttgtgagtatcaattacttagtttttaaatttttaaggtattgcctacttttctttagaatgcagaaatctcgtcctgagcccttattatgcctgtggtagagcaatgcaagactgaaaaggttgccagtattttcaggcttatttgactaagaattagtgccaagaactggaaagtctactttttggagggaaatgatacttagaatttgtaaacataagcagtaatagtgtaaatatttagaaaaatagcaagtgctttaactgctcaataaaatagtatagatgttatttcacccttaaggcactggctgttgcccattattttccgatttcgtgattactgtatatattacatttgagtaatgaataattggtaatagtgtattatagtgttctacagcacaccttactgtacagtatttgaagttttcttttatatcaataataaaactataagttaatactgattttcccctgaaattctccacattagcttttaaaggtaattttatgttctttagtttcctggaattataatgcatgaacatatagttcagttttataaagaaattcttaaataataaagttttcttgttgaactt

SEQ ID NO: 78806 - DNA, 454 bp, Homo Sapiens
gaaagggtttttagatgggggaatggcaggcttttccgaggctgaaagagatccaacccacttctatttcttcaggctcccagtgatatgaaaaagtgccaaacaggactataaaattgtggtctactgtaaatggtttgcagtaaaagttctcaaccagcttccactcaaccaactcaccagttagacaatgggccctctcctgtgtttaaaacagtccggtgcccacctgggtccacatgcagctggcaggtgtttgctagtgtgcccacccatgtctgttccccccacgtgagttatgtgcttacaacgagtcgtttctttgcattttccaactttcttacatttatatttaattaaagatgatctaaactgagaaatgaatgtgaaaagaaacaaagctcttttttgtttggtttttaactaaattaaatgtttttaacaagttaaaaaa

SEQ ID NO: 78807 - DNA, 703 bp, Homo Sapiens
  misc_feature (64)..(64): n is a, c, g, or t
  misc_feature (390)..(426): n is a, c, g, or t
tgcgcaggcaccgtgcccctgcagcggaaaccaaagtccccctactatgtgcggggcgcctggngactgagtggctaacgggaagcctccctgcttctctggggccagagcagcttccaggaagtgaagagacccctctccccagtgccccacatctttctctgggagacactcgcgccccctatcctggccagtgatggagggtatctctacaggggtcctcggtctccatctacttccctttcttcatgtgtttccagccccaccctcagccagagccaggcccccaggcaggagcttcccagcgagcggcctcccctcacttcctcctggtggtcccgttgtctctgctgaatcagagctgagaacggtgccaaaatccaacgatgnnnnnnnnnnnnnnnnnnnnnnnnnnnnnnnnnnnnnggcctcatgaccctgggggctgcccccctcggtgctcccggagcctccagtagagtagcgtcacaagcaatctccctggcgcttcctgggtgggaacccctgctccgtccccgcttcctagctgcccacttttcagtgttacgaagcctggggaccggggcaggcacccacggggctctccaaacgccccctacactgcccgccaccattttgcacactgcctgttcacatgtcgcccaggcgggaaaaatggaaaataaagtgtatttacacagtc

SEQ ID NO: 78808 - DNA, 1137 bp, Homo Sapiens
cctgatctgtaccgtttcccgcctctcatgttcaacctatttccgacgcccggcaagaacctttctggggtgctcacgatcgtccctcacctcgtccctgatgcccagctctttacttgaaggttgctcgcgtaagacccctaccaggccctcacttcgctcccatcgcagagtagcgttccagatttcgttctaccaaccctcccgggagctacggccaggcctggctgggattccatgaatcgtggagctgtgggatcttatgacccagtctggctgttgtcggctacgtcagcaagttactccaagagggccccatggtggatctcacgtacgtcactggcagagatctcgttcccttctgggcctattgctctgcgtcccgctctcagacaccgttgagttcccttgctttggtccacgtccccatgaacatgcagcagtagctacgttagcactggatgaggaacacatttgctggatgccgttaactcttgcctcttggtagtgatgctgaccacacggacttcatcgacacagctggtgccaatgctgcagtatgctgtcagcctgtactgaagcccactgaaggtctcggctcgccagctgcccccaagcgtagccagggtggatgcaaaaagccgagttctgtttcctctctgggttgggacatgctgctgagtacgtcaggcctcgggtggcgctcattggggatgcagcccacagagtccatccgcttgcaggacagggtgtcaacatgggctttggggatatctccagcttggcccatcacctcagtacggcagccttcaatgggaaggacttaggttccgtgagccacctcacaggttatgaaacagaaagacagcgtcacaacactgctcttctggctgctacagacttactaaaaaggctctattctaccagtgcctccccgcttgtgttgctcaggacgtggggcttgcaggccacaaatgcagtgtctccactcaaagaacagattatggcctttgcaagcaaatgagtactcctctcctaaagaaagattacgttgatgaaaaagaacatcctgcccaggacccatcatacatattttcaagatcttatttaatttaataaacttactttacattaaaa

SEQ ID NO: 78809 - DNA, 739 bp, Homo Sapiens
  misc_feature (50)..(50): n is a, c, g, or t
  misc_feature (123)..(123): n is a, c, g, or t
  misc_feature (134)..(134): n is a, c, g, or t
  misc_feature (467)..(477): n is a, c, g, or t
tacttaaatggtaataagcactgtaaacttctgcaacaagcatgcagctntgcaaacccattaaggggaagaatgaaagctgttccttggtcctagtaagaagacaaactgcttcccttactntgctgagggtntgaataaacctaggacttccgagctatgtcagtactattcaggtaacactagggccttggaaattcctgtactgtgtctcatggatttggcactagccaaagcgaggcacccttactggcttacctcctcatggcagcctactctccttgagtgtatgagtagccagggtaaggggtaaaaggatagtaagcatagaaaccactagaaagtgggcttaatggagttcttgtggcctcagctcaatgcagttagctgaagaattgaaaagtttttgtttggagacgtttataaacagaaatggaaagcagagttttcattaaatccttttaccnnnnnnnnnnncttggtaatcccctaaaataacagtatgtgggatattgaatgttaaagggatatttttttctattatttttataattgtacaaaattaagcaaatgttaaaagttttatatgctttattaatgttttcaaaaggtattatacatgtgatacattttttaagcttcagttgcttgtcttctggtactttctgttatgggcttttggggagccagaagccaatctacaatctctttttgtttgccaggacatgcaataaaattt

SEQ ID NO: 78810 - DNA, 733 bp, Homo Sapiens
  misc_feature (19)..(19): n is a, c, g, or t
aggcatctcagtggagacntgtgagaaggtaaacaggtgaagcttagtctcacctgtatatagtaaaaagtgcattctgcagcctcagtcaattcatcatctgctgaacaaagacagcaggtcataccatttctcacgcattgctcttagtgcaatcaaaatacctatttttaatggcagcagaaaacattaaggtgatagcatgaagacaaatccaatactactgcagttggcacaattagaaatggcagaggaattctgtggtggttttatctgatttggtaaaattcatgaaaaatgctagcaaatggcgtcatcaccaaaactcaaggaagtgaagttgtatctcactacaaatgaaaaatttgccttccaaatcctgctgcctttgtgctgatttttgtgacaagttctaacagcttcctgccttttcaaactctctgtgtacttttacaacaggcacttacaaaaattaatctggatcagtgtgtgatgaagagtgcctttagtaaacaagtggtttaaccttgagtgttggccaaaactggagaagtgaagacaaccaagaaaagcttgttacagaggagggagggagaaagaaagcaaagatgtctactgctgttcatgtgtagtgcatcagcttagccagacttgtgaactaagggcactgctacttttgaaattttcctgagagttaaacaagaaaaatgaataaaagaatgaaagaaccatt

SEQ ID NO: 78811 - DNA, 660 bp, Homo Sapiens
  misc_feature (116)..(116): n is a, c, g, or t
gtggtcttctctctgtccagcttccagtactcatcctggctgcagccgtgccaagagggcgcccttccgccggccgctctacaccaatgtgcccttctggtggccctggcgcttcntgagctccgtcctggtgggccttgtcctggtccccggcctcctgcaggggccgctggcgctgaggaacatcactgacaccggcttcaagctgctgctgctgggtctggtcaccctcaacttcgtgggggccttcatgctggagagcgtgctagaccagtgcctccccgcctgcctgcgccgcctccggcccaagcgggccgccaagaagcgcttcaagcagctggaacgagagctggccgagcagccctggccgccgctgcccgccggccccctgaggtagtgcaggcccacgggcaccccagacactggaactccctgcctttgagccaccaactggacccctctccagcaacaccaccgccaccacctcccacatccctgaggttggcgactgtctacactcctcccccgagaccacccccaccctggggaagcgttgactactgtcccctaccttggaccatcccgcgtaggggtggcagcccccagctcccctcagtgctgctgtcagtgtagcaaataaagtcatgatattttcctggc

SEQ ID NO: 78812 - DNA, 1036 bp, Homo Sapiens
  misc_feature (66)..(67): n is a, c, g, or t
  misc_feature (79)..(79): n is a, c, g, or t
  misc_feature (96)..(96): n is a, c, g, or t
  misc_feature (113)..(113): n is a, c, g, or t
  misc_feature (123)..(123): n is a, c, g, or t
  misc_feature (151)..(151): n is a, c, g, or t
  misc_feature (154)..(154): n is a, c, g, or t
  misc_feature (156)..(157): n is a, c, g, or t
  misc_feature (166)..(166): n is a, c, g, or t
  misc_feature (261)..(261): n is a, c, g, or t
  misc_feature (287)..(287): n is a, c, g, or t
  misc_feature (628)..(628): n is a, c, g, or t
ctattgcatctgtgaggagtgatccacgactcatgtgtagagcattgcacagcagacgcctcatgnntgagtgcccaanccggcttgaactccggntagaaggactgaggagntatgcagctntgctgagcagtggcccaaagacagaccntcntnncaggatgcntaccaaaaactgatgagtctcccagatgtgagaaaacaatatgatgctgctgtctccacgtaaaaggatttcctgtctcagctcaggagcagcantaggagatttctatcccagagtcagnccaaggaggacagaatggatgctttaggagaaccatagaaaaccagcactctcgtaatgatgtcatggtttctgagtggctaaacaaactgaatctagaggagcctcccagctctgttcctaaaaaatgcccgagccttaccaagaggagcagggcacaagaggagcaggttccacaagcctggacagcaggcacatcttcagattcgatggcccaacctccccagactccagagacctcaactttcagaaaccagatgcccagccctacctcaactggaacaccaagtcctggaccccgagggaatcagggggctgagagacaaggcatgaactggtccntgcaggaccccggagccaaatccagtaacagggcgaccgctcgttaacatatacaactgctctggggtgcaagttggagacaacaactacttgactatgcaacagacaactgccttgcccacatggggcttggcaccttcgggcaaggggaggggcttgcagcaccccccaccagtaggttcgcaagaaggccctaaagatcctgaagcctggagcaggccacagggttggtataatcatagcgggaaataaagcaccttccaagcttgcctccaagagttacgagttaaggaagagtgccaccccttgaggcccctgacttccttctagggcagtctggcctgcccacaaactgactttgtgacctgtcccccaggagtcaataaacatgatggaatgctaaaaaaa

SEQ ID NO: 78813 - DNA, 446 bp, Homo Sapiens
  misc_feature (125)..(195): n is a, c, g, or t
gcggggagcctaataatgcaggtaacagtcagcacttgccacgcgcgaggcatgttctcagtgtgtgtcttgtgtcatttctgtgatgcttgcacatcgtcagggagtacctaccactggaaccnnnnnnnnnnnnnnnnnnnnnnnnnnnnnnnnnnnnnnnnnnnnnnnnnnnnnnnnnnnnnnnnnnnnnnngagctgggctggggcagggggcagctcctcaagtggaacctggagagcccacggggcaaatggcggaggctggaggggctggcaagggagggactgcaaagggcctcacaggggctagacgagggccctgggcaccagtgattatggtgcccccccatgtggattgaagattaaacctcgaagcaagtgtataatgcccccaaaaatcacatttggaagtcatcacttcaataaaaatttctatattaaat

SEQ ID NO: 78814 - DNA, 371 bp, Homo Sapiens
ttggcaataactttgtgtattatgtttaaaaacactggaaaccgtgaccaccatggactgcccttcccctctgaggcaattattacatgtaggactctgaactttaaaccttcagcgtgactgaagcagcagcctgcacatgtggatggtcatcagtgcctcgcccagagatacctggccttcatccaaagggaccctgctgccacaagtcctccaggcagcacccgcactgtggctccttcgcactgagtatgttggactctgccatagactgaccctcttgtctggctgctgcagtttgtctgtaatgccctgacatgttgcattctccccatttggataaataaaaacaaacaaatgcttctgtcaaa

SEQ ID NO: 78815 - DNA, 1034 bp, Homo Sapiens
  misc_feature (119)..(119): n is a, c, g, or t
  misc_feature (146)..(146): n is a, c, g, or t
  misc_feature (158)..(158): n is a, c, g, or t
tatcatgcagccgttccgatgaagcgcatggccaccatatgtgatgtcatcatagcacccagctacattttgtcccgctgtatgtgttgaattgagcgatacatttcaccaggaacagnttgactgatacgaattatcgactcatntagggattgccntcgagccagaatcggcacgagccatcctgtgcaccaggctgcggacctagtcaacataccttctgcgagggctcatgccccggagcgtccaagtactcagcagaggcccaggccatgcagcaccagtgcacctgctgccaggagaggcgggtccacggaggagacggtgcccttgcactgtcctaacggctcagccatcctgcacacctacacccacgtggatgagtgtggctgcacgcccttctgtgtccctgcgcccatggctcccccacacacccgtggcttcccggcccaggaggccactgctgtctgagaacgttctgcctccatccccatgctctgtccacctggagccaggatgtgcattgtctgatcatgaaaaccttgggcctcctctgcggagccccccggcctgtgtgtggcaccccgcgctccgtgctcctgctgcccaccccgtgggtgaaaccggccccagaagggtgaggggccagcaggacccctttcgggagggcgccactcaggagtcctaccctgggagagcctgtggcccaccttggccttgcccctccctgatgtcactgggacgccctggaacaaactaagcatgtgcgggcctatgtgtccctgccacggccggagcgcccgcgcagcacggattccagctggccacgtccggccgctggggcagacaggctggtccaggcaaggccagctgctgccaggaagctgcgacaggcaaggcggccgcctgtccatgcctgctgcagggtaactcagggctgaggtcgcaacggccaggtcagagaggggtcagcatcccaaagccccctctgctcaacccagcccagttttgcaaataaaccctgagcattgagt

SEQ ID NO: 78816 - DNA, 1658 bp, Homo Sapiens
ggcgccaggagctctctcgccccattccctgcggcacaggtggggccgttagaggttgaccttggaagtaaaacgccttcaggaattaggtagaaaaggaccatccgttcatccaagatcatctcacctcccatgaagggaacggtcttctaaatgcagttttccttcaagcagggtggatggggagcatcgctggctgacaggctggtcaaaaaatgtgatgttctgaatcgtggattttcaggttacaataccaggtgggccaaaattatccttccaagattaatcaggaaaggaaacagtttggacatcccagtagcagttacaattttctttggggccaatgacagtgcactaaaagatgagaatcccaagcagcacattcccctggaggagtacgctgcgaacctaaagagcatggtgcagtacctgaagtccgtggacatccctgagaatcgagtcattctcatcacgccgaccccactttgtgaaacagcctgggaagaacagtgcatcatacaaggttgcaaactaaatcgcctgaactctgttgttggtgaatatgccaatgcgtgtttacaagtggcccaagactgtgggactgacgtacttgacctgtggaccctgatgcaggacagccaggacttctcatcttatttatcagatggactacatttgtctccaaaggggaatgaatttttgttctcgcatctctggcctttgatagagaaaaaggtctcttctctacctttgctgcttccttactggcgggatgtagcagaagcaaaacctgaattaagtctgctgggagatggagaccattagccaatcacaggagacccaaatctgcttgttatctacagaactcaaagttgtcaatacgtagaggtacgcttttttcctcaggcttaaacctttgccactgatattaataataaaagtattagatgatttttcagggaagttttatacttaggtccattgtgtttcgacagtatttattaatgcagatatcagtgctacagctataaaatataccctgagcagcttgttaattctataaatgacaaagactatgtttttaaaaagtcacaattttataaaaatggtttttcttacattcttttgagaactgtttcactcatacatacacccacacaccccactcaaccttgtatcaaattccaaaagtgtaactaaagtataagaatatcatgactagttaaaagatagcaaataccataaggtacaagttcaagtattagtataacaagtatctgagtaacaaatgtccttggaaatggggggtaggaggagatatgattagtcacaggtttggttaactgccctcaaaatttacaagttaaaatgttttggctggtgagcacatttcagttcttaggggaaaaaaagcttttaatggcaatttatagaaatcagaatccaggctaatgatttttatccttcacacagtaaatgcagcccatccagaatcctggagcaataaagtaagaagtaattcaaatatctgcttgtgggtcaataaaaagggtttctgaagtatcaagtcttgtggggacagcccccaaccctaagggcaggtagtattctatctcctggctggcgcatcacatgtcaaaacaacctgtttttttgtg

SEQ ID NO: 78817 - DNA, 604 bp, Homo Sapiens
  misc_feature (110)..(128): n is a, c, g, or t
tgtacagagtacttggctgttagccccaggtaaaaaaggtcataacagatttttttgggactgttttgttgggcagtgcctgataagcttcaaagctgctttattcaatnnnnnnnnnnnnnnnnnnngatatatgaatatgacaaagtattgctgagtccaacaatgttgttttaagactcttaaaatacggtacctggcaatgtttatttcataaagaattgtgaacttcttgaatctagggagggggaatgtagtgaagggatgtatcaagtggggtggtgggagggggaggcaaggttatatgcactttctcatgatttacagagaagtgaataactgcaaagtgaagttgcttcttctacttcagtcttctctcactttgatttgctagttgttatcaattaatgacaattacaaacctactgtatctctaatacagtgtgactggtcaggtatttcagttcttaggaaggaagtgccaagtttgtttttgggttcctggaacagcgctcacctttgtttagaacactggtttaaagggataatcatctctgtcacattagactatccatcatgaccagcaaatactcattttaggaaa

SEQ ID NO: 78818 - DNA, 779 bp, Homo Sapiens
  misc_feature (64)..(87): n is a, c, g, or t
  misc_feature (131)..(139): n is a, c, g, or t
cgggcagtgccaagctaaaattaacctcactaaagggaataagcttgcggccgcctgctcaggnnnnnnnnnnnnnnnnnnnnnnnnaagtttgattttgctacattgaaaaaatgtttgtgtgtgtgtgnnnnnnnnncctttacaaaactccttccacagacgcccggggcctgtggcgggtcactgtctgggcagatgctcacagcagcacgtggtgcccacagagttcaggaggctctggtaggggctgttttagaaaataactgatttcctgttgaatcaggtacgctccgtgcgaccactcctccctccctgctccctgtccagttcgggtggtcctggctttctggctgtgggcagctgagaggacaaaagaaaggaagaaaaaagggaaaagtaaaccactgccccccagttgagccaggttcctcctggagacctctggggaggaggcttctggatgacagcctccccgccagccttccattccctcctaggcctgttctctcccggtggcccaatctgacaccagctggtggcctggagtagggaaggtgggcaggtgtggcctcgggcagcctgccctcgcaggggactcggtccccggggacctcagagccactggccaggtgtgtgcctgccaggtcaggccctggcccgggcttcgatggcatcatcatctccaggaagggggatgttttgcaaagggaacccaatctgggtagactgcaccagcgaagaagcatcccaaacaaagtaataaaacaaactggaaa

SEQ ID NO: 78819 - DNA, 834 bp, Homo Sapiens
gactccgtgggctcagccaggctccagcagggtcagacgtgctgttaagagcaaagccacagacgatgactgtccattctcagtgatgctccaggctgtgcctacacagcagtgctggtgacatgtccagggttccagggcccggtggcctgggagctgctttctccccactggctgggctgcatctggccctggctggaggccttgctttgaggggctgtgaccctcttcccccaggccctccccagccgacgacagccaccggagaggagatcggaacacgattgtctcagatgcagggcgctgtgcgggacgaagccgcaaggactctcgtatcgggcccttgggactcgggaggtgccagaggcggcggctgctctggacctcggtgttcactgacctttgtttcacttgcctctgctcgactccgagagcaggaaacccggccgtggcctggcagctccgcctcccatgcccgcacgctggggtctgtcttgtctggagcagtggggcacaccccggaggaggcgggggtcagggctgtcggccttggccccctgctggtcgctgtttcggggactcggggcggccagtaccaccgcctgaggcggggctcagcagcgttgcatgtacgggcctcgtactgcctcatggaaaatcctccggagccgccctccattgtgggttcctgagagtaggacacattgccatggttttgtgggaatcacgcgcccctgatggaacttttctgctgttgtgaagtacttttatccatttgcttctctgctgaccttgccaagttgttcgaggtggaattaaacacctcccagacct

SEQ ID NO: 78820 - DNA, 1549 bp, Homo Sapiens
cggctaggtacgaggctgggtgtgcgaatcggcacgaggctcagcctttatctctgggttttgatccccgactccaggctctgggccccttcttcccccttccctcaaacctggctgctatatggcagcagaaccctgaccactgagtaatacagccccaggggagggaggagaccccaggcagggaggatgggggcagctctcttctctccccaggacccaggctgtggatcacggggcctgccagcttgagtgtagagggaggggggactctacccttctcagccccaccagcccccctctgcccaaccacaattttcccttcctccgccttcctctcccactcctgtttacactccccaaatgcacacaggctgttatcatgggtcctgagtcatcccacacacagcctgccccagcgtccctgcccccagctggccgcagggcccgccccatggagccccctgccgccctgggctaatgggagccagatggccgcctggtgactcagccaccgggcctgtgggaacccaggcgtcccgccttcccatgcccccacacccggctcctgctcccccagcagacacacacaggagggcctggccactgttgagggggcacacagggcaagggtcaccaagtcggggcctagggactcctcatgcctctgagatggaatggtggtatcctgccgtggccaagcctgaaggaccctcaaaactgcctcctggagtccacggttcctgacctccgagcctcagctatgccctctgggtcaaccagaattagagccagacagggaaagtgagagctggatggaggcagacaagatgctcagagcgactattaaagaacgaaagcctctgctacggagcgcttctgtcctctgtcaggcccgagcgaagtgcctgacaccgggttgaatcctcagatggccccatgaactagtgaagtgggtcaaaggaggcctggaaagatgttgcttcctcaaggccactcggccatcagaggcagaaatgaaacaggaacccaggcctagaatcacaaaggtcctagaaaccacttggctgtctggcctctcaggtgtcagggccatccagagtgagacagcattggagggacaagtgtgcatgcagatgtcctcagacgggaaggtttgagaagggtcagatggtaggcgggcctaacaagggctccgtgctagccactgtcccgcacacagacaggatcaggtcatcttgatatggagatcagtccccaaatcactgaattgtcccagcagtgctatgccctaggtactaccaatatcactcctctatttcccagaggaggaagcagcagctagactccaggaccttggggtcatacctctcagaaagccaagagtgcaggatgagagctgtctgtctcttacctgcctgtatttgtgccccatttttaaagagcagagggcctgggccacaggaaaggtatcagcccttggtgataggcacattttttaccagtctatcatttggtcattaaatttgtttacaatataaaaacaata

SEQ ID NO: 78821 - DNA, 616 bp, Homo Sapiens
cttcatgggtgcaaagtatagttgttaaaaacaaaacaacagaaacagaataaataggcgtggcctctgcggggcagtgccaaagcagagctccacatacttaggcctggggaggaagggctctatgctccaacaagtctagggctggcaggcagggagggaggtggggtctcatgtgttggccctcatggcaaagaatggagatctggtggggccgatggagggcttgagaaagcctgatcaagatgcggctgtggcctcagccccctcctctgagtcccacacctctgactgcaggtaatcagcaaagagagccctagcccggcgcaggacgcgccccaggtggtgttttcgcacaaggcggtcaaagtgcatggccagctcattataatccagcccattgcgcatgatgtggtcgcggtgctccagcaggatggccaggcagaggaacagcatgaatgggttcccccggccaaactccctggggtgggggcaggcccattggtggtacaggtggcagggactttccagggtctttcggggagcctacctcttgcatcaagggggatcctacagccatatcaccagtgggagaggcctcctgggtggatggtgg

SEQ ID NO: 78822 - DNA, 1394 bp, Homo Sapiens
gcaacaaactgcagcccaaaggccagcattatgccaacatttggcagggcgagtttccggtgaccaacactggtggggatggcttccaaggaactgcgcctgttgatgccttccctcccaatggttatggcttatacaacatagtggggaacgcatgggaatggacttcagactggtggactgttcatcattctgttgaagaaacgcttaacccaaaaggtcccccttctgggaaagaccgagtgaagaaaggtggatcctacatgtgccataggtcttattgttacaggtatcgctgtgctgctcggagccagaacacacctgatagctctgcttcgaatctgggattccgctgtgcagccgaccgcctgcccactatggactgacaaccaaggaaagtcttccccagtccaaggagcagtcgtgtctgacctacattgggcttttctcagaactttgaacgatcccatgcaaagaattcccaccctgaggtgggttacatacctgcccaatggccaaaggaaccgccttgtgagaccaaattgctgacctgggtcagtgcatgtgctttatggtgtggtgcatctttggagatcatcgccatattttacttttgagagtctttaaagaggaaggggagtggagggaaccctgagctaggcttcaggaggcccgcatcctacgcaggctctgccacaggggttagaccccaggtccgacgcttgaccttcctggccctcaagtgccctcccctatcaaatgaagggatggacagcatgacctctgggtgtctctccaactcaccagttctaaaaagggtatcagattctattgtgacttcatagtgagaatttatgatagattattttttagctattttttccatgtgtgaaccttgagtgatactaatcatgtaaagtaagagttctcttatgtattattttcggaagaggggtgtggtgactcctttatattcgtactgcactttgtttttccaaggaaatcagtgtcttttacgttgttatgatgaatcccacatggggccggtgatggtatgctgcagttcagccgttgaacacataggaatgtctgtggggtgactctactgtgctttatcttttaacattaagtgcctttggttcagaggggcagtcataagctctgtttccccctctccccaaagccttcagcgaacgtgaaatgtgcgctaaacggggaaacctgtttaattctagatatagggaaaaaggaacgaggaccttgaatgagctatattcagggtatccggtattttgtaatagggaataggaaaccttgttggctgtggaatatccgatgctttgaatcatgcactgtgttgaataaacgtatctgctaaatctgattaaaaaaaa

SEQ ID NO: 78823 - DNA, 1152 bp, Homo Sapiens
  misc_feature (73)..(97): n is a, c, g, or t
gtacggctaggtacgaggctgggtgtgaattcggcaacgaggcagcacagcggtgaccccgagtgagaggaannnnnnnnnnnnnnnnnnnnnnnnntgaagtcactgctgctctgggttcgggttggcgactgaaggcggtaccggcctcccggaacagcccgggggagggcttaggtgcagaagggcaggctggccgcggccggtttggtctggggaccacgggctggagcaggtggaaatttaaaattgtttacagtcaacactgtttccagccatgggtttgtctccatctgctcctgctgttgcagttcaggcctcaaatgcttcagcgtccccaccttcaggatgcccgatgcatgaagggaaaatgaaaggctgtccagtgaatacagagccatctggcccaacctgtgagaagaaaacatactctgtgcctgcccaccaggaacgcgcctatgagtacgtggagtgtcccattaggggcactgcggctgagaataaggagaacctagatccttcaaatctgatgccaccaccaaatcaaacaccagctccagatcagccatttgcattgtctactgtcagagaagagtcatccattccgagagcagattcagagaaaaagtgggtttacccttctgagcagatgttctggaatgcaatgttaaagaaagggtggaagtggaaggatgaggatatcagtcagaaggatatgtataatatcattagaattcacaatcagaataacgagcaggcttggaaggagattttgaagtgggaagcccttcatgctgcagagtgtccttgtggtccatcattgatccggtttggagggaaagcaaaagagtattcaccaagggcacgaattcgttcctggatggggtatgagttgccttttgataggcacgattggatcataaaccgttgcgggacagaagttagatatgtgattgattattatgatggtggtgaagtcaacaaggactaccagttcaccatcctggacgtccgtcctgccttagattcactttcggcagtatgggacagaatgaaagtcgcttggtggcgttggacctcgtaaagcactgtttcagatggaaaaatataaactatttttttctgagcgatacattaaactattttccccag

SEQ ID NO: 78824 - DNA, 1126 bp, Homo Sapiens
aacattacggtctaggtacgaggctgggtgttgaattcggcacgaggagtcctgcgagcgacgcgcggcggggcggcgagaggaaacgcggcgccgggccgggccctggagatggtccccggcgccgcgggctggtgttgtctcgtgctctggctccccgcgtgcgtcgcggcccacggcttccgtatccatgattatttgtactttcaagtgctgagtcctggggacattcgatacatcttcacagccacacctgccaaggactttggtggtatctttcacacaaggtatgagcagattcaccttgtccccgctgaacctccagaggcctgcggggaactcagcaacggtttcttcatccaggaccagattgctctggtggagagggggggctgctccttcctctccaagactcgggtggtccaggagcacggcgggcgggcggtgatcatctctgacaacgcagttgacaatgacagcttctacgtggagatgatccaggacagtacccagcgcacagctgacatccccgccctcttcctgctcggccgagacggctacatgatccgccgctctctggaacagcatgggctgccatgggccatcatttccatcccagtcaatgtcaccagcatccccacctttgagctgctgcaaccgccctggaccttctggtagaagagtttgtcccacattccagccataagtgactctgagctgggaaggggaaacccaggaattttgctacttggaatttggagatagcatctggggacaagtggagccaggtagaggaaaagggtttgggcgttgctaggctgaaagggaagccacaccactggccttcccttccccagggcccccaagggtgtctcatgctacaagaagaggcaagagacaggccccagggcttctggctagaacccgaaacaaaaggagctgaaggcaggtggcctgagagccatctgtgacctgtcacactcacctggctccagcctcccctacccagggtctctgcacagtgaccttcacagcagttgttggagtggtttaaagagctggtgtttggggactcaataaaccctcactgactttttagcaataaagcttctcatcagggttaaaa

SEQ ID NO: 78825 - DNA, 929 bp, Homo Sapiens
gctgaagtcctgcgagcgacgcgcggcggggcggcgagaggaaacgcggcgccgggccgggcccggccctggagatggtccccggcgccgcgggctggtgttgtctcgtgctctggctccccgcgtgcgtcgcggcccacggcttccgtatccatgattatttgtactttcaagtgctgagtcctggggacattcgatacatcttcacagccacacctgccaaggactttggtggtatctttcacacaaggtatgagcagattcaccttgtccccgctgaacctccagaggcctgcggggaactcagcaacggtttcttcatccaggaccagattgctctggtggagagggggggctgctccttcctctccaagactcgggtggtccaggagcacggcgggcgggcggtgatcatctctgacaacgcagttgacaatgacagcttctacgtggagatgatccaggacagtacccagcgcacagctgacatccccgccctcttcctgctcggccgagacggctacatgatccgccgctctctggaacagcatgggctgccatgggccatcatttccatcccagtcaatgtcaccagcatccccacctttgagctgctgcaaccgccctggaccttctggtagaagagtttgtcccacattccagccataagtgactctgaagctgggaaaggggaaacccagggaattttgctacttgggaatttggagatagcatctgggggacaagtggagccaagtagaggaaaaagggtttggggcgttgccaaggctgaaagggaaaacacaccactggcccttcccttcccccagggccccccaaggggggtctccaggctacaagaagaaggccagaaacagggcccccagggctttctgggctaaaaacccaaaaccaaaagggaccgtgaa

SEQ ID NO: 78826 - DNA, 486 bp, Homo Sapiens
gcacgagggctgaccagagcaagatctgggcaagcagagagtgcctgggacaggactgtgacctggtggacaggggcctagatgtagcctctgttcctcctggacataggaaggtcccaagcttagtatcccacgtggcctttacaaatcctatggctggccttctcattccacaagggccctggaaagggttgacagccagccttggcatatggctgggagtcccttagcaaggccaaccctgaagaggccctttgaggcattccctatggcttagagttgtagacttacactcaaccctcatgtgagcgtgggagtgagggtggcggtcccttgccaagttggtagcagtgacccagtgattcactgccatcccaggccttaactagcaaaactacggagcgtgccaagtgacctggtgcctgtgggaagtgggttctcaggactggcattcttggaataaattcactctgtccttgcaaaaaa

SEQ ID NO: 78827 - DNA, 1101 bp, Homo Sapiens
tttacttttttgttaataagcaaacttatttgctgcagaatttgggttgactcctgagcatatttaaaacaaagaagctagaaatttagcagtcagattaggtaggtggttttatttcaaagggaaactttaatccaaagaaagattaattactctaacaaacaagagaagcttcatgtttgatgatacagatttaagaatacctgagacttaagagtgttggaagtcatttgatagaaagatgagatcggagacaatgttgtgttatagggcacacattgaaggtatatgccaaatctctcaccagataagtccttttctccctgtgccgttttcttgctcaaagggaacagtgaattagccagctagaatcttcctggtccctttttgaggcagtagcaggtaaggaaagggctgattttcatcaaaaccaagacctttctgcagggatgatagtggaataataatgtgggattagcccgctagcattaggagcagttgggaagttacctggtagatcaagcattacacacaaaaaatcaagttgatcagagtatgggttctccatatagcaatacttcagtgagattaagtataaacagtttttggcaaaaaacaacacagtctactctttctgcttacaaagacaaagccttacaaactcactatgaaggtaaagggaggacgacagcttgcttctttgcccagacatttacaaagttgtttttaaaacacactcataagtaagtttggcaagttgtttaaaaaatgtctctttgttttgtacagttctgttagatgttgttatattttaaaagtttaatttaaaaaatttaatttgtccttcctaagaaggataaatatataaaaaagccactggaatgaaaacttcctatatgctatgctgttgtcttattattatatagaaaaataactttagaaaaatattgaagacattgtattaccacttgtgattcaaacaattttgtggttaaaactggattttaaatttaaaaatcaataaaaatttcaaatgtttattaccttcctcggtgccataattttgactttatcttcaaataaaatccttcattaattgtg

SEQ ID NO: 78828 - DNA, 674 bp, Homo Sapiens
  misc_feature (33)..(33): n is a, c, g, or t
  misc_feature (41)..(51): n is a, c, g, or t
  misc_feature (653)..(662): n is a, c, g, or t
caagaagctgagctggcagagagctccaccatntggtgctnnnnnnnnnnncgtcctgaggttcatgaccaccatccagtttctggcctttacacagtcacctttcactgaggtcaggagcccctgagcagtggctgctccctgacaaccacagccatttctctgcacgggggtcattcataggactaatgtatttcatgatctactgtgcacatccaggcctgtggccacagtcccctgctaaagttgctcaggtgttctagtcctgacttcacctttttgatttggtgtgtgccctagggtatgtacccttccccatctgagcctcggtgtgtccatgtgtctggtgggggatgggtggactgtatgatttccaaggactctaccagtcagtggttctgatgtcatcgggtggaggtggtgttctatacctaaaggatgacctgctccagaaacagcaccagcacagcatgtattttcttctcttctgaaagttctggcttgtagacccctcccctcctttgcaaaggtatgggatagaggggtcagatgcagatctctactgtaaaatgggctccctggtatctcctgtcttccctactgctccaaaccctaaattttggttgtacattttatttgaaaggaaaataaannnnnnnnnngggccaacagtt

SEQ ID NO: 78829 - DNA, 753 bp, Homo Sapiens
gaaaaaaaactcatctaaccaaaacagatggatggctgcagctctatgggttcgttatgccaaagttctacatgtccaccaacataaaacaaaaccaagccttggctcgttctcttctctcttcaatctctggaaaaataagtacatatagttgataacccctcttagcttacaggaagctttttgtattaattgcctttgaggttattttccgccagacctcaacctgggtcaaagtggtacaggaaggcttgcagtatgatggcaggagaatcagcctggggcctggggatgtaaccaagctgtacccttgagacctggaaccagagccacaggccccttttgtgggtttctctgtgctctgaatgggagccagaattcactaggaggtcatcaaccgatggtcctcacaagcctcttctgaagatggaaggccttttgcccgttgaggtagaggggaaggaaatctcctcttttgtacccaatacttatgttgtattgttggtgcgaaagtaaaaacactacctcttttgagactttgcccagggtcctgtgcctggatgggggtgcaggcagccttgaccacggctgttcccctcacccaaaagaattatcatcccaacagccaagacccaacaggtgctgaactgtgcatcaaccaggaagagttctatccccaagctggccactatcacatatgcttactcttgcttaaaattaataaatcatgttttgatgagaaaaaactattct

SEQ ID NO: 78830 - DNA, 639 bp, Homo Sapiens
ctccaagcataatgcagacttcacagagctgttgtaaagattaggtgaggtcaattgatactgcttaaaaggcccggtccgtagaagatgcccaataaacattactgctttccccctcaccctactgcctgaaaaaatattacacctgtgagactgactttgagaaccagtgtgggtggggagttgtgcatataaactatttaatgagtaccaaacacaaaagtcaagcttgtaaaatatcaggccttgccccagaaagacaaataccacatgatctcactgatatgtagaatcttaaaaagtcaaactcagaagcagagagtagaatgatggttatcaagggctgggggagggagggactggggagatgttggtcaaatgatacaaaggtttagttaggtggaataagttcagaaaatcaattgtacaatgtatcaattatagttaatagcaatataacatatacttgaaaattgctgagagtagtgtgagtgttctaccacaaaaaaatatgtgcagtaatagatgttaattaccttaatttagtcatttcacaatatgtacatatataaaaatatgttgtatgccatgagtatatataattattatttgtgaatttaaaaaataaaaataatttcc

SEQ ID NO: 78831 - DNA, 1997 bp, Homo Sapiens
  misc_feature (1037)..(1037): n is a, c, g, or t
aaagtaagctaaggggacccatggcaaataggccgagaagttcgggaaatgaccataagaggttaaaaccgatgcttcttaatgaaaaattgaacgcctttctcaaggcactgaatattgtcacataacgtggaatgtgacttgaccgtatcacaatgtatactctcgagatcctaataatctgaattggttcataatcgtaatggagaatagaaatctccacagtcctgaatatctggaaatggctttgccattattttgcaaagcgatgagcaagctaccccttgcagcccaaggaaaactgatcagactgtggtctaaatacaatgcagaccagattcggagaatgatggagacatttcagcaacttattacttataaagtcataagcaatgaatttaacagtcgaaatctagtgaatgatgatgatgccattgttgctgcttcgaagtgcttgaaaatggtttactatgcaaatgtagtgggaggggaagtggacacaaatcacaatgaagaagatgatgaagagcccatccctgagtccagcgagctgacacttcaggaacttttgggagaagaaagaagaaacaagaaaggtcctcgagtggaccccctggaaactgaacttggtgttaaaaccctggattgtcgaaaaccacttatcccttttgaagagtttattaatgaaccactgaatgaggttctagaaatggataaagattatacttttttcaaagtagaaacagagaacaaattctcttttatgacatgtccctttatattgaatgctgtcacaaagaatttgggattatattatgacaatagaattcgcatgtacagtgaacgaagaatcactgttctctacagcttagttcaaggacagcagttgaatccatatttgagactcaaagttagacgtgaccatatcatagatgatgcacttgtccggctagagatgatcgctatggaaaatcctgcagacttgaagaagcagttgtatgtggaatttgaaggagaacaaggagttgatgagggangtgtttccaaagaattttttcagctggttgtggaggaaatcttcaatccagatattggtatgttcacatacgatgaatctacaaaattgttttggtttaatccatcttcttttgaaactgagggtcagtttactctgattggcatagtactgggtctggctatttacaataactgtatactggatgtacattttcccatggttgtctacaggaagctaatggggaaaaaaggaacttttcgtgacttgggagactctcacccagttctatatcagagtttaaaagatttattggagtatgaagggaatgtggaagatgacatgatgatcactttccagatatcacagacagatctttttggtaacccaatgatgtatgatctaaaggaaaatggtgataaaattccaattacaaatgaaaacaggaaggaatttgtcaatctttattctgactacattctcaataaatcagtagaaaaacagttcaaggcttttcggagaggttttcatatggtgaccaatgaatctcccttaaagtacttattcagaccagaagaaattgaattgcttatatgtggaagccggaatctagatttccaagcactagaagaaactacagaatatgacggtggctataccagggactctgttctgattagggagttctgggaaatcgttcattcatttacagatgaacagaaaagactcttcttgcagtttacaacgggcacagacagagcacctgtgggaggactaggaaaattaaagatgattatagccaaaaatggcccagacacagaaaggttacctacatctcatacttgctttaatgtgcttttacttccggaatactcaagcaaagaaaaacttaaagagagattgttgaaggccatcacgtatgccaaaggatttggcatgctgtaaaacagagcagggcaaaataaaacaagagaaagggagg

SEQ ID NO: 78832 - DNA, 768 bp, Homo Sapiens
tcaccaacaagtgcagtacgtgatcaagggtatcacaaaagaagagagtatatgctgcttttctcagtcactttggcacaggtgtcgtggaatatgatgcagaaggcttaccaaaactcactctgctgctgatgtggaaagatttttgttttcttgtacacattgacctgcctctgtttttccctcgagaccagccaactctcacatttcagtccgtttatcactttaccaacagtggacagctttactcccaggcccaaaaaaattatccgtacagccccagatgggatggaaatgaaatggccaaaagagcaaaggcttatttcaaaacctttgtccctcagttccaggaggcagcatttgccaatggaaagctctaggaaacaccagtcttgagaggtggccagccagactgcctgtccacatgcgtgtcagcacatacagccgcttcctggaagccgcctggaatgtcttcacggcagcgttttgctcacacagcagcttttgcacgccccaggcagccccgactgctgaaatccaacttgagctggctggtggtccctggatcctagagcccttcacttcgggttactccctctttcttgcctctatttcttagttggaagaaataaactcacaaattatggtgcagtaattttccggggaaagtaaagcctcaggaatgcccacgcctttcttccaaagcctttgtctctgagacctcttaagttctaagattaaatgcccctcgctgttcttcctctgaaa

SEQ ID NO: 78833 - DNA, 586 bp, Homo Sapiens
  misc_feature (331)..(331): n is a, c, g, or t
ggcccaaaaaaaattatccgtacagccccagatgggatggaaatgaaatggccaaaagagcaaaaagagagagcaacagagatggggaggaatccatgctctgcctgacatccaggcatcctctccaaattgcatagggcttatttcaaaacctttgtccctcagttccaggaggcagcatttgccaatggaaagctctaggaaacaccagtcttgagaggtgcccagccagactgcctgtccacatgcgtgtcagcacatacagccgcttcctggaagccgcctggaatgtcttcacggcagcgttttgctcacacagcagcttttgcancgccccaggcagccccgactgctgaaatccaacttgagctggctggtggtccctggatcctagagcccttcacttcgggttactccctctttcttgcctctatttcttagttggaagaaataaactcacaaattatggtgcagtaattttccggggaaagtaaagcctcaggaatgcccacgcctttcttccaaagcctttgtctctgagacctcttaagttctaagattaaatgcccctcgtgttcttcctctg

SEQ ID NO: 78834 - DNA, 764 bp, Homo Sapiens
  misc_feature (223)..(233): n is a, c, g, or t
  misc_feature (236)..(377): n is a, c, g, or t
gactgtgagacctcctttattaggccaagagtggccatgtgcacagatttacagagctgctcctccctgtgccaggaccgcccagcatcttcaggagcctctgggccaggggcgagtgaggacagcaccagaatgtggtagggccaggagaggcaggacacatgtggtttggaccccagggaaagggaaagggcaagggcagggagcagcttggcacggaccnnnnnnnnnnncgnnnnnnnnnnnnnnnnnnnnnnnnnnnnnnnnnnnnnnnnnnnnnnnnnnnnnnnnnnnnnnnnnnnnnnnnnnnnnnnnnnnnnnnnnnnnnnnnnnnnnnnnnnnnnnnnnnnnnnnnnnnnnnnnnnnnnnnnnnnnnnagcatgagccactgtgcccagcctgttccactgacatttcttagacattcagcaaaacccccaccttaacctcttttctttcttgagggttggtcctgtccccacctccaccctcccaccccctggaagaggaagggcccgggcatcagtggctagtccaaataaaatatgggcttggggatggaatgggtggtggtaagttcacagagtgtagttagatcccaactcccatgacctctggcttcagtggtgggtggggcagggcagatgaaagggcttcagtgggaacctctgagagcattttcctgttccccctatcaaccgcccccagtgataacatctgtgaagccagccattactcaataaactgcaaacttgtctacttaa

SEQ ID NO: 78835 - DNA, 948 bp, Homo Sapiens
  misc_feature (814)..(814): n is a, c, g, or t
gagagtatgaagtcgacggcgcgccgaattcggcacgaggcgcacttttccatctgctggccacacgcacagacaaggtccgagcccttcgggaggcgttctaccgccagaatcttcccaacctcatgaatctcatcgccaccatctttgtctttgcagtggtcatctatttccagggcttccgagtggacctgccaatcaagtcggcccgctaccgtggccagtacaacacctatcccatcaagctcttctatacgtccaacatccccatcatcctgcagtctgccctggtgtccaacctttatgtcatctcccaaatgctctcagctcgcttcagtggcaacttgctggtcagcctgctgggcacctggtcggacacgtcttctgggggcccagcacgtgcttatccagttggtggcctttgctattacctgtcccctccagaatcttttggctccgtgttagaagacccggtccatgcagttgtatacatagtgttcatgctgggctcctgtgcattcttctccaaaacgtggattgaggtctcaggttcctctgccaaagatgttgcaaagcagctgaaggagcagcagatggtgatgagaggccaccgagagacctccatggtccatgaactcaaccggtacatccccacagccgcggcctttggtgggctgtgcatcggggccctctcggtcctggctgacttcctaggcgccattgggtctggaaccgggatcctgctcgcagtcacaatcatctaccagtactttgagatcttcgttaaggagcaaagcgaggttggcagcatggnggccctgctctctgagccgtctcccgacaggtgaggagctgctcagagcgctcgaagggactctatcatgcgcgtgctgcgcgcatagactttatatgtttgaatcgatcttcatcatggtagtgcaactttca

SEQ ID NO: 78836 - DNA, 1447 bp, Homo Sapiens
  misc_feature (40)..(40): n is a, c, g, or t
  misc_feature (76)..(76): n is a, c, g, or t
  misc_feature (113)..(113): n is a, c, g, or t
cgagattcaagtatgtagagatgtgactggagcagatccngtccagaccaatgcgctagaagtcagcagacgaganggccccgatgcacagccaccaaaggcgcggctgtggnatgtaccggtgagttcatgaccatggaggtctctcggtggcctctcatcaccatctgctgctccttcagctgctttgcaacatctttggcagaggaacctgagacctcaatccacgtttggagaagaatgcacaggagcccagcatgaacactatgtatacaactgcatggaccgggtcttctaacacggagccaaaagattctggaggggacaggtaatagcaaaggccaccaactggataagcacgtgctgggcccccagaagacgtgtccgaccaggtgcccagcaggctgaccagcaagttgccactgaagcgagctgagagcatttgggagatgacataaaggttggacaccagggcagactgcaggatgatggggatgttggacgtatagaagagcttgatgggataggtgttgtactggccacggtagcgggccgacttgattggcaggtccactcggaagccctggaaatagatgaccactgcaaagacaaagatggtggcgatgagattcatgaggttgggaagattctggcggtagaacgcctcccgaagggctcggaccttgtctgtgcgtgtggccagcagatggaaaagtgcgatgatagcaccttcaaattccattcctcggccagtgttgacagtagtggggctgaatgccttccatacgatggtttcacagatgttagttgcaatgaagagagaaataccagagccaaggccatatcctttttgcaggagttcatccaaaagtaggacaattaagccagcaacaaagagctgaatggtgattagcaggcaaattccagcacccatttcagaagggtccccatacatcccggtcatcacatacacgatagactggccgatagtaatgatcatgccaaataacttttgggctccgttgaagagagctcggtcttttggggtgtcaccaacttcaattatcttggcgccagccaagagttgcattataaggccagacgtgacaataggagagatccctagctccatcaatgtgcctctgttagaggctagaatcactctcatccaatagaaagggtcagctgaatctgaagacatgatcccaaacaggggaatctggcagcacactaagaagataaagagggtgatagcggtccacagcactttctccttaaactgaatcttcctctctggcttctgaatttccggcaggatgacacagaagggcttgatgacttccagaaatttgattgccatgacggcgcctgctcgggctccgggtcccgcttcagctcagctctgctccgcgtgaggcgacgctgcccgcggcccagcgcgttccac

SEQ ID NO: 78837 - DNA, 1169 bp, Homo Sapiens
  misc_feature (1)..(1): n is a, c, g, or t
  misc_feature (49)..(49): n is a, c, g, or t
nagcccctttcaagccttttaacatcatgtcaccttcacaatgagcagntgctcccattacccagtgaactcaccttctgatgggacagttaccctagttggggcttctcagccttgagagatgtgcagagcagggacctgtccagggcagagcagccagacagcgtggaaataatccaaacagagaaagcattcaagaacttggcctctggttgacttaacacactacttcaagtatatggcaggtctgtataataaactcctgcctgtctagtcttcagcctcatagaaagcaagaaagcaggtggcgtatgttgcagaacaattcttgggtagaacaaggggacatttgatggtttgggtttttcagtaagaaagatgaagtcctggagtatagggtagagtggtacagtggaaaatatttcagcttgggggttagaaaataaacatgccgattcttgctttgccataaatgatgtcacctaacttgtgtgaccctgttttctcatccctaaaatgatttgataagtttaagattaggctatttttaaatgtatggaagaaattgggtgttacccttcttgaaagacattttccctgcaagtatggcaggctgtatctttcagtgtaacaaagttctattaaaggtcataactgctgccctgtaacttttgccttattctagaaacttctactccttgaatgacatgtgttggtacatgtttcttctctttcagatagaatggttaattttgacttgttgcttctgcacacgtgtcctggaaataaaagtttcttccccctacttattgctgatttatttcataggaagtcttaaggaaaaaggcaaaaaacgggctcatgggtcccttgaagttggaaaattctgtggagattgacaaaggagactcacttttgagcatctgttatcagtgtaaccttcaaatctgtggaaacataactaggcccattttatgattatttagaatgttaataaattgctttgagtttcctcaagtccattttgtaagatcagaccataggtgggtgttgtttcttttaagtgtgtgtactgtgtccaatgttacatttttaaaagtgttcatgctttttgtaaagtgattcgttttaagcacattaaaggtcgtttgagtattgtcatgtttttt

SEQ ID NO: 78838 - DNA, 449 bp, Homo Sapiens
agggcagaggacgacctgaagaagaagaaagctctgtcttccatgcgagccaactacagcaggctacctggccaaggctgaccagaagagaggcaagaagcacacagcccggaaaatgaaaaaaaagattctggctaagagacgcaagccgctcaacatcgatcaccttggtaaagacaaactgagggacaaggccaaggagctctgggagaccctgcaccagctggagattgacaagttcgagtttgggaagaagctgaaacgccagaaatatgacatcaccacgctcaggagccgctcgtgggactccacatcctccagcccccacaatcctgtcaggggctccctgacagtcctgggggtggagaggccatcccggggcgtcccccgcgtctgtgtccttgctgccttcatcccctggggcctgtgaataaagctgcagaaccccc

SEQ ID NO: 78839 - DNA, 484 bp, Homo Sapiens
atgagaaaaagaatgaccacacctatcgagtttttaaaactgtgaaccggcgagcacacatcttccccatggcagatgactattcagactccctcatcaccaaaaaagcaagtgtcagtctggtgcagtaatgactacctaggaatgagtcgccacccctcaccacacaccccagatgatgaactacttccttgagaatctgctagtcacatggaagcaagtggggctggaactgaagcctcattcctcagctgagtgcaacttctgcaggaggccactgcattttgaagtgatgagtgaaagagagaagtcctatttctcaggcttgagcaagttggtatctgctcaggcctgagcatgacctcaattatttcacttaaccccaggccattatcatatccagatggtcttcagagttgtctttatatgtgaattaagttatattaaattttaatctatagtaaaaacatagtcctggaaataa

SEQ ID NO: 78840 - DNA, 2613 bp, Homo Sapiens
  misc_feature (2222)..(2319): n is a, c, g, or t
  misc_feature (2322)..(2323): n is a, c, g, or t
  misc_feature (2326)..(2326): n is a, c, g, or t
  misc_feature (2328)..(2339): n is a, c, g, or t
  misc_feature (2379)..(2390): n is a, c, g, or t
  misc_feature (2406)..(2453): n is a, c, g, or t
  misc_feature (2474)..(2482): n is a, c, g, or t
  misc_feature (2539)..(2550): n is a, c, g, or t
gctggaccggtccggaatcctgcgaaagagggcggcctgaggctgctctcccgacaagggcaacgagcgtttcgtttggacttctcgacttgagtgcccgcctccttcgccgccgcctctgcagtcctcagcgcagtctttccacaggagccagcatacttcctgaacatggagagtgttgttcgccgctgcccattcttatcccgagtcccccaggcctttctgcagaaagcaggcaaatctctgttgttctatgcccaaaactgccccaagatgatggaagttggggccaagccagcccctcgggcattgtccactgcagcagtacactaccaacagatcaaagaaacccctccggccagtgagaaagacaaaactgctaaggccaaggtccaacagactcctgatggatcccagcagagtccagatggcacacagcttccgtctggacaccccttgcctgccacaagccagggcactgcaagcaaatgccctttcctggcagcacagatgaatcagagaggcagcagtgtcttctgcaaagccagtcttgagcttcaggaggatgtgcaggaaatgaatgccgtgaggaaagaggttgctgaaacctcagcaggccccagtgtggttagtgtgaaaaccgatggaggggatcccagtggactgctgaagaacttccaggacatcatgcaaaagcaaagaccagaaagagtgtctcatcttcttcaagataacttgccaaaatctgtttccacttttcagtatgatcgtttctttgagaaaaaaattgatgagaaaaagaatgaccacacctatcgagtttttaaaactgtgaaccggcgagcacacatcttccccatggcagatgactatgcagactccctcatcaccaaaaagcaagtgtcagtctggtgcagtaatgactacctaggaatgagtcgccacccacgggtgtgtggggcagttatggacactttgaaacaacatggtgctggggcaggtggtactagaaatatttctggaactagtaaattccatgtggacttaaagcgggagctggcagacctccatgggaaagatgccgcactcttgttttcctcgtgctttgtggccaatgactcaacccctcttcaccctggcgtaagatgatgccaggctgtgagatttactctgattctgggaaccatgcctccatgatccaagggattcgaaacagccgagtgccaaagtacatcttccgccacaatgatgtcagccacctcagagaactgctgcaaagatctgacccctcagtccccaagattgtggcatttgaaactgtccattcaatggatggggcggtgtgcccactggaagagctgtgtgatgtggcccatgagtttggagcaatcaccttcgtggatgaggtccacgcagtggggctttatggggctcgaggcggagggattggggatcgggatggagtcatgccaaaaatggacatcatttctggaacacttggcaaagcctttggttgtgttggagggtacatcgccagcacgagttctctgattgacaccgtacggtcctatgctgctggcttcatcttcaccacctctctgccacccatgctgctggctggagccctggagtctgtgcggatcctgaagagcgctgagggacgggtgcttcgccgccagcaccagcgcaacgtcaaactcatgagacagatgctaatggatgccggcctccctgttgtccactgccccagccacatcatccctgtgcgggttgcagatgctgctaaaaacacagaagtctgtgatgaactaatgagcagacataacatctacgtgcaagcaatcaattaccctacggtgccccggggagaagagctcctacggattgcccccacccctcaccacacaccccagatgatgaactacttccttgagaatctgctagtcacatggaagcaagtggggctggaactgaagcctcattcctcagctgagtgcaacttctgcaggaggccactgcattttgaagtgatgagtgaaagagagaagtcctatttctcaggcttgagcaagttggtatctgctcaggcctgagcatgacctcaattatttcacttaaccccaggccattatcatatccagatggtcttcagagttgtctttatatgtgaattaagttatattaaattttaatctatagtaaaaacatagtcctggaaatannnnnnnnnnnnnnnnnnnnnnnnnnnnnnnnnnnnnnnnnnnnnnnnnnnnnnnnnnnnnnnnnnnnnnnnnnnnnnnnnnnnnnnnnnnnnnnnnnaannaanannnnnnnnnnnncccccttataaaaaaccccccgggggggccccaataattnnnnnnnnnnnnttttttgtgaggaaannnnnnnnnnnnnnnnnnnnnnnnnnnnnnnnnnnnnnnnnnnnnnnncgcgttttttcaaaccccgcnnnnnnnnnaaaaaaaccgcaccctggggggatttctttggagaagaaaaccccctcttctctgtnnnnnnnnnnnnaaaaattattgtggcaccaaccacccccctacacaaaatatttttccccgcctttcgggcggg

SEQ ID NO: 78841 - DNA, 1331 bp, Homo Sapiens
  misc_feature (364)..(377): n is a, c, g, or t
tttctgtctctgtgtttgaagtttcagtttctgttttctaggtaaggcttatttttgattagcagtcaatggcaaagaaaaagtaaatcaaagatgacttcttttcaaaatgtattgtttagcacttaactcagatgaatttataaattattaatcttgatactaaggatttgttacttttttgcatattaggttaatttttaccttacatgtgagagtcttaccactaagccattctgtctctgtactgttgggaagttttggaaacccctgccagtgatctggtgatgatctgatgatttatttaaagagccgttgatgcctccaggaaacttaagtattttattaatatatatataggaannnnnnnnnnnnnngctttgtctttctctcccttcttttatcctcatgttcattcttcaaaccagtgttttggaagtatgcatgcaggcctataaatgaaaaacacaattctttatgtgtatagcatgtgtattaatgtctaactacatacgcaaaaacttcctttacagaggttcggactaacatttcacatgcacatttcaaaacaagatgtgtcatgaaaacagcccctttacctgccaagacaagcagggctatatttcagtgacagctgatatttgttttgaaagtgaatctcataatatatatatgtattacacattattatgactagaagtatgtaagaaatgatcagaacaaaagaaaatttctattttcatgcaaatatttttcatcagtcatcactctcaaatataaattaaaatataacactcctgaatgcctgaggcacgatctggattttaaatgtgtggtattcattgaaaagaagctctccacccacttggtatttcaagaaaatttaaaacgatcccaaggaaagatgatttgtatgttaaagtgactgcacaagtaaaagtccaatgttgtgtgcatgaaaaggattccttggttatgtgcagggaatcatctcacatgctgtttttcctatttggtttgagaaacaggctgacactattctctttgattagaaaataaactcataaaactcataatgttgatataatcaagatgtaaccactataaatatgtagaagaggaagttttaaaagaccttaagctggcattgtgaaggaacaccatggtagactctttttgtaaatgtattttgtatttaatgaaatgcagtataaaggttggtgaagtgtaatataattgtgtaaacaaatcctgttaatagagagatgtacagaatcgttttgtactgtatcttgaaacttgtgaaataaagattccacctctggttaaaa

SEQ ID NO: 78842 - DNA, 573 bp, Homo Sapiens
  misc_feature (414)..(471): n is a, c, g, or t
acgtaaataagttacgaatcatgtttccgcatttacatgtcatctgcaagggattctaccatgtaaccctggttacaaagcactgaactggtacaacccctttattttcctgatgaggaaactgcagcccagccacctgcccaggtaacacagcaaatcgtggcaacctcgccgtccagcactcttctgggtctccaaggcctcccttcttcccaagtgtgtggacgtcggaaggcccatgtggcaagggagactgagccctgaggttgctgacaggaggccactgtggcgacacaatgcagtcatctggtgtttctatttattgactctttaaacttcatcatccaaagagagttaatacatgactgtttggtagcaagagaaacataatctaagaccgcaatgacccacccnnnnnnnnnnnnnnnnnnnnnnnnnnnnnnnnnnnnnnnnnnnnnnnnnnnnnnnnnnttggagttttagctgaagaagcgagggggctgagggtcagagtggctctctgtggtccagggggtcaggtagaggctgctctcaagtgggagccttctctcc

SEQ ID NO: 78843 - DNA, 958 bp, Homo Sapiens
  misc_feature (102)..(153): n is a, c, g, or t
catctggtgtttctatttattgactctttaaacttcatcatccaaagagagttaatacatgactgtttggtagcaagagaaacataatctaagaccgcaatnnnnnnnnnnnnnnnnnnnnnnnnnnnnnnnnnnnnnnnnnnnnnnnnnnnntctgaaaccaaacctttggagttttagctgaagaagcgagggggctgagggtcagagtggctctctgtggtccagggggtcaggtagaggctgctctcaagtgggagccttactcgtgttgaaaagcctacattccagcccctcagctttggggggcccttcctgaaggggcttcccttgggcagaaggggtgtggagacggattcagtggtcagaggggctcctaggtctgccctccaaggtgaccatatgtgccagtgcatgagacacagggaagcagggccaaggactgggggcgactgtgaggagatcatgggcccatttctcctacctgagagaaagccctgtccaaggccccatcagtgttcccaaattagggaaccactaaaggcaccaccaacaaactgggaaatgacaaagcctgacaggtccccagatggcaatcactgccccctaatagtcagcatcttgatctagaggactgagggcagccccatcaggctggggccctggaaagtttatgtcaacgggcaatgtttagggccttggacatgcagtgtgcgtacgtgtgtgtctgtatgaatggaatggggctcaggggcgcatgggtccctccaggaaggcttggttagagtcccagggtggtccccagggcaggaataggtttcttttcctcatgtcatttcctcaaatcacccccaccccaggtgaccaggtcactgcataaataagtgcttgggaaggtacacatctaaaaagaaacataaatactgtaacatggggattccccagcattccgtactcc

SEQ ID NO: 78844 - DNA, 986 bp, Homo Sapiens
  misc_feature (88)..(88): n is a, c, g, or t
  misc_feature (155)..(155): n is a, c, g, or t
  misc_feature (166)..(166): n is a, c, g, or t
  misc_feature (222)..(222): n is a, c, g, or t
  misc_feature (246)..(246): n is a, c, g, or t
  misc_feature (249)..(249): n is a, c, g, or t
  misc_feature (300)..(300): n is a, c, g, or t
  misc_feature (304)..(304): n is a, c, g, or t
tttggcacccagttacatttgtcccgtctattttttgatttgacgatacattcaccggaacgttgactggtacgattatcgactcctntaggattgcctcgagccagaatcgcacgagcgaagcccagcggagcccgccacaaatagctccctcngactgttgacntgacaagtcatgtccaactagtgcgcagacagtggttcccgccgggagccagagcncaaggagacctgcaggagccacantcnccagcctgccctccagtcctccgtgtgaggtgcaggcactgtgccaccacntgcncaccggccctggacagctgagctccacaaaaggagacatcctacgagtgctggggcgagctggaggagactggctgcgctgcagccgtggccccgactctggcctggtgcccctggcctacgtgacattgaccccaactccaagtccaacccctggaagcagccaaaactgaggccctgtgcatgctggtggcctcagggaccctcataacccccagactcagagcccgagagcccttcccaagccattggcttggctgcagagtagactgagagctggggccacgtatccctgtgctggcacctgctccctgtgctcagtattaattacgcccccttaactgtcccagtgaccttgtccagacctccacccaggagagggatgggacacagcactgggctgccaggattcccctggcccgtctgggccaacccttccatgggtgaagacaagcaagtccccctggaggcgggtggcccagaaagccatctacagggttccctaggccaggtggagatgaggatgggtaacagtattggggccagatccctaagccccccagctgtaaataggctgtggccagtgcctggtcatcagaagagggaggaggagcccaggcgtctgtttatgtatttatttatttatttattatacctattaataaaaaaggtgctcagcctcc

SEQ ID NO: 78845 - DNA, 1216 bp, Homo Sapiens
  misc_feature (30)..(30): n is a, c, g, or t
  misc_feature (36)..(36): n is a, c, g, or t
  misc_feature (164)..(164): n is a, c, g, or t
  misc_feature (221)..(221): n is a, c, g, or t
  misc_feature (275)..(275): n is a, c, g, or t
  misc_feature (288)..(288): n is a, c, g, or t
  misc_feature (963)..(1053): n is a, c, g, or t
cctgtccgattcattcgttttaagcagtcncacatntttgcattgaggtgtcgactgaggtaactgtcattattgctcacttgagggcgttggtgttgcttgcaatgtatggtgacttaacactcgtgagtaagcgatacatatggttgcagctttctcacctntcttgctggagagagttaatgtacctttagttgtcccagaaagatcagcccgttgcnacagaatgctctttctgagggtagcagtatgaatagggaacagacagaaaaccncaggagggctttncaggaaactctccctctccatcgccatcctgcaagctccacagcctcgggctgccagcctgtggcactgtcctcggtgtgtcctggagctgtgctgggcagcagggcctcgcgtaaggaactgctggaacccactgagcccttcccggggtttcccgccgcactcagtgtgttccttcaggctagtgaggtttcattctgttttatttgcaagcttatcaaaagtttgtggaagatacattgttgggttccagaggctggagtcatgctgcccacatcttgtttgggaaagcaaaagctcccagtgagctggtgtccccgtgtgtctttcatgggactgtcccctttagagatcccacctgtcagagccacagcttcggggtcctgtcatcacatcccctgggaggggaggcaggaggaggccgagggccccaggatgtctgcctggtcccttctcactgtgaggacgcccttggcacacctttctcaagtcacacaaattattgcagttacatacagaattgctgacaggagcaggagacgctgagggaaacagctggcaatgtgacaaaagtcttttctgggacaacaatcaaatcatgtatttgtatttttttaagtttaccaatgaattgtacaacaatgtaaaaataaagttcatcctaatatgctgtgnnnnnnnnnnnnnnnnnnnnnnnnnnnnnnnnnnnnnnnnnnnnnnnnnnnnnnnnnnnnnnnnnnnnnnnnnnnnnnnnnnnnnnnnnnncttgtccggcccgctctcggcccctcaaaaaatttttcataaaccattctcttttggggccgccggccccccaaaagggaaaggggaacttgggcccatacctgtgttccccaaggaaaaacccctgggccatgaccatagggctttgggaatctcccccccc

SEQ ID NO: 78846 - DNA, 1480 bp, Homo Sapiens
gcggccgccgctgccaacgagctcaacaacaacctcccgggcggcgcgccggccgcacctgccgtccccggtcccgggggcgtgaactgcgcggtcggctccgccatgctgacgcgggcggcccccggcccgcggcggtcggaggacgagcccccagccgcctctgcctcggctgcaccgccgccccagcgtgacgaggaggagccggacggcgtcccagagaagggcaagagctcgggccccagtgccaggaaaggcaaggggcagatcgagaagaggaagctgcgggagaagcggcgctccaccggcgtggtcaacatccctgccgcagagtgcttagatgagtacgaagatgatgaagcagggcagaaagagcggaaacgagaagatgcaattacacaacagaacactatacagaatgaagctgtaaacttactagatccaggcagttcctatctgctacaggagccacctagaacagtttcaggcagatataaaagcacaaccagtgtctctgaagaagatgtctcaagtagatattctcgaacagatagaagtgggttccctagatataacagggatgcaaatgtttcaggtactctggtttcaagtagcacactggaaaagaaaattgaagatcttgaaaaggaagtagtaagagaaagacaagaaaacctaagacttgtgagactgatgcaagataaagaggaaatgattggaaaactcaaagaagaaattgatttattaaatagagacctagatgacatagaagatgaaaatgaacagctaaagcaggaaaataaaactcttttgaaagttgtgggtcagctgaccaggtagaggattcaagactcaatgtggaaaaaatattttaaactactgattgaatgttaatggtcaatgctagcacaatattcctatgctgcaatacattaaaataactaagcaagtatatttatttctagcaaacagatgtttgttttcaaaatacttctttttcattattggttttaaaaaagcattatccttttatctcacaaataagtaatatctttcagttattaaatgatagataatgcctttttggttttgtgtggtattcaactaatacatggtttaaagtcacagccgtttgaatatattttatcttggtagtacattttctcccttaggaatatacatagtctttgtttacatgagttcaaatacttttgggatgttaccttcacatgtcctattactgatgtgtgcaaccttttatgtgttgatgactcactcataaaggtttttgtctactgtcatttgttctttccacttattctaagcatttagagtaatagagtcatacttttgtataacagcaaccttttaaaaggaaagctcttataaagtcactgtcatgttttagttgactaaatataaatttaagagaatacttgaattgtgctatagtaaataaaaatttactattttgtgtttg

SEQ ID NO: 78847 - DNA, 1038 bp, Homo Sapiens
  misc_feature (77)..(111): n is a, c, g, or t
  misc_feature (412)..(429): n is a, c, g, or t
aagacttgatatatatagggcgctacgcgtagaagcgaacgacgagcgcagagagtcagtgagcgaggaagcggcgnnnnnnnnnnnnnnnnnnnnnnnnnnnnnnnnnnncagtcgacggtaccggacatatgcccgggaattcggccattacgggccgagctagttctgcagaactagcccaacctcataaactgtctgaaaccccaggcactaaagcagagtgtcatccctgtctttaaactgggggtatgtccactctagcaagtaaaaaaaactactgttacacgttccagtaactctgtcaatattttcttgtatcagaatgttattatgcagccttcatttgggctggtttcatcatttgcactgtgaaatagctttacagtgcattactacagccagaagaacnnnnnnnnnnnnnnnnnnttaaaaatatatcggatagttgtatacaaatgagcaaggtatttgttgcaacttactacatagcatatacccaaaatcactgaagaaaatcgctggcatcagtgtgcagcaaatttgttcttttggtttcatcactaacaaaagtgcctcatcataaaaatacagttggtttttagggtgccatattgttaaaattagataacttacttacattgaataaacgaatgcgttttattggtaacagatatcattacatttaccagttttaacacaggtggatacagaacttccattctttagtcattccaggtggatctgagttttatattcaaacttttaatacagtttttgagttttgtgtgacttgaatttttaatctttctgtaaaatacgtaacttaaatgaacatattaaatgtgtatcttttcttcagataccagatttgatataatgttgtaacataggtgtgtagatagtggatcctggatggaactggcttctttatcgagaagaatataattctgcatgaggacttaatgaatccaaacctgtgtcatgcctgtgtgcatacccaattaaacactggaaataaaaattgttttggtgaaa

SEQ ID NO: 78848 - DNA, 1648 bp, Homo Sapiens
  misc_feature (1067)..(1067): n is a, c, g, or t
  misc_feature (1366)..(1378): n is a, c, g, or t
  misc_feature (1568)..(1588): n is a, c, g, or t
attcattaatttgataagcagaattgttatttaaaaactaactggaaagattgttaagttctttctgaattattcagaaattatgcatcattttccttcaagaatgacagggtcagcatgtggaattccaagatacctcttgacttcctctcaagctccgtgtttggtcagtggaggcccatccgagctcagcactgagaagtgttagtttctttgggacccatctaccctgaccacatcatgatgttcatctgcagctgttgcaaggtgttcagattgtataaacataaatgtcacaaaaactttaaaagaagtgcaattctcaaaaggttaggtggactaaagcattctgtaaagcaactgctaataatgagcttacagtggatttgaatttgaaaaatatagtaacaagcctgtcaaatatctgcaagaactatggaataaaactactgatgcagtgaagacagttgaaaagatcaaacaaatgccaagctatatttataatgaacaaattcaagaaaaaggactacggaaagttcaggacatcaaagaagtcaggcaaaactcatcttgacccctgttgcaggcaaaggaacgcagctggaagaaaagatgatataacagttaacaggatgcagacatggcagaggtttcctaaaaatctcattatctataaccatttctatatttacatttgaaaatctcctttggagacttagaacctctaaattattgacttattttttatataaggtcactccgatgaaaggtgattacaaaatcatctacattgctgtctacaaaacagataatatggatgtttgatcgcatctcattgttaactctttactgatatgtttgtaaatacagaagtgaaatgtggacataaaatagttacgctatttggttaatggtactagacaacatgtaattaatgacattcaaaaatttatggctagtgatatatataaagtaaaattttctttgcagtaaaatatgccctttattatagaagggaggatataaggaaccaacagtttgtatgaaaatagctcaaataatatctntttattttgattttaatatttcttattttggtttattagtgtcttagaacaaaatggccttatataatgaagcctagttatgctggactgttttgatctcttttaattgttctgacagatagttggggatgagagccgaataaggtttgcctgaaataactgacactatataatttctgctttggcaaatactaagttctaacttgtcattcctggtagaacaagctttatttttcgagcctagcaatgatctagaagcagatgttatctcagtgccttttgcaatttgttgtgtgggnnnnnnnnnnnnnaaagccacacaataattttggaaaacaatgtatgggtagaacatgtgtctgttaattgcacacaaaaccacttttaatgggtacagagttaaatttgaaggaataagttctagctgaagtattatgaactccaaataatgctttgaggacctccaaaggtaaaagtactaatccctttggccatttattnnnnnnnnnnnnnnnnnnnnntagggtgactatagttaatgtattgaatgttcttgctacaaataaatgatatttgagctg

SEQ ID NO: 78849 - DNA, 1156 bp, Homo Sapiens
  misc_feature (824)..(1113): n is a, c, g, or t
gacctagtgtgtccctagcactagctctcccattagtccccagagacaatgagtctcttctcattggctatggtggaagtccataatctgcaagacaaagaccgataactgaggaatgtatgagaatgagttgggctttgatctgaagccaaagttaatctccggctctattccctctagggtgactcagggggaccgttggtgtgcagaggtaccctgcaaggtctggtgtcctggggaactttcccttgcggccaacccaatgacccaggagtttacactcaagtgtgcaagttcaccaagtggataaatgactccatgaaaaagcatcgctaacgccacactgagttaattaactgtgtgcttccaacagaaaatgcacaggagtgaggacgccgatgacctatgaagtcaaatttgacttaacctttcctcaaagatatatttaaaccaacctcatgccctgttgataaaccaatcaaattggtaaagacctaaaaccaaaacaaataaagaaacacaaaaccctcagtgctggagaagagtcagtgagaccagcactctcaaacactggaactggacgttcgtacagtctttacggaagacacttggtcaacgtacaccgagacccttattcaccacctttgacccagtaactctaatcttaggaagaacctactgaaacaaaaaaaatccaaaatgtagaacaagacttgaatttaccatgatattatttatcacagaaatgaagtgaaaccatcaaacatgttccaaaagtaccagatggcttaaataatagtctggcttggcacaacgatgttttnnnnnnnnnnnnnnnnnnnnnnnnnnnnnnnnnnnnnnnnnnnnnnnnnnnnnnnnnnnnnnnnnnnnnnnnnnnnnnnnnnnnnnnnnnnnnnnnnnnnnnnnnnnnnnnnnnnnnnnnnnnnnnnnnnnnnnnnnnnnnnnnnnnnnnnnnnnnnnnnnnnnnnnnnnnnnnnnnnnnnnnnnnnnnnnnnnnnnnnnnnnnnnnnnnnnnnnnnnnnnnnnnnnnnnnnnnnnnnnnnnnnnnnnnnnnnnnnnnnnnnnnnnnnnnnnnnnnnnnnnnnnnnnnnncacaaatgatattacaaacctattaaaaatgatacttagacag

SEQ ID NO: 78850 - DNA, 995 bp, Homo Sapiens
  misc_feature (96)..(96): n is a, c, g, or t
  misc_feature (133)..(133): n is a, c, g, or t
  misc_feature (155)..(541): n is a, c, g, or t
aacgcagtcgacagagaccagaggactccagggaaccctgttctatatcttcggttcgcacttgattacgtgattttgtgctgtcaggggcgagcnttgaaaacgcagcacgcgccttttacgtctgcccctntgctgcccttgctcacatgtcnnnnnnnnnnnnnnnnnnnnnnnnnnnnnnnnnnnnnnnnnnnnnnnnnnnnnnnnnnnnnnnnnnnnnnnnnnnnnnnnnnnnnnnnnnnnnnnnnnnnnnnnnnnnnnnnnnnnnnnnnnnnnnnnnnnnnnnnnnnnnnnnnnnnnnnnnnnnnnnnnnnnnnnnnnnnnnnnnnnnnnnnnnnnnnnnnnnnnnnnnnnnnnnnnnnnnnnnnnnnnnnnnnnnnnnnnnnnnnnnnnnnnnnnnnnnnnnnnnnnnnnnnnnnnnnnnnnnnnnnnnnnnnnnnnnnnnnnnnnnnnnnnnnnnnnnnnnnnnnnnnnnnnnnnnnnnnnnnnnnnnnnnnnnnnnnnnnnnnnnnnnnnnnnnnnnnnnnnnnnnnnnnnnaagaattcggcacgaggagaaaagcaaaactgaccataaaaaacaattacctggtgagaagttgcataaacagaattaggtagtatattgaagacagcatcattaaacagttatgttattctccttgcaaaaaacatgtactgacttcccgttgagtaatgccaagttgttttttttattataaaacttgcccttcattacatgtttcaaagtggtgtggtgggccaaaatattgaaatgatggaactgactgataaagctgtacaaataagcagtgtgcctaacaagcaacacagtaatgttgacatgcttaattcacaaatgctaatttcattataaattgttttgctaaaatacactttgaaactatttttctgtattccaagagctgagatcttagattttatgtagtattaagtgaaaaaatacgaaaataataaacattgaagaaaaa

SEQ ID NO: 78851 - DNA, 607 bp, Homo Sapiens
tcagaatgcaagtctgtctcttatatcctcgagaaacacacctttatatcccagttagtactgacaaaaattaaactagggactggccaaaaacagtgcctttcctcactttaatctcactaaagtagataagactcaagttatttggttcttgcaatggcattgacaaatgtttgcaccaaaaaccatgttgaagttcattaaggaaactgtgatccaagatccaaggtcaaaaaaacaaattcatcaattcagcacaccaccaactcacaggctaagcatcttactgctaattcattgatgctgccatttgtcaagtgccaaattgaattattgatttgtcaataatttccttccgttggttacttatatagtatattgcaattcttgttgctgaagtcagctacactttttctatttgaaaaacaatttcttgcatttgggatttcaggtatagtgattgttacaaatatgaaggacttgaattaacagcaagttttcaagtaaaactttacttatgtttaactgaatgagttcttaaagacatttactaacaattttccacaaactaaaaatttataaaacaataaataaaatagactttaaa

SEQ ID NO: 78852 - DNA, 1251 bp, Homo Sapiens
ctggaccggtccggaattcccgggatatcgtcgacccacgcgtccgcccacgcgtccggccctgccctgtgagttcctccggccgggctgcggggctccgctcagtccgggagcgcagctgggccgcggcgctccgacctccgctttcccaccgcccgcagctgaagcacatcccgcagcccggcgcggactccgatcgccgcagttgccctctggcgccatgtcgcagaacggagcgcccgggatgcaggaggagagcctgcagggctcctgggtagaactgcacttcagcaataatgggaacgggggcagcgttccagcctcggtttctatttataatggagacatggaaaaaatactgctggacgcacagcatgagtctggacggagtagctccaagagctctcactgtgacagcccacctcgctcgcagacaccacaagataccaacagagcttctgaaacagatacccatagcattggagagaaaaacagctcacagtctgaggaagatgatattgaaagaaggaaagaagttgaaagcatcttgaagaaaaactcagattggatatgggattggtcaagtcggccggaaaatattccccccaaggagttcctctttaaacacccgaagcgcacggccaccctcagcatgaggaacacgagcgtcatgaagaaagggggcatattctctgcagaatttctgaaagttttccttccatctctgctgctctctcatttgctggccatcgggattggggatctatattggaaggcgtctgacaacctccaccagcaccttttgatgaagaactggagtctgacttggttcgttagtggattacttctgagcttgcaacatagctcactgaagagctgttagatcctggggtggccacgtcacttgtgtttatttgttctgtaaatgctgcgttcctaatttagtaaaataaaagaatagacactaaaatcatgttgatctataattacacctatgggatcaataagcatgtcagactgattaatgtctactgtaaaaatttggtagtaaattttcatttgatattagatataaatatctgaatataaataattttaatatactagtcatgatgtgtgttgtattttaaaaattatctgcaaccttaattcagctgaagtactttatatttcaaaagaatgaataacattgataataaaatcgctactttaaggggtttgtccaaaataaatattgtggccttatatatc

SEQ ID NO: 78853 - DNA, 957 bp, Homo Sapiens
  misc_feature (696)..(697): n is a, c, g, or t
  misc_feature (718)..(718): n is a, c, g, or t
  misc_feature (804)..(805): n is a, c, g, or t
  misc_feature (884)..(885): n is a, c, g, or t
cccatttccagtttttaaaagtagacacagatttgcttagaataaagctgattttaaaagcacacaaaagttgaacacaaaggagaggattaaattcaccaatgcagagtgataaagaggaaaagatactgagtaggtgccttcagcagaaaactgatcatccagggtgatcacctaataatcggagacttaattccttataatgcaaaagcaagaagagtttagtgtacgaactgtacagctgagtttgtagctctatcttggtttctgttgattatgaacaattagcatagttatatataatctttctttagtagacaacctgcatccatttaaattaaataatactttctacaatagtgtgatatataaggccacaatatttattttggacaaaccccttaaagtagcgattttattatcaatgttattcattcttttgaaatataaagtacttcagctgaattaaggttgcagataatttttaaaatacaacacacatcatgactagtatattaacaattatttatattcagatatttatatctaatatcaaatgacaatttactaccaaattttcacagtagacattaatcagtctgacatgcttattgatcccataggtgtaattatagatcaacatgattttagtgtctaatcttttattttactaaattaggaacgcagcatttacanngacaataacacaagtgacgtnggcaccccaggatctaacagctcttcagtgagctatgttgcagctcaagagtatcccactacgacagtcaactccattctcatcannagtgtggtggaggtgtcaacgcctccatataatcccatccgatgcagcaatgaagagcacaagatggaggaaacttcannatctggcaagaagccccttctcatacctgggtctccagctaggtgcgtggctcggggttaaagatcctgggg

SEQ ID NO: 78854 - DNA, 787 bp, Homo Sapiens
  misc_feature (100)..(100): n is a, c, g, or t
tgcgggctcagtcccgcgttgccatgtgtgggagaccgcgtcgcgtaagcgctggatgtgcttcgctgatgcacattggaccgggctctggactgggctnaggggaagggcaggagggcggaattgggcccgagggccaggcctcgccgacccccgagtgcgcctcccggtggccccgcagcgcctcccggtggccctggagtgcaggtcttaccgtccgagatcgtccgcaactgggcgagctgtgcatggggcgtggctaaggccgtggtttggttacgattggccagcgggacttaagtgttgtctctgaagagcatggacattagtctggagggtcctggaagagtgatccccgccccaccatcaaatggcgcttaggtctaggaagcgggtgtgggtggggccttagggcgaggcgcagacacaccccgaagtggttggattgtataccgcaaggggctggatcgaaccccccaaagacactggaaggctgtgtggctgaggagggcccggcagatccagtgtgtcgtgggctttacaggaaagagctccaccttctctggagtgtgcagatgcgatctaggtgtgtccacccgatgggagctgcgggccgggcagatgctgccccagtacaaagctgatttggacctggggcctctggacttccctgattctctgcttgcatctccagcaaagtcctgtcccgttggctgccttcatccactctctcacttctctgccttcagagtaaaattgcaagatctgtggtgcttactgggatctg

SEQ ID NO: 78855 - DNA, 1210 bp, Homo Sapiens
ctatttcctggtgacacagctcttctcaggcggggctgcctgcaggctcccgttttctgagcccacgctgcccacagctgaccccagcgcagccccgggcacgcggcactttacatgggggcagcttgggcccagactcctccgctgtgtagcagatgaggaaaatcaggccagaggacaacaggctggcgttttgttgggaactgaagaggaatctgttgaacacagcgaccagatgaccttccatttcaccggcggcagcagtttcagcgtgcagttcccaaaccccaaagctgaccctgcgccccatttgaatacggccagagcctgctggttcactttgggtagagccgtgcctcttgggcaggctcccatagtgaccacgtccccacgaatgggaaagcacgttagtgggagggacgtaggacacgtgtggaccgccaggccctctcagtccattttccggggctgctcggtgctgctgttaagacgtgagtgcatttcacttggaagaacccattgtacaaagttcaaggctaagagttctgaattctggcgtcagcttcctcaggattttcttcagttgcaagtacctttccactgaaaatatgagcatgcccgcctggctagtaggcatctgtaagagtgtcgccaggcccgcgccagctgaggcctcagactagccaggcaagagccgtctgaccagttggctggcggtgggttctggtggagcacgagggagcccgggtggtgccctgagcctcgagctgctctctgtcactgtcttgaatcagactcagaaatggcttcttcccagccctgcctacaagtttttctctggggtcctctttcaaggatgtccacggtaccttcctcctgaaacttgaggaagtcttttgtcttccagctgctcagggttctctggtccaagaccctgctttaaagagagtctttggcgtgctcagactccagcgctccgttcttcaaggaggttgacttgcctctcgggccccgtaggtaccaagagactgtttacctcccagaatgtttgggcttgaagttacattaaagtgaagttatttgaaagaaagaaaacctcatcatttctaaggatgacttaattactgtgccttttcctttctttttacacatcctactgtcccttagggtaaaattttcagcattaaataaaacatttcaaatatattgt

SEQ ID NO: 78856 - DNA, 981 bp, Homo Sapiens
  misc_feature (88)..(88): n is a, c, g, or t
  misc_feature (114)..(114): n is a, c, g, or t
  misc_feature (179)..(179): n is a, c, g, or t
tgtggagtagctttactgtttgcgatagcacttgtttgcaattacagcttctccgattctggtccctggcttctttctttctgtcttntggttagagtgagacttccctccctntgacattgatatctcagtctgacttgcttgccgctgctgtcctttaaagtatctcgtacagcctnagagttctattgtccagggttaagtgagaggagactgtactttgttcaaaaggatccttcaccctgatctgcagtgaggtggatagatcacctggagtccctcgtctgtggtcttggaggcttaaattgtaaaatacatcccttatggaatcctaaattcctctaggtgtttttggaaggcgcatttgagccttgtgagctaaaatggaatggatttaatatttcctatctggcatttccatcttgcccctggtacacaagtcactggcctggaactcagccttgattcactgtccgtcttcacggattagctgtgctgttatgttgtctgtgctgcagattggcccatgtgggaagtcgggggggacctgatttcctgcttggaagacttgggggactgccgagcatatcaaagtgtttatagtcaccaagtgaactgcagcacaaccatctcctctccagcaagccctgaagtcagtagtgcctgcaggtgaaaccaaccagccctgtgttagaggaggaaaagcggagatgacatggaagtctccaagcctgtgccatccacctgccaaggaaaagcacaaggtgctatctacttttctctctaggatttagattatcatttatgtgctgttgcacagtgaaacctcacctgtgtgggcgtgaaagctgattggcattgtttttgattcagctttttggatggctaattgttttcactgtgctgtgggaatgcctctgtattttttcccctctttggccatctttttctgaaaataaagtgatggatcctctagccaaa

SEQ ID NO: 78857 - DNA, 652 bp, Homo Sapiens
  misc_feature (87)..(87): n is a, c, g, or t
  misc_feature (98)..(98): n is a, c, g, or t
gagctcctgattgagtcagaccctggactttcccttttgtatctgtcattttcctctggatcctcacacctttgtgtttaatttttntaaatttcatntgttgacttcctatgtggggtaaaatgacttcctttgattaatgtactttctgtatcctagagtttccctttccctttgtgatttagtccaacgtgtcctactacagcctcaaaaattgtcattggaatcaaaagctttccaaggtgcatcaggttaatgatttggatgcatcctgaggttgtctcctgtagcatggaggcattataataggagtctcagaagttacaccatttttctacagcacatcacaggcccagaggcttgaatctaagagaatccactctatgtctgtcagcctgaatccttccttcttgctgcacaacaaagcaactgaacgtattttgagtttaggtgaaaactatcactcattcatcaaagttctatctgggtgatatatgctatcgaaacagatgtggacactgggctgacagatgttgagaacggacctgttgctgaagctcatgttatcacacatgctgtgggaagagaggtcattggcattcaagatgcaacacctacaatatggtgaattaaagatgccatttgcatggat

SEQ ID NO: 78858 - DNA, 368 bp, Homo Sapiens
gtctgtgcaaatgctttaatggggggattcttaaatacagtggttaatccattgcccacaattctttactaattccgaggcacctcatgccgggaacacactttcccttccactaaacaaaggtgaccgcgtttcagagctctcctcttacaaggttcacgtccttcgttaggccgaggaccgtggtactacaaaagaacatttcgttagctgaagtcactacgattggcgagaaacatccgttacttcagaatacgttaactacaaaatatattgaatttccatatgtattaaccatatacatgtgtaactattactaaatgtagttcagtctgttaccattctgatgtttgtggtttgtttataac

SEQ ID NO: 78859 - DNA, 704 bp, Homo Sapiens
aggaatggggggactcgcacaagacctcatggaaagggtgatgactagggaaaagagggtgcagggcacggctgctccccaccaccaggtctgcatttgttcatcatcatcaggagcagaggtgaccagagggttcagagtgggaggcggggccagcccaggccaggagcgcctcatcttcccaggcctcagccacccagggtaaaaggtgccagggaagttgtgggcacctgagaggaggaacagatgtggaggacctgagggtgctcaaagggccaggctcagcctcaagcagtgttttcattgccaacacttactgtacccactccgcagagcccagctgggcctgggccccagggccacagctagcctgcatgtgtgtactgcactttacagtttgcaaagctcttccatacccactctctcaccgaagcctaattgaggctcttggaaggagtcaggcaaggattgtgcttcccccattatacaggtgacaaaactgagtcctggggaaagtgactggtccgtggtagagccgggacccaatcccctctctctcctccctgttggtgctgttcttcctgcccaacacctgtttctcttttcctcaaggggtttggggcaggagcctgggcacttactccccgtttttgctgtttctccttctgaccctgctcttgggtctaataaccccatttatttgt

SEQ ID NO: 78860 - DNA, 1091 bp, Homo Sapiens
  misc_feature (1015)..(1049): n is a, c, g, or t
ccaagagaagataatttagaaaaaggcatttaattacaaaattttcttttaaataaaaaagcaatggcacgaatcaccacaaaatcatttaagtgataatatccacaggctgttcttgtaattatatgctaaaaatttatgactgttctcattaacagcattcccccccttcattagagacatcaagagcttctgagaatgtgtagtttttcctaaagtactactaaaagtatcatgaacaccgtttgtgcagcattcatttacatcaccttttatttactatattctaaactcataaaatatttaacatttctctacttcatttcttatttacagtacagaggctcatctcttgtcacaatatggtttgtgcattaaaatccctgggaatagtactttcaagaacattttaataaattgactccgattatttaaaataagaacacaaacaaaagctttttcacccagaagaataattcttccagtagacttattcaggactttaaaacaaaaatccctctttaagtaaaatacattcttcaaccattactggattatactatcatgcatatttataatgctaataatgacaacacgtaaagccagctatgacttttaaaattccatttagaagagtacagtagacagaaagtgctttggctttcactctcttgttatccataatccaattattatttcacatgggtatattttatttattcttagtatataagtatttaatggttcagtaataactggcagcttctgacagtcctattttcttggtcgctgatacggttctgtgaacataagtcagatgaactgaaaaaaaatgcaaatcacttcctgtgatacagcaggaaaaggtggaatgttattatttgagcaatgattcaaagagatgaatactaacattctgtcgtgacaggaatactgtgaaattaggtatgttttaatgtgctgtcccggccgtaatggccgaattcccgggcatatgtccggtaccgtcgactgnnnnnnnnnnnnnnnnnnnnnnnnnnnnnnnnnnncggccgcttcctcgctcaatacttcgctgcgctcgtcgttcg

SEQ ID NO: 78861 - DNA, 785 bp, Homo Sapiens
tttccatttaaaagtattttatttttttccagtcaaatgactagttaacaagaagagtaaacttattaaacatgctctaattataaatcactgcattaaggacaatgaaaataatcaatttcggttatacaatatatacagttgtgctgcaaccaaagtaatcaggtgaatgaactgaatatcatacatctcaaaatagcatcctaagctgcatattatgttatccaccccttaacagatcacacagttactcttagtctgtgtacatgttctgagccatcatcccagatctgatggagaatggcatgcaaaatgccagaatcctgcagctgcagttcatgaaacataaactttaaatataaatagatatctacaatgtttttctttctcttagttgcttttttaatttgcaaggagcaaataactaagaaaggatattagcagggtcgttaatataatttctcctctggtaagagtactattagttactgcacaatagcaccaaattgtagactggaaaaatatttcctaggtatttatgtaccagtgaacctgacagattagtttgggactggagttctaatgttgatatgaatcaactttattccttatatagctggcaccaggtggtcaaaaggctgactataaaatacagatgcaggaggattgttaaaatagacataagtgcactgtgcaaaatacatctgtttacttaaatctatgagaaaattaaatgaagggttcaaacagaaattaacaattagtgaaaacagatgtagtgcttt

SEQ ID NO: 78862 - DNA, 1945 bp, Homo Sapiens
  misc_feature (697)..(740): n is a, c, g, or t
  misc_feature (1704)..(1704): n is a, c, g, or t
ctctttagaccacataatcttccggtcttagcatttagcctcttgattcagactctaatgactaaatttcatctcgaagcccctgagacacgatgcacgctgagattactcgtgatgcattattggtttggtcaagcattcttctattttcagggcaactccaacaacattgccaccgtggacatctccgcaggcttcgtgggcttagacacctacgtggaaatcccagccgtgctcctgacagcgtttgggacgtacgcagggcctgtgctgtgggccagccacttagtgcacttcctgagctcagaaacacgcagtggttcagcactgagtcatgcttgcttctgctacgcactgatttgttctattccagttttcacgtacatcgttttggtgacatctctgcgttatcatttatttatatggagtgtattttctccaaaacttctctacgagggaatgcacctgctcattacagctgctgtctgtgtattcttcacggcaatggatcaaaccagactcacacagtcttagactaagctgaacactggaaaaataatacatgcttaaagtctgctgttattctaaaatgaaagatatgaattcaacaaagttgatggataactttctttgactgctctacctgaatttagactaagcagtaaatagtttaataaaagatcactttaatataacnnnnnnnnnnnnnnnnnnnnnnnnnnnnnnnnnnnnnnnnnnnncaagaaatacccttccacgcatgacgttaacaagaaaaactcccaactaagcccacaagaactagaccgaattaacggccacatttacacataagcaactatccatcccttttaccgaggaacccccatttttcatagagagctgccagcacccacaagtaacaccctacccccggaatatctttacccaaaccactcccccaacacgtcatttagtataccataacccccgcgtttgtaaagaacgaaaaccccgcccggacccccattccctgcccgaacacatctgcgcgcccaccacagcacgaatcgatataaatacagtaaccaccgcaaaccatccggcggaataaaactgcttctcctccacaagcccagccacctctgtgaaaccgcgggcacttgtcccaacacagtagtctatttagagcgctttgtttgatggtactgcaccttctctttaccgatattcgtgcagacgcggaagttaaataccaaagaaaaagatctcatcgtagacacacgaaatacaacgcaatactacgcacaggcatcgaatatgagtttggagtgaaggtggtgttcttcacacgcaactatctctccactcgcccaccatcactatttaagtccagagtcaccactcttaggactcctgtcctcaatagatcgtttctctctctcctgcaattgtctaccaggaacgcaggattcatgacttacttaaactctaatatctatgtcctatttgtctagtacaaaaataaaaatatcatcaccaagtggccgcagtagaactctctgtcgctctgatttgcgtataataagtatcattttcgtcttcatacagctgttcttgaggtctaaaatatatacgagcttgtaaaagcaagagaaggctctattacattacctacagcacgcctcctgagcacaaaatatacctacgcacatgcgcactcancattcgtgcgagacccgccctcggagaatgctagcgtaaagatacggtagaggatctacctctaatgtacgtagataagaaaagttatatataaccaccacctcgtttcccgtccggccctgataagaagactcacgacctatcgtggtcattaaggccgagtagatatcccgttcgcctacatgcgtttatgagtatgctttatcaaggttacaccagtaaggatcgaacaacaaagcaa

SEQ ID NO: 78863 - DNA, 701 bp, Homo Sapiens
ttctggaatgggaccaggggaccttttggtgcagtgggtgcctgtaactcattagacgtactgaggcagcacttctgcagggtgcataccctgattgttgtcatttgtaacaggtcacttccttttcactcagtttaaattggtgatggacgttgcttgattgagcttattactctctattttgagaaggtagaaggtaagagggcccatattcattctttgccatgaaatgaatgaattaggaagattgtatttacttaactgttttttaaatacatgtttaatgaaataaactgtaaaatatccagttttgtgtattatatgtacatttgatttttaatagcctttccaaagaaatgagggcatgattattgtacagtaagtacgtgactgatttaatttgatttacagagcggagtgtgttcttataaaaatatttaatgacattggttcttgtcttttgatcttttatttctgaaacactcaaacaccttacaaagtgctgagtaggtaatagtgacccaacttgtttgctaaatgattatttgtttaaatctgtacagttttaagtgttcacttatacaaagagtgtatatactttcaaataatttaaaatgctttatattatttggctagaaattgctgtttttaataaatgtgaattttttaaaaataaagatttttgctttccttaccttgaa

SEQ ID NO: 78864 - DNA, 1169 bp, Homo Sapiens
  misc_feature (519)..(567): n is a, c, g, or t
  misc_feature (991)..(1014): n is a, c, g, or t
catgaaaactcttgcagcaagtgctaactgaatgaaaaacaatttcttattgaagataatagataatattttagaaagtgcgcccatggtttttgagattatagtaaaaatcaaagtatggtaagacaatcttttaaacatacatagtaaatcatcgttttatcattgtttaggaaaaaaagaccacgtctcaatgtaaaaaattttgtctgtggaacagtccgaaaaattttgaagaataatggtataacctactgaatcccaaatatttacttgtatcttcctatgaaaataaatataccaactacaatgacaataaaactctagtaaagttctaggaaaaatttttagggtatacttaggctttgtcgattcttaacaatcttatgaacatgaacaatgcaacctgcttttaaagaagaaacccacatgtctgattccaaaacaacaggccttaccaagggctgctggggctgcattgcttggagaccaagggtctgactctgggactgcgaggannnnnnnnnnnnnnnnnnnnnnnnnnnnnnnnnnnnnnnnnnnnnnnnnatctggaaagagggtaaaaatgttatacacttaaaaggaagaagaaaacagcattgctgaatctgtttcccccatataccttttatctaatttttatgttgtagtaaaaacaatatatacctgcctgctgcatctctaccttgctgaacctcattcgtccttttgagggcaagacctaaacctgctcatccatgaagccttctaggaccaccccaaccctacggatctcttccactggcagtcagtactgctgtctattccacactgcgctgtccggggccatcctttctgcttactgttttaattcctttcatgtcctttgtccttccgcatgttttatcccttcttacactacaggttggacagggactgctcagtagtaatcctctcattctttatgatatctggcagaattcttaaaggnnnnnnnnnnnnnnnnnnnnnnnnccaaaaggaagaggcagactagtcgccatgacaccttctggcataatttacatcagaaattcagaaatcatgtcagtaacagggttggctcaaacacacagctcttggaaaatgcttccaagtcacagaaaaagcacagaccagacatccacaag

SEQ ID NO: 78865 - DNA, 1071 bp, Homo Sapiens
cagtcgacggtaccggacatatgcccgggaattcggccattacggccgggggttaggcaatagggttccttcatgagaaggaaaaaactgtatctttattgtcagtaagtgtggaaaaaaacccgacttgtatgtgtattcacagtttgataggcatattttgaagtcattgttttccatcaatattaagtatcatccatttctatgttctctagcaaaagaaaattcttagtgtgatacagctttactctttgtttgactttgtacaaggtccacaaaaggaggaggctcaaaaaattggacactttaccctgacattcagcacattcattttatctttcgataaagataaccagaaatcatgtgcctcttgtttattatcatgttgaaaacacaacagtatagttccttttgtcccttacattggaaaaggtattttaaatttagccttgccgtattatttatagttaggaatttactacattttggtagtctgttttgaaactaagcacttgtgtctgaaagatgcagataatatctatctatttattacacagtgggctctgtttgctgcagaaaagagtgaaacttttaactgcttagcacacttgccagtgaaatatacctgacagagcagaggttataactttggctctaattacttttagtaatggtaagacaacgtgagttttgtttgtttacatgctgtttacaatggcataattttaaaaatatatacaattgagatatttattgcctactattttaaagatgttttatgtgttttcacctttggaatatattgttacatttccttgtacagataattttggtggctttgttaatgtagctagtaatttttatgactactaagtgaccagttttcggtgccttttattgtgggatgcatgattatgtatttattgtacggaagtcactgacgtgtgtatttttgtactttgctgaaagtaatggttgatcctgatgtacatgatgatgaaagacatctttcccaaagggcactgccttgagatcatccttctcaaataaaaagaatgcatttgaagaaag

SEQ ID NO: 78866 - DNA, 731 bp, Homo Sapiens
  misc_feature (711)..(711): n is a, c, g, or t
tgaatacataccatactttaataaccaagacaattcagctgtttttccagagtatatttcaaacagagttggcatataacccgtatgtaacaatattgctgtgattttagtcatatttaagggtccaaaatatgttcacaaaagaacagtttgtgaatgtcaaccagtttttgctttatattccttcaaaaacattccaccctggtcattcacactaatctacatcactgaaaataaccaaaataattcacagtctcacctctatgtaaaaattctaattgactcaacagggaaaggactgccctgctccttttgaggaaggaaacctgcaaggcaagttctcaatccctaaaaccaagcaaaaatgttccagtgcagttgctgtagccatgtatttaggatttgtatttatagaattaaatttgagaatgaaacatggccatacacatcgcaataagctgcctctcatatcaaaaatacaatgcaaaatgacttgaagacatttccaataacacagatttgaaaaactgaacgcttagacataactcctgcatctttctttaattaagaagtcattgccacacttacaaagttagaggcagtaatctatattagcgtgtgattaatcaaagagtacacttactaccatgaacttgggccctatgtcatagaattatttttgcctttcccccaaagaatcatttgctcttngaagtaataggctttttaag

SEQ ID NO: 78867 - DNA, 962 bp, Homo Sapiens
tacgctaggtacgaggctgggtggcgatttcggcacgagggaaagtcgcagaggctgatgcagaagatcgaggacacgctatgtccttttggcttcgaggtttaccccttccaggtggcatggtacaatgaactcttgcctccagccttccacctaccgctgccaggacctaccctggccttcctggtactcagcacgcctgccatgtttgaccgggccctcaagcccttcttgcagagctgccacctccgaatgctgactgacccagtggaccagtgtgtgccctaccatctgggccgtgtaagagagagcctcccagagctgcagatagaaatcattgctgactacgaggtacaccccaaccgacgccacaagatcctggcccagacagcagcccatgtagctggggctgcttactactaccaacgacaagatgtggaggctgacccatgggggaaccagcgcatatcaggtgtgtgcatacacccccgatttgggggctggtttgccatccgaggggtagtgctgctgccagggatagaggtgccagatctgccacccagaaaacctcatgactgtgtacctacaagagctgaccgtatcgccctactcgaaggcttcaatttccactggcgtgattggaccttaccgggatgctgtgacaccccaggagcgctactcagaagagcagaaggcctacttctccactccacctgcccaacgattggccctattgggcttggctcagccctcagagaagcctagttctccctccccggaccttccctttaccacacccgcccccaagaagcctgggaatcccagcagagcccggagctggctcagccccagggtctcaccacctgcatcccctggcccttgattttctcccatgtggaccctgatttatggtggtacttgctaggacttaattggctttggcaaagcaaaaggttttgagt

SEQ ID NO: 78868 - DNA, 770 bp, Homo Sapiens
aattcggaacgaggagaaaagtaaaccgagaacataattaggcatcgggcctaagtgtcctggggagattggaggggacggcagcgttctgcatgatggaggcgctgccgggccccgggtctgtgggggccgtgctctcagggcgtgtgcgggacgccacctgtgcacacctgctcagagcacggctcctcgcaggggtgaaggggcagaccaacgaaaccagatgagaccaacgacaccatgcgagacacgcttgcagacactgttgttttggaaatgtgcttccctccatctgaaatctcatccctccacccgcccactcgggcagctgtgccgtgggcagggcatgcgctcccctggctgagcaccccagagattctcctgcaccttcctcatgccgcacgctgctcatccgtctccatgtgtgtttagatccatgccattcactgactcactaacacctgcaaaatctttaaggaaaaaagctgaagggtacgaccatgcacatatgtgacctggaaaatgcaaatttagatcttttatgatttaattattattgtttcccatagaagttccctccctttgaaattaatatataatgtataaattctgcactgagccatggcggagctgggcagcccctaggttagagtggagacggaggcccaggcgcaggggtcacacctcatctggtttccttcccatctcacagcttagcttgtgcttctcaacaccaagtctttaagagcaataaaaactacaccatgaaa

SEQ ID NO: 78869 - DNA, 605 bp, Homo Sapiens
  misc_feature (65)..(65): n is a, c, g, or t
agggcgtgaagaacctgagtgggaaacacccagccagggcccagagccctcccagaccacagctntgccctgagtgtccctgccctctgcctctgtctcgtcatttgtggaataggaatagtgacagcctctccctgtcgtgctacctgagccaacgcagtgaaggtgcttggagctgtgtcccacacgggaaatgactgataagcctttggctttatccttctgcaccgtgatgctcacgctgcccctccatggagctgcactcagctctggtggtcctgagcgtggggaccctcagctccctgacactgccctgtctccacaggcccataacgacctgctgcgcacgtatgaggcaaagctgctggccttcgggatccctctggacaacgtgggcttcaagcccttggaaacagctgtgatcggacagacgctgggccagggccccgcgggactggtgggcaccccgacgtagctgccccccctggggggccacagcccagagaaccagcctaggaacactcgggatgacaccccttatcacaccaaggacagcaagttttttagattttatcatcagcaaatgaaagcttttcacatgttaa

SEQ ID NO: 78870 - DNA, 663 bp, Homo Sapiens
gctggcgcttgtttgatgacagcacagtgacaacggtagacgagagcaagggtgtgacgcgttatgcctatgtactcttctaccgccgccggaacttctcctgtggagaggcccccccagggcaggtcactctgagcaccacccagacctaggccctgcagctgaggctgctgccagccagggactaggccctggccaggcccccgaggtggcccccacgcggacagcccctgaacgcttcgccccccctgtggatcggccagcccccacctacagcaacatggaggaggtggattagcaggtccctggctgatgggggggactgggtttgggacacccacacagagggccagctccttgccgcttctccttctctaacccagaggacactggctctgtcaatgggaagctgaggggtatgatttgggtgtggagacctctcaggttgggacttcttgtcagcttggacccctgaccagtgggctttggcttctccagccgcctccagtgctgcgtgatttgattctgttgtaccttcaattcttctgacccgcattataaacattataattttattctaaaaattgtaattttttttgcattttggaagtgactgctgctgtttaaatatattttaaaaataaataataagtaagtagactt

SEQ ID NO: 78871 - DNA, 1007 bp, Homo Sapiens
  misc_feature (29)..(29): n is a, c, g, or t
  misc_feature (111)..(111): n is a, c, g, or t
  misc_feature (135)..(135): n is a, c, g, or t
  misc_feature (152)..(152): n is a, c, g, or t
  misc_feature (197)..(197): n is a, c, g, or t
  misc_feature (203)..(204): n is a, c, g, or t
  misc_feature (221)..(221): n is a, c, g, or t
  misc_feature (252)..(252): n is a, c, g, or t
cgcagcagctatccactggtagtgttacnccattaagcgagcatgagcaaagagctgattgatctttgctctccagaggcccaagaatacttgtgtacacagacccactcnagtgttacagcaaatctatagtgntctgagcccagcaggcnttactctgcccctggagagtttagccgtcttgtgttcttgttacntcacannccaaaattgtcccctcnttctctctgtaaaagggagagaagtcacttnagctggataatacctatgtaacaaactgagcagctgttatttgggcaaaatcaaaggaagaaagagactatggtcttctatttattgtgggaaggaaaacagggtggggcgggtgagtgaaaaggtggaaatccctggtaccttgcctggtggttacacagtttaaccataggccaattttaggggcctctgaagtatctttctacaaacgcagacaagctccactacccctaacctgccaggatgctcaagtccactgtcacaatccctttcagaaaacattagtggccgctgccccagctacagagacggccgaaatgctttcactccttagctttgccaactccatcctccaaaacttcccagaatacctccctttccagttctaccaaatctgtacttgggagcagcctgctggatccagaacatgacaacagagagctgcgtccacagggaacaaagccctgacctctctctccacattacccttacaaaaacaggccctccccatgagagagctacacggcaggggcagacactgtgagtataagctactttcctccctggagtgctctatgtgggcagaacatgctctccttgcctctcctggaaggtgtcttctctatggcctggctagagctgcaaaaaagggacacaccccacttcggtaaaagaaaatagggaaaggccataaacaaagacagacttgtagtttattttgtattttttttaaataaatacactttacattaaag

SEQ ID NO: 78872 - DNA, 713 bp, Homo Sapiens
taaagtttcactcttggtattttctaactagtgctagggaaagtcttgagacacgatcacagccactgcttggcatacagggcctccacccaataagcaaactggagattcctcagcctctcgtggacacccacatctcattcttctcacagcagagaagctctcccttcagcctgagctgtcttctttctgctgcagtgcagcctgctccctcctaccctggcctcaaggaaggtgggaaacatcttctgcatttcaaagtcctcactttgacttatttggccttcatcttggcatggaaggtggcaggcagaatggaaatactccccccaaacagaacagatattcttgcgtgtgtaagggcagaagggacaagctctctatcccatgagactaggggccggagcccacctgcctttccccacaacttttcctgctcaaacccactcctcttgacacactggaatctgtattatatatatttttaagaaaatacaatgatggttgtctggttttgttgtttttacaggtgttgtggaataaaaactgtaagaaaattaagtatttaaaatgttccaataaagtggggttttttgttattctaatatattattgtgtacctattgtaaatatgaaacactcctattttgcaagctgaggacacaatttgtactgttgttatatataaataaagtttactgaattaaaaaaaa

SEQ ID NO: 78873 - DNA, 823 bp, Homo Sapiens
  misc_feature (93)..(110): n is a, c, g, or t
gaaaagaatgttacaacccttcacaaagtaaaaattttatatcagatagattcttctgtttcaatccataaaaccagggtttggatcattttnnnnnnnnnnnnnnnnnntaatttattggaatcattagggaggacctgatagaataaaatgacaagctgaccaaataggccttagaagggagaggtgcctgggcagttacaaggacctaggtagcaggggtgacttggccacagtcattttctttacttgatttaaggaggttaaattacagtgagagagttgcacttatttagtttgcataccgtactcaactcttagctagcatagggcaggttccttagttgaaaaatttccacaaaacatgatgtaaagtggaaagatcagttcccccaaagaatatcagttaccaaagtaggatgaaaggatgttgggtagatcaaaacaacaaatgtccattacagcaattaacaaaagttagggagtggggaagtctgagtgctaatatggatttcaaaacaactttaaaaatggcttcaaacattttatgctttttgtaatttagtcattttaatattagataaatcttcctgtaactgaaagttcttgagttaaagaaaaatattcggtagttcagctcttccttcaattttattagttgctttttcttttgttcaagtgaaataaacataaaaataattttaaaatattatgtatcatatccttcgatttaacataattctatctagctgttcttatattttctctgatatatttttaaaagctttctggaatattattaaccttgaataattataaaaaa

SEQ ID NO: 78874 - DNA, 1374 bp, Homo Sapiens
  misc_feature (629)..(632): n is a, c, g, or t
  misc_feature (642)..(653): n is a, c, g, or t
  misc_feature (738)..(800): n is a, c, g, or t
  misc_feature (843)..(861): n is a, c, g, or t
  misc_feature (892)..(907): n is a, c, g, or t
  misc_feature (1149)..(1159): n is a, c, g, or t
ccccttcctcgtcctgggcgatacattctcatatgggcgtgccctgcaagcctctgcactcaatgcctggcgagggcaacgggacaatgctggggctgccactgaggagttcatcaagcgggctgaggtgaatgggcttgcagcccagggcaagtatgaaggcagtggagaagatggtggagcagcagcacagtcactctacattgccaaccatgcctactgagtatccactccataccacagcccttggcccagccatctgcacccacttttgcttgtagtcatggccagggccaaatagctatgcagagcagagatgccttcacctggcaccaacttgtcttcctttctctcttcccttcccctctctcattgctgcacctgggaccataggatgggaggatagggagcccctcatgactgagggcagaagaaattgctagaagtcagaacaggatggctgggtctccccctacctcttccagctcccacaattttcccatgatgaggtagcttctccctgggctctccttcttgcctgccctgtctcctgggatcagagggtagtacagaagccctgactcatgccttgagtacataccatacagcaaataaatggtagcaaaacnnnngagaagaacnnnnnnnnnnnngcgaacagacggagacagaacgccgcgacagaagaagcaacgaggacgacagccccgccaaccgagccacaagagtaaggaccgnnnnnnnnnnnnnnnnnnnnnnnnnnnnnnnnnnnnnnnnnnnnnnnnnnnnnnnnnnnnnnngctcacccccaccacaccgtcgactgaaccccctttggaccgnnnnnnnnnnnnnnnnnnntaaatagtttttctccaacccactgttcgtnnnnnnnnnnnnnnnnccccccaggacagggtaacgaccgggcgccgactttacgttttctcaaggaaagacgcccaccggccctcacaacaggggtggtggaccccgaccccacaataaaacaccccccgggcggggcagaacattgggttccagacaacaatcaccgggagaggggtgtactgcggacctattttgcggtcacaccaacttaagcgtcgcgtgccccggggcccgcccaccctcataatatatcannnnnnnnnnngccaagcacttagtgccaggaaggtggggggggaaagactgggaacactaccgtctcccccggaagaggcgtcctcccatcaagaggacgcaaagcgggcgtctcgacgcgccctccgcgcgggtatctcaccgtgcatcagtccccctcatgacaatatataagtgtccccgcgggcgagaagagacacggcgagtcagaaataattcgtcccc

SEQ ID NO: 78875 - DNA, 1035 bp, Homo Sapiens
  misc_feature (24)..(24): n is a, c, g, or t
  misc_feature (47)..(47): n is a, c, g, or t
  misc_feature (64)..(64): n is a, c, g, or t
  misc_feature (124)..(124): n is a, c, g, or t
  misc_feature (153)..(153): n is a, c, g, or t
  misc_feature (157)..(157): n is a, c, g, or t
  misc_feature (174)..(174): n is a, c, g, or t
  misc_feature (196)..(196): n is a, c, g, or t
  misc_feature (202)..(202): n is a, c, g, or t
  misc_feature (249)..(249): n is a, c, g, or t
  misc_feature (252)..(252): n is a, c, g, or t
  misc_feature (265)..(265): n is a, c, g, or t
  misc_feature (275)..(275): n is a, c, g, or t
  misc_feature (281)..(282): n is a, c, g, or t
  misc_feature (310)..(310): n is a, c, g, or t
  misc_feature (317)..(318): n is a, c, g, or t
  misc_feature (325)..(325): n is a, c, g, or t
  misc_feature (329)..(329): n is a, c, g, or t
  misc_feature (348)..(348): n is a, c, g, or t
gttggactacaaggcgtgcgtatnatgaacatcagttggatccttcntggggtcaagtagaatnacccgctggtgcctcaagacagatcagtgagaacgtggtcatgggaaagcgcagcattgngctgccaccctcctcaagagtgtgcagcntacnccaggatacatcgacantgcatggcagtcttgcactcgntacgcntgccatgtccgacctcacccccagtgtagatgccatcacagatgcgntgntggcagctcggcnccgccgccgntatacnnccgccaggggcttggggctcatgtactncatccanntactacntgcntgaaggcctgcgcgccgcnttcctgcagcccttcttcatcagtcactgtctgcctcgagcactgcagcctggccagcctggcactaccccaccacaggacgcagcccaggacccaaacctgagccccggcccttccccagcagtggctcggtgagccatgtgcacctatggcccagccactgcagcacaggaggctccgtgagcccttggttcctccccgaaaacccccagcattacgatcccccaagtgtcctggaccctggcctaaagaatcccacccccacttcatgcccactgccgatgcccaatccaggcccggtgaggccaaggtttcccagtgagcctctgcgcctctccactgtttcatgagcccaaacaccctcctggcacaacgctctaccctgcagcttggagaactccgctggatggggagtctcatgcaagacttcactgcagcctttcacaggactctgcagatagtgcctctgcaaactaaggagtgactaggtgggttggggaccccctcaggattgtttctcggcaccagtgcctcagtgctgcaattgagggctaaatcccaagtgtctcttgactggctcaagaattagggccccaactacacacccccaagccacagggaagcatgtactgtacttcccaattgccacattttaaataaagacaaatttttatttcttctaaaaaa

SEQ ID NO: 78876 - DNA, 597 bp, Homo Sapiens
gaaacccacagatgtctctggggcagatccccactgtcctaccagttgccctagcccagactctgagctgctcaccggagtcattgggaaggaaaagtggagaaatggcaagtctagagtctcagaaactcccctgggggtttcacctgggccctggaggaattcagctcagcttcttcctaggtccaagccccccacaccttttccccaaccacagagaacaagagtttgttctgttctgggggacagagaaggcgcttcccaacttcatactggcaggagggtgaggaggttcactgagctccccagatctcccactgcggggagacagaagcctggactctgccccacgctgtggccctggagggtcccggtttgtcagttcttggtgctctgtgttcccagaggcaggcggaggttgaagaaaggaacctgggatgaggggtgctgggtataagcagagagggatgggttcctgctccaagggaccctttgcctttcttctgccctttcctaggcccaggcctgggtttgtacttccacctccaccacatctgccagaccttaataaaggcccccacttctcccattaaaaaa

SEQ ID NO: 78877 - DNA, 666 bp, Homo Sapiens
ttccatcaactacaagaaataaagggagttcagcaagatgaagctctccaactgccaaaagacctagattatttgactatcagggatgtgtctttgtcccatgaagttcgagagaaactacattttagtcgtccacagacgatcggggctgctagtcgcatacccggagtaacacctgccgccatcatcaatctgctgagatttgtgaagaccactcaacgaagacagtcggctatgaatgaatcatccaagactgatcaatacttatgtgatgcagacagacttcaagagagagagttatagctttcaattcataaaagatttttaaagagcatataaataatttgatcaatacaacagtatagataaaagaattatttagcacatgttaaaatagctttattaggttactatgggtttgccattaatttctgagtgggacagaaattataattgtgctttttcgtgtatatgaaaaaactagtcgtaaacaatttgtactctttctttaaggagctgtaatacaaataactttgtgcagtgttcatcaaagagagagacagtgaacctaaaactgaacctggaataaaactcaacatgcagatttgcctactcatagggactttgcctattaagtctaccaaattaaaagtcttatcattcaaa

SEQ ID NO: 78878 - DNA, 1035 bp, Homo Sapiens
ggcgccgaggttgccttagggctctctgcccagtaacaggcatcgaacggtgcagactgaagacgccctccgtcagcgacgccgtcgcaatggccatttgtcaattcttccttcaaggccggtgccgctttggagatcggtgctggaacgaacatcccggtgctaggggtgcaggaggaggacggcagcaaccgcagcagcagccttcaggtaataatagacgtggatggaatacaactagccagagatattccaatgtcatccagccatccagtttctccaaatccacaccatgggggggcagcagagatcaagaaaagccatatttcagttcttttgattctggagcttcaactaacaggaaggaaggctttggattgtctgagaacccatttgcttcacttagtcctgatgagcagaaagatgaaaagaaacttctggaaggaattgtaaaagatatggaggtttgggaatcatcagggcagtggatgttttctgtttattcaccagtgaaaaagaaacctaatatttcaggttttacagacatttcaccagaggaattgaggcttgaataccataacttcttaaccagcaataacttacagagttatctaaattctgtccaacgtttaataaatcaatggaggaacagggtaaatgaactgaaaagtctaaatatatcaactaaagtagctttgctctctgatgtaaaggatggagtaaatcaagcagcacctgcatttggatttggcagcagtcaagcagcaacatttatgtcgccaggctttccagtcaataacagcagcagtgataatgctcagaactttagttttaaaacaaactctggatttgctgctgcctcttctggaagcccctgctggtttcggggagttccccagcaatttgaagctgcaagcctctaccagtttcagggatttcctaccttctgcctccaggtttttgggattggggaaagccttgaaaatccccttcgggcttggcatccattttttcctttcaaaaagccccctggca

SEQ ID NO: 78879 - DNA, 1050 bp, Homo Sapiens
aaactaggcaggtacgaggcgggggcgtactcggcacgagggagagatgtcgctgctgcggtcgctgcgcgtgtttctggtcgcgcggaacgggagctacccggctgggtctcttctgcgtcagtcgccccagccaaggcacacattttatgctgggccccgtctgtctgcctcggcctccagcaaggagctcctcatgaagctgcggcggaaaacaggctactcctttgtaaattgcaagaaagctctggagacttgtggcggggacctcaaacaggcagagatctggctccacaagggaggcccagaaggagggctggagcaaagctgccaagctccaagggaggaagaccaaagaaggcctgattgggctgttgcaggaaggaaacacaactgtattagtagaggtaaactgtgagacagattttgtttctagaaatttaaaatttcaactgttggtccagcaagtagcccttggaaccatgatgcattgtcagaccctaaaggatcaaccctctgcatacagtaaaggtttcttgaattcctctgagctttctggacttccaggctgggcctgacagagaaggctcactcaaggatcagttggctttaaggcaattggaaaactgggagaaaacatgattcttaaacgagctgcatgggtgaaggtgccatctggggttctacgttggctcttatgtccacggagcaatgcagagtccctcacttcacaagctggtgctggggaaagtaatggggccctggtcatctgtgagacgtctgaacagaaaacaaaccttgaagaagtggcggcgcttgggcagcatgtggtgggcatggcccctctctgtgtggtcctggacgatgaccgggggaaaggcgaacataagaaggccaagcgaattggggatcctcatactggggaaattgcagcccagggggcggagaacaaggcgggggagggacgggacagcgcaagacagatcacaagtgggcgaggaaacacggggaacaaggaaccccccgcagcgggacaggcaactgcgggaa

SEQ ID NO: 78880 - DNA, 2454 bp, Homo Sapiens
  misc_feature (16)..(16): n is a, c, g, or t
ctaagagcgagcctgngtggcgattctccacgagggccggagggtgtttatcgcggctagagagatgtcgctgctgcggtcgctgcgcgtgtttctggtcgcgcggaccgggagctacccggctgggtctcttctgcgtcagtcgccccagccaaggcacacattttatgctgggccccgtctgtctgcctcggcctccagcaaggagctcctcatgaagctgcggcggaaaacaggctactcctttgtaaattgcaagaaagctctggagacttgtggcggggacctcaaacaggcagagatctggctccacaaggaggcccagaaggagggctggagcaaagctgccaagctccaagggaggaagaccaaagaaggcctgattgggctgttgcaggaaggaaacacaactgtattagtagaggtaaactgtgagacagattttgtttctagaaatttaaaatttcaactgttggtccagcaagtagcccttggaaccatgatgcattgtcagaccctaaaggatcaaccctctgcatacagtaaaggtttcttgaattcctctgagctttctggacttccagctgggcctgacagagaaggctcactcaaggatcagttggctttagcaattggaaaactgggagaaaacatgattcttaaacgagctgcatgggtgaaggtgccatctgggttctacgttggctcttatgtccacggagcaatgcagagtccctcacttcacaagctggtgctggggaagtatggggccctggtcatctgtgagacgtctgaacagaaaacaaaccttgaagacgttggccgccgccttgggcagcatgtggtgggcatggcccccctctctgttggctccctggacgatgagcctgggggagaggcagagactaagatgctgtcccagccgtatttgctggatccctccattaccttggggcagtatgtgcagcctcagggggtgtcggtagtagactttgtgcggtttgaatgtggagaaggtgaagaggcagcagaaactgaataggttccagagacttttggcccaggaggaatatttacttttagctctggacatcattacaaaaaggaatatttcccaaacctcttcagaccgagaatgcatgggtaaaattattaaatagttgtataataaaaataattttttccttgtttgcgtaatactggatttagcttttctgtgcctttcaaaaacaacaggtgggccttattgacgtgatagtgtcgtggagaacaggcatcaacaatactgctgctcccttcaacatagatttattatggtatttctgaaatttctaacttatatgttctgtcttacaccttttatgacatagaactcttttgttctgtttttgctttgcgacactgtgaaccgtgcttctgcctcggaacctccctagttatattacttgtgccacatggatttctttaggattattgattcaaacctagagttgtctggaaaatgtgggttctcttctttgtgattgtctgtagtatgctttgaaggtgctctgcagtggtagacacactggttctggcctcatttaatgaaattaataacacatgcccctatttctcttttggatgatgtgtgggtgggtgggtactgaggtttcctggccagctgtaaggcagattttgacattcttgtgccagaaacagaaattagagtagtccagttacccagagagctcacttaacattgcctctttacttccccagtactgaaacatttcttcaagtataacataaaattaccgtaacaagcagacccagaatactgaaaataactccatttgttcattataggtatctttatttgaaaagtgaaaaatgctttgacacattacagatctgggtatttggattttgcctatggagtgcatatatgatttcaatgatttacaggctaaatagattttagaaataatcatcttaaaattgaaaacaaaggtaggtcctggtataatattaaacataaagttattaaacattttaagcattgttttttggttctctttcttttgatttctccagatttatgcagttttagtgctttctgctgaggctttagctagagggccacaaaacccaaaaactatatggttaacattttaggtatataacaagcaaggaatgcaaggatgagaaaaaatggagaacatgccgtgatttgcagactctattatatctaaattaagtagctgaatgtcaggcagaaattggtggataaattatttcctgatattggcactatctgctcttttctgtggccttgcaataggtataggccttcttgctctagaaaagccccttttctttcttcatttggagctgtttccagccaggcagagctgcaaattgccctcttgtgatgccaaacacagacacaaagtcctgttcagagaggtaatt

SEQ ID NO: 78881 - DNA, 710 bp, Homo Sapiens
  misc_feature (121)..(121): n is a, c, g, or t
tacggacctcacatccatctgaggcttcatggacaaagattctccacttggccaaactttagccaagctcctcaaccttctcccaggcccaatctgggcacttccttgtaaaatctagttntggcaagaagtctattaggtcagtttagcaagaacacctaacccccccatatctgttcaacctcagtatctgatcaggctcctcagcctccaccatcccccaggtgatgtctggtcaactggcctaccttcagctagaatcctgttaggtcggtttagatgaatgctccctgatatttcctcttggtaatcttcccatccactgcccctgaccctgttccctgtctataaatccccagttttccatggtgtattcagagctgagtccagtctctcttcccctactacaagtccccattgctgtggtccccgtacctgtcatgatggtcctaaataaagtcttactgtgctttaataggtagcattgaaaaatttttttctttgacatcattcatgacaacatgaaacctattgggacagcatgactgtgcagggtctttagagctcagctttctgaggccctgagcattcttggttttccgacatcgtgaacctgttctgtgttgcaagatatcactcaagccagtgttgcttaataccatctctttgtgtaatagatctgaataaagtaattgtaatacaccaaaaaa

SEQ ID NO: 78882 - DNA, 658 bp, Homo Sapiens
ctcagggaccattaagacatctgagacatgaccatgattaaagattagttgcgatagttatttggatattatagagtctttgaaatatagaaacactcacacaaactaatgacgatgagcatccggggcttggtgtttctctgtgtcagctgcagtagaggtgggcggctctcaattcaggctcactccatgtcagtttcacaagaaaacgccagtgctgcccccagctcccctagctgctagggcaggtatttctattttccatgcagcacagaagagggggccttaccacagacaccaggaagaataatgtcaaacccatagcaatccaaacctgggagaagcttgaaaactgaggattggtcttgtcaatcctactggcgggtcttgccagttttaaaaaatgaaatacaacagaatgcaacagaatgggaaacaatcagagcacattaaaagaataagtactactttgtgatacttttcagttatgtatgtgggtatcagtgtgtactgagggttgatgagaaatgtatttttaaaatgtgagtcaagttaaaagacctcaaagaatgatgctctaagaaattatatactggagacagtcacgattatatattggatgacgaaaaacaaaataaaaattataaattagaaattt

SEQ ID NO: 78883 - DNA, 642 bp, Homo Sapiens
gaaaggtctaaatcacaaggatagacatttatcaaagaagttaaaatggtgtggcaggtcattaggattaggcagaatctctcagagctgctgggacaaaggaggtctacttattttgtgtggatggtaattatggcatgcacgctgaatgcagttctgagcatggcagcggcccctgagggtcagatcagaattgcccacaatgtgttttttaactaggaccaggtgcagcatgctagtcttgattggaaagatttgacaggatgctaattactgaacagtgggttttgtcaacgccctggtttcagaatatgaactgaggagtcaaacagttggaaacagcacattgctgatttacactggatcttgccttagaaaccattgtctgcctgcctaaccagcctttcataaaatttaaacaaaactctttctacgtagtgatcctcaagcaatatttttgatacagcaagtgtcaaacttgctatagcataaaagccggggctcctgatttccaggtttctaaaaaggaactgaggtaaaacagatgcctgaccgttttaaaggatcttttttaatgttttatgactgcctgtctgtttgaatactggcaaagggataaataataaattgacatcaaaacgt

SEQ ID NO: 78884 - DNA, 1075 bp, Homo Sapiens
  misc_feature (88)..(88): n is a, c, g, or t
  misc_feature (92)..(93): n is a, c, g, or t
  misc_feature (105)..(105): n is a, c, g, or t
  misc_feature (129)..(142): n is a, c, g, or t
  misc_feature (145)..(146): n is a, c, g, or t
  misc_feature (177)..(177): n is a, c, g, or t
  misc_feature (180)..(180): n is a, c, g, or t
  misc_feature (186)..(186): n is a, c, g, or t
  misc_feature (192)..(192): n is a, c, g, or t
  misc_feature (198)..(198): n is a, c, g, or t
  misc_feature (310)..(310): n is a, c, g, or t
  misc_feature (1015)..(1034): n is a, c, g, or t
ctcccgagggaggcggcttgcctttccttaacatcccatggcgtggggcaccaacactttcccggccgtttgacaccccgagcggcgntttnngtgcactcccgngaccgatgcaggtcccgaatgagnnnnnnnnnnnnnngcnncagcatgaggtcccgatgtggggtgagagcnccngatganggtccngatgtngagtgaggcccccggatgtgagtgacgcccccggatgaggaactcggaggaggagctggccccgcgcgtccatgattcgaaggctcgttttcgcagctttcccacgtctttntccgtccccactgccctccatgctaactcactgggcgtctctagccgttataccaacaatgactgcgaccagtgttgggaaagcgccccctgggcccctccctgacgccagcccatccttgagactccctgcaaggaggcggcccgacccagtgggtgcgtgtcgtggggtgaggaggaatggccgacctaatggtcccgcttccgtgagtagcacaggggtgcctgctcagagtgtagtacaacgctgacaagtagaaggcgaggattgcggggcctgggtgagatgggacccactaagttgtgggatcgaaatctcagtaggtccttggggaaagcggggacgggaggggagatgagcagattggaatagaaccgagagagacggaggaaactgacagttgcgtccctggtgggaagactaaaatctatgcagaaacagggataggcaaaagcattgtgcacaagcgggacaggcagagcgccgggacagaaacccttaggacattctgacaccttgctgaacctggatccttacagaatatgtcttgtaggtgaagctagatctgcaaggcataggcaagcctcttagagaatcagaaaagtgatttggaaggaacttcagctgttactactttgtttaagcaaatcaaatgctgttctttaatgttactggacgtttcaaattaaacacaagaaaacctgnnnnnnnnnnnnnnnnnnnncctagcaggcggccgcaagcttattccctttagtgaggtta

SEQ ID NO: 78885 - DNA, 745 bp, Homo Sapiens
  misc_feature (137)..(192): n is a, c, g, or t
tccagccaaggtgagtagcctcacaggagtcagcacactgtagcctgtgcccaaatctagcccacagcctgtttctgtgaagccctcaagttaagaaatgctttttatagctgagcatggtagctcacacctgtaannnnnnnnnnnnnnnnnnnnnnnnnnnnnnnnnnnnnnnnnnnnnnnnnnnnnnnntcaacaaattcttcttaaaatgtcacctagaatgccatcatcaaatccagcaactatttttatttctttatttcctgtgtccaatcgttggctctgttttgatgtcagcatttatagttttgctctgtgtctcatggtagaaatcttcctcgttaagtcattgatcccgtccttccgaagggatcttggctctctgtggtgaaaatccttcaaaccctgtcctgctttggtccaaggtcattccacttctaggaatctttcctgaaggatctaccagcaatgggaacaacagctgcagcttaagtggttgcatcatggcatcatttctaatgtcagaaaactggaaataacacgaagggctgacatggggaggactggtcagataaattcagggcacagctgtccaccggcctggcagaaccttgaaatcacatcattaaaagcctatttaatgatgagagaaattgctcaacggaggctaaaaacaggatacataaaactgtatactcacagttttttaaagtatgtctgcatgactgtacatgcaaagaaa

SEQ ID NO: 78886 - DNA, 686 bp, Homo Sapiens
cttaaggttcttgcgtcagcccatagaagcccactgacctccaccacagcccaaatggagggctgtgatagccagatctggttggcttttgtgggctgacccagacatttaatcaccatctcttatgttgttgccgtaagaaatgcattccaggttgggacttgggatcctgagagcacattcgccccctgtggtggccgcttgccaccttgcaagatggaagcccagtctccttactaccaaactgtagttgtaagcagagggaggggtgagatgtttataggacattccctaagctggggagtgatttttatcactattcatgtcaactgtactttggtatagactccctatcaatttaataatatgaaaagcctaaaataaaactatgcatgctattctatgtgctattttatatcagtaaataagcttatgcttgccagttgtatacacagttatgaggtgtatagaactgactttgacagtattttttgcactgtttcctatctgtttttataaagtcttatttagatattggaccttgttgatgttctcactgcccttgtgcttgctataaaatgtttcatatgtgcctttacaaatgtgagatctttattctaacctttttttgtaaaagatatctattgatttccatatgcaataaacctttttttcagagaaaagtt

SEQ ID NO: 78887 - DNA, 719 bp, Homo Sapiens
agatggcagaccaagcctgggatctccatatggacaaccccctcgctttccagtccctcacaatggcagcagcgaggccaccctgccagcccagatgagcaccctgcatgtgtctccacccccccagcgctgacccagccagaggcctcccgcggagccgagactgcagagtcgacctgggctccgaggtgtacaggatgctgcgggagccagccgagcccgtggccgcggagcccaagcagtcaggctccttccgctacttgcagggcatgctagaggccggcgagggcggggattggcccgggcctggcggccccggaacctcaagcccacggccagcaagctgggcgctccgctgagcggcctgcaggggctgcccgagtgcacgcgctgcggccacggcatcgtgggcaccatcgtcaaggcacgggacaagctctaccatcccgagtgcttcatgtgcagtgactgcggcctgaacctcaagcagcgtggttacttctttctggacgagcggctctactgtgagagccacgccaaggcgcgcgtgaagccgcccgagggctacgacgtggtggcggtgtaccccaatgccaaggtggaactcgtctgagctgggaccctgctcccacgcctgcttcttaaggtccctgctcggccggtgtaaatatgtttcaccctgtccctctaataaagctcctctgctccaccttgaaaaa

SEQ ID NO: 78888 - DNA, 1321 bp, Homo Sapiens
ggcacgaggcacctggccctgctgcggcagcccggcatctacaagcccttcatcatcggcgtctccctgatggccttccagcagctgtcgggggtcaacgccgtcatgttctatgcagagaccatctttgaagaggccaagttcaaggacagcagcctggcctcggttcgtcgtgggtgtcatccaggtgctgttcacagctgtggcggctctcatcatggacagagcagggcggaggctgctcctggtcttgtcaggtgtggtcatggtgttcagcacgagtgccttcggcgcctacttcaagctgacccagggtggccctggcaactcctcgcacgtggccatctcggcgcctgtctctgcacagcctgttgatgccagcgtggggctggcctggctggccgtgggcagcatgtgcctcttcatcgccggctttgcggtgggctgggggcccatcccctggctcctcatgtcagagatcttccctctgcatgtcaagggcgtggcgacaggcatctgcgtcctcaccaactggctcatggcctttctcgtgaccaaggagttcagcagcctcatggaggtcctcaggccctatggagccttctggcttgcctccgctttctgcatcttcagtgtccttttcactttgttctgtgtccctgaaactaaaggaaagactctggaacaaatcacagcccattttgaggggcgatgacagccactcactaggggatggagcaagcctgtgactccaagctgggcccaagcccagagcccctgcctgccccaggggagccagaatccagccccttggagccttggtctgcagggtccctccttcctgtcatgctccctccagcccatgacccggggctaggaggctcactgcctcctgttccagctcctgctgctgctctgaggactcaggaacaccttcgagctttgcagacctgcggtcagccctccatgcgcaagactaaagcagcggaagaggaggtgggcctctaggatctttgtcttctggctggaggtgcttttggaggttgggtgctgggcattcagtcgctcctctcacgcggctgccttatcgggaaggaaatttgtttgccaaataaagactgacacagaaaatcaggtcagtgtctctgggctttgtgcaagctcagtttgaaaagggtttattcccatcactgcccaggacaccctgtggctttacttgctcatggtcagccaagcttacccttcacactgagaagtcatttctggctacttccttgggctcagttccctgggtcatcagccatcaaatcttgttgagttt

SEQ ID NO: 78889 - DNA, 488 bp, Homo Sapiens
  misc_feature (52)..(82): n is a, c, g, or t
ggtttctgatctccagttggtgcagattatgttggcagccggtgactgcagnnnnnnnnnnnnnnnnnnnnnnnnnnnnnnncaaggccctccccaaaccaaatgacttaaaaaacaaaacccatatggcgaggaatggagagaggatcctattgtcttggaggcccatggaatctacttccgtctatgaaacgttctccgaaaagagcatcgctcgctggctggctgggacagctctgttctctgtgtttcctacttctgtgtacattctcgggttcaagtttgcttggattttgaccttttttttaatgtttaataaaaaaagcagtgtctgctgccatgttgcgtctctttctctctttgtctctgtatgcctctgtctctgtgcttgtagctgttccttggagcgcggtgtggtgttcttgatgtagtgagctcaagtctgcggctgtttctggggacgtggtggaggctgcatgttctgttct

SEQ ID NO: 78890 - DNA, 501 bp, Homo Sapiens
  misc_feature (144)..(152): n is a, c, g, or t
acagcttgatcctcttatgaaaaggaaagaatttaaagatgaacaattacatttttgtttaaacagcaattaatcctcattacagagaacaaaagatctgtggcacattgtctttggaaagatcttttgcagatttttcttctnnnnnnnnnctataattctctcacagatcacatattctttcaaacgactatacaaggcagctaaattttattcacaaagccccaagttgcagttccattgctgaagtaggtaaaatacatggagttccccttaatttgtgttgcacatcttcccattgagagcatcactgcttccctaccctatgtacaaaatcattgtgttgatgatagctggcacgttattccacagtaattaaagaaaaacttattaaacataggccagtgattttcatttatcaactggaaaatttactcctttttaaaacaattttaataataccaagatttgactttcctccaaagttataagaaagcaaaa

SEQ ID NO: 78891 - DNA, 843 bp, Homo Sapiens
  misc_feature (743)..(760): n is a, c, g, or t
ttctctccctccctaagtattctacaatggaaagaatggaggaagcacttcaagtagccatcaacaacaacagaggatttgtctcacccatgctcacacagtcataatcacctctgagagactcagggtgggctttctcacacttggatccttctgttcttccttacacctaaataatacaagagattaatgaatagtggttagaagtagttgagggagagattgggggaatggggagatgatgatgatggtcaaagggtgcaaaatctcacacaagactgaggcaggagaatagggtacagagatagggatctaaggatgacttggacacactccctggcactgaagagtctgaacactggcctgtgattggtccattccaggaccttcatttgcataaggtatcaaaccacatcagcctctgattggccatgggccagacctgcactctggccaatgattggttcattccaggacattcatttgcataaggagtcaaaccacaccagtcttggattggctgtgagccaattcacctcagtctctaattggctgtgagtcagtctttcatttacatagggtgtaaccatcaagaaacctctacagggtacttaagccccagaagattttgctaccagggctcttgagccacttgctctagcccactcccaccctgtggaatgtactttcacttttgctgcttcactgccttgtgctccaataaatccactccttcaccaccnnnnnnnnnnnnnnnnnngcctacagccgcggccgcaagctgtagcgaccctcgacaggagggtgtaattttagctgtggcacgaggccgtcgttaaaacc

SEQ ID NO: 78892 - DNA, 912 bp, Homo Sapiens
tttaatgaaagcagggatttattgaaaaccaaagtacactccacagtgtgggaacgggcctgagcaagtgactcaagggcccagatacagtcttctcagtccaaataccccttggaggtttccccttggccacttcatgctcacctcatggaaatgaagtagtggaccacaatcggtctgattggttgcagggaagcaaccaatcagagactgaagtggagtaacaaaggtcacgctcctgtgcaaacatctgattggttgcaaaaagcaaccaatcagaggctaaggtgaagttacaacgttgcaacgaagactcggctggcaatcagtctgattggttacagacagccaatttcccagcgttgaccaggttttggggggaacaaaattatctgaataaaatgaagacagcaaccgtcgtggatttggtgaaagttttctcccatctccctctcaaggccttaaacaggtatgagttgattatagccaatgtttacttttctcattctgattcattataaaactggggtaaatacgttcaggaattagaccacgtaacaattataattgtcgaagactttgaaactgcatagtagattgtgacattggagctttttgttgtgctcattagaaagcagggtctgaaactcagcctgtgtagcaagcacgggtggctcacaagcagaactgggaaatgacacttctgctccccagagccccctttcacatctggggttctcattgtttgcctttttacttaatgtattttgtaatggctgtgaaaattaagctacaaaatgagtgaacattgaagacaatgattgctattgaaacttaggatttctcatttcaaacttagcgtgtgtttatccttcgtattcattcaataaatatctgtggagcaacaaaaaa

SEQ ID NO: 78893 - DNA, 994 bp, Homo Sapiens
  misc_feature (33)..(34): n is a, c, g, or t
  misc_feature (42)..(42): n is a, c, g, or t
  misc_feature (49)..(49): n is a, c, g, or t
  misc_feature (67)..(67): n is a, c, g, or t
  misc_feature (90)..(90): n is a, c, g, or t
  misc_feature (95)..(95): n is a, c, g, or t
  misc_feature (124)..(124): n is a, c, g, or t
  misc_feature (145)..(145): n is a, c, g, or t
  misc_feature (193)..(193): n is a, c, g, or t
  misc_feature (222)..(222): n is a, c, g, or t
  misc_feature (236)..(236): n is a, c, g, or t
  misc_feature (307)..(307): n is a, c, g, or t
  misc_feature (317)..(317): n is a, c, g, or t
  misc_feature (374)..(374): n is a, c, g, or t
  misc_feature (430)..(430): n is a, c, g, or t
cagaatcgcacgagggagaacccagtagggatnntgaagccntgagttnaaaagaggatcgtgctanttgacatcatcctacatttcccntgacntaaaaagctaccaagaagcacgagatctnccacctcattttagaaagctnttctacagaactatatgcttgcttatagctacctatctacagttgaancagggagaaagggagatatgtatgtctgntacatctttcctcnactcttgaattgctgggacagcaagcaacaacagtttgaggtccagtgacctacgtaaaatgagtgtcgtntgtgtcaggngacacatgtaactgtgcaacatggattttctacagggagggctaggaagggtggttntggaacctaacctactttgtgtcttcattgtcagaactaaggttggaaatgccctntaaaggacttggtgaggcatatgctaggacaatagagctgctttagaaagaaattgagacatgttttgtcaggacagataaaagtttaatgcaggcttttgaacagatgttttaaaacaaatttgaccttaccaactatttttttcttctagccaaatcattgtacaggagtttcatatatgataaaaagtgttttgttattgtttttgctttcttggcaggggagaacccctaccattgtgagcagttactgtcactctggctgaatggacaaatagctgtgtaaatagcttctcataaaacgcttctactgatagctgtttgactttttcttcccgttatgaatgggaggaacatttgtaaacttcctttctgggtagctaccaaaaaacgtactggcttatggtcccatgtgaccttgtctccgttaagcccagaatctgagtgcctttagcaagtgttagcatttcacagagagaagagagacagaattattgctattaatcaccattcataaataggagcttggaataacaaaggtctgtgtgaattctgttctacgtc

SEQ ID NO: 78894 - DNA, 726 bp, Homo Sapiens
cccaggaccccagagctgaaagggcccctgggcccttcatgggcttgactcctggggtttctcctctgggcattggctgggctggctgcagggaggtgggctggaggctgccagactcttgggttgcagagagttgtccagggccttggccttcttattaatggacctgagggacgtgggggaaaagcagcacatctgcccctggttgctaaggtgcacacgtcccatgggagctgaaggcaggtcccctagtgtctccctgagcctgcatgggagctgctggttcttagaaagcctgtgcattttccaaggtcccagacaccagcactccctggggggccaccgtgatgtgggagttaccgagggctggagctgctcctctttctcttgccatctccatcctccaagtgctgcacgctggcatccaggttaagctgcctctcatacggggacaggacagagctgtggggtgagaacagcgggtgggccactgacccacctcctcagcctggggatctggtgggatgtgtaaggaaacgggccaagaggacagtcagtgggccaggatcggagccacacccaagtgctaaggccctaagcagacccccatgaggggtacaggcccagccagggggcccagccatgtgcctctgcctaggcaatggcccagaggagctagcaaacttggtaaatatagaaaaataaaaaccttggataactaaaaaa

SEQ ID NO: 78895 - DNA, 1560 bp, Homo Sapiens
tcggctaggtacgaggccgggtggctgaattcggcacgaggcccagacctgccactgtctatccaggaagcttaccagctgctgctgaccgaccacactgtgaccttcctgcagtaccaggtcttcagccacctgaagaggttgggttatgtggttcgacgattccaaccaagctctgtcctgtccccgtatgagaggcagcttaacctggatgccagcgtgcagcacttggaggatggagatggcaagagaaagaggagcagctccagccctcggtccattaataagaaggccaaggccctggacaactccctgcaacccaagagtctggcagcctccagcccacctccctgcagccagcccagccaatgcccagaggagaaaccccaggagtcaagccccatgaagggcccagggggcccctttcagcttctggggtccctgggccccagccctggcccggccagggagggggtggggtgcagctgggagagtggcagagccgagaacggagtcacgggagccggtaagcggcgctggaacttcgagcagatctccttccccaacatggcttcagacagccgccacacccttctgcgcgccccagccccagagctgctcccggccaacgtggctgggcgggagacagacgctgagtcctggtgccagaaagctgaaccagcgcaaggagaacctctccaggcgggaacgggagcaccacgcggaggccgcgcagttccaggaagatgtcaacgccgatcccgaggtgcagcgctgctccagctggcgggagtacaaggagctgctgcagcggcggcaggtgcagaggagccagcgccgggcccctcacctgtggggcaagcccgtcaccccgctgctgagtcctggccaggccagctccccagccgtggtccttcagcatatctctgtgctgcagacaacacaccttcctgatggaggtgtccggctgttggagaagtctgggggcttggaaatcatctttgatgtttaccaggccgacgctgtggccacattccgaaagaataaccctggcaaaccctatgcccggatgtgcattagtggatttgatgagcctgtcccagacctctgcagcctcaagcggttgtcttaccagagtggggatgtccctctgatctttgccctggtggatcatggtgacatctccttctacagcttcagggacttcacgttgccccaggatgtggggcactgacctcacagctctgcagaggatggagcttgctccgggggaccgggactgtctgttctcagggaccatctcggctgcctcctgtacccagactctaacctgtagcttcagaggccagtctgggccttggccctgggtgtctgatactcacagagtgaaactgtgaccctctcccttccctgctgccttgcagtgacccctctggaactcaggactcgattttaaggacccaggaggtggggcagaagagaggactgtgtgcctttaacgagagggtgcctgcttcgtgctataaagccaaagccattaaaaatagatttcttttcaaa

SEQ ID NO: 78896 - DNA, 775 bp, Homo Sapiens
  misc_feature (709)..(709): n is a, c, g, or t
tggcacgaggggagccgatccgaatgccgcggccggtggaggttcccgcggggcgcgtgctcagcgcccgggagctcttcgccgcccgctcgcggtcgcagaagctgccccagcgctcgcatggccccaaggactttctgcccgacggctcggcagctcaggccgagcggctgcgccggtgccgggaagagctctggcagctgctggcagagcagcgcgtggagcgcctgggcagcttggtggctgccgagtggaggccagaagagggcttcgtggagttgaagtctcccgcgggcaaattctggcagaccatgggcttctcagagcagggcccggcagcgccttcacccggaagaggccttgtatcttctggagtgtggctccatccacctcttccaccaagacctgccactgtctatccaggaagcttaccagctgctgctgaccgaccacactgtgaccttcctgcagtaccaggtcttcagccacctgaagaggttgggttatgtggttcgacgattccaaccaagctctgtcctgtccccgtatgagaggcagcttaacctggatgccagcgtgcagcacttggaggatggagatggcaagagaaagaggagcagctccagccctcggtccattaataagaaggccaaggccctgggacaacttcgcctggcaaaccccaagagtctgggcagcctccagcccnactcctgcagccagccagcaatgccagaggagaaacccaggagtcagcccatgaagggccaggggc

SEQ ID NO: 78897 - DNA, 761 bp, Homo Sapiens
  misc_feature (187)..(200): n is a, c, g, or t
ggaaaagccctgatctaagagtttttagatgctagcaaccttgtttagatgtagatcttgtttagatgtagcaaccacttgacatttaatttatcatcttaaccttgaatgattctttgttttgttttttgttattgagatggagtctgcactccagcctgggcgacagagcgagactccatctccnnnnnnnnnnnnnngtgaggttgagatttgcatggtaccaaggcttacatgcttcagaatagatcaatggttattgtataagtaattttatcctaaaacattatgacattttttgtttcttattgagggtagataatgttaatattaaactactaataggaggcccttatcacttctcttttcattttttccatgcagtgataggtattattagaaaaaagttatttcttgagttacacctaagaggaagaagtaacatgatggaaagtggttggagatagcacccaattaacatcgacagccaagtcttctatttcagaatattgatttatttcgctttggcttttgatgccatcatgagatttaagtctgcagtttcaaaagctcatgctacttagaagagatgatttttgcagcttaaaaaattgcttgtgactgcagtatgtacacagttaaaaagctgttcactgcccctttcaaccttttcattttgagctttactaagagaatgcttttaggaacagaattcctaaagtgtaattttttatgtataaataaagtttaaaactatatct

SEQ ID NO: 78898 - DNA, 1215 bp, Homo Sapiens
  misc_feature (80)..(114): n is a, c, g, or t
  misc_feature (1088)..(1088): n is a, c, g, or t
aaatgtatagactcactatagggcgctacggcgtatagcgaacgaacgagcgcagcgagtattgagcgaggaagcggcgnnnnnnnnnnnnnnnnnnnnnnnnnnnnnnnnnnncagtcgacggtaccggacatatgcccgggaattcggccattacggccgggggacgcctcctgcagcgcctggagccacacagggatccggagcctgggggaaaagcggcgcgggagccggcacccaccgctggaggggcggcgacggcggccgtagcgacctcgggaggcaagcggagccgccatggccgagttcccgtcgaaagttagcacgcggaccagcagtcctgcgcagggcgccgaagcctcggtgtcggcgctgcgcccggacctgggcttcgtgcgctcccgcctcggggcgctcatgctgctgcagctggtgctggggctgctggtgtgggcgctgattgcggacaccccgtaccacctgtatccggcctatggctgggtgatgttcgtcgctgtcttcctctggctggtgacaatcgtcctcttcaacctctacctgtttcagctgcacatgaagttgtacatggttccctggccactggtgttaatgatctttaacatcagcgccaccgttctctacatcaccgccttcatcgcctgctctgcggcagttgacctgacatccctgaggggcacccggccttataaccagcgcgcggctgcctcgttctttgcgtgtttggtgatgatcgcctatggagtgagtgccttcttcagctaccaggcctggcgaggagtaggcagcaatgcggccaccagtcagatggctggcggctatgcctaaaccacctgtgccacggccccctctggggctgaagccgccgctgggtcacagagcagggtcaccctgcaagcctgaagctggggagccctgcgtggagtcagcccaacagggactgcatttgctcctctctgcccgtcagacataagctctcacagcgctaaaggagcaggcccaggctggcaggcatctcggccttgcaggaggccaactgctgagaactcttctccatcccccttattcangggaaaaatgaacggggggatctgaaggctgggtcccctggcccttggcctttaaaaggaacttcaagcggtcccaagaaatgggggccccacccccttcctcacccaggcacctaaaatggcgccc

SEQ ID NO: 78899 - DNA, 776 bp, Homo Sapiens
ctgaagccgcgctgggtcacagagcaggtcaccctgcaagcctgaagctggggagccctgcgtggagtcagcccaaccagggactgcatttgctcctctctgcccgtcagacataagctctcacagcgctaaggaagcaggcccaggctggcaggcatctcggcttgcaggaggccaactgctgagacctcttctccatcccccttattcagtggaagatgacgggggatctgaggctgtgtctctgccttgtctttagaggacttcagcgtccaagactggggcccacccttctcaccagcactaaatgcactaacaaggactccagacctgcagccccagacccgccgtagtataagcctaacaagcaacacgtagcaccttagtctttgttccaggagagctgagcaagctggtgaaaccactctccttcctttaaacaccgtttcaaccaacctctccctggagccaacctgtaaaaagtgggttgattgctgacagcatggtcttccctccctgcatttcagacataccagttactgaaagcaaatcagttttaagtgatttctcagtgctgaaaagcctgtccaggtttccttccctttcccaagcctctctctgtaatactccctttgggcgaagctaacatcggtgcctccccgaccttgctgactaggcacatgggacgcaaaggagggagggaagcaaggccttgcctggcgagttgtcatgtggttggggtgactgtttatttttaataaaaataagatgagaga

SEQ ID NO: 78900 - DNA, 913 bp, Homo Sapiens
  misc_feature (76)..(87): n is a, c, g, or t
  misc_feature (780)..(780): n is a, c, g, or t
  misc_feature (816)..(816): n is a, c, g, or t
  misc_feature (828)..(828): n is a, c, g, or t
  misc_feature (891)..(891): n is a, c, g, or t
acatcatcggccgtagttacaggccgggtggtgaatcggcacgaggcctccactctgctcaggtccctctcactcnnnnnnnnnnnnaaccgctacgccacagtccccgggagaattcagatcccaaccggggcttccggattctgtagtggctttggcctgtgtctggtctgaggacgcccggaaggcattgcactgaggctaagggaaaggtctctggagggagcctcaggaagagcaaatggaggccagagactggcaggagcgcgccagcgcaggatttaatcccgacgagcggattcagagccgtgcttatataaagcttcaggaagcgccgttccgacgatgaggtcgacacgcgagaggcgacctcaagagcggcggcgccagggatctgtgcgccaagggaggacgggagggagcaggttcgccataattcctggctccaggctctgttttgttggaccgagccactgtattttagctcacacaggagaattctggccctgggaaaattggtctcagcatgctgccaagctttctcatggacgtcagcgaatcccaacacactgtcggtcaaagccgtgctggaagaaacaaaacagttctccctcggtagaactgagaggggattggtccagggcccccgccgataccaaaatccaggttgctcaagtctctcatagaaagtggcgtagtatttgcacataactatgcacatcctcccgtgtactttaaatagtctctaaattacttcgtaacacctaatccagtgtaatnctatgttagtaatggtaatccggttttaattttccnacctttggtggnctttttttaaaaagaatcatttgtttatatttcggtcttgggaaccgcgtatatggaggcctntacatgagaagctgagggatat

SEQ ID NO: 78901 - DNA, 717 bp, Homo Sapiens
caatacataaagagaattaaggatatattcagaggagaaattaaggattatatttagagcacagaggttatacaaagaatataaccttgtttggtcaaattcttaggtaaagaaaagtaatcaatgcttgcattgctgttggagattctaaaagatgtattgaatgaagaggatgtacacatctcattgttactgcgtattcttttgcttggtattcctgcttgcattaaagctggacaatgtactgtgatgtaattacaaaatttttattccttctaacgattgaactcttcttatccctattgataaaactgtattacaattgatgagtgtggctgccagaaaataatacaaaactgggcatttagctgttccacattgtgtagtaaatgttttgattatggggatttacagtgtatattaaagtagaaatgcttttgcacttgttttcagtctcaaataataatttttgtttttaattaaggatactttaaaagcaatgacagaaaaatctaaaatatcagaattaattattgtgaactgtgtgtaaaatatcttgtgagttttatacatactttggttgtctgatgtttcctaagtataaatgtctttatagaaaatttcagttctctgtgaagagtaggaagtgtactgtatattgaactagttctttgtgttactttgatatttaaaataaatataaagttctttggtcct

SEQ ID NO: 78902 - DNA, 778 bp, Homo Sapiens
ctccgcctccataaacactcattaaacaccaactatgtacagggtcccagcctaggaaacctggttttaaggacccagaacctagtctcagggaagtgagaacactttaatggatctgaggtctgtccatctcttctctctcctcttcctcatttctggaacgcagtgtccagcactcagggctgacacagggatgggctggggatgaccctaggccacatgcgcaggataaaaggggccgtgcaaaatcctgttctggccaccagatcactcctaagaaagttgggtgggggctgtggaagatgcttccttctgaagaggtaagggcaagcccccactgtggcccaggtcccaggtcccttccttgggagccagcactcagagagaagctaagtgctggtacccccatttctaacttgggtgcaggcagggaggctcggccttcagacaggcctccctcaccccactggacaacaataaatcctggatgagatctgcagagggcccaaggccctggggcagtggagggctcagaggccatgaggcagggcctgcagccagcccagacctaggccatggtggcccctgcctgattagtggcgttacctgagtggtttggttgggcagggtggtctctggggccagcaaggtagcagtggagatatggtgaagaggggactaagggaggaagcaaagggccaggaagggcataagagggaagtgggggccaggggggaggccagatgaggacggtgtggggggcgaggggctcagagcc

SEQ ID NO: 78903 - DNA, 705 bp, Homo Sapiens
ggaggctactgaaaaggaacagctcattaaaaggagagtgtgtaaagacaccagcaaagacaaatttgactacattgcctacatgaatgatatcgctgcctgcataggcacaaagcccagcatcccacttctgttcctcaaggatcccagactagcttggaaagttttctttggaccatgtactccttatcagtaccgcctcatgggccctggaaaatgggatggagccagaaatgccatcctgacccagtgggacagaacattgaaacctttaaaaactcgaattgtccctgattcctccaagcctgcctccatgtcacattatttaaaagcctggggggcacctgtcctacttgcctctcttctacttatctgtaaatcttcacttttcttgaaattggtgagagataaactacaggacagaatgtccccttacctagtaagtctttggcgaggatgaacctgattgttacaagggttacacaaagtcatgctaattctatctccaagtatcttgtgcatccctcctctgctctccatcataactgctattagccaaattcaggcccagtcatctcctatctgaattattgtattatcttcttctttgttttcagtaccctctttcttgccaccctttccaatgcatcttctaccctgctacctcagtgattattctaaaataaatatatataatatggttta

SEQ ID NO: 78904 - DNA, 404 bp, Homo Sapiens
aactggcattttgaggatattggtttaatggaaggaaaaaggaatggtgcaaagcacatggtatttgaattccaaagaccttgaccctcagcattagcaagtcacttgttttctgagcctcagttttcttactctcaaatgaggtaatatccgaaagtactttgacaacacactaaagcctgatgcagatttcctttttgaagtaattgtgctgtttctattcatattggatatggtattctatggtattggctatagatacatacattttaaaatgttatttaacagcatgtaaatgttcatttcatgccatgtgatcatgttcccctttatgattttttaaggctgtcttacaagcctaacagtgtactaagtcattaaaagatatatttaaagtaaaaaaa

SEQ ID NO: 78905 - DNA, 1663 bp, Homo Sapiens
  misc_feature (33)..(33): n is a, c, g, or t
  misc_feature (345)..(345): n is a, c, g, or t
  misc_feature (1064)..(1111): n is a, c, g, or t
ggtccccaccgcctcccctttctctctggaaanttgaagtatctccaaaggccttggaaatggcacaaaggtgataaggagcaggtgctttgctgcagtctcccttgcaaatgtataattaaggcctttcttcccaccccaagtccaagaacaaatgccagccacgtcctccgccacttggagagatgagaacccagtggggtcacgtaaaggaattgcaggtcggtgagaggacaagagggactcccatgttctaagcacctgttcctggccaaggctctaggcaggctctctaagcacatttctcctttcattccccctaaaaacagagtgacctggaagtangatgttctttgctccttgtcagagttgaagaggctgagacttggcccactgctaagcggcagaggcagggccagccatcctgtcgcaagcccgtgctggggctgccctttctgtttccagtccagttacggacttcccggccgccactgggccctgccggtcaccaggccactgtgcagtgggcgcagagcatggtcaggagtggcctgcccgtactcctccacccagatgagggccctccagagcctgcaggcatctgtggggaatcccagcctgcaggttcttggagaagcaggtgaacctaaggatgaaagcaaaggagggccttgaggaagcagcccccaggcctggcagccacgcagcggctgagctcatgaacttggttcgcagcctgccttgcccctggaggccacgccaggcgctcacccctgagcccacagcccctgcttgggctgcctggcaccctcagggtggcccggcctcctcctgccactctgagcacatgtccgggggttgccaccagagacggctttgttctcccagctaaggccgtggagctgctgtgtgactgtgtcaggcctggacaaggaagacccttagggatgacgtccccgctgcatatttattcaaggtgactcttgtacttggcaagggaagtccactgtgtgattgtctgtattcttaatataatttgttaaataaacgtttgttttaacctnnnnnnnnnnnnnnnnnnnnnnnnnnnnnnnnnnnnnnnnnnnnnnnngagagggaggagacagaaaagaagaagaacaccaccctgaagggacaccacaaaacactaaccgacagtcgcggcggcgctacatcagggaaacacacgcgccggcgccgccgcgaccggcgagggccgagactacaaccaccgagcttattatttatgagagcacacaccgcgtggtgtacaccaacacacgagacgcgagacgcgtcgtgaaaaaaaccatgtcgcgagagcccgcgacgagcgcacctcctggtagatacgacaggcgcagccgaccgttgacaagctcggactagacaagagatgcgttgcacccccaactaacgtgggggcgaccaccataatgttcgagcacacaaacaagccatctcattattaaacggggcgcctatgagaggaggatcaaccatattggtgtcatggacagacgtcctatcgacacgagctggtgatcaaaaaggcaggggtgtgattccacccaccagctgccgcatgcggcggaaatgattgtacgcagcaagccgccgttcagcagaagagtattagagg

SEQ ID NO: 78906 - DNA, 316 bp, Homo Sapiens
cactgggccctgccggtcaccaggccactgtgcagtgggcgcagagcatggtcaggagtggcctgcccgtactcctcctgccactctgagcacatgtccgggggttgccaccagagacggctttgttctcccagctaaggccgtggagctgctgtgtgactgtgtcaggcctggacaaggaagacccttagggatgacgtccccgctgcatatttattcaaggtgactcttgtacttggcaagggaagtccactgtgtgattgtctgtattcttaatataatttgttaaataaacgtttgttttaacctctttaaa

SEQ ID NO: 78907 - DNA, 664 bp, Homo Sapiens
ggggcatggttggcctccaatgatttcattcaaggccaaagtcctgagccccctccgctggtcccagtccagctcttatcaactccccaaaggaaaacccactggttcttagctctgtgggtaggaaggggccctagaaagggcctagttactatcctgtcagttctaacagtagtggaacaggagaatctgggccctaggagccctgtaactcccaggagagaccactgaaaatactggagcaacaatgcccctgcttccatttctccccacctcactctcaccaagtcaccagagggtggttctgtaggacctcttttgttgcttaagatgcagatggctcttaagaatcaggcagtcgcccacttctctccagatgaagggaagacattcataggtcccaaatctgcccattcagatgtcacataatatggtgggatatcaatttacttcttccacacatgtggttgtgcacatgtgagcttgtgtgcttttggagagaatgttgattggcaaaagcagcacagtattaatatttagagtaggatgcagcctcttatgcaccacagttaaatctagaacgaacaaaatttcagagctcaagacatgggacatttaaatcctcaaggagtttggaacaaaataaacagatctaaaaattaaa

SEQ ID NO: 78908 - DNA, 1001 bp, Homo Sapiens
  misc_feature (609)..(678): n is a, c, g, or t
ggcagcgccgggcaacaccgggcggccctacccgtggcgggcgcacactacaagagatggagcggcgcggccgcaagcggagaacggcgccgggaacaggcgcggatggcgcaaaaacgggacgacagggctcgggaagcgggcggtggggcggggggccggcgattgcggcgggagggccagtcataagcgcccacaccggtgtgcggtcggtcgcggcttcccccggcgcaggcgcccctttatatgcaaggctcgctcgggaagccggaccgacgaatcgccccctcgcgtcgccccgccgtcgatccaggtatgtgacctctgcgccctggtccggacccgcgaatcgtcggcgcgaacacatctccggttggggtagtttttccctttctgggcttcctcttccttttgaacagtggcaacatgcttggcggaggcacagcccatagtctcattcggtcagcttcagccgggctgaactgcaaatcatctctacagacacagggacattttttttctttaaacacaaagaaaatccaccttgctgctgagttggtcaagatgtgtgcaccttgggcgttcgcgggggggctgaaggtggcaagnnnnnnnnnnnnnnnnnnnnnnnnnnnnnnnnnnnnnnnnnnnnnnnnnnnnnnnnnnnnnnnnnnnnnnccacagtgtgtccggggctccccctcctccccgccgcttggagtaagaacccaaaaccccgaagccgggcccgcgtgcaagcgtgcgggaggcggcggcgcgcggccagctctccagtaactgagcgcggcgcgcagctcccaactaaagtgtgaaagaagcagcgccgcggcggccgcggcacggaacgtccccccgggagtgggcagggagcgagcgggagcttgcgaggagcgagcgagggaggggagctcctcgctccctcgtgccgaattcgccacccagcctcgctaccttaagaccgtgatagttactgccgtttc

SEQ ID NO: 78909 - DNA, 956 bp, Homo Sapiens
  misc_feature (124)..(124): n is a, c, g, or t
  misc_feature (360)..(360): n is a, c, g, or t
  misc_feature (365)..(382): n is a, c, g, or t
gatgatgaagaatatgcttgatattgatcttcactcccttgttcaacacgatcgatccatcatcagaaagtcagtaattagataactataaggtccggatgtcatcaccaggcaacatcaattntgaaccacagattctcagatctgatgaaaaatgaaaggtcggatactgtcgaagaggagattcactagcacaatttaccactcaaccagagctactactgttaaataggtacaccccagttgaatctttgcaaaggtcggtctattcagcgaacagcactatagcaaaagaagatcgttccatattgtacgccccattaaattacagtgtttcttaatgaacttgcaaaggaatantgctnnnnnnnnnnnnnnnnnnctgttatcgaactttctttgttgctgctagttaaaacttgttgcaacttttcacttctcttgtgtccaggtatgcagcaaaattctgcaatttcaccttaaagatactgttggttttacagatgctctccaacctattttctataagatgaggtagtggtgaactcagataacaaacttctcttctaaactggttctgcttctaagacaagcatctcctgccctctctccttcctccccatctctcgcacgcagtctagagatggactgagccttgcttctcactggcagtgttgagctttggagatgggatggttgctatgccaagccttgtttctctgctcagaagaagtagagaagctattatcaattaaaagcatgctgtgatgtgactcctggaagtgacgtaggagtgagtggcaggttgtttgatttaataggtatcttaatcaagaattaagcttgcaacattggctttgctcagatgcagatggaagtgtgatcacaatcattttgaatccctcttcctcacttttttttctaagaaaataaacattttactgtttttatggaaa

SEQ ID NO: 78910 - DNA, 1337 bp, Homo Sapiens
  misc_feature (74)..(74): n is a, c, g, or t
  misc_feature (760)..(868): n is a, c, g, or t
  misc_feature (870)..(879): n is a, c, g, or t
gtgagcagactgcctcccagcacctcgtgccatcctggacccaccccgtgctggcttgcgtgagtgcttttgcntaaggaggtggcacgggaacgaggacacgtgggtggctcaccatgttatgcactctctggctgtggggacccagctggtgttgcctcctcagattccaaggtgatcctggccatccggagagctaagaacctcaggcggctgctgtacgtctcatgcaacccccgggcagccatgggcaactttgtggacctctgcagagccccatctaaccgggtgaagggcattcccttccggccggtcaaggctgtggcagtggacctgttcccgcagaccccgcactgtgagatgctcatcctgtttgagagggtggagcaccccaatggcacaggggtcttggggccccacagccctccagctcaacccacaccaggacccccagataacaccctacaagaaactgggaccttcccctcatcctaggcccaggacccattatggggacaggagctgaagggctcccagggccccaggggcggggaaggcatggcttgctggccaggatattcagaggtaggcagccaaagggcacagaaccctgtgccccaccaggattggcctgctgctaggggccaggggccctgaccaggaagacaggtgggttcctgtagcctgttgcccatccccagggcctttgtggactagccaaggctgtgagggccagaataaacaactggctcaacgaatnnnnnnnnnnnnnnnnnnnnnnnnnnnnnnnnnnnnnnnnnnnnnnnnnnnnnnnnnnnnnnnnnnnnnnnnnnnnnnnnnnnnnnnnnnnnnnnnnnnnnnnnnnnnncnnnnnnnnnngaagcgggcggcgggcgcacctttatgattttcacttctttacgatgcgtcagtgcctataacttatctatcatccatactacagcgtcctgcttgtttttttcatcactacgtatcgcttcgatcctttttatgcagcttgtgtattgtcttatttatgctataattccttgctgcgcagcgatgttagatttacaaatattctcgtgtgtccgggtcgcagacaatacccccgacgtcctgcgccggttccagcctacaatcatcgcacaaacaaggacagcactcaccgccatgggggcacatgacatcacccaccgcatcagcccccagcagcacatcccgccctataccacacatccctcgtaaccccatgtcccaggcgcatcacacaacatccaacacttcctgatggaaccacatgcccagtgcgaccccaccaccaccgcgttgttagc

SEQ ID NO: 78911 - DNA, 1126 bp, Homo Sapiens
  misc_feature (63)..(97): n is a, c, g, or t
  misc_feature (401)..(410): n is a, c, g, or t
gaactaatgcgctccgccttatcgaacgacgagcgcaggagtagtgagcgaggaagcggccgnnnnnnnnnnnnnnnnnnnnnnnnnnnnnnnnnnncagtcgacggtaccggacatatgcccgggaattcggccattacggccgggggagttgtaagaaggtgcacatatttttttaaatctcactggcaatattcaaagttttcattgtgtcttaacaaaggtgtggtagacactcttgagctggacttagattttattcttccttgcagagtagtgttagaatagatggcctacagaaaaaaaaggttctgggatctacatggcagggagggctgcactgacattgatgcctgggggaccttttgcctcgaggctgagctggaaaatcttgaaaatannnnnnnnnncctgtggcacattcaggttgaatacaagaactatttttgtgactagtttttgatgacctaagggaactgaccattgtaatttttgtaccagtgaaccaggagatttagtgcttttatattcatttccttgcatttaagaaaatatgaaagcttaaggaattatgtgagcttaaaactagtcaagcagtttagaaccaaaggcctatattaataaccgcaactatgctgaaaagtacaaagtagtacagtatattgttatgtacatatcattgttaatacagtcctggcattctgtacatatatgtattacatttctacatttttaatactcacatgggcttatgcattaagtttaattgtgataaatttgtgctgttccagtatatgcaatacactttaatgttttattcttgtacataaaaatgtgcaatatggagatgtatacagtctttactatattaggtttataaacagttttaagaatttcatccttttgccaaaatggtggagtatgtaattggtaaatcataaatcctgtggtgaatggtggtgtactttaaagctgtcaccatgttatattttcttttaagactttaatttagtaattttatatttgggaaaataaaggtttttaattttatttaactggaatcactgccctgctgtaattaaacattctgtaccacatctgtattaaaaagacattgctgaccatt

SEQ ID NO: 78912 - DNA, 1133 bp, Homo Sapiens
  misc_feature (921)..(921): n is a, c, g, or t
gtggtaccggtccggaattcccgggatatcgtcgacccacgcgtccgggcggcgcccgctcgagagaagtggggccgagatcgcgccgtcccagcccgcccgccggcgtctgcgctgctccggcgcccttacccctgctggcccttgcaaggcgcgaccggcggccatgcagccccggggctgaggccgccccatggcaaagccggcggtcccggcgacgacggcgcatggagaacttccgtaaggtgcgctccgaagaggcgccagcggggtgcggggccgagggaggcggcccgggctccggccccttcgcagacctggcgccgggcgcggtgcacatgcgggtcaaggaaggcagcaagatccggaacctgatggccttcgccaccgccagcatggcgcagccagccacgcgcgccatcgtcttcagcggctgcggccgggccaccaccaaaaccgtcacgtgcgccgagatcctcaagcgccgcctggcgggcctgcaccaggtcacgcggctgcgctaccggagcgtacgcgaggtgtggcagagcctcccgcctgggcccacgcagggtcagacgcctggcgagccggccgctagtctcagcgtacttaagaacgtgcccggcctcgccatcctactttccaaggacgcgctggatccgcgacagcccggctaccagcccccgaatccccatcctggtccctcgtccccgccagccgcgccagcgtccaagaggagcctaggggaacccgcaacctgggagaaggctccgcgaagcgatcgcaaaccgaacccaggggttgcggacgaggatcagacgggctggaactccggactgtgggccacctagtccgggaggatcttccggccagcgcctcacctttcagatgaacctcccgccctttcacttcttcggnccctcccggaccccacaaaccggaacaacgttccttcagacacgggaccaagggacccttaagggccacaaagaagggggcccaggaatgggcaagaacaggatccccgaacccccctaggggaaacttcgggggaaaatttcctgcctatagcccctgggttgcctggaaaaacgggacatttcccccttttccgggaaccttctcttggg

SEQ ID NO: 78913 - DNA, 1664 bp, Homo Sapiens
gaaagctatggaatatagaccgggttaaaaaaagcaggctggtaccggtccggattcccgggatatcgtcgacccacgcgtcggcgggtcaaggaaggcagcaagatccggaacctgatggccttcgccaccgccagcatggcgcagccagccacgcgcgccatcgtcttcagcggctgcggccgggccaccaccaaaaccgtcacgtgcgccgagatcctcaagcgccgcctggcgggcctgcaccaggtcacgcggctgcgctaccggagcgtacgcgaggtgtggcagagcctcccgcctgggcccacgcagggtcagacgcctggcgagccggccgctagtctcagcgtacttaagaacgtgcccggctcgccatcctactttccaaggacgcgctggatccgcgacagcccggctaccagcccccgaatccccatcctggtccctcgtccccgccagccgcgccagcgtccaagaggagcctaggggaacccgcagctggagaaggctccgcgaagcgatcgcaacccgagccaggggttgcggacgaggatcagacggcctgaaactccggactgtgggccacctagtccggcaggatcttccgccagcgcctccaccttcagatgtacctccagcctttcactcctcggtcctccggagcccacaacctggacacagctcctcaagacaggtagcatggaccttaaggcgacaagagaggggccccaggagtggcaggagaggatccccgaccaccctagggaaacttcgtgcgataattgctgcttatgcccgtgttgcgtgaagacacggaacttcaccttttctgggaccttctttgggggagaatggtggacagtgggattctggaaacttgtttgggacccccaagggttaaagccacccagcattcacgaagagcacctgaagtatggaagctgagaagagttattggaatcacccccaccgttgacagaggaaggcagggggtgagaattaactgcttgagggtaggagagtctgagatgtgggggccctattccgctccccgccctgggacagttttcctttctagttttctttcccctgcttcagaggagcatctctgagggttctagctcttttaacaccccttttccccctgctggcccagagggagacccaggactgaactctccaggcctcctcccctgagccctgcagctggctggagtcttgcttccaataaaacaagcacaaaaatggctgtgtcccccattttttttctaaccacccgcctgtgcagagacagctctcgcctggccccttgtgtctcccctcccctccagccttgcgtcctgagtcttggagtcttcagggtcaggcacagagactgaacagcttcaaaatggtgcaaggcactgcccagtcctggcttcttcctctctcctcccccactccgcctcccgggctggcctggcttagaggtgtgcaaatggggcccgtgtacccctgtacatcggcactaaggagagggcggccatgtttctgggagggagaagggtgtgaggccgtctgagaactcctgggtccgggaaggggaccgtggagccctaatgggcccaaaaaaggacttccaaggtggagcccctgtggtggtcctctgggctgaagagacc

SEQ ID NO: 78914 - DNA, 898 bp, Homo Sapiens
ggttttcacaagttctattgagtgctattcagaataggaacaaggttctaatagaaaaagatggcaatttgaagtagctataaaattagactaatctacattgcttgttctcctgcagagtcttaatacctttgatgctttgataattagcagtttgtctacttggtcactaggaatgaaactacatggtaataggcttaacaggtgtaatagcccacttactcctgaatctttaagcatttgtgcatttgaaaaatgcttttcgcgatcttcctgctgggattacaggcatgagccaccatgcctggccaggacatgtgttcttaaggacatgctaagcaggagttaaagcagcccaagagataaggcctcttaaagtgactggcaatgtgtattgctcaagattcaaaggtacttgaattggccatagacaagtctgtaatgaagtgttatcgttttccctcatctgagtctgaattagataaaatgccttcccatcagccagtgctctgaggtatcaagtctaaattgaactagagatttttgtccttagtttctttgctatctaatgtttacacaagtaaatagtctaagatttgctggatgacagaaaaaacaggtaaggcctttaatagatggccaatagatgccctgataatgaaagttgacacctgtaagatttaccagtagagaattcttgacatgcaaggaagcaagatttaactgaaaaattgttcccactggaagcaggaatgagtcagtttacttgcatatactgagattgagattaacttcctgtgaaacccagtgtcttagacaactgtggcttgagcaccacctgctggtattcattacaaacttgctcactacaataaatgaattttaagctttaaaaaaa

SEQ ID NO: 78915 - DNA, 674 bp, Homo Sapiens
gccgctgtcgcagacccgccgctgacttccatccctccggatccagcagggtgtctgctgtgctcctgatccagcgaggcgcccattgccactcctgatcggactgaaggcttgccattgttcctgcacggctaagagcctgggttcgtcctaatcgagctgaacactagtcactgggttccacggttctcttccgtgacccacggcttctaatagagctataacactcaccacatggcccaagattccattccttggaatccgtgaggccaagaaccccaggtcagagaacacgaggcttgccaccatcttggaagtggcctgccaccatcttgggagctctgggagcaaggacccccagtaacatttggtgaccacaaagggatctccaaagcaatgggaaacgttccccccaaggcagaaacgcccctgagatgtattctggagaattgggaccaactggactctcacatgctaagaaataaacgacttatattcttctgcagtaccacctggccacgatatcctcttcaagggggagaaacctggcctcctgagggaagtataaattataacactagcttacagctacacctcttttgtagaaaagaaggcataaggagtgaagtgccatatgtacaaactttcttttcattaagagacaactcacaatt

SEQ ID NO: 78916 - DNA, 970 bp, Homo Sapiens
ccgccgttccgcgaccacccgcctccccggcccagcagaaccgggtccaggctgggggaggtgctagcggtgtatgcacctaagtccacctgggcctggaggaggacagaaccctgttgtcagaggtacacccagagcaactccacaccgggtgcatgccacagcaactccatcttaaataggagctggtaaaacgaggctgatacctactgggctgcattcccagacggcatagcgaggaggtgctgaagagcgcaggtttggagaatgatcacctggattggaaccatagctctaccaatattggaacccagctccttaggcctcggtcttctcatggagaacatggtgtgataatcctactcctctgagagggtggctgttaaggtgagtgattgcacacgagtccctctagctgatgttaccgagcggtccttgtttttagagctcccaagagggtggcgggccacttccaagatggcggcaagcctcttgttctctgacctggggttcttggcctcacagattccaaggaatggaatcttggggcatgtggtgagtgttctcattaggacaaacccaggcacttagacatgcgggaacaatggcgagcctttagcccgaatgggagcggcaatgggtgcctcgctggatcaggagcacagcggacacactgccggatccagaggggtggacatcagtggtgggtctgtgatggcggcaaacaacagcagacagcaaatggcagtggtggatggcaagcgaaagctcagctccagccataacaaacacggaccagaagagtgtgcagttgcaagatttaacagagtgaaaacagacgtcccatacaaagggagggaacccaaagggggttgccattgctgggtcgaatgcctgggtttctgtctcaatcactgtccctccccctgtgctctcaggcaatagatgattggctatttctttaaaaaaa

SEQ ID NO: 78917 - DNA, 1349 bp, Homo Sapiens
  misc_feature (70)..(282): n is a, c, g, or t
  misc_feature (460)..(482): n is a, c, g, or t
ggcgcgcgatcatgaggagagcggagagccccatacgcaacgcctctcccgcgcgtgccgatcataatgnnnnnnnnnnnnnnnnnnnnnnnnnnnnnnnnnnnnnnnnnnnnnnnnnnnnnnnnnnnnnnnnnnnnnnnnnnnnnnnnnnnnnnnnnnnnnnnnnnnnnnnnnnnnnnnnnnnnnnnnnnnnnnnnnnnnnnnnnnnnnnnnnnnnnnnnnnnnnnnnnnnnnnnnnnnnnnnnnnnnnnnnnnnnnnnnnnnnnnnnnnnnnnnnnnnnnaagaattcggcaagaggcggcacgaggctcaaaacaaaaaattcactagttatgattcaacgcgttcaacagaagccatccccagcccagcttaaattataaagatagacaataactctgttccaatctgcgtggtgcttctttagtaaatactgtacagattttaccatggagaacnnnnnnnnnnnnnnnnnnnnnnncttaattacccttattccgaatggacgaacactttctaccactgctgaccattgtaaaataccgtgtatataaatcccattgaaataatgccctggaatagaacatctcaaatgctgcttaattacagactcaggtcgattacttgtatttcatgtaatgttcctccaagttagacatctggtgcaagaccaaccgggagaccatggaattgtcaaaagtacaaactgacagtgtgtatatttaatttaaagacttatttaaaaactcacaagctctcacctagactttggagagcagtctgttttctgtaatgtctgatactagaaactaatttgcttattttagttgtattcaagatttgaagatgtattttatagacaagttctgtttttgaactttgtggaactgttccaatcaatcaatttcccagttatgatgagtatttacattatgaatgtataacccagacatgatttgtaaagccgacagtatgtttctattacacaacactttttgatacagcgtctcttgtcttcactgatactggagtctccgttgtctgcttggtcccttcgagtttctagttacagacacaatcatactgtgattttatttttaatatggatatgctatcaaactgtgatacacttataattcactggtcctgcatcaggagatggagtggggaaaactgtatttaatacagtttgtatctgaataatctgtatggtttatacagtttgtgttgttcagagatgtttaaagtttgatctttgtttttctaaagattaaaaaagcacttgccccactgtaaatatacagcatgtaaaatttctatagtatataaatggcagcaaatcacattg

SEQ ID NO: 78918 - DNA, 455 bp, Homo Sapiens
  misc_feature (286)..(305): n is a, c, g, or t
tatgtgtgtgcgtgtttgtgtgcgtgtttacctccacaggggacactctacactcagtgtaagatctgctgggaacagggccaccaggagtggctggatctcagtctctctgtctctctttctctccttttccttttggtgtatcaaatatttgattgacaaagtaagggccttgattaggaccaaattctcgtgtgttgctatggtctttatttaggacaacaattaacaatgcagtggcccattcttgtcactctacacatatgactatacgggacatatgtannnnnnnnnnnnnnnnnnnnaacattcccctctgtccccttggcttcggatggaggcctttctgttgagctgaaatgcacctgcagctgggtgctgccagcagcttgcaggccccagccctgttccaatcaatgcagttgacaataaaggaatgagtatcgtcacggagt

SEQ ID NO: 78919 - DNA, 493 bp, Homo Sapiens
acagtgaatacataaacacacaactttccaaatctttaattacatgttttacagcagtaaaccttgggtggacaaagatactataatctcaaatgacttaccactggcatgcagaaagttaacatatcaggctacttcctccaagaggctttcattgacacccccagcctgagctgtctctcatataattgtttagcatccagtacttcctctcatcataactattatattggaactaagttacttgtttgtatctccctctgaactgtttcttgactgaaataaatatgtcaactgtttgaatactttcttcacccgtaagtcagtacttcatttttctaaaccaaagcatagaagagctgggaagcaattaaggcgcagtaatctagaggtcatattatgcaagggatatgctgtggctattagcaacagattccattggcttatgaggcactgcctgaagcttccagggaaacatacaggggaaacagtc

SEQ ID NO: 78920 - DNA, 670 bp, Homo Sapiens
  misc_feature (523)..(534): n is a, c, g, or t
aatgactagatgaaggaaaaacattgttatgacccatgaccctcggagcccaaacagcaccatgaagagcatcattaaaactaagagaaagtggctatcagaaaatgaaacagctttaaaggggttccttttaagtcttgttttctattcagaatgttctgtgttttttctcaagtgtgggaatgacatttatcttagcaggttactcaactacactggatgatgtcactctaaccagtgtacggcactgacccaagtcctggggggctccttggaccaatggactattttacaaacctgggaggtgggagggatggtatatttttgataatcagacattccaatgtaatgttttccttagaggtcacacccttccccccattaatgtcatcgtgagatacatcaagtgtgttcttttctattttcgtataataaatgggctttgcttatcaacatcacaatggcaaagaagaaatatactgtacaaaactgcaggaagataaaacatgaaaactttctatgnnnnnnnnnnnncacccttgagtttcctgtcgtcttcttttgaaactgtagtgcatatgttaaaacatgtatatcatttacagtattgagtcgtgtgccactgctgtacctgatgtatccaatctggattaaacaaattatgtgcccc

SEQ ID NO: 78921 - DNA, 713 bp, Homo Sapiens
  misc_feature (1)..(1): n is a, c, g, or t
  misc_feature (510)..(510): n is a, c, g, or t
  misc_feature (555)..(555): n is a, c, g, or t
  misc_feature (630)..(630): n is a, c, g, or t
  misc_feature (660)..(660): n is a, c, g, or t
  misc_feature (663)..(664): n is a, c, g, or t
natgagccaccgcaccccgcagtactttccctcgtatacaagctactctcctgaaaaaaatagcaggaacccattccaatgtccaagctcccctaaagtgccaactcagaataactttcatgtttaaaaacagctgtcttcacattgcccattgtgaggttgtaaaaggaagttaagatgtcaagcaatttagattctgttacccatttccctatgaaaagagatgtgttaaaagtctttaactacttaaagggtcatcatgaaaaataagaattctattccagaagacagagttatacacagggaggtgtattatatacttgctaataatttttgtgtaggtctttagtaatttatctgataatggaaaatcacctttttggtggaaaggacatacagaagctaaatcatcatctgttaatagtgtttaagagatttcttcattgagatggaatatgggcaagatgacctttaaggtctttttcacttttatcattggaaatccccagnagcaatctgatagtcttaaactttgtccctttctagtcctttgtnatcattttagagctcttcaaggaactagagatttttggacttttggtgacaaagcggtctgacctgtgttcgtanctgggaacatgaacacaaattctggggttnatnnctctgagaatctatagtagtactggcataatgtatactaactacaaatt

SEQ ID NO: 78922 - DNA, 945 bp, Homo Sapiens
  misc_feature (104)..(104): n is a, c, g, or t
  misc_feature (121)..(121): n is a, c, g, or t
  misc_feature (196)..(196): n is a, c, g, or t
  misc_feature (211)..(211): n is a, c, g, or t
  misc_feature (240)..(240): n is a, c, g, or t
  misc_feature (247)..(247): n is a, c, g, or t
  misc_feature (329)..(329): n is a, c, g, or t
  misc_feature (335)..(335): n is a, c, g, or t
  misc_feature (363)..(363): n is a, c, g, or t
gattccagtctttcagagcgggaccaagcccaatcacctggcagaaaggatgtcagtcaaaattactccaagaataacatcgcaccatgaagatcagcgccaanaaatcgttgctgctctngattgggtgccagttgcttctgatggggctcttgcttgctatcgagttggggagtataatgacttgttgatcacnatatcagtgtgcccngcccagacctacggagcgcgagcccagcnagtacgntgcccacccccaccgtgccgagctgtggaggcccacaccaacttggcttccagcctgacacggccccccgcagccccaacantggccntaccccagtgagcaggccctgcccatcncaggcaccccgccccccaactatgactccctgcgtctgcagccgctggacgtcatcgagtctgacagtgagggtgatgccatctaaccctgcccctgcccaccccgggcggctgaaactcactgagcagccaagactgttgcccgaggcctcactgtatggtgccctctccaaagggtcgggagggtagctctccaggccagagcttgtgtccttcaacagagaggccagcggcaactggtccgttactggccaagggctctgtagaatcacggtgctggtacaggatgcaggaataaattgtatcttcacctggttcctaccctcgtccctacctgtcctgatcctggtcctgaagacccctcggaacaccctctcctggtggcaggccacttccctcccagtgccagtctccatccaccccagagaggaacaggcgggtgggccatgtggttttctccttcctggccttggctggcctctggggcaggggtggtggagagatggaagggcatcaggtgtagggaccctgccaagtggcacctgatttactctagaaaataaaagtagaaaatactgaaaa

SEQ ID NO: 78923 - DNA, 585 bp, Homo Sapiens
gatgcccaagtgataattccatctgtgtgcaagaagattaccgtatccctcaaatcgaagatgctgagattcataacaagacatatagacatggagagaagctaatcatcacttgtcatgaaggattcaagatccggtaccccgacctacacaatatggtttcattatgtcgcgatgatggaacgtggaataatctgcccatctgtcaaggctgcctgagacctctagcctcttctaatggctatgtaaacatctctgagctccagacctccttcccggtggggactgtgatctcctatcgctgctttcccggatttaaacttgatgggtctgcgtatcttgagtgcttacaaaaccttatctggtcgtccagcccaccccggtgccttgctctggaaggaggaagacctgaacatcttttccctgtcctttatttcccacacatcaggttggcagctgctgtgctttatttttgccctgtgttaaagtcctctcccaccccagcacctacctgttcctcaactagcaccaccacatctctgttctaaatgttgttctcctgcaataaaggacgtttgaattaaa

SEQ ID NO: 78924 - DNA, 1009 bp, Homo Sapiens
  misc_feature (773)..(794): n is a, c, g, or t
ttttcagaataatttaggtgcttttattcacgtatctaatcagtgtttactggagagagatcttcacctacatttttcattacattcaaaaattaaagaaccactgattctctgacttgcctcttcaggcctctgagacaagagatttgctacttgttatatgaaatccttttgcctccaaaagctttcagattttacccactggataaatcaaaagagtctccatgctgcttatattaaggtagccttttgttgaagaaacatacattagagttagaggagctgggactttgcttacagattaagcgcagtttgaaattgtgaattttagatgtagcattgaatgaaaagctttcactctaccatgtaagaaaatgtttctcaataaaactaagggacttaacactacaaatcagtgagtcagtcagaaagcatctgtttccacctgctggcacagagcacagcactacagcgacatgaaccaaatgagggctccaggagctcaattcagctgcactaggaccatgacttgggtatgcagagagggccgctggaccaggggtttgcatgagtcagagaccttaaaggagtcacttgttgagcaaactcttggctctcttccttgaagcctgggggtggggggcactctgggcatccctcaaagcccagcaggtctctggtcaagtgtacgcccgtgagctgtgcagggccgaagcacagcgccagctgaaaccacaggatcacggccaagagtctctggggggactgaggtnnnnnnnnnnnnnnnnnnnnnnctagaaatccatctccattgctcgggttcattccatgatacatctttcatccacagagggcatccagcttgcaagagtattggctccgcgccggtccccgggattcagcagctgtgcccaccacaggaaagtctagagcctccccgcgtctcggggccgcgaagacacttttcctgggcctatacatttcactctgggaatctcacaatgtggca

SEQ ID NO: 78925 - DNA, 1470 bp, Homo Sapiens
  misc_feature (84)..(118): n is a, c, g, or t
aaatgttatagatcactatagggcgctagcggcttagtagccgaacgaccgagcgcagcgagtatatgagcgaggaagcggcgnnnnnnnnnnnnnnnnnnnnnnnnnnnnnnnnnnncagtcgacggtaccggacatatgcccgggaattcggccattacggccgggaggcattgtgtggctgctcaattaatgtaccaacacctggatggaagaaacatacctatgtcagtaaatgatattgtgaaacccggaatgaggagaagaattattggatatgggctgccatttccaaaaaaatcctgaccaacgtggtgaccttctaatagaattccgaggtgtccttcccagatactatatcttcttcatccaaagaagtacttaggaaacatcttcctgcctcatagaactgacagaactctgttacacatatttcgataaggcactgaaaatataaaaggactggtagtttactgatgtagatgtgaattctgtataaagatgtgtaaattcttttgagggttcattaaattgcatgaatagagacgggtcaaataaataggcaaaagggatttttacagttagagataaaagagaaaaccattcactgtattttatttcatttctcctgattcagatatttttagtaatttgcttatatgtaaaagttgttttgtggagtcagtggatatatttctaatgaagtgctagactatccaattacttaatttcttatacctttagataatcagtatgaaaagttcccatttataatggaaatgaaaattcttaactaaactatacatgtaatatgtatttctagaagagaataaaaacccaagtcagttattagatttaaatcaccttctgaaatgctgctatagggctggtatctgtaaaagaatatcctgatgcatctgtttcaccattttgatttttaaagtatgctgtagcatttcttaataacatcgttgtgatgttcttaaggcagatctttcttcataaaaaggaaagtaatggcaatttctctcctgtggaaatcccaattgcttgaattactgatattttagaatagactttttaaaatgccatatgtaattttatgcaagttgactatatatcttgtacttaataaattataggctcattttgttctctgctagtttaaagtaattcgtttaataatagatgtgtttttaaaggaaatgctgttacttggaattaattttccagttaaacagtcttctataacttactaataatattctatatggactttatgtaatttccctaaaaagaatgaactaccactacactatggtgttaaaccaaaatatagggaaaataaacactaactgctgcttatggataatgttgcaactacttgttatgcatataaatattttactttttcacatgtatagattgcatttcttaggtgttttaattttttaaatatatttatgtttt

SEQ ID NO: 78926 - DNA, 642 bp, Homo Sapiens
aatgtactgttcttctagaaaattagcacaagatactatggaacaaacatgttttgaccaatgctgagctaagggagcttcacatgaaagcctacaaatatgaggaggaaaaacctagccacggcacatttccaacaatttcttaataattcctcttttcttaaccacagaaataaatcagagcctttaaaagttaccttacagataccagcttctcagaaattattttgcagttatgtgagagtatgtgccttcacaatgtcagcaccaacatctttagtattttaagaggaaaagtcaagtccactgaaggaatttaacagatttttccagaaacacttaagacatctataattaggttttaaaaggagtgacagaatgtcttgaatcacaaattaatctgaattcaggacaataataactttaactcttacccacttttataagccattattcccattaatggctgacaatctatatttcccaatttccatgccaaatgagctgagcttccattcttttgaggatgaaaaacagaatgacttctgaaggatctgctatttgccagtatatcagttaacttttgcttcctaacagcttgctaccaaaacttagtggctacaaacaacatctattgaactg

SEQ ID NO: 78927 - DNA, 1030 bp, Homo Sapiens
  misc_feature (39)..(39): n is a, c, g, or t
  misc_feature (53)..(581): n is a, c, g, or t
  misc_feature (626)..(644): n is a, c, g, or t
tccgttagcgcaggtcgaacagggagcgcagagggactnccaggggaaccctnnnnnnnnnnnnnnnnnnnnnnnnnnnnnnnnnnnnnnnnnnnnnnnnnnnnnnnnnnnnnnnnnnnnnnnnnnnnnnnnnnnnnnnnnnnnnnnnnnnnnnnnnnnnnnnnnnnnnnnnnnnnnnnnnnnnnnnnnnnnnnnnnnnnnnnnnnnnnnnnnnnnnnnnnnnnnnnnnnnnnnnnnnnnnnnnnnnnnnnnnnnnnnnnnnnnnnnnnnnnnnnnnnnnnnnnnnnnnnnnnnnnnnnnnnnnnnnnnnnnnnnnnnnnnnnnnnnnnnnnnnnnnnnnnnnnnnnnnnnnnnnnnnnnnnnnnnnnnnnnnnnnnnnnnnnnnnnnnnnnnnnnnnnnnnnnnnnnnnnnnnnnnnnnnnnnnnnnnnnnnnnnnnnnnnnnnnnnnnnnnnnnnnnnnnnnnnnnnnnnnnnnnnnnnnnnnnnnnnnnnnnnnnnnnnnnnnnnnnnnnnnnnnnnnnnnnnnnnnnnnnnnnnnnnnnnnnnnnnnnnnnnnnnnnnnnnnnnnnnnnnnnnnnnnaagaattcggcacgagggatgttggagcggccgcggctgtaggcnnnnnnnnnnnnnnnnnnnaaacacagaatcactctggcaattgtctgcagctgccactggtgcaaggccttaccagccctagcctctagcacttctctaagtgccaaaaacagtgtcattgtgtgtgttcctttcttgatacttagtcatgggaggatattacaaaaaagaaatttaaattgtgttcatagtctttcagagtagctcactttagtcctgtaactttattgggtgatattttgtgttcagtgtaattgtcttctctttgctgattatgttaccatggtactcctaaagcatatgcctcacctggttaaaaaagaacaaacatgtttttgtgaaagctactgaagtgccttgggaaatgagaaagttttaataagtaaaatgattttttaaatatc

SEQ ID NO: 78928 - DNA, 1743 bp, Homo Sapiens
  misc_feature (892)..(900): n is a, c, g, or t
tgagccaccgcgcctggctggaacattttctttacatacactggcttttctccccttcaaatcatcagaaaatgggataatttttagaaatcaggtttaagcactactttcagataagcatttcatagttacaacagttacctcaaaatagaagtatgaagagcaagtgagaaatctggtttcattgttacactaggcagttccctatagaaactttgcaggggttaatagtcctgaggaagattttagttacaatgtattccaatcccatcgatctgatctgagcaaagctgacaaatgaagctggtcaaaaataaagggagattactcaggatggagtcagtcttaaacaaacttgtttctaacggcccatggtaggcatgacaacagcaggtgaggaaagagtagcatcttcttctttccactgagaagtaatggtctttaactgagtgtagaattggatgccctgtttgccatagaaattggtgtctcccctgaaggaggatcgagagccggtgaatgagaacattggcaaaggcactggaatggggacattcactcccacctgtccaacatccaccaagtgggcatatttccgagcagtggctccatatggtggtgaagatggcagttccatttccatatgggttgttatttacaatctggatggcttcatccaatgtttctgtctccagaaccacaagaactggaccaaaaatctcctctttgtaacaggtcatatttggctgccaggagtgatgcatccagaaaagaagtcagctttttggattctgagtattttatgcttatttggtactttcacttactacacatcatttacgtggacaactttcatattactaatctcttttcatttcaaatcacctatttnnnnnnnnngtcctctctcaagtgtattccgtcttccaagttaccaatcatataaacaacttggaattcctatcaacaataaccacacttcctttaagggactgtatctttagttcatgacccatcatcagctgcctttttaatacctgaacgactagtttcatccaattgttatcaaaaagttacatgaaaatttattttttataaatccaatctatagtaaatataccaggataatttttctctttacagaaaccccatgctgttttctgtaacataaataatccattcttattcactcctttgcctcccaaatatgtctgtatgtttatattttgatatcaggtcgcagacactcaaaacatccttcaccatgcaattaatgtttgttgctgataaacggatttttctgtatggttctgtggcaagagatttcataatttctactgcacttacattcaacacttgatgattcactattatagtaaggatatatgaatttcaaaaaatgcctcataacctcaatttttaagtcatgttagctgagagactttcaaagttttgataaataaaaattgacaagtcaattatttttgtcactttcaataaatattgggtggttgatatattgattgagacactgcagtagccataagctaggcagcaagagggagaggggagagaaaacattaacaaaccagtataagataagatagcgtttggcaaactatagcctgtgggccaaatgtggcttcctgcctgtttttgtacagccccaagttaaaaatggtttttgcatttttaaatggttgaaaaaaaattaatcatatataaaatgatatgaaattcaaa

SEQ ID NO: 78929 - DNA, 527 bp, Homo Sapiens
  misc_feature (220)..(291): n is a, c, g, or t
gtagagaaaataatttaatagagaaacaatgaatgatactcttcacactcagcctcctgcagggaggacagacagctcttgcccaaggaagcatttaagggcagaagggctacaaatcaccaacacccgctgattatttaaaagaaactctcaaatacattcttttccaggttaaattcactttgtcctcataagtgcccatgctgtgggctgtgaaggnnnnnnnnnnnnnnnnnnnnnnnnnnnnnnnnnnnnnnnnnnnnnnnnnnnnnnnnnnnnnnnnnnnnnnnnggcagggcaggcctagaagtgggtggcctagagggcactgggtcagactgtctccaagcctccctctccctgtcccaggctcaaactccagcacaaggcccgcgctgtggctagtgtggggcccagagggaacggaggtgggagagatgaggaccaaggaaccctcctgagtgctccctaggccagggcaggaacaaggcttgggcttcttaaaccccaaaagatccagctttcat

SEQ ID NO: 78930 - DNA, 695 bp, Homo Sapiens
tgcggccgccaactcagctcctctttgcactggaatgggcactccaacacccctcagggaccaccctccccacagtatgcactcagccccacagaacccaccagtctttctgggaactcacacctgcccgccatcttggtactttaggttaatccctcaagcatgaaagctggatcttttggggtttaagaagcccaagccttgttcctgccctggcctagggagcactcaggagggttccttggtcctcatctctcccacctccgttccctctgggccccacactagccacagcgcgggccttgtgctggagtttgagcctgggacagggagagggaggcttggagacagtctgacccagtgccctctaggccacccacttctaggcctgccctgccgccgtggagccctgggcaagctctttcccctttctgggcctgggtctccccatctcttcaatggggctgataccttcacagcccacagcatgggcacttatgaggacaaagtgaatttaacctggaaaagaatgtatttgagagtttcttttaaataatcagcgggtgttggtgatttgtagcccttctgcccttaaatgcttccttgggcaagagctgtctgtcctccctgcaggaggctgagtgtgaagagtatcattcattgtttctctattaaattattttctctaaaaaaaa

SEQ ID NO: 78931 - DNA, 1511 bp, Homo Sapiens
  misc_feature (260)..(272): n is a, c, g, or t
cccatctctcagatgcacgggaacaagcagcacctgcagaaggacttcttcctgtacaacgcctccaaggccaggagcaaaacctacatcaacatgcgggaggtgtcccgagcgcttccgcctgcctcccagcgagtacgtcatcgtgccctccacctacgagccccaccaggagggggaattcatcctccgggtcttctctgaaaagaggaacctctctgaggaagttgaaaataccatctccgtggatcggccagtgnnnnnnnnnnnnnccaagcccatcatcttcgtttcggacagagcaaacagcaacaaggagctgggtgtggaccaggagtcagaggagggcaaaggcaaaacaagccctgataagcaaaagcagtccccacagccacagcctggcagctctgatcaggaaagtgaggaacagcaacaattccggaacattttcaagcagatagcaggagatgacatggagatctgtgcagatgagctcaagaaggtccttaacacagtcgtgaacaaacacaaggacctgaagacacacgggttcacactggagtcctgccgtagcatgattgcgctcatggatacagatggctctggaaagctcaacctgcaggagttccaccacctctggaacaagattaaggcctggcagcaaaattttcaaacactatgacacagaccagtccggcaccatcaacagctacgagatgcgaaatgcagtcaacgacgcaggattccacctcaacaaccagctctatgacatcattaccatgcggtacgcagacaaacacatgaacatcgactttgacagtttcatctgctgcatcgttaggctggagggcatgttcagagcttttcctgatttgacaggatggagatggcatctcaagctcggggtctggaagggtcgtcacggctcgcatctaataggcgacagccgacagaggcctcgcccgcacaacacgacatacacgatcacgatggtcccgtgtcctgcgtggaggggtcggcctctccttcgttctgcccctcgcacccccgggcgcgggggaccacaggcgggaacaggggtgtgaccacctaaacacgggggacacaacaaaatacatggggggggcggcccacccgcgcgcgccccctacccacacccgccgccaccccagctgctcgaagagccgggggcgctccggcgcgatcaaatggggttaaacaaaacagaaaggaacaggcattcaatgggcggggagggcggggacaagagcagacgacacgtgggataggtagtcagggtgtcatggtgttgtgcttgctcctgtataaaattaactaaaggggagaaacacacacatggtggtgggaatatacaccggtgtgagcgcctgagagtgtgcagacccggggggtggatgcggggggtgtgggaccgggtgaacaacctacaccatacacgagacgtttgtgacagtacaacacacgagcagcagacccaagggagacgagcg

SEQ ID NO: 78932 - DNA, 1442 bp, Homo Sapiens
  misc_feature (136)..(148): n is a, c, g, or t
  misc_feature (1362)..(1385): n is a, c, g, or t
ggggaatgaccacaggcgattggttttagtggtaggtgtgtggggatctgttctggtcatctggatgctggtcatcggtgtgcagtattgatcaggacctgcaaacccaaaagcttatgggagctggcacgtcacnnnnnnnnnnnnnccaagcccatcatcttcgtttcggacagagcaaacagcaacaaggagctgggtgtggaccaggagtcagaggagggcaaaggcaaaacaagccctgataagcaaaagcagtccccacagccacagcctggcagttctgatcaggaaagtgaggaacagcaacaattccggaacattttcaagcagatagcaggagatgacatggagatctgtgcagatgagctcaagaaggtccttaacacagtcgtgaacaaacacaaggacctgaagacacacgggttcacactggagtcctgccgtagcatgattgcgctcatggatacagatggctctggaaagctcaacctgcaggagttccaccacctctggaacaagattaaggcctgccagaaaattttcaaacactatgacacagaccagtccggcaccatcaacagctacgagatgcgaaatgcagtcaacgacgcaggattccacctcaacaaccagctctatgacatcattaccatgcggtacgcagacaaacacatgaacatcgactttgacagtttcatctgctgcttcgttaggctggagggcatgttcagagcttttcatgcatttgacaaggatggagatggtatcatcaagctcaacgttctggagtggctgcagctcaccatgtatgcctgaaccaggctggcctcatccaaagccatgcaggatcactcaggatttcagtttcaccctctatttccaaagccatttacctcaaaggacccagcagctacacccctacaggcttccaggcacctcatcagtcatgttcctcctccattttaccccctacccatccttgatcggtcatgcctagcctgaccctttagtaaagcaatgaggtaggaagaacaaacccttgtccctttgccatgtggaggaaagtgcctgcctctggtccgagccgcctcggttctgaagcgagtgctcctgcttaccttgctctaggctgtctgcagaagcacctgccggtggcactcagcacctccttgtgctagagccctccatcaccttcacgctgtcccaccatgggccaggaaccaaaccagcactgggttctactgctgtggggtaaactaactcagtggaatagggctggttactttgggctgtccaactcataagtttggctgcattttgaaaaaagctgatctaaataaaggcatgtgtatggctggnnnnnnnnnnnnnnnnnnnnnnnngcccgcgtatgcggccgcaagcttattccctttagtgagggtaattttagcttgcac

SEQ ID NO: 78933 - DNA, 745 bp, Homo Sapiens
  misc_feature (230)..(238): n is a, c, g, or t
  misc_feature (488)..(582): n is a, c, g, or t
  misc_feature (696)..(696): n is a, c, g, or t
tttgatgtaacagagggctttactgaaaaggttgacaaatgaaaagagatctaaaacccaacaaatcttttagttaaaaggttacttggaaacagaatatagtataaccaagttataaaaatgcaaaaaacagcttataagaactttctttcgacaatgtcattgtttaagaatgtaactaaattacttttgaggtatttcataatacatgttgggtattttaaatagtnnnnnnnnncatacatatgtgaattcagtaatggctcaaatattttctatttagtctgataaattaattggcacttaaaataactatactttattcataaaatatccaagataaagaatatgctatataaaataaccaaccatttaatagtaacatgcttacagtggctcaaagctgaatgtgacaaatgtactccaggaaaatgtatttaacattggacctagctatattctaatcctaaacttacttttttggggtnnnnnnnnnnnnnnnnnnnnnnnnnnnnnnnnnnnnnnnnnnnnnnnnnnnnnnnnnnnnnnnnnnnnnnnnnnnnnnnnnnnnnnnnnnnnnnnaaaggtgaacaccaccacactcggattaaacttacttctatatgaaaaataaccagactaacttttaaggattagtggttccacaattcaattttacgactactaacagaattntataatataaacgcctacgatacgacagcatacataagaaaaatatttt

SEQ ID NO: 78934 - DNA, 1381 bp, Homo Sapiens
  misc_feature (91)..(125): n is a, c, g, or t
  misc_feature (391)..(446): n is a, c, g, or t
ccgttttgaaagactatctacctcatatggcgcctcctgctacagtcgaacgaccgagcgcagcggagtagatgagcgaggaagcggccgnnnnnnnnnnnnnnnnnnnnnnnnnnnnnnnnnnncagtcgacggtaccggacatatgcccgggaattcggccattacggccgggccctatgggacatttattaaataaaattaatgggactcttgcaaagtagccttaaaagtgttaatgagtctattaataaatatgaacacatactattattagaaccaactttactcatatctcaaatacagtacatttacattactgtagaggatgaagctctaatttctattacatgtaattttctttagaaagagaaccctgaaagctgccagnnnnnnnnnnnnnnnnnnnnnnnnnnnnnnnnnnnnnnnnnnnnnnnnnnnnnnnncaaaattgcaccttgtgtccaaagggcgaagatatgacattgcataagggatttatgtttttcaaagagctaactgttttcatatccatactatatacacttgaagcaattggtaggaagagaacctattggaaaaatacgattttcaaaagtaagtattcctcgggatgtttttatataaattatgttttggaatagaacataaatgactttgagttaggataaggatgataggatgggtgctggagatgccctgccttgcttatttgtttctgtgggggatttaatactataaatgaaaatggcttctgctccattaaaaagtaaaaattgtcctccaaatataaaactccttaatagatatttttgaaattaaaatctttaaattttataaatcagctgttgccactacacaactatgatggcatgtgcttataacatttttataacattccgtctgtgtctattccctaaatatcatgagtttataataaggaaagtgataaaaatacagtaatgaaataaaaatctgaatgtttctaagaaaggttttggaaggaaaaatgacctgaaatcagtgcgtactgcaaagtacagccaataatttttgttctttgttttcacccccaccctcactggaattctcaccaaaaatagtttgatacttaaaaaacagaagtaaatacttttctcaatattgttttggctatgcaaatatttgttttgcttaatgtcctccatttacacttctcagcaaatgtagttgcaaacaaatgctttctttttatttttcccttggtttgaggtatgtaaatagccaaaaatgtacattgaatttcacattgtaaaagttttattttatcccttgtatgatattactcaaaaaatccctgtgtatatgaaagtgcataataaatatatttgctttacagaaa

SEQ ID NO: 78935 - DNA, 677 bp, Homo Sapiens
agtaagaattatttattgtataaaagtggaaggttaattggtacagtactatacataatctctcacccttgaaaaattaaacataactggataaaaataacaaagcagaatgaaaacagaatattttatggagaatgttctgctatatttatgtactaatgttcttcaccattgcgtcttaatttttctgatttcttacaaaaatgaacatattttatcatttgataaatgtacatacagttctatatttttcattcaactcagctaactagctgactgaaactttcaactaaatgtagcactatttaaaaaattagagccttatctcagaaaatgcaacattgttctgtgaaatttgcacaatataatgcaaatatcttagcttttagtaataaattaaaaaatgccagccaccatcttatgacttaagcattatgaattagtcaaatgctatcttgtggaataaaatagtcatactaaatgtagagaaaagtgataaaagtttcaaaaatgtgtgccaggactaccttcattacttttatatttaattataaattagatgtttaaaaaactgagctactccctcacatgttctctcatataccagaaaagaaacaaagcattattattcttcagggtaactgtatcagaaagagaattactgcaaaaaacaaaac

SEQ ID NO: 78936 - DNA, 1621 bp, Homo Sapiens
acggccagtaactataacggtttaaggtagcgaggcctgggtggcgaattcggcacgaggagccctgacatcactgcttcgactggtgcagtctgatcacagtgctgtgcagcggcatcggcccactgtggtggaatgtctacgggaaactgatgcctccctcagccggagagccctggaactaagcctggctctggtaaatagctccaatgtgcgagccatgatgcaagagctgcaggcctttctggagtcctgccctcctgacctacgggctgactgtgcctcaggcatcctgctggctgcagagaggtttgctccaaccaaacgctggcacatagacaccatcctgcatgtgctgacaacggcgggcacccatgtgcgggatgatgcagtggccaacctgacccagctgattgggggggcccaggagctacatgcctactctgtgcgccgcctctacaatgccctggcagaagacatttcccagcaaccactggtgcaggtggcagcctggtgcattggggagtatggggacctcctgctggcagggaactgcgaggagattgagccccttcaggtggacgaagaggaagtgctggcattgctggaaaaggtgctgcagtcccacatgtccctgccagccactcgaggatatgccctcacagccctcatgaagctcagcactcgcctctgtggggacaacaaccgcatccgccaggtggtgtccatctacgggagctgcttggacgtggagctgcagcagcgggctgtggagtatgacacactcttccggaaatacgaccacatgagggctgccatcctggaaaaaatgcctcttgtggagcgagatggccctcaggctgatgaggaagcaaaggaaagcaaagaagcagcccagctttcagaagcagccccagtgcccacagagccccaggcctcacagctcctggatctgctagatctcctggatggggcttctggggatgtccagcatcctccccatctggacccctccccaggaggtgccctggtacacctgcttgaccttccctgtgtacctccacccccagctcccatcccagatctcaaagtgtttgagcgtgagggagtacagctgaatctgtctttcattcgaccccctgaaaaccctgctttgctgttaatcaccatcactgccaccaacttctcagagggtgatgtcacccatttcatctgccaggctgctgtgcccaagagtctccagctgcagctgcaggcccccagtgggaacacagttccagctcggggtggccttcctatcacccagctcttcagaatcctcaatcctaacaaggcccccctgcggctaaagctgcgcctcacctacgaccactttcaccagtcggtgcaggagatctttgaggtgaacaacttgcctgtggaatcgtggcagtaactgtctccactcacagcctgaaattctcctgtgtcccaaaccccagggggccccagcagcttcgaacctacacctgagggctaccagcaggtggcgctctggctttgcactgcaaaaactggggaccagcccccttctcccacaaataaagcccaataaagcctgagaagtgaggaaagccaaaaa

SEQ ID NO: 78937 - DNA, 726 bp, Homo Sapiens
  misc_feature (13)..(13): n is a, c, g, or t
gcacaaacgctcntggggcctcatgggggcagagcctcccctgggcctgcagagagtcctgttagcagcgacgtccccccgccgcggggtcctgtcagcccggcagtgtcttctcagtgtcttcacctgagcgagtgtctgtggccccaacgcgttctgctgtggctctgccctttccaggttgagaggcctgcaggagaaacacactcccctcctgggtttccacactcaggaggtcagaggactggctcctgtgaccagggcccctctcccctgaatgggaaaggggtctggggatgggagggcgcaccacagagaggagatgatgctgggtgtggcccatcttctgtgggccccttcccagacaccggatccatgggcactaacccgcctcccaggctgatgcccggaggcagcttcctgggcaggagggttccatgggcactaacccacctcccaggctgatgcctggaggcagcctccagggcaggaaggaccctgtgctccccgccccccatcctgacatcctgttcttttgcacttaccctgtgctgtgaatgtaacagtgggccttggccccgcccactctgatttgcattttcatttgtgtttgtttacacatccatgcactgcctgtagcagtcgattgtcacagcttcgacttttggatggtagagtgtgtgcactgactgtgagtcgaataaacaattgagacgatttccttcc

SEQ ID NO: 78938 - DNA, 466 bp, Homo Sapiens
  misc_feature (264)..(281): n is a, c, g, or t
aaatgaaatatgtcaggtttgtacctaccacatttaaaatagggacttgaagaattaaacattttattacaaatgaagcacttcatgcacagactggcacatagtaagtagtcgataggtgttaacaatttgtgttattgttattttctggagtccaactaacaaatcccacagtgaatgacatcacagggatgcaaccaacaagatccagaatatggaaacttctactagataaacaactccatttcttcagcaacaattcannnnnnnnnnnnnnnnnnagctatacattttaaaaggctgaagaaatatatgaaccaaatttgtatgaggcaatcagaaaaactgacaccgactgtattaaggaattatctaattttagtgtggtaatgagattgctgttatgttttctaaaaagtcattatactttagattttcataataaaataattatgaatgaaaaaaa

SEQ ID NO: 78939 - DNA, 1671 bp, Homo Sapiens
  misc_feature (1247)..(1247): n is a, c, g, or t
  misc_feature (1327)..(1327): n is a, c, g, or t
  misc_feature (1336)..(1336): n is a, c, g, or t
  misc_feature (1346)..(1346): n is a, c, g, or t
  misc_feature (1356)..(1356): n is a, c, g, or t
  misc_feature (1420)..(1421): n is a, c, g, or t
  misc_feature (1441)..(1441): n is a, c, g, or t
  misc_feature (1444)..(1445): n is a, c, g, or t
  misc_feature (1463)..(1463): n is a, c, g, or t
  misc_feature (1470)..(1471): n is a, c, g, or t
  misc_feature (1482)..(1482): n is a, c, g, or t
  misc_feature (1495)..(1495): n is a, c, g, or t
  misc_feature (1498)..(1498): n is a, c, g, or t
  misc_feature (1500)..(1500): n is a, c, g, or t
  misc_feature (1506)..(1506): n is a, c, g, or t
  misc_feature (1509)..(1509): n is a, c, g, or t
  misc_feature (1515)..(1515): n is a, c, g, or t
  misc_feature (1560)..(1560): n is a, c, g, or t
  misc_feature (1632)..(1632): n is a, c, g, or t
ctaactccctaggcctgagttagctgtttactgacatggtgctgtgtgtgagcgagtgacagaaggcccgaggaggccgactgggctgctggggcagggcccagggaggtggcagggaagggtgcctggctgggctttggggctggtgggataggagggtgcccctgggaacacagtgccccagtggtgcgggccaggtctggcgccaggggcaggcagctaggcagggagggggctgggaaagaacttggacttctaaaggcggagggtctccctgggcaccctgcaggcaggcagaccacagtgtggggggtgccccacaaggctcagccctgggcaaggaagctttggaagcagcaaggtgggggtcaggctacaggtgccccacctccccagagccctgcagtcacgtgaggcccctgtgcagtagagagcctttctccagcccatgctggctgtggccggggctgccgcatctgcctggagcctgggcagcacctccgggactgaccttcggcagtggctgggggactgctttcagtgcctgctgttcgtgactcagaaacagaagaaaaacactgagaaaaagcattaaaaataagccaaaataagactattggtaaacacctaaatttttgtaagaaaatttaaaaattaaagcagcaaaggaactttttgctttctgccactcaggtctggcacaaggggctggcttctcccttgggtcgggcctctgcccgtctggggcagggccctgggtggagggggtcccaggtgcccatctgctgtgtcctgcaaaggctctgtttctggtccctggggggccccaaacttgtccacttgggctcactggtctgtctatccataggagggggctggctgggggctacccagcccttgaccccaggagtagaatcttggctaggggctggtctcggtgcaggtgaactcagctagcacagggttgattcctgtcctgggcctgggaactgggcccttggagcctctgaggtggctagcagtctgaccccttggaggagatggggacagctctaggtgtaggtggacagaaaccagcactgcatcctcactcatgggccagggaggcaactacagggatgcgggagctggtctgagccattgcctcttctgtaagcaaggcccagtggggagtagggaaggagatgcttccactctgtgccacatggggcccaaaggggctggtgctgctgcggggtcacctgtcnccagcgcctgcttggtcagaaaggtgtgaatgctggctgactcctcttcgtttcccaggctggcagtcgtcccccatggngctaacaangtgccctggnctagctgcangagggctgacctctgcaccactgtggctgggacggcaatgggtcaagcgtgccacccagaaccnnagcagctaggggcccgcccntanncgtagcgtccgtcaaggngagcttnngatgttggtgncaagtcaaggcancangngactgnagntgaaangatgtataagctcgtgccgatttctggctcgagggcaattcctanatgagtcgataattcgtatcatgcaagctgttcctgtgtgaatgtatcgtcacatcacacacatagaccgancatagtgtagctgggtgctatgatgactatcaactatgg

SEQ ID NO: 78940 - DNA, 662 bp, Homo Sapiens
gcggccgccaccgagcgtgctgagcaaccgcagcctccgcggccgagagtgcagcgagcaaggggagagccagttgcgcagagccctgcaaccagcagtccagggagaagtggtgaatgtcatggagcccagctgaaatggactggcccccttgagcctgtcccaagccctggtgccaggtgtccatccccgtgctgagatgagttttgatcatcctgagaaaaatgggccttggcctgcagacccaataaaccttccctcccatggataatagtgctaattcctgaggacctgaagggcctgccgcccctgggggattagccagaagcaggcttgttttcctgctcagaacaaagtgacttccctgaacacatcttcattatgattcacaccaacctgaagaaaaagttcagctgctgcgtcctggtctttcttctgtttgcagtcatctgtgtgtggaaggaaaagaagaaagggagttactatgactcctttaaattgcaaaccaaggaattccaggtgttaaagagtctggggaaattggccatggggtctgattcccagtctgtatcctcaagcagcacccaggacccccacaggggccgccagaccctcggcagtctcagaggcctagccaaggccaaaccagaggcctccttcca

SEQ ID NO: 78941 - DNA, 541 bp, Homo Sapiens
  misc_feature (498)..(498): n is a, c, g, or t
gcggccgccaccgagcgtgctgagcaaccgcagcctccgcggccgagagtgcagcgagcaaggggagagccagttgcgcagagccctgcaaccagcagtccagggagaagtggtgaatgtcatggagcccagctgaaatggactggcccccttgagcctgtcccaagccctggtgccaggtgtccatccccgtgctgaggtaagaccccctgaagcccagcctgaggaagagaggacacaatgccttttttgcaggggcaggaggcagagggccttctcaggaaagaaggagcagttagttgtttctggttcagtcaaaccatctgcttcagcctcagcccgttgggaggcaaggtcaattggtggccaaagaggcttctgctttgtcagagcaggtctttggaatcttgatgggagttgtattttctcagttgctggtgaaatttgaattcccaagggaatacatttatcctccaggtaagactgcaccggattcangtgaatgcttaagtatacctcctctgctctgcaagggagctct

SEQ ID NO: 78942 - DNA, 1288 bp, Homo Sapiens
  misc_feature (34)..(35): n is a, c, g, or t
  misc_feature (67)..(68): n is a, c, g, or t
  misc_feature (119)..(119): n is a, c, g, or t
  misc_feature (153)..(153): n is a, c, g, or t
  misc_feature (158)..(158): n is a, c, g, or t
  misc_feature (160)..(160): n is a, c, g, or t
  misc_feature (173)..(173): n is a, c, g, or t
  misc_feature (195)..(195): n is a, c, g, or t
  misc_feature (200)..(200): n is a, c, g, or t
  misc_feature (1033)..(1034): n is a, c, g, or t
  misc_feature (1037)..(1037): n is a, c, g, or t
  misc_feature (1040)..(1042): n is a, c, g, or t
  misc_feature (1044)..(1044): n is a, c, g, or t
  misc_feature (1047)..(1058): n is a, c, g, or t
  misc_feature (1071)..(1166): n is a, c, g, or t
  misc_feature (1172)..(1172): n is a, c, g, or t
  misc_feature (1175)..(1176): n is a, c, g, or t
  misc_feature (1178)..(1178): n is a, c, g, or t
  misc_feature (1190)..(1205): n is a, c, g, or t
gctgacctcttgttttccctaccgcgtgtgccanntcccctggtgcgggtgatcgaggcatcccganntgcacctcccgggaccagttgggccgccagacagacttcggcatgtacgantacttcacacgccagtacggggatgagtccactntgccntnccagcaggcccgntacaacttcatccgaagcatgnccgcntacagcctcctgctgttcttgctgcagatcaaggacagacacaacggcaacattatgctggacaagaagggccatatcatccacatcgactttggcttcatgtttgaaagctcgccgggcggcaatctcggctgggaacccgacatcaagctgacggatgagatggtgatgatcatggggggcaagatggaggccacacccttcaagtggttcatggagatgtgtgtccgaggctacctggctgtgcggccctacatggacgcggtcgtctccctggtcactctcatgttggacacgggcctgccctgttttcgcggccagacaatcaagctcttgaagcacaggtttagccccaacatgactgagcgcgaggctgcaaatttcatcatgaaggtcatccagagctgcttcctcagcaacaggagccggacctacaacatgatccagtactatcagaatgacatcccctactgaggaggggaccttcgagggcctctgccccatgtgcccttgaagctgccccacaatcatggagccctgcgacctacccgccctgccgccacatgcagtggaggagaggcctgtggcccgaagagcctggtagcgcctcctggggcagcacgtgggtggcgcaggcttagtaacgccgtggactgcagcgacaatcagtggatggtgctgtctatgcacaggtgtgagtcctctgtttgcactggacatattccctacctgttttatttcataggtacatgaagtattgtgtataaaaaaagagataagatttaaccaacatcaacaaaataaaaacccaaaatagtgctgtgttggaaaannaanacnnncnacnnnnnnnnnnnnccacacaaaacannnnnnnnnnnnnnnnnnnnnnnnnnnnnnnnnnnnnnnnnnnnnnnnnnnnnnnnnnnnnnnnnnnnnnnnnnnnnnnnnnnnnnnnnnnnnnnnaacaanaanncnaaaatggggggnnnnnnnnnnnnnnnnaaaaaagtttttaaaaaaccttcttttgggggcggcggccccccacaaggaaaaaggaaaagggggctatactttgttccccc

SEQ ID NO: 78943 - DNA, 471 bp, Homo Sapiens
ggggggagacagtgatggggtgggtggtggggcagcaggcagagaaagagaagggaggaagtggaggaaggagccaagctggggcactgaacctggacgagccccactccgcccagctccagcttctgactcagagcaatggcggctctcgcccagctccctggggccggggcaggcaccctctacagcagaacagcttggtggccgacagttcggacctcagagctggaccctgacactcctggcagggtggtcctgggcattctcctctctgtggggtggggatccctatccacccctgggtgccggggtgaagggagaggagggtggcgctgtggctggctgaccgatgtggatgatatggcccttcttgtccagcataatgttgccgttgtgtctgtccttgatctgcagcaggaacagcaggatgctgtaggcggccatgcttctgatgaagttgtagcgggcctg

SEQ ID NO: 78944 - DNA, 1357 bp, Homo Sapiens
  misc_feature (83)..(117): n is a, c, g, or t
aaattgtatacatcatatagggcgctagctcggtctgcagccgaacgacgagcgcagcgagtagtgagcgaggaagcggccgnnnnnnnnnnnnnnnnnnnnnnnnnnnnnnnnnnncagtcgacggtaccggacatatgcccgggaattcggccattacggccggggagggactcgggtgcctggggcagacgaggccggcttctccgcggacagctagggagagtgtcctgggtgtcagccagaacatgtctttcaacctgcaatcatcaaagaaactgttcattttcttaggaaaatcactgtttagtcttctggaggctatgatttttgccttactcccaaagccacggaagaacgttgctggtgaaatagtcctcatcacaggtgctggaagtggactcggaaggctcttagccttgcagtttgcccggctgggatctgttcttgttctctgggatatcaataaggaggggaatgaggaaacatgtaagatggctcgggaagctggagccacaagagtgcacgcctatacctgcgattgcagccaaaaggaaggagtgtatagagtagccgaccaggttaaaaaagaagtcggcgatgtttccatcctaatcaacaatgccggaatcgtaacaggcaaaaagttccttgactgtccagatgagcttatggaaaagtcatttgatgtgaatttcaaagcacatttatggacttataaagcctttctacctgctatgattgctaatgaccatggacatttggtttgcatttcaagttcagctggattaagtggagtaaatgggctggcagattactgtgcaagtaaatttgcagcctttgggtttgctgaatctgtatttgtagaaacatttgtccaaaaacaaaaggggatcaaaaccacgattgtgtgccccttttttataaaaactggaatgtttgaaggttgtactacaggctgtccttctctgttgccaattctggaaccaaaatatgcagttgaaaaaatagtagaagctattctacaagaaaaaatgtacttgtatatgccaaagttgttatacttcatgatgtttcttaaaagctttttgcccctcaagacaggactgcttatagctgactatttgggcatccttcatgcaatggatggctttgttgaccaaaagaagaagctctaaagaccaactctatggctaaggtcatctgatacacagtgttacataatgcgtacttcaatgaagaaaagtatttttgtctgacagtggaatatatctggagaccacaagtaccactcctattctgttatctggactagaattttcaatcaatgtgtttgaaaataatgttgctatcacct

SEQ ID NO: 78945 - DNA, 1193 bp, Homo Sapiens
ggcatggtgactatagacccgcggttaaaaaaagcaggctggtactggtccggatatcccgggatatcgtcgacccacgcgtccgccacgcgtcgcccacgcgtccgcttcaaaacccctgcaatagctgggctttacacgacatttaccacctggggacccaaaagagaaggcctaggagagttttctagaaggttagggattgtcagggtcctggccccccagcaactggtcttgatcaagggccttatgtggagcagaggttgtctctgaatccaggagagacaggtactatacctttcaaatccccagggcagacacacccccacccagcccctatttggacctaaactgtgccatttgaacagtcacttccaagctcagtctaaatgaaaccgaaacgtgaccacgcacaaaggcagtcactgcctcgaggggtgcagaccgcagaattttcacagcaggggctcttggaactctggaaacccccttcttaaatttgggaggaggagtatgcctttggtgtccccctcccaaggggcaattctgaaccccatctttggcaggcatacatatttcactgtttccaaagctatctactctgccaaacaacacccagtcctattccaaactctcaacgattctatcttgttcctgtttttctatgtatttatggttgccgtttgtgtctgatttgattttactgttttttccctgattttatggagtagcattgtgacctgttttcctttgtcttatataactttagtaaactaaccactgtcaatgattgagggcaggtggcacgtggggaagaggggacttggcacgcagtggctacctgggcatttgtggtcatttcagtttccatctccccagcgggggctccctgggtgaaaggccacagtattttgggttggtaggcaaattgcaacattctggacatggcctgaggaaggcctcttcttataagattctcagaccaaattctagaccaaagacacaggcagaccaagtccccaggccccgcctggaaggaagtcgttcctcaactctccccaaggcacctgtctccaatcagagccctctcgcccagccagccctggctctgtgtgcagagcatagctctgcgagtacctgtgtaataatgctcaaccttcatgtctccgtataaacgaaactttccatgagaa

SEQ ID NO: 78946 - DNA, 2109 bp, Homo Sapiens
  misc_feature (51)..(52): n is a, c, g, or t
  misc_feature (145)..(145): n is a, c, g, or t
  misc_feature (158)..(158): n is a, c, g, or t
  misc_feature (164)..(164): n is a, c, g, or t
  misc_feature (178)..(178): n is a, c, g, or t
  misc_feature (181)..(181): n is a, c, g, or t
  misc_feature (186)..(186): n is a, c, g, or t
  misc_feature (249)..(249): n is a, c, g, or t
  misc_feature (286)..(294): n is a, c, g, or t
  misc_feature (311)..(311): n is a, c, g, or t
cgacgttcgactgaagcgcatgcgcagcatatttgatgtcactcatagccnncgcttcacttatctccgctgttgtgttgatttgagcgatacattcacacagaacagctatactgatacgattatcgactcctataggaattgncctcgagccaganttcgcnacgagtgtaatacntcntagcnttgagctctgttactagccattgtgagcttcagtttcttcatctgcaaaattggcataatacnatctatcgtgccacatcaaggatttgttattcctgtnnnnnnnnnccataccaaaagaagcntacaatgttggccttagccaaaattctgttgatgtcaacgttgttttattcacttctatcggggagccatggaaaagaaaatcaagacataaacacaacacagaacattgcagaagtttttaaaacaatggaaaataaacctatttctttggaaagtgaagcaaacttaaactcagataaagaaaatataaccacctcaaatctcaaggcgagtcattcccctcctttgaatctacccaacaacagccacggaataacagatttctccagtaactcatcagcagagcattctttgggcagtctaaaacccacatctaccatttccacaagccctcccttgatccatagctttgtttctaaagtgccttggaatgcacctatagcagatgaagatcttttgcccatctcagcacatcccaatgctacacctgctctgtcttcagaaaacttcacttggtctttggtcaatgacaccgtgaaaactcctgataacagttccattacagttagcatcctctcttcagaaccaacttctccatctgtgacccccttgatagtggaaccaagtggatggcttaccacaaacagtgatagcttcactgggtttaccccttatcaagaaaaaacaactctacagcctaccttaaaattcaccaataattcaaaactctttccaaatacgtcagatccccaaaaagaaaatagaaatacagtgaacccctagatagtcggaaccaagtggaggtgctaaccacaaacactcatagcttacacatgtgggctaccccttatcaagaaaaaacaaatctacagcctaccttaaaattcaccaataagtcaaaactctttccaaagacgacagaaacccaaaaagttctgcgattagacaatgcaccggaaccttatgatgtgagttttgggaattctagctactacaatccaactttgaatgattcagccatgccagaaagtgaagaaaatgcacgtgatggcattcctatggatgacatacctccacttcgtacttctgtatagaactaacagcaaaaaggcgttaaacagcaagtgtcatctacatcctagccttttgacaaattcatctttcaaaaggttacacaaaattactgtcacgtggattttgtcaaggagaatcataaaagcaggagaccagtagcagaaatgtagacaggatgtatcatccaaaggttttctttcttacaatttttggccatcctgaggcatttactaagtagccttaatttgtattttagtagtattttcttagtagaaaatatttgtggaatcagataaaactaaaagatttcaccattacagccctgcctcataactaaataataaaaattattccaccaaaaaattctaaaacaatgaagatgactctttactgctctgcctgaagccctagtaccataattcaagattgcattttcttaaatgaaaattgaaagggtgctttttaaagaaaatttgacttaaagctaaaaagaggacatagcccagagtttctgttattgggaaattgaggcaatagaaatgacagacctgtattctagtacgttataattttctagatcagcacacacatgatcagcccactgagttatgaagctgacaatgactgcattcaacggggccatggcaggaaagctgaccctacccaggaaagtaatagcttctttaaaagtcttcaaaggttttgggaattttaacttgtcttaatatatcttaggcttcaattatttgggtgccttaaaaactcaatgagaatcatggtaaa

SEQ ID NO: 78947 - DNA, 666 bp, Homo Sapiens
  misc_feature (104)..(104): n is a, c, g, or t
  misc_feature (632)..(649): n is a, c, g, or t
atttaaggctgctaagccatgttcagcattgtaaatgtggtctatcctgacatacagtgtataacaacataactccttggaacctcctatgtgtggtataattntactcttccaaggaacatgacttcaatactttcagtgattcaggtactgaaaagccttacctaaaaggctgttctttgtttccccctttcatactattcttttccatgacccaggatgcagcaaatgaaacagatttcttctcttaaggggatattaagactgttacttcctagtaagccaagtaataccatatttttattaacatctaacttttgtagatgggtgctaaaattgcatacattttaaccactaaaatagaaaaacaagtggtgctattatgtctcatggcaccagaaatgagctagcacttgggtttgttgttgctgttgtttattaagagtattgtgttaattaaatcattacatacttgaagttatattacaaaaattctagaaggttgattgaactatttttttaggaactaccatcaagtgtagcattttcttgcagttttaaaatgaggaaaacttctttgaaactgtgaaatgctccatgtggtaactggctgctgagaaaacccttcaccnnnnnnnnnnnnnnnnnntgaataggattgtcatc

SEQ ID NO: 78948 - DNA, 598 bp, Homo Sapiens
  misc_feature (212)..(212): n is a, c, g, or t
  misc_feature (228)..(228): n is a, c, g, or t
  misc_feature (249)..(249): n is a, c, g, or t
  misc_feature (251)..(251): n is a, c, g, or t
  misc_feature (256)..(256): n is a, c, g, or t
gaggctgaagcgggccaatgaaaccccggaaaagcggccggcccgggtcatccgagagcgagaggccaagcggctcaagaggaggctggagaaaatggacatgatgttgcgagctcagtttggccaggacccttctgccatggcagccttagcagctgaaatgaacttgttccagctgcctgtaagtggggtggagttggacagccagcttntgggcaagatggcctntgaagagcagaacagcagctntntgcantgaaccacaccctcctgcctgccctcccttcccacctacctacccacccacccacacccacagccacgaggaccagtgctgctgccacccacgaggccctgtccttgctgccagaggcaggcctgggtttattgcaggtggacctgagcagcccttgcatatgggaacaggatgatggggtcaggagggacctggctcaaggcagctctggacaagggagcaggcagtccagagaactggcctccccagcccactgccacaggctgtgcttctaggactgtggggcccctgtgtggcccatgaagttgtgaagtcaaataaattaattttatctttaaaaaa

SEQ ID NO: 78949 - DNA, 905 bp, Homo Sapiens
  misc_feature (44)..(54): n is a, c, g, or t
tttttagtatttcaaatcactctatttacaagtttatcttttcnnnnnnnnnnngtaaaagatacagtaattcaacacaattcaagtttttcttttcttctttaaagttccctaacaaggaattccagaaacaggtaacactctgaagcaacgctgccatccaaggggctcctggggagcttgacggtccatcggtttgtagtttgtctagagtcacccttgcaatgacattcacatgtggaagatacggataactctgttgtttgcaggccaagtgaatttgaaatctccaggtagtacttccccatccaagacagtcttccacaagatccagcctcttttcaccagcaaattccctttttcagagggtactcatcccaccctccaaccttgggtttcttcctgaatcacaatggcctatattagtctcaagccttgaaagactgagaaataattccctttttcagagtggcagtgaacatagatgtgcttttaaactataggccatacggttagcctaggaattaaccttgaaaaccaccacagcaccagtgttcagcagcccagagtagggcaagggggctggccagtggtgggttagaggcaggcaagggtgggagcagagatgggtgaatgggaggacatggggaaaccagtcagatggcatcacccattgggaggcagcatcttaccctttaaaaaacaaacatcagttgcatggaggaacagaaatattaagactatgtaatttaatctcaagaggttactagggtgtgctccaaatatattccgatgctgctgaaattaatcagaaagggaacagttcccagctactatcccatctgcctcaagtagaccaccctaattccttgatcctgtgcttcaagttgttagaaaaccattca

SEQ ID NO: 78950 - DNA, 734 bp, Homo Sapiens
acagaaaacagcatccaactgttacataacaggatggggtgacacaggacgagcctattcaagaacactacaacaagcagccattcccttacttcctaaaaggttttgtgaagaacgttataagggtcggtttacagggagaatgctttgtgctggaaacctccatgaacacaaacgcgtggacagctgccagggagacagcggaggaccactcatgtgtgaacggcccggagagagctgggtggtgtatggggtgacctcctgggggtatggctgtggagtcaaggattctcctggtgtttataccaaagtctcagcctttgtaccttggataaaaagtgtcaccaaactgtaattcttcatggaaacttcaaagcagcatttaaacaaatggaaaactttgaacccccactattagcactcagcagagatgacaacaaatggcaagatctgtttttgctttgtgttgtggtaaaaaattgtgtaccccctgctgcttttgagaaatttgtgaacattttcagaggcctcagtgtagtggaagtgataatccttaaatgaacattttctaccctaatttcactggagtgacttattctaagcctcatctatcccctacctatttctcaaaatcattctatgctgattttacaaaagatcatttttacatttgaactgagacaccccttttaattgaatcagtggtgtctgaaatcatattaaatacccacatt

SEQ ID NO: 78951 - DNA, 632 bp, Homo Sapiens
  misc_feature (90)..(102): n is a, c, g, or t
ctacaacaaacaatgtttgcaatcagaatcaagaaatagcctcgagacattcatcactaaagcagtgatcgggaaggctctgagggctgnnnnnnnnnnnnngatgttaacagaaaccaatcttagcaccttttcaaggggtttgagtttgttggaaaagcagttaactggggggaaatggacagttatagataaggaatttcctgtacaccagattggaaatggagtgaaacaagccctcccatgccatgtccccgtgggccacgccttatgtaagaatatttccatatttcagtgggcactcccaacctcagcacttgtccgtagggtcacacgcgtgccctgttgctgaatgtatgttgcgtatcccaaggcactgaagaggtggaaaaataatcgtgtcaatctggatgatagagagaaattaacttttccaaatgaatgtcttgccttaaaccctctatttcctaaaatattgttcctaaatggtattttcaagtgtaatattgtgagaacgctactgcagtagttgatgttgtgtgctgtaaaggattttaggaggaatttgaaacaggatatttaagagtgtggatatttttaaaatgcaataaacatctcagtatttgaagggt

SEQ ID NO: 78952 - DNA, 1041 bp, Homo Sapiens
  misc_feature (29)..(29): n is a, c, g, or t
  misc_feature (77)..(77): n is a, c, g, or t
  misc_feature (96)..(96): n is a, c, g, or t
ctctgcaccagctacatttgtcgtgtatntttgattgacgtacatcaccaggacagttgctgtacgattatcgctcnttggggattgcctcgagcnagaatcgcacgaggataagcagagagacctgagcagacccccataggagatatatgtataaaaagtgtcaatcaaggtgtgctaccaaagatattttgagggggttacttcccagccatctcactgtacaagagctgcacggttccataactttggacccatgctcaaagtatcctccgaagatctcactacccgccctatgagtgacataggctggggcgccgtggtagagcacaccctggctgacgtcttgtatcacgtggagacagaagtggatgggaggcgcagtcccccatgggaaccctgaccaggtccctcttttctgtcaaggactttctgggaataatactgggggttttgtttttgtttttgaactgtctcaaatgttctcccaaagatgctaaaaacacagcctctccttttagcaagttaaaaggctgggtaggactgcgggagactgcctgcctttcaccattttctccccacttccagtgactgctcttattttgtgtaccataagccaacaaccgctgactccaggattgcataagccccctgtgaaatcggtgctgtactgcataccctgccagctgtgacttgttatcctactatattttctaaggagtgaataatattgtccgagtaactaacttatttaaaagacatttccttctgtgggcattgactgtatcccacctgttttccaaggaaatggtaacctgtttctgagaacacctgaaatcaatggctatacattccaaaccaatctaaacgctatttccttttggtgtgggtttggttttgttcattttgaaatacacttttgaacactgagatccgtaaaactactagatctctggaagtgtaattgtgaaagaaacttgcttgcagctttaacaaaatgagaaacttcccaaataaaacttgttttgaagtttaaaaaaa

SEQ ID NO: 78953 - DNA, 1878 bp, Homo Sapiens
atacggcagtagcaggccgggtgtttaaattcggcacgaggcttgatttccgcctgatcctggtcggcagggtggggtttcttggcattcctcaggccgggggatgcgacgtctgggtgtggaggtgatgagctaggggttctgtggcactccggctctgctcagggcgacctgcgtaggggcctctggggcaggcccgctttctgtcaaaatggcagcgcccagcgtgcgcgggtatctctgaagttggggtttaagattcttgcccgtgagagcgaacgagcctgccgtacttctgattttgaaacacctgggtctgggcttcccgggcgagcggtggaacctgtgagaagtttctacaatggtgggctcagctctcaggagaggtgcccatgcatatgtctacctggtgagtaaggccagtcacatctccagaggccatcagcaccaggcctggggatcgaggcctcctgcagcagagtgtgccacccaaagagctccaggcagtgtggtggagctgctgggcaaatcctaccctcaggacgaccacagcaacctcacccggaaggtcctcaccagagttggcaggaacctgcacaaccagcagcatcaccctctgtggctgatcaaggagagggtgaaggagcacttctacaagcagtatgtgggccgctttgggaccccgttgttctcggtctacgacaacctttctccagtggtcacgacctggcagaactttgacagcctgctcatcccagctgatcaccccagcaggaagaagggggacaactattacctgaatcggactcacatgctgagagcgcacacgtctgcacaccagtgggacttgctgcacgcgggactggatgccttcctggtggtgggtgatgtctacaggcgtgaccagatcgactcccagcactaccctattttccaccagctggaggccgtgcggctcttctccaagcatgagttatttgctggtattaaaggatggagaaaagcctgcagctctttgaacaaagttctcgctctgcgcataaacaagagacacacaccatggaggccgtgaagcttgtacaggttgatcttaagcaaacgcttaccaggctcatggcacatctttttggagatgagctggagataagatgggtagactgctacttcccttttacacatccttcctttgagatggagatcaactttcatggagaatggctggaagttcttggctgcggggtgatggaacaacaactggtcaattcagctggtgctcaagaccgaatcggctgggcttttggcctaggattagaaaggctagccatgatcctctacgacatccctgatatccgtctcttctggtgtgaggacgagcgcttcctgaagcagttctgtgtatccaacattaatcagaaggtgaagtttcagcctcttagcaaatatccggctgtgatcaatgatatttcattctggttgccctctgagaattacgcagaaaatgatttctatgacttagtccgaacaattggaggagacctggtggaaaaggttgatctcatagacaagtttgtacatccaaagacgcacaagaccagccactgctaccgcatcacgtaccgccacatggaacggactctgtcccagagagaggtcaggcacatccaccaggccttgcaggaggctgcagtccagctgttgggtgtggagggcaggttctgatgtcaccacttcactcaggctgcagccctcttggggctccaggatttgctgaaagagaaaaagatatggtttgtgaactggggcatcaatcatcttttgataaatggatcagttttaggactttcagaaaataaaagatcgctcttgaaaagctaaaaa

SEQ ID NO: 78954 - DNA, 993 bp, Homo Sapiens
  misc_feature (12)..(12): n is a, c, g, or t
attttaatattntgtattttcaacttataaagataaaaatatcctcagggggtggagaagtgtcgttttcataacttgctgaatttcaggcattgtgttctacatgaggactcatatatttaagccttttgtgtaataagaaagtataaagtcacttccagtgttggctgtgtgacagaatcttgtatttgggccaaggtgtttccatttctcaatcagtgcagtgatacatgtactccagagggacagggtggaccccctgagtcaactggagcaagaaggaaggaggcagactgatggcgattccctctcacccgggactctccccctttcaaggaaagtgaacctttaaagtaaaggcctcatctcctttattgcagttcaaatcctcaccatccacagcaagatgaattttatcagccatgtttggttgtaaatgctcgtgtgatttcctacagaaatactgctctgaatattttgtaataaaggtctttgcacatgtgaccacatacgtgttaggaggctgcatgctctggaagcctggactctaagctggagctcttggaagagctcttcggtttctgagcataatgctcccatctcctgatttctctgaacagaaaacaaaagagagaatgagggaaattgctattttatttgtattcatgaacttggctgtaatcagttatgccgtataggatgtcagacaataccactggttaaaataaagcctatttttcaaatttagtgagtttctcaagtttattatatttttctcttgtttttatttaatgcacaatatggcattatatcaatatcctttaaactgtgacctggcatacttgtctgacagatcttaatactactcctaacatttagaaaatgttgataaagcttcttagttgtacattttttggtgaagagtatccaggtctttgctgtggatgggtaaagcaaagagcaaatgaacgaagtattaagcattggggcctg

SEQ ID NO: 78955 - DNA, 1524 bp, Homo Sapiens
  misc_feature (179)..(191): n is a, c, g, or t
  misc_feature (1311)..(1361): n is a, c, g, or t
gggttgttcagcttcaataatatagagatctaacatagtcagtcctcaggccccctaaagaaacaagcaagaaagtgagggccatcactagggttggctttggggaggggaaaactaaggactgcttttgccaaatgatatttttgataatgtaaggaaacacagggaccacaaaaccnnnnnnnnnnnnnaagtgtgaaagattagtgccttttggcatacttttgattttagaggatatagtatcggcattgacaaatcacgtagaaacaaagaatgctatagatgacaacagtattaaatgttactcctgattctgcagaacagcttttgaagatactggggggtatcttcaagcctcagagcagcttgtttcagatagaaattctctatgggttgaaatgccaaaaacagaaaacatgatgttgactcatgtaatttagtccattttagcagagcctttagtgttaacaccagtggcgaggagcattgcatattctctgtcagcagcagcactcccacaccaggtggttctgggctctctgtaggctggtcctagtaggtgacacccagcaacacccctgttggacaggattgattgttcgcagtcttagaccaacacttcagtcagaaatgttactgggaggaggaaaggaaaatcactttttttcctccatgtggaaatgaggagagaggaaagtggattgcaaaccaaaatgtgagtcagtgtgatgaagcagtggctctgtcatctcggcctttatccaataacaaaccagcatctcttaaaggcgcttttggcctagacacccctgaagtttggatgaagtctggtggattccctgtccgttgtatttctgtgtgcctgttcccttcattgctgtgagttgggagtgcattgagagatgatgtccatctgatatattcctgtgaaataaactgccagcaaactttctaacttgtattttaactgttaaagaagagattaaaaacttcggctttggacatgtccacattatggactgtcatcttatttttaaaagtcattctttacgtttaaaattttaaaataaaaaccttctgaggtattgatgtagtccaccgtgtaaatgttaccttctctccatgctgccattatgccaaaacaaaagctgtgataaaaaaagtgcttgagagagtgtgttgataagaaagtgatttatttacagatggaagtctttgtttcatgaagctaccaaactttaaaaagaatgtcacccttttttttgtttgttatggaaaccagagattgtaaaatggaaaaagaatcgnnnnnnnnnnnnnnnnnnnnnnnnnnnnnnnnnnnnnnnnnnnnnnnnnnncatatatctgtgtataaaaaaattgttgtttactatggaattagtattacattttgaggtaaacaaaagaatttgtattgcttgataaatattagcttgtaaatttaaagtttctttacttcaattaacttaaaggaccaataaacccataaaagatgctttc

SEQ ID NO: 78956 - DNA, 213 bp, Homo Sapiens
gttgactttttgatgctggcacgaggtttttgtccacttttttcatatatctgtgtataaaaaaattgttgtttactatggaattagtattacattttgaggtaaacaaaagaatttgtattgcttgataaatattagcttgtaaatttaaagtttctttacttcaattaacttaaaggaccaataaacccataaaagatgctttcttaaaaa

SEQ ID NO: 78957 - DNA, 1346 bp, Homo Sapiens
gtagcgaggcctgggtggcgaattcggcacgagggccattgccgccatcgtcgtggggcttctggggcagctagggctgcccgccgcgctgcctgcgccggaccggggcgggtccagtcccgggcgggccgtcgcgggagagaaataacatctgctttgctgccgagctcagaggagaccccagacccctcccgcagccagagggctggagcctgctcagaggtgctttgaagatgccggaggccccgcctctgctgttggcagctgtgttgctgggcctggtgctgctggtggtgctgctgctgcttctgaggcactggggctggggcctgtgccttatcggctggaacgagttcatcctgcagcccatccacaacctgctcatgggtgacaccaaggagcagcgcatcctgaaccatgtgctgcagcatgcggagcccgggaacgcacagagcgtgctggaggccattgacacctactgcgagcagaaggagtgggccatgaacgtgggcgacaagaaaggcaagatcgtggacgccgtgattcaggagcaccagccctccgtgctgctggagctgggggcctactgtggctactcagctgtgcgcatggcccgcctgctgtcaccaggggcgaggctcatcaccatcgagatcaaccccgactgtgccgccatcacccagcggatggtggatttcgctggcatgaaggacaaggtcacccttgtggttggagcgtcccaggacatcatcccccagctgaagaagaagtatgatgtggacacactggacatggtcttcctcgaccactggaaggaccggtacctgccggacacgcttctcttggaggaatgtggcctgctgcggaaggggacagtgctactggctgacaacgtgatctgcccaggtgcgccagacttcctagcacacgtgcgcgggagcagctgctttgagtgcacacactaccaatcgttcctggaatacagggaggtggtggacggcctggagaaggccatctacaagggcccaggcagcgaagcagggccctgactgcccccgcccgggcccctctcgggctctctcacccagcctggtactgaaggtgccagacgtgctcctgctgaccttctgcggctccgggctgtgtcctaaatgcaaagcacacctcggccgaggcctgcgccctgacatgctaacctctctgaactgcaacactggattgttcttttttaagactcaatcatgacttctttactaacactggctagctatattatcttatatactaatatcatgttttaaaaatataaaatagaaattaagaatctaaatctccccatataaaaa

SEQ ID NO: 78958 - DNA, 1180 bp, Homo Sapiens
  misc_feature (231)..(286): n is a, c, g, or t
  misc_feature (1077)..(1096): n is a, c, g, or t
aggctggaccggtccggattcccgggatgtcgtggggcttctggggcagctagggctgcccgccgcgctgcctgcgccggaccggggcgggtccagtcccgggcgggccgtcgcgggagagaaataacatctgctttgctgccgagctcagaggagaccccagacccctcccgcagccagagggctggagcctgctcagaggtgctttgaagatgccggaggccccgcctnnnnnnnnnnnnnnnnnnnnnnnnnnnnnnnnnnnnnnnnnnnnnnnnnnnnnnnntctgaggcactggggctggggcctgtgccttatcggctggaacgagttcatcctgcagcccatccacaacctgctcatgggtgacaccaaggagcagcgcatcctgaaccacgtgctgcagcatgcggagcccgggaacgcacagagcgtgctggaggccattgacacctactgcgagcagaaggagtgggccatgaacgtgggcgacaagaaaggcaagatcgtggacgccgtgattcaggagcaccagccctccgtgctgctggagctgggggcctactgtggctactcagctgtgcgcatggcccgcctgctgtcaccaggggcgaggctgatcaccatcgagatcaaccccgactgtgccgccatcacccagcggatggtggatttcgctggcgtgaaggacaaggtcacccttgtggttggagcgtcccaggacatcatcccccagctgaagaagaagtatgatgtgggacacactggacatgggtcttcctcgaccactggaagggacggtacctgccgggacacgcttctcttggaagaaagggggcctggctgcggaaaggggaaagggctactgggctggacacgtggatctgcccaaggggcgcccagaattcccaaacacaccctgccccggggaacagcctgcttttgagggcacccccctacccaatcggttccctgaaataacaggggaagggggttggaaccggcccctggtagaaagggcccatttaaccagggggccccagtcacaccgaaacccaggggcccctagaattggnnnnnnnnnnnnnnnnnnnntttctcgggggttttcttcaccccaaaccctgggaacactcgaaagggtgccccaaaacaggcgtctcctcgcccggacccctt

SEQ ID NO: 78959 - DNA, 882 bp, Homo Sapiens
tggtcattgtgcttgagatttagcagtgcctcattccaatctgaggattgctcgtcgggatattaactggatcctatggactcttacctgcaagcctgcgggatgctacaggatggtacatgtgtggcaaccttaacaggccatgatgatgaaatactagacagctgctttgattacactggaaagcttattgcgactgcttcagctgatggcacagtcaagaattttctagtgctgcctacaagtcaatgcattgccaaactggaaggtcatgaaggtgtcagtttcaaagatttctgtcaaccctcaagggaaccatcttctaactggcagctctgacaaaacggctagaatctgggatgctcagactggccagtgcctccaggttcttgaggggcacactgatgaaatcttttcatgtgctttcaactataaaggcaacatagtcattacaggcagcaaggataatacctgtaggatatggcgttgactgaaggaagctggtcagtgagcaaccttgctagcaatggtaatcaagaactggaacttcacagacagcagctctcttaatatttcttatactttctctttttctgcaagtcaactatttctacaactgtccttcatttcacagatatgaccattaaacatgacaaagttatgccactctcaatattattatttgatggcgatggcaggacacagcataatgtttggctaatgccaccagttatttcagtagtgtttgttttgttaaaagtcattatgatacgtgaaaaaggagaccagaacaactaaacaacgggtctcctggattttactttgaagcctattgttataatttctgttgaataaagtgtttggaggaaattccttgtaaaa

SEQ ID NO: 78960 - DNA, 642 bp, Homo Sapiens
gggcccggcagtgcccaaggatgggtccggggcctcggggccaatgagcgcctcttcctaggtgctgggattcagtccccaaacacagcgggaggggtccctggggcagatggggctttaccagcgtcgggtggtttagttcgagtcccttttgtggagaaagggagatgaaaactgaccacgtgccaggtgtggccgaagcccccagggagggccacattcggggagcggggggtcgggggagggccaccgactggctctgctgccagcacaggcccctccctggaagtcctcgggagcggagcgcggatcggcacgggctctgggctccccgtggagagaagctgtagtttttaccaaattgtgtacatctgggcagatgtttaatttctgtgactaatcactgaactagacgaatgttaaattttttatgtctgaagcctgagtctattttggatctgtaaataatcattgccagtgtgacttttgttcaacaaaaggattgtactgtattaagaaccgatgaaaaaaattctcctgtaacatttttttaagaaaactttgtttgtttaaagaaaaagtattgtataaattataatttttatttaaataaacctaaaatgctttgtgctaaggctcaaa

SEQ ID NO: 78961 - DNA, 860 bp, Homo Sapiens
  misc_feature (617)..(660): n is a, c, g, or t
  misc_feature (787)..(787): n is a, c, g, or t
ggagcgagcctgggtggcgaattcggcacgagggctgtgacccctgccctttccccgccagagacctcaggctctcagcacattccacaggctcctgagtccccgaggcctgggccagcttgggcaagccaagatcagatgtctctgtgttcgggaaggtctccgtgtgggaaagcccttgggggatcccgggtgaggagtgttgccccatccagagaatgaatgagttcctttaagtgccaccgccagcaagcccagaggcacacagtccgagtgcacccgcttagcctttacattcctctccaccgacaaaaggaaggggaaactcaatcagcaggacttcagaaagggccttgtgtttatagctttgtcaagtaaatttggacgcagctggagcacaggccctgtttgtttgcacataataatcttgtttatcactttaaaaaattcagtaatatctcagcagtcaggcttctggttgtgaaatcacattgtatgggatttataccaaattatgtatttgctaaacattcactgcacacgtgtacagcggagtacgaaaaggaacgttgtccacaggggatttatggatacaacagcaaacattttataaactnnnnnnnnnnnnnnnnnnnnnnnnnnnnnnnnnnnnnnnnnnnntgcaaacatagccacttttttgtcaagagttaccctttggggctccttaaaccagaatgggagtttgaaagagagatcatactccagctgaagtttgttgacccttttctaaaattaaaaagatcanatttagtatttgctggatatgcagggagatgagactctttttatctcaaaataaacagattctttcaggaacg

SEQ ID NO: 78962 - DNA, 1176 bp, Homo Sapiens
agctaggtacgaggctgggtggtgaattcggcacgaggggcccctccttctcccgtccccaagttccctgggtgggaacggggtcttggggtccctgactgggtggccagaccccgaagccagcgctgggaagggctgcggatgcccgggtcagaggaaggggcaggtccaaggacacgcgggtctggtcctgggcaagaaccgccccctctccgggcctgcttcagtcttcctttgcagaacaacgggccaggccccttccctctgcccccgggtgcttgaagtctagccccatcctggtccaatgcgctcttggtagcctcctttcccagctgcccgcccgccgccatgccgcccttactgcccctgcgcctgtgccggctgtggccccgcaaccctccctcccggctcctcggagcggccgccgggcagcggtccagacccagtacttattatgaactgttgggggtgcatcctggtgccagcactgaggaagttaaacgagctttcttctccaagtccaaagagctgcacccagaccgggaccctgggaacccaagcctgcacagccgctttgtggagctgagcgaggcataccgtgtgctcagccgtgagcagagccgccgcagctatgatgaccagctccgctcaggtagtcccccaaagtctccacgaaccacagtccatgacaagtctgcccaccaaacacacagctcctggacaccccccaacgcacagtactggtcccagtttcacagcgtgaggccacaggggccccagttgaggcagcagcaacacaaacaaaacaaacaagtgctggggtactgcctcctcctcatgctggcgggcatgggcctgcactacattgccttcaggaaggtgaagcagatgcaccttaacttcatggatgaaaaggatcggatcatcacagccttctacaacgaagcccgggcacgggccagggccaacagaggcatccttcagcaggagcgacaacggctagggcagcggcagccgccaccatccgagccaacccaaggccccgagatcgtgccccggggcgccggcccctgaggggctcacctggatggggcctgcagtgcgttcccgctttgcttccttccctggacggcccgctccccgaaacgcgcgcaataaagtgattcgcagaaaaaa

SEQ ID NO: 78963 - DNA, 1236 bp, Homo Sapiens
  misc_feature (531)..(662): n is a, c, g, or t
  misc_feature (1038)..(1083): n is a, c, g, or t
atgtccacagctgctgtcacacctcaaagtgaccagggacttcggatgccattggaccctagacaagccagggccactctgagccctccctatctatcacaggaagggttagactgaggttcctaaccctgtgtaagggtaaaaagctgtgaggcccctagagtggggtggaagggggcaggacttcagggacagcaggaattggattcccagggttaattgtgacccattgcaggaaggtgaagcagatgcaccttaacttcatggatgaaaaggatcggatcatcacagccttctacaacgaagcccgggcacgggccagggccaacagaggcatccttcagcaggagcgacaacggctagggcagcggcagccgccaccatccgagccaacccaaggccccgagatcgtgccccggggcgccggcccctgaggggctcacctggatggggcctgcagtgcgttcccgctttgcttccttccctggacggcccgctccccgaaacgcgcgcaataaagtgattcgcagnnnnnnnnnnnnnnnnnnnnnnnnnnnnnnnnnnnnnnnnnnnnnnnnnnnnnnnnnnnnnnnnnnnnnnnnnnnnnnnnnnnnnnnnnnnnnnnnnnnnnnnnnnnnnnnnnnnnnnnnnnnnnnnnnnnnccgacaccacccgcagtagcgagcacacgaaggccgaccaccaaaaagagggcgcgtcaattaaaccaagacgacgaggctagcggagcgacgagaacaaacaaaatacgcagcatagcgacaaaaagcgacaacgcagacacacatcgacaaacgacaccacccaccggtgggggacggcccaaagtgggcaccacaccaccaaccaaagaaaaacaagctcagggagaaacacacaaaacacaagcgggcgatggccgtggaaacaacacgaacgaaaacagcggccagaaagaacgagcgggcacaagagcaaactcgctaaaaaacaaacaaacggggagcacataaaacgaaaagcaatacaaccaccgcnnnnnnnnnnnnnnnnnnnnnnnnnnnnnnnnnnnnnnnnnnnnnnacaaaaagacaaagcagaagaagaggactgagacccagagggaaaccgaacacgccgcacgagagagcgcgaagacacgaagagccgaagaaggaacaaaagagaaagcaaagaaggaaacaacgaaaagcggagcaagagcacaatacaaaa

SEQ ID NO: 78964 - DNA, 601 bp, Homo Sapiens
ccctaaacgtcctaagtagcgaggcctgggtggcgatctcagcacgaggcttcagtcttcctttttgacaaacgggccaggccccttccctctgcccccgggtgcttgaagtctagccccatcctggtccaatgcgctcttggtagcctcctttcccagctgcccgcccgccgccatgccgcccttactgcccctgcgcctgtgccggctgtggccccgcaaccctccctcccggctcctcggagcggccgccgggcagcggaaggtgaagcagatgcaccttaacttcatggatgaaaaggatcggatcatcacagccttctacaacgaagcccgggcacgggccaggtctgtccctgctctattctgctccctgctccctgtccaggaaccacacttcgggatccctatcccaaccacccaggtgccctctcctccagggccaacagaggcatccttcagcaagagcgacaacggctagggcagcggcagccgccaccatccgagccaacccaaggcccccagatcgtgccccggggccgccggccccctgaggggctcacctggatggggccctgcagtggcgttcccgctttgcttc

SEQ ID NO: 78965 - DNA, 512 bp, Homo Sapiens
ttttcacagaggaggtaccaggggcatcagtaaagaccacagcaatccaacgcacacacacaagtgtccactgactgcatcctcctcatgctgtcgcgcatgggcctgcaatacattgccttcaggaaggtaacgcacatgcacctgtaccttcacggatcatcaggatcgcattatcgcagccttccccaaccaagcccgggcacgggccaggtctgtccctgttatactctgctccatgctccccgtccaggaaccacatttggggatccctatcccaaccacccaggtgccctctcctccagggccaacagaggcatccttcagcaggagcgacaacggctagggcagcggcagccgccaccatccgagccaacccaaggccccgagatcgtgccccggggcgccggcccctgaggggctcacctggatggggcctgcagtgcgttcccgctttgcttccttccctggacggcccgctccccgaaacgcgcgcaataaagtgattcgca

SEQ ID NO: 78966 - DNA, 617 bp, Homo Sapiens
tttcttggtgcggcgctgcctttaataagtaaggagaggctccagagaccaacttcaagcagctcttatcttgagagacacaagagtacgggccacgaggtgctgtggaggactggctgaccacactggaattcacccaccctcctgccctctgcccatcaccccggggagaacaggcatcacctgaaggcaatgtagtgcaggcccatgcccgccagcatgaggaggaggcagtaccccagcacttgtttgttttgtttgtgttgctgctgcctcaactggggcccctgtggcctcacgctgtgaaactgggaccagtactgtgcgttggggggtgtccaggagctgtgtgtttggtgggcagacttgtcatggactgtggttcgtggagactttgggggactacctgagcggagctggtcatcatagctgcggcggctctgctcacggctgagcacacggtatgcctcgctcagctccacaaagcggctgtgcaggcttgggttcccagggtcccggtctgggtgcagctctttggacttggagaagaaagctcgtttaacttcctcagtgctggcaccaggatgcacccccaacagttcataataagtactggg

SEQ ID NO: 78967 - DNA, 1220 bp, Homo Sapiens
cgcctccttcccgctttttgagttacagggagtcgtagtgtggtcatttacaaggaggaattgtggtcatcagtaacaacagaaagccctcagtaaactcccgagggattgcaagctggctcaagctggcccctcagctctggactgcctctgcaaggtcagaagggttgtttgtggagtctgggctgggcagcactgcctagaatatcatgctgtctctgtcacccaagggtgtttcttgaggaggggtggctctctcgtcctccagctggaggccctggtaccctgttctaggtcactcttcaagatggggcctaccttgcatcaatcccacaaagggagctgtatggtgggtggtggggaatctgggagagaaaccttagtaatgctgggaaggagcagcagagtctggggaccacccggtaaatggcacattcctgacacctggctgttttgatgttgcttatttcagaagcagaattaggtaagcaaaactccccggtgtgactgagacacacagaaggcacccatacccccacctccagcctgttgacagtaccattttgtagcagttttactactgtgtgatttttgtttggacatctgaagtagagcttgttttgtttttaaataagaatattcacaaattaaaaaccagcggtcctatttgaatcctggggttagctgagtgagcggctgatgatagaaatgagaaatagaacaaaatagtatgtgccgtaggtagcttaagaaagtctcagatattttgttgctgatcaaatactgtttttttgtggcttcacttgtaatcccccctgtacttacctactcacattggagagttctgaggccggagtaactgtgtccttgaaacacgtttctaattggaatgccagggttcagtagccgtccccccggaaaggggtgaccttttgctgtgcttgatgttgcatcagcagcctagggttctgtttagactaaaatcttggccagagctccttgccatctgctaagaagactggggctgagtagttaagccagccttctgagaggtggctgttggtcaggacgggaagctggtgaccttggcatgtcttggcagcagctagatcaggccctcggcagagacacaggaagcggaactgctgtgccttaacttggctgtggagctggagctggagaaggcagcatactgaccagtggctttttgattgattgtt

SEQ ID NO: 78968 - DNA, 688 bp, Homo Sapiens
ggaagagtcatgaagaattcccccgtgaagacgttgctagtcccaccttcagctccctcctggatgttttctgtcgaccacagttttctgacgctgtccaccacctgcttcctgaagtacgaggcggccaccgtgcctcccccgcccgccgccctggcggtcttcagtgcagccctgctgctggaggtctgtccctcgcggttccatcaggatggtttcttcctggaggacgtcatggcctgcaccaagcgcctgctggagtggatcgccggctggctaccacgtcactgcatcggggccatcctggtgtcgcttcccgcactggccgtctactcccatgtcacctccgaatatgagaccaacactacacttcccagctgttcacaggctcggccgcactgattgccgtcgtgcactacagtaacttctgccagctcagctcctggatgaggtcctccctcgccaccgtcgtgagggccgggccgctgctcctgctctacgtctccctgtgcccagacagttctgtattaacttcgccccttgacgcagtacagaatttcagaagacgagaaccctgtggagagggagactccaagtttcccttcagttcacaggaagagagttgccgtgcaggagcctaattgtaaatttgaaaaaattaaaaactgcttatgctctgtcaattacc

SEQ ID NO: 78969 - DNA, 959 bp, Homo Sapiens
gtgtgaagacattcacaggacacagagaatgggtacgtatggtacggccaaatcaagatggcactctgatagccagctgttccaatgaccagactgtgcgtgtatgggtcgtagcaacaaaggaatgcaaggctgagctccgagagcatgagcatgtggtagaatgcatttcctgggctccagaaagctcatattcctccatctctgaagcaacaggatctgagactaaaaaaagtggtaaacctgggccattcttgctgtctggatccagagacaagactattaagatgtgggatgtcagtactggcatgtgccttatgaccctcgtgggtcatgataactgggtacgtggagttctgttccattctggggggaagtttattttgagttgtgctgatgacaagaccctacgcgtatgggattacaagaacaagcgatgcatgaagaccctcaatgcgcatgaacactttgttacctccttggatttccacaagacggcaccctatgtcgtcactggcagcgtagatcaaacagtaaaagtgtgggagtgccgttgattgtgtctccttcggcccctcctccctcttttcctctggatgcactctgatgataccatggttaccccattgagctctgtttaaataaatattgtcctttcatgtaaattattctggatgtagattgagcttattaaatgttacacacaaagtattcatgcatggtgaatccaaattgtatactgtaaatttacatacgttgtctagaagtaccatagggtttaaaaacctgggctggcattggtcacaccaggcctaagaaggcagaagttgaatcaattgaactagggcactaaactgaatagttgacagtgtcattttatgttggattattaattcctgtttttctttctgctatctgacggtgcctgacttgatggcctcatttggggaaaagtggtg

SEQ ID NO: 78970 - DNA, 1107 bp, Homo Sapiens
  misc_feature (516)..(541): n is a, c, g, or t
gctaattgatgtaatatactgctctaaagattactgccccataagtaaatagtatagccacattctgaacatatcaaaagtacaaacttaggaggagtgtatgtacaaaaatgtaaaattttatgaaaatgaacatgtttttatgatgttatttctagttcataagaatgtgatgactgctttgcttcatttatgtacgttcccattatattcttgctgtcaatcaatcacaaatttatatcagattaggataaactaagccattttatgtattttattttaaaccttattttggcagagtaattccttagaattggaaaagctgttactttgaaattaccaatttattacaaaacatagaaatgtattgtagctacaaagacaaccaagcattttctgtgttttaatgaatatctaaaaaactacatttagtttattttactcagttttgaaatgatttttttactggctctattgccttaaaataactaagagattaatgattctttgtataannnnnnnnnnnnnnnnnnnnnnnnnnacatttcgcagagttatatctatagttttagtaacaatttcttatgtattctggataactgaaaacaactaaaggtgttgggcgttagaaaataattgtgagcagtaagattactgatgtaatatgtatgttggactgaagtatttctttataaacattctatttgattttaagcaaaatgtatgttaaagcatgtttttacatcagtaaagtcatttgtcgaccttctggaaatgaaaggtttttacctagatactgtaagttacacctccttaacaatcatatttgtcattgttgttttctgcaaacaaaaatgtttatgggcttcatgtaggcttaagattgtaggcaaaaatggactgagttcaggacccttcaagcagtaggcattcagttacagagcagttggtactttgtaacccagacttacagtttaaaaatatcaagttagctgatgtttcattataataaaaatactattttgcttaagagttgtattacaaatatttgtgcttaacattagaaatagctgttttaaattgtagttaacatattaacttaaaaag

SEQ ID NO: 78971 - DNA, 374 bp, Homo Sapiens
gccatctgcatgtctcaaatacgttcaccaccccccatacaccacctaagaagtcaatgcaaactttcacccctttgactaatataaaatgagtattcctggaggcagtcatccccaaagaaaatggggagtggcaaagcaacagggcaaggtgttcctgtttcaaagcggtgaagaacaaaatcgcacggacaattttgagctgcaaaaattggccccaggaaacttctgagcttgggagataaaaggcagaacctggaattgtagcatccaaggacaaaaagaatgtttgccagcaaatcttggctgtcaattttaaaggggccgtgggcggggcggaggggggcgggtaggattccaacaaaaaatgagta

SEQ ID NO: 78972 - DNA, 670 bp, Homo Sapiens
gggaacaataaccaaaatacagccctgccattttgagttcattataaggattttccaaagaaagacccatggccagtaaatacattcatgacaaacaattttcaaggtgaaaagcatcttgtccttgaaggttaacttttctcctctgtgtcctcccatgcataaagctgagagagttaactttacaaagaagtaatcaaatagatgaaaaataccccctaccaaggtagcccatgtaagaactaaggaaccaccaaaatcacgcatatcagttcaggagagaaagttatcatttagctgtttgacacgttgaatcttttccaaaagcaatgaagctagttcttggagtgcagaagctctcttgtgctgggccacttccctggtctcaaccaagagagagttggctccactaaagcagaaattctcagtcccatccacaatcactgacttcttctaacaagtcttctgaaaatctctttactaatttctgaaatgaaattcagaaataatataacctacctatgcatataatttttaaaatcagtgtaaggtctaaattgaaacataaagtagaaataatttacactaatacatatataacattaataatgaataattattatattaatagccttacaataaataaattggtttttaaatacagtaaaaa

SEQ ID NO: 78973 - DNA, 1019 bp, Homo Sapiens
  misc_feature (87)..(87): n is a, c, g, or t
  misc_feature (116)..(116): n is a, c, g, or t
  misc_feature (200)..(200): n is a, c, g, or t
  misc_feature (221)..(221): n is a, c, g, or t
  misc_feature (242)..(242): n is a, c, g, or t
  misc_feature (257)..(257): n is a, c, g, or t
cgctctttttggattgacggtacattccccagaacattgactgtacgattatgactccttaggattgcctcgagccagatcgcacgngtgacgtcccttggatgaatgaagctgangacaagcaactcctacgagatcaatctttgctgtgtgggaattgcagagcctgagccatcatcccagggtatgcccacagagantgaagccccccaatatatgcntggagatgagggcagccagtntaatggacttggtcncatgaatcaagctgcatccatgtggaggctcccgccagctctgaccctgcaggactggccagcccagcgggcaccatctcctaccgagccccagagctcttcctctgtgcagagtcactgtgtcatcgatgagcggactgatgtctggtccctaggctgcgtgctatatgccatgatgtttggggaaggcccttatgacatggtgttccaaaagggtgacagtgtggcccttgctgtgcagaaccaactcagcatcccacaaagccccaggcattcttcagcattgcggcagctcctgaactcgatgatgaccgtggacccgcatcagcgtcctcacattcctctcctcctcagtcagctggaggcgctgcagcccccagctcctggccaacatactacccaaatctgaaaaagcagcatgttgagaagatggccccttgtgccttggaaagaggttcccatccctcattggaatcaccacccattccatccaggacttctcttacacttgagggtagcggggtcaggacaatcatctcagtcctgcatcttttcttctgctttcttccctccaagagcaaaacctgggcaaggggacttactgagtgggggtgggtgggggttgggaaaagggaaactggtgggatatggaacatggctctgagcaggactgttgagctcacatagtgttctgactccaaatctgggagcaggagaatgtgtaaacaagaataaagtggaagcaggttggtgtagaaaaaa

SEQ ID NO: 78974 - DNA, 749 bp, Homo Sapiens
ggcaagccacgtggggcaccttggcttcccggcaggaggtggacacccagccagaggcctggctcaaggtgacctcaccttcaccatgggcttcctgggtgcgcgggcatgagcgcaggttgttttgtacatattggaatatgtgttaacttatgccccgcatcccaactcacacggaagcacgggtcttgtctcagtctcttcgctgcatttggaaagcagtctcctctcgggccagcgccgggctgaggtgtccagaggcggcggcagctggcagtgccctcagcccccaagtgtccagcctggcacttcccattcaggccacctgctttgggtcaacagttcctttgccagcagcatctcctaaattgtaaggactctgtccaccggggccctcccagggctgtgaggacggaaacaggcagggagtggagctaacagcttagtcaccaggacccccagacctgcaaacgtcccctcctggaaggggaagccaggaacagcagaactgcccacaaaacaaggctgtgaacttttcgggaactggaactgtttaacttgaacccaggattgtttaaagctttatttatttatagcttcttcttaaaaaaaagtgttgaagaaattttttggttattcatacaaaaaaatgagttgatgatggaaaagcaagtcataatcatctaattgtttttgtctaggtcgagaatgaatgttagctgatgaaataaaccctgacaaggaaaaaa

SEQ ID NO: 78975 - DNA, 759 bp, Homo Sapiens
  misc_feature (40)..(40): n is a, c, g, or t
  misc_feature (97)..(97): n is a, c, g, or t
  misc_feature (480)..(490): n is a, c, g, or t
tgctcgtatttcctttgataggagtagcaatgttaggatnacatgagccagatttggttttatgtaaaaaaaatctttcagttgatgagttcttgtntaaattgtattgctgtggcaatttcttattgtaataatatgtaggagaatttctaatttgaatccctttatttacagaaagctcactgtaaatttgtaggaatgtcatggtactaccccattaagttatttttattagtgtttagttattgattcagcagtctctaattgtgccaaaaatggtgcttagattagattgccattgctacccatgggagctgctacttaattattcccacctcaaattcccagctctcaagttagcactactcctttgcaatttactccttctctgctcgtataaataccctcagatgatgatagttggtggccactatacctttgaagaggttgcccacttctacatggaaaggaaaagatggnnnnnnnnnnnaaaagatgaatttgataattaacttgccactatttcaccttgtgatgaaacctcaattttaaacatagtgttaattgttttattgtccacagaattaagggtaagtaatgtcatacaatttttgtctttagtcttttagtatggtttctttaacttctattgagcttctgttgcagatattggacatgggcgtatcttctaacgatgtcgtcaccattagtatattcttcctgctaaaaataaatatcaaaccctgaagcctgaaaaaa

SEQ ID NO: 78976 - DNA, 808 bp, Homo Sapiens
  misc_feature (165)..(180): n is a, c, g, or t
  misc_feature (453)..(462): n is a, c, g, or t
ccagtatctaacactttgtagagatacttacatataatgtaagtccacacctacccagaggaatggataactgttaaagtgttaataatagctcgtcttagttgatttcagcataatttacattagggagacctaaaaagcaccttcaaagtattaaaagcaccnnnnnnnnnnnnnnnncctaaaaaagcaattaaaatggtcactgctaacatttattaaacttcatgttagttgatgaaacagctggagggaagctgccacatctcctagctaagcagtctgacttacctgttgggaaacaaagggatattgctctaagattgattaggatgattgtagctagagtcttgaattctatctgtatacggcagagaaactttatagagtgtagagaggtgagcgaaaggatgcaaaagcactttgagggctttataataatatgctgcttgnnnnnnnnnntgtgtagttgatactcagtgcatctccagacatagtaaggggttgctctgaccaatcaggtgatcattttttctatcacttcccaggttttatgcaaaaattttgttaaattctataatggtgatatgcatcttttaggaaagatatacatttttaaaaatctattttatgtaagaactgacagaggaatttgctttgtataatgcaggctggctttacaaaagcactgtagcaaatttactacaagtctaaaagtatacatatatgttaatagatatatgtgcaactagatatggacagcagttgtatttttttaaataaatatttttaacaaaatgaaaaaaaa

SEQ ID NO: 78977 - DNA, 911 bp, Homo Sapiens
aaaaaattttttaattaaattcaagtcaaatttgcagaaccctgtatctcctccatagattcttagtattccatggaacatattttgaaaaccttgggatagatgatccactgaaatcttttccagctctaagattttaaattgtccttttagattagacttgctgagtttaattcagattacctaattttaaaatgtttctgaaaagtgaacagagttaccttacagagttttggatctttccagggatagccaatgatttaatcccccagaatccttcacctttcaaggagttatttaacaatgagcccagtgactcaatagggcccaaacctttttattttacaatatgagctccaagacacttactgatctactgtgaatataaaatgttattagccttatcaaataaataaatgagcacagctctttgttcgctctattgaactgggtgataattatttagatgtgaatgttaggtcagttctactgtaataactaatcgtaaaagttgtaaatttgtttaatggatgaaatgtacactttttgtattctgtacagctttgtcttttttaaatatgaagtacttaaatgtacttactatgataggaaatataatgtgtgccttctaggatttgtgaagtggtttcatgaactctaaggaatttgttttccctatcctaactcagtaacagagggtttactccgattatgtatagaaccttagtttgagaaaatgaattttactatgtactgaatttagaggttgagaataataggatctgtgttattcttagtacccactgataaattgtgcaataaataatctttcgcaagtgattttagctaattgaagagattattttcctatgtaatttcacattctaatatactaaatgtttatattcctt

SEQ ID NO: 78978 - DNA, 1105 bp, Homo Sapiens
  misc_feature (533)..(652): n is a, c, g, or t
  misc_feature (673)..(697): n is a, c, g, or t
  misc_feature (783)..(792): n is a, c, g, or t
  misc_feature (945)..(1054): n is a, c, g, or t
cccatatgtagcaaaaatcagggctgggggagagccgggttcattacctgtcctcattggtcgtccctatgaattgtacgtttcagagaaattttttcctatgtgcaacacgaagcttccagaaccataaaatatcccgtcgataaggaaagaaaatgtcgttgttgttgtttttctggaaactgcttgaaatcttgctgtactatagagctcagaaggacacagcccgtcctcccctgcctgcctgattccatggctgttgtgctgattccaatgctttcacgttggttcctggcgtgggaactgctctcctttgcagccccatttcccaagctctgttcaagttaaacttatgtaagctttccgtggcatgcggggcgcgcacccacgtccccgctgcgtaagactctgtatttggatgccaatccacaggcctgaagaaactgcttgttgtgtatcagtaatcattagtggcaatgatgacattctgaaaagctgcaatacttatacaataaattttacaattctttggnnnnnnnnnnnnnnnnnnnnnnnnnnnnnnnnnnnnnnnnnnnnnnnnnnnnnnnnnnnnnnnnnnnnnnnnnnnnnnnnnnnnnnnnnnnnnnnnnnnnnnnnnnnnnnnnnnnnnnnntggggggccccccggcccccnnnnnnnnnnnnnnnnnnnnnnnnnggggcccgggccccaaagggaaagggaactggggtttattttttccaaaagaaatccgggcaaaaaaaaggggttggtttcccccnnnnnnnnnncccccgggggaaccgggggtttttaaaaaaaccccaaggggggttccggggccttttgtggctccctacaagggggcccccggggggctttatttaaaatttggccccgggggcgggagattttcggaaaaggtgggtggaattctttatcannnnnnnnnnnnnnnnnnnnnnnnnnnnnnnnnnnnnnnnnnnnnnnnnnnnnnnnnnnnnnnnnnnnnnnnnnnnnnnnnnnnnnnnnnnnnnnnnnnnnnnnnnnnnnggggaaacaacggggcggcgaaaaaacttgtccctttttggcgcccgtttt

SEQ ID NO: 78979 - DNA, 607 bp, Homo Sapiens
gctacccaccctcatagcatccggaggaatcttagacatttctgttcaggtcatggtcctgtttaaaccctcagtgactccctggagaccttggtccagagcatagcttcttaacaaggcccctgcctctctgcacagcctcatatcctgccaggcaaacacatttattcttctggttgcctcccaagctcccgcccagctcttctgaaacactgctatcttgctccttccatcttttgcttaggttttctcttcctgggctactcaatcccctcaacacatacatccacactgggcatcctccacaggacttccaaaataccctggacctctctttgtactcaccccattccattaccatgatctgttttggaatctgtttctcccatttatttgtgagcccttggcagataggggtggcacatctgtgtgttgtgcacatctgtgtacatatctgtgatgaattcgttgtttggtatatgtgctgtgactgttacatttaactgtattggtatatatgttttgtatttctatcatttaatcaacatttatgtgtcagcctctaagctaaatttaacaatgtcaaaataaaaccaaccaaacaaaa

SEQ ID NO: 78980 - DNA, 1263 bp, Homo Sapiens
  misc_feature (91)..(91): n is a, c, g, or t
  misc_feature (883)..(883): n is a, c, g, or t
  misc_feature (1037)..(1078): n is a, c, g, or t
atgctgacaagggggattaaagtcatctcctatggagatgactatgccgatcttccagaatatttcaagcgactgacatgtgagatctccnacaaggggtacatcagcagggatggtgagagaaggtcagctaaatggctcatctgcagcacacagtgaaataagaggctgtagtacatgagcgagctagagaaatcaccaccgtttagaccaagctgtaaggccctactacagacagtgtttaacatgagcgagctagagaaatcaccaccgtttagaccaagctgtaaggccctactacagacagtgtttaacaagtaaacttacaagaacccaacacaattcccagaaagtaacaatagccagaggttgaagggcggggtagaagaggggggaatgttgcagcgtaatccttcataccacctggttcttgatattctgccgcctgttcaagttcaagaataaaagcgacagcaggacccaaatgcagctcccaacccactccccaggctagacatgcttgtgtccacacagcacaccaatgtgatacttccactgaccggctgcagctctgcatgaaggactcggggtctggatgccatggaatcactgtggctcttgttgcagttttgtactctatacttggtttttcaattaagcttaatggcttttttaaaacatgacttgaagctctagttttctagatcttttacagtgtacagtattttacataactaagctgtattaaaagcttgttcatttacttgccaggaccctggctctacttttagagtcattgtaagaaactctaacttgcatcaaggtactaataagcttaattttaataacccaaagtttaaaggttccgatctttctccttggnggtggagtgatctcattctcaggacaaccgtttacttacctgattcctcggagcattatcaacttctgctctgttgtcctgaccatacatatgtcccagaactacagttaaatgtgctgcgggattctacgcttgaatcccgcactgcaaaccnnnnnnnnnnnnnnnnnnnnnnnnnnnnnnnnnnnnnnnnnntgggttgtttgccgcggccccccggcgactcttcgcgctttactccttccgcctcgcggcctccttttgcgcccgccccccctcggcagtacgcggcgactccgaatcgccgcggcccgtgcgtttgtccctttttattccctgaccggcgcggccccattcggggtgttcagccgtcctcggcc

SEQ ID NO: 78981 - DNA, 1064 bp, Homo Sapiens
  misc_feature (1008)..(1020): n is a, c, g, or t
tggaaatacaagcaagtttaattctccatcgtaaggttggagctcctgtctgtgaaaggactggaaatgtaaaatgcgctcttcaagtacaaaggcagagaggatccataaacaggcacaggctgccctttggtataaactgttcacattaaatctatgttatgttgctcaagagttaaaataagctcaaaggagaggctgattccaatgtcaacccagggaagacagacactgaaattccaaactgagttaccaaaaacaatagatggatgagacatgcagacatgccacaatccggcacatcagagttcgatgtagtcctgctgcaaacacatggaatccgagaagtccaatgcaaacggaatagatttcttgggatctaatatttttcaaattgcctgaccagcttaccttctaggaaaacttatttaagggaggcaaataatttggggagatgagtataagaggtagtaggaggaagctaagggaaatcaccactacatattgcaggaatgtattagaaggcaaatatggcccaaagaaaaagctccactgaaaaaaacattgaatactgaccacagaattagcaccttgctcccaggtcaataaagtgaaccaaaaaaattacaaagaccttgctcaatcctgaggttcgtgaggaatacaggagagttgtgtgttcacgtgactcctgaaaacaaagagcagtactattcgaagggcatgatgtcttgatcttaggatcaaatattctagaccttgagccggagaatctgcattacagtaggaaaaatggggagtgctttatgcctgtggattcaggacacaccagcaacctacacgtgtagcattctctaagtcataatgaccattctcatctcccactgagggcaggtgtaagactcttctcttgcagtgctctgatagaaagctgggtttcttcttcttctctataaatcatagggaaaccaaatatttgtacctgttacagccccaaagctgaaagcnnnnnnnnnnnnngcctacagccgcggccgcaagcttattcccttgtagtgaggtta

SEQ ID NO: 78982 - DNA, 1533 bp, Homo Sapiens
gaagcattgtctatacagtgtaaaaaagcaggctggtacggtcggaattccgggatatgtcacccacgcgtcgccacgcgtcgcaaggcaagcgccggtggggcggcggcgccagagctgctggagcgctcggggtccccgggcggcggcggcggcgcagaggaggaggcaggcgacggccccggtggctcccccccggacggtgcgcggcccggcccgtctcgcgaactcgcggtggtcgcgcggccccgcgctgctccgaccccgggcccctccgccgccgccatggctcggccgctagtgcccagctcgcagaaggcgctgctgctggagctcaaggggctgcaggaagagccggtcgagggattccgcgtgacactggtggacgagggcgatctatacaactgggaggtggccatcttcgggccccccaacacctactacgagggcggctacttcaaggcgcgcctcaagttccccatcgactacccatactctccaccagcctttcggttcctgaccaagatgtggcaccctaacatctacgagacgggggacgtgtgtatctccatcctccacccgccggtggacgacccccagagcggggagctgccctcagagaggtggaaccccacgcagaacgtcaggaccattctcctgagtgtgatctccctcctgaacgagcccaacaccttctcgcccgcaaacgtggacgcctccgtgatgtacaggaagtggaaagagagcaaggggaaggatcgggagtacacagacatcatccggaagcaggtcctggggaccaaggtggacgcggagcgtgacggcgtgaaggtgcccaccacgctggccgagtactgcgtgaagaccaaggcgccggcgcccgacgagggctcagacctcttctacgacgactactacgaggacggcgaggtggaggaggaggccgacagctgcttcggggacgatgaggatgactctggcacggaggagtcctgacaccaccagaataaacttgccgagtttacctcactagggccggacccgtggctccttagacgacagactacctcacggaggttttgtgctggtccccgtctcctctggttgtttcgttttggctttttctccctccccatgtctgttctgggttttcacgtgcttcagagaagaggggctgccccaccgccactcacgtcactcggggctcggtggacgggcccagggtgggagcggccggcccacctgtcccctcgggaggggagctgagcccgacttctaccggggtcccccagcttccggactggccgcaccccggaggagccacgggggcgctgctgggaacgtgggcggggggccgtttcctgacactaccagcctgggaggcccaggtgtagcggtccgaggggcccggtcctgcctgtcagctccaggtcctggagccacgtccagcacagagtggacggattcaccgtggccgactcttttccctgctttggtttgtttgaaatctaaataaaactactttatgagaaa

SEQ ID NO: 78983 - DNA, 621 bp, Homo Sapiens
  misc_feature (12)..(12): n is a, c, g, or t
gccagcccctgntgggttcagaggccgaggaggcactggaggctgctggccgtttcctactgcctgggctggaggaggagctggaagaggccgtgggccgcatccacctgggaccccagggtggcccggagtcagtgggtgaggtgttccgcctgggccggccccggctggctgcccactgtgcccgctggacactggggtcagagcagtgcccgaggaagcggggtctggccctggtggggcttgtggaggcagcaggtgaagaggcagggcccctgacggaggctttgctggctgtggtgatggggattgagttgggggcaagggtccctgcctagactgttgacgtcccctgggaaggggacccaaggatgaattggctgtgaaggatcctccctgagactggcaagggaggaggctgagcagaaggagtcatcatggaggagcggtgagaacatggaaccggactccaagatgacgatctaaagacccgggagcgagaagccaaggccaggttctgggtgtagggcccagagaagcagaacagcccagagccccaggtgcctggcctggcctagacctctggaattgagattaaacaatttggagttggaaaaaaaa

SEQ ID NO: 78984 - DNA, 865 bp, Homo Sapiens
atctctgtacgtgtgtgtattgaggaaatgctttactgactcagaggaaagatcatgaattctccattggcaaaaccacctctgtcctttcggcaaggctgcatacttccaggcagacgcaccttcacgagaatgctcagctgggcggctccacgctcatccagtgggcctaggttctgactgaccagcgaacaaaaactgtgacagagatctaggatttcattcaggcagtgaaacacctacccgggaaacagagttggcattaggaaaggaaggaaggtacatccatgaagttaaagtgttaggagaacagtctgattaatagctgatctaattaatagctgacctcccaaatctgacaggatagacactgccacgtgcaaggcctgccagcccctcagacgcacaaaatgcgtaaaacaaatgcatcctttcctggctaagcgagtattactctcttagccctgcaccaaacctccaatctagccacatttaactcttcatttcttagacccgcagagtgtcttcctgcctctgagctgtgagtgttgttccctttgcccgggatgctcttgtttttaataccagttcaagtcccactctctcagtgaagcactcccttccccactatagcctttagtgaaccctcgtttcttgcttctttattatctgtactgttgtccacttggcaattgttcaggcctctgtgttgttactgatttttgtatgtatatatatatatatgtcttgtttttccaactagattgtgagctccttaagggcagagccatgaattatacctctttgtatccccagtgccttgcatacagtaagcactcaataaatatttaatgatgatgaaaaa

SEQ ID NO: 78985 - DNA, 1639 bp, Homo Sapiens
  misc_feature (1567)..(1587): n is a, c, g, or t
cttgactaattgtagaactttgtgtgaggactttggttatccaaaatcacagaaatgaaccgttttgcagctgcgcagtctaaagggcaggccagtgtctggaagcagggcccacgtggcggtccgctggcaggctggtcctggggagcattctgcggacccggtcacgggcttggttagtcatgcgtacatgtgtgccttggggtgctctgcactccacggcccttctcagccacacttcccaccccagggggtgcccccaggctgatctcatttctgatgttgagggctgtttggctctgtctgtatagcttgtaacaggagccttgggctaggggctggggaaggaaagccgagctggcattcgttctctggactttttatgcctgccatacccgctaatgctcctcgaggtgcaggagcaggttgctgagccagtggctgccccgtgccctccttcccagcactatcatgtgtcacgtttcccggactctgcccctacatctcagctgaatctccagggaggctgcagagcatcgtggagaccactttctgcctcggcctttaaatgctgactcacctcctctcgggagaggcgtcctgtcttcacgggggggtcccggtggcctccagacgtagccatttcctgacatcaagatgttgaatgtaatctggtctgagctgggcctgtgggaggggccgcctgaagcctgtgcgctgttgtcctcgcagatgtacctatttttgttcatgatacgggcgttccgttccttaaagatgtatatattttcttactgtacataaagatgttccttaagtcgtacagaaggtggcgcggcaaagggcctcgtgcagtgtgttcagattgcccctggggatcttctgtgtcttcagcgcccagccctgcgtgttcctggtgaagcagtttcacatcagtctctccagatagcactacgatgtattccgcttctgaacaggatcccatgccagtgtggaacaccttcccaatcttagttcagaagtggcttgtatgacctgttcaggggtcacatgaggtctcgccagtttcctgggtcctcttcagaggccagaaagttctaagttctgagtccccggccagggtcccttaacacctcggcacagaggctgttggcaagtgtagaggctgcctctgtgtgtggtttaagtaaactggaaatgagacattgacgtgctgctcctccagaggtctgcacactccacttcacatgccgttgactctcacagtctaagacttcagggccgggacctttgtccagcctgcacagtagagtgaggctgcctctcccgccaggcattgggatcccatttagaaacggcattcacttcagaaggtactttttaactgctcagtttttgactattttaaatagtttgctgaaaactcctgataacacttgctacatatcatgttttaattgcttgtacagttaacctttaattttatttagtaaagtgtatcaaagtaggacttttttgaattgtaaataggtggttttattaaataaaagtcaatgtaaaattgttnnnnnnnnnnnnnnnnnnnnncctgagcaggcggccgcaagcttattccctttagttgaggttaattttagct

SEQ ID NO: 78986 - DNA, 1126 bp, Homo Sapiens
gcaggacagaagcactgtaaagggctctccagccgcagctcagctgcactgcgttccgaggtgaagtcttgcccctgaattttgcaaaatgggaaagtgggcgcttgcccaagggccaggctgcatggattctcacatcagagttctctggccctagaaaggcttagaaaaggcataagggaactcataaaggctagcagcatgcggtattttaactttctgcctcggcctctgtggatgcagaaatctgccctacaaaatgctcttcattggttgtctctgtgagagcactgtccccacccaacctgtcacaacggccagaaccatacaccagagacacactggcaggttaggcagtccttctggtgatcctattccattccctcctgctgcggtttctcttggcctgtcctcactggaaaaacagtctccatctcctcaaaatagttgctgactccctgcacccaaggggcctctccatgccttcttaggaagcagctatgaatccattgtccttgtagtttcttccctcctgttctctggttatagctggtcccaggtcagcgtgggaggcacctttgggttcccagtgcccagcactttgtagtctcatcccagattactaacccttcctgatcctggagaggcagggatagtaaataaattgctcttcctaccccatcccccatcccctgacaaaaagtgacggcagccgtactgagtctgtaaggcccaaagtgggtacagacagcctgggctggtaaaagtaggtccttatttacaaggctgcgttaaagttgtactaggcaaacacactgatgtaggaagcacgaggaaaggaagacgttttgatatagtgttactgtgagcctgtcagtagtgggtaccaatcttttgtgacatattgtcatgctgaggtgtgacacctgctgcactcatctgatgtaaaaccatcccagagctggcgagaggatggagctgggtggaaactgctttgcactatcgtttgcttggtgtttgtttttaacgcacaacttgcttgtacagtaaactgtcttctgtactatttaactgtaaaatggaattttgactgatttgttacaataatataactctgaaatgtgtg

SEQ ID NO: 78987 - DNA, 522 bp, Homo Sapiens
  misc_feature (504)..(504): n is a, c, g, or t
gcgaccgagggttaccccgcctggcgcctgcctccagctcggggctcagcctggcggaccccgagcagccccggccccatccccgcccagagccgggcgtccgtgtgggtccgtgggtgataattgagagcgtcagacccaggactgttcagggaggagccccggtcagactcccacgtgtgaagaccgggccccaagtggcaagggctggcctgggcgggcagcttgggtcctggacgttgataggaagcggaaggggaatcgcgggaagctggcccaggtcaggtccgcaaaggcttctgaagaagaggaagggcgagtaggggcacctggacgctgatggtggccaggatgctcagctggccaggagggcagcacctgctggggacggtggccctggctttcatgcccaggacaccagctgggtccagctagcagccactgggaatcagaggaatgggggtgcctagccaagttgcagtccccgccccgcctagtcctcgngtctagcaatgctcacgc

SEQ ID NO: 78988 - DNA, 963 bp, Homo Sapiens
  misc_feature (833)..(845): n is a, c, g, or t
gcggccgcagggcttccccgcctggcgcctgccctccagggctggggcctcgcctggcgggaccccgcagcagccccggccccatccccgcccagagccgggcgtcgtgtgggtccgtgggtgataattgagagcgtcagacccaggactgttcagggaggagccccggtcagactcccacgtgtgaagaccgggccccaagtggcaagggctggcctggggcgggcagcttgggtcctggacgttgataggaagcggaaggggaatcgcgggaagctggcccaggtcaggtccgcaaaggcttctgaagaagaggaagggcgagtaggggcacctggacgctgatggtggccaggatgctcagctggccaggagggcagcacctgctggggacggtggccctgccttcatgcccaggacaccagctgggtccagctagcagccactgggaatcagaggaatggggcagagctgggcattcaggaccttgaggacacgtgaccccacccgcccaccgccactatcaggccccgggaccgcactgacaggaaaccttccgtcgtgagggagcacttcccaggggccgcagggacgacactctccagggaggccccagcaaccacaccatcttcttgctgtgagaggtctcaccccgggctacctcctgtcactactcactgccctggggtccgtgggcaagttgcccagggtgggggtgcctagccaggtgcagtccccgccccgcctagtcctcggcgtcacgcaatgctcacctcgcctcttccccactaacatcccagactttaaaattcagtaaatcagatgtacaccgnnnnnnnnnnnnnggcggcgctcgcgacagaactagtccgacgcgtgggtcgacgatatcccggaattccggaccgtaccagcctgctttttaacgacgtgttcatagtactatgctgatgcggtgctgtc

SEQ ID NO: 78989 - DNA, 631 bp, Homo Sapiens
agatgccataacttcatttaatattgatagcagctcaatttaaattttgaaaaagcaaatacatttaataaaattggtgtgaattattacatattttgatggaactactgtacagaatgtatacatatataaatctatagatagaattatatacatttgagtatataccacatacatattttttccactcacatttttctctttagtaaaacaaagcagttttactgtacacagaagtgcaatgctacattaagtcctgagtaatttaaggtatcattaataaactgctataaattctagttttccagccaaagatccaatagattctgtaacaaaaaatgtgaataatacttaaaaatatgcatttagctttgcgttcattttgtgcttagcagaaaaagctcaagaatgcacagtagccatttagatttgggagaatgttcttgaatattcaaggttaaataaatatcctaattgtagggatttatagaagttttaagtaatgttgtctacatccaatttgtcaagcatggaagactacagtcatgattggatcaaaaaatcccttttgcagaatatgaaattctgtgtaaacatcagtgtttgggttttatataaaagttctgattca

SEQ ID NO: 78990 - DNA, 742 bp, Homo Sapiens
ggatcaccttaacattcagagatgatagagtgttccccactgagaagccaaaacaaggcccttaataaccccttaagttcaccatatgaatcagaaggagaacactaaagtggagagacttttaagagatcatgatagtgaaagccttaatataatcagaattgtaccataaccttgaatctatatttgttcaaaacatccctttgacttttctaagtgtttgcttaagcagagtgtaagaatgtgtggttacctttggttgagatcctttccattctttttgactctctgcttcagattttttcagtagtgtgagtcaccaaaacatttactaagagtaattgggtttaggatgttggaaatttttagcttgggggaaaaaacattcttatgaaggagataggttctcttctgagtttgtcataatatagattggtgtctttggaaaatggccacaattttaagaattcaattatgcatataaaatgataattattggaattccacagtaacagatttaaacagtcttaaattgtttatctcctttactgtaatgtattgaaatttttagagaaattttagttgttaacattttattaagtgccagtgtcagaatataacaaattatagtttcttatgaatgacaggcctacagttattattctggattatttgatggaggacaaacttacctgtatttgttagtcaagctgtgaaaataaggtggattacaaaagatgtg

SEQ ID NO: 78991 - DNA, 529 bp, Homo Sapiens
cttattttcttcagtgtgtatatttctttactatcattcatattgatgcccaaattgtcctaaatcaggccaatgggagctccttcaagctgatcctgtgtccttttgatatgacttaatcatccattgagtgatttctttgctgttgagcacaatcagatattccaggctcatttcaacgctggagccaggcacttctatttcttttagtggagaatagcatttggaaatcaagatctgcgtgctgggtatgttcattgctactggggtgtcattgcttctaggccttttcaactgacagggtcagtaatggagtaaaactcattgtaatcgtgtaacttatgtgggttaagaaattgaactttgctagtaccccaaaagctcctttatgtcccctcctgattttaacgcttaatcaccttcatcctcagttttatggtaatcacttgtctttgcagttttagtctgtaaccatgcatccctaaataaatgtttagattgcctattttaaaaatttaatataattggt

SEQ ID NO: 78992 - DNA, 718 bp, Homo Sapiens
aaggaagagttggactgtgtctcgcatgctcctgacgcagaagttttgaaccttttttcacctcgtctgaaatggctgcctcccagtgtctctgctgctcaaaatttctcttccagagacagaacctcgcctgtttcctcacaaacccacactgtggcagccttgttaatgcagatggccatggtgaagtgtggacagattggaataatatgtccaagtttttccagtatggatggcgatgcaccactaatgagaatacctattcaaaccgtaccctgatgggcaactggaaccaggaaagatatgacctgaggaatatcgtgcagcccaaacccttgccttcccagtttggacactactttgaaacaacatatgatacaagctacaacaacaaaatgccactttcaacacatagatttaagcgagagcctcactggttcccaggacatcaacctgaactggatcctccccgatacaaatgcacagaaaagtcaacttacatgaatagctattcaaagccttaaattgggcatcactcaggatgtgtataagatcttaatattgactagtttcacatccaggtttctaagaaatgataagatacttcacttttccagagtgaaatgtaggagggagcacattctaagtacagctaaaaatttagctcactgtaacacagtttcactctctgaataaataaagcaaaaaacacaaaaaa

SEQ ID NO: 78993 - DNA, 1047 bp, Homo Sapiens
  misc_feature (57)..(57): n is a, c, g, or t
  misc_feature (68)..(68): n is a, c, g, or t
  misc_feature (101)..(101): n is a, c, g, or t
  misc_feature (116)..(116): n is a, c, g, or t
  misc_feature (128)..(128): n is a, c, g, or t
  misc_feature (156)..(156): n is a, c, g, or t
  misc_feature (166)..(166): n is a, c, g, or t
  misc_feature (186)..(186): n is a, c, g, or t
  misc_feature (196)..(196): n is a, c, g, or t
  misc_feature (223)..(223): n is a, c, g, or t
  misc_feature (228)..(228): n is a, c, g, or t
  misc_feature (242)..(242): n is a, c, g, or t
  misc_feature (285)..(285): n is a, c, g, or t
  misc_feature (291)..(291): n is a, c, g, or t
  misc_feature (316)..(316): n is a, c, g, or t
  misc_feature (323)..(323): n is a, c, g, or t
  misc_feature (327)..(327): n is a, c, g, or t
cgatagggagagtgtcaggtcagcgcaatactcagcagtgtgctccttacgtacagntgcatgagatntgcttgagaggtctgccccggtctgttctctcngacgtacagatgatntcgcgtgggctntacgagggactgctgcagggatcgcgcntggcatgttntgagccctccaccgactctnggcgtcagcntcgagtcttcgcctcacccctcactgntactnccgccagtagtgtntgcttccccgacacagacggtacttggctcccgcggccctgcntagatntgctccactgagtgttcatttgagnccaaccntccnttctgcgaggagctcatggatgccatggtctctcactttgagagactgcttgagagctcaccggagcccctgtccttcatcgtgttcatccctgagtggcgggaacccccaacaccagcgctcacccgcatggagcagagccgcttcaaacgccaccagttgatcctgcctgcctttgagcatgagtaccgcagtggctcccagcacatctgcaagaaggaggaaatgcactacaaggccgtccacaacacggctgtgctcttcctacagaacgaccctggctttgccaagtgggcgccgacgcctgaacggctgcaggagctgagtgctgcctaccggcagtcaggccgcagccacagctctggttcttcctcatcgtcctcctcggaggccaaggaccgggactcgggccgtgagcagggtcctagccgcgagcctcaccccacttaacatatcctgcggggaggaggagccccaggggtgctagtctggactgctgggactcgggcccctggggcctcagagggaccccggctgccactgacatatgaagattatggttctgccagggctcccctccctgcctgtccccaagtcctcacctcaaactccctccaagtcccatgtatataggtcctgatgccttcccaaccccgcccctcaccctgttgccaccttgtttcatttgtaaaaggaaatacagaaacccccccaaaaaaa

SEQ ID NO: 78994 - DNA, 2030 bp, Homo Sapiens
gcggccgcgtggggcccagcacaaagacctgtccccaggggccgccgcctccgccgctgctgctgccgccagcctagagccgcccgccgaagcagagccggcgccggggtcctcatccccaccggtcccgaggggcggctgctgcccgtcgccacgaggcccaggggcccgagtgccgagccctttgctccctcggccgcgcggggacagggctgctgagcagcctccgcctctcccggctgtgggggccccactgagtatgtcggaggagagcgacatggacaaagccatcaaggaaacttccattttagaagaatacagtatcaattggactcagaagctgggagctggaattagtggtccagttagagtctgtgtaaagaaatctactcaagaacggtttgcgctgaaaattcttcttgatcgtccaaaagctagaaatgaggtacgtctgcacatgatgtgtgccacacacccaaacatagttcagattattgaagtgtttgctaacagtgtccagtttccccatgagtccagccctagggcccgactcttaattgtaatggagatgatggaagggggagagctatttcacagaatcagccagcaccggcactttacagagaagcaagccagccaagtaacaaagcagatagctttggctctgcggcactgtcacttgttaaacatagcgcacagagacctcaagcctgaaaatctgcattttaaggataactctgtagatgccccagtgaagttgtgtgactttggatttgccaagattgaccaaggtgacttgatgacaccccagttcaccccttattatgtagcaccccaggtactggaggcgcaaagaaggcatcagaaggagaaatctggcatcatacctacctcaccgacgccctacacttacaacaagagctgtgacttgtggtccctaggggtgattatctatgtgatgctgtgcggataccctcctttttactccaaacaccacagccggactatcccaaaggatatgcgaagaaagatcatgacaggcagttttgagttcccagaggaagagtggagtcagatctcagagatggccaaagatgttgtgaggaagctcctgaaggtcaaaccggaggagagactcaccatcgagggagtgctggaccacccctggctcaattccaccgaggccctggataatgtgctgccttctgctcagctgatgatggacaaggcagtggttgcaggaatccagcaggctcacgcggaacagttggccaacatgagaatccaggatctgaaagtcagcctcaaacccctgcactcagtgaacaaccccattctgcggaagaggaagttacttggcaccaagccaaaggacagtgtctatatccacgaccatgagaatggagccgaggattccaatgttgccttggaaaaactccgagatgtgattgctcagtgtattctcccccaggctggagagaatgaagatgagaaactgaatgaagtaatgcaggaggcttggaagtataaccgggaatgcaaactcctaagagatactctgcagagcttcagctggaatggtcgtggattcacagataaagtagatcgactaaaactggcagaaattgtgaagcaggtgatagaagagcaaaccacgtcccacgaatcccaataatgacagcttcagactttgtttttttaacaatttgaaaaattattctttaatgtataaagtaattttatgtaaattaataaatcataatttcatttccacattgattaaagctgctgtatagatttagggtgcaggacttaataatagtatagttattgtttgtttttaagaaaagctcagttctagagacatactattactttaggactgtgtagttgtatatttgtaagatgacagatgatgctgtcaagcaatattgttttatttgtaataaaatatacaaaaatcacttgccagcagtagaaaaaggaccgactataccgacctttctgattagtaaacagttgaatcaagg

SEQ ID NO: 78995 - DNA, 680 bp, Homo Sapiens
  misc_feature (52)..(52): n is a, c, g, or t
  misc_feature (80)..(80): n is a, c, g, or t
aggtcagagtcctcttgcagcaaagatgtgtaagggacaggcttcgatggcntcggtggccggacaaaattcatccagcntactgacacagtcatgatccgcccattgcctgttaagcccaagaccaaggttaagcagagggtgagggtgaagacagtgccttctctcttccaggccaagctggacaccttcctgtggtcgtgagaacagtgagtctgaccaatggccagacacatgcctgcaacttgtaggtcaaggactgtccaggcaggggttttgtggacagagccccactttcgggaccagcctgaggtgtaagggcagacaaacaggtgaggatgagtgtggcacccagagactgctcttcctgccctcaccctgccccactcctacgactgggagctgacatgaccagcccactgatcctgtcagcaggtcctgctcctgttgccaggctcctgtttatagccatgatcagatgtggtcagactctttctgggcctggagaccacggtcacttgttgactgtctctgtggaccagagtgcttgaggcatctcaggcagcctcagcccaagcttctacctgcctttgacttgcttctaggcatagcctgggccaagcagggtgggtaatggaggatagcatgggatgtatggagaggatggaagattttcatgt

SEQ ID NO: 78996 - DNA, 717 bp, Homo Sapiens
ctgttctccctttgggccctccttcccaaacgcaaacaatccaggatccactcagcgtcaggcccaatggaaatagtgaagcagtgattttccctcccctgcctctccatagcctggtcttttgccctctcctttgctcttctcttcccccatagccacctcaaatacctgcagcctgatatcttcatcccttcatccagaccttttctctcctagtggtattgcaaactgaaagtggacaaagacttaaggtaaacctgctcctcatggtggaatgcttccaaatgctggaaggaggactttagggcagagttcactaaggaggcttgtgcttatagatcagtgggcctgaaagaagtttctctaggttctggttgtgtgctgtacgaagtgtaggtagtaataatactcttgtcagccacagtgaagccccaagctagccgggataggggactgaccttgtacaggcagcatggagaaactaagacagagtgtcctgcccaagtgatggcactggggagcagtcactcaggtttatttccaccagggcccaagaaaaaaagaaatgaggcaacctaaaattccatcaagatagataccaatatccaaggtgcttggtcttagcggtgtgggacccacgttaaggctcttggtgggaaggtgggaggtgttttcagcatgagatagggttcaggctgtgaatcagagtctagagcc

SEQ ID NO: 78997 - DNA, 1121 bp, Homo Sapiens
tcctaggtagcgaggcctgggtggcgatctcggcacgaggcaggcgcccgctgcagcgggcggagtctggctggagagaggaggcgggcgtccgggaacgcccggaaggggcgaggccagcggcggggcggggcttatggagatcgtgagctgggcctctgactccaggccctgtcccctgagctctgccctcggatgtccgaccgcccagagcctgcatgcgccgtggggcgccccaggaccaggagctggtgggtccggggccccctgggcgggggtcccggggcgcccctcctcccttgggacccgttgtcccggtcctggtctttcccccggatctagtattcagggcggaccagcggagcggaccccgacagctgctgaccctctataaccccacaggaactgcgcttcgcttccgagtcctgtgcacagcacctgccaaatacacggtgtttgacgcagagggatatgtgaagccccagtcttgcattgacattgtgattcgccatgtggcacccattcccagccactatgatgtccaggaccgcttccgcattgagctgtctgaggaaggagctgagggccgagtggtgggacgcaaggacattacctccattctgagagccccagcgtacccccttgagcttcagggacagccagatccagcgcctcgcccagggctcctgctgggacaccaccacccacggccagacacttccaggagcacccccgccagcaactggccaccagctccttcctcctcttcttgctgacggggattgtgtctgtggccttcctgctgctcccactcccggacgaactcggcagccagctgcctcaagtcctgcacgtctccctgggacaaaagttggtggccgcctacgtcttgggcctcctcaccatggtgttcctccggacctgagctccgtgctcaacccccagcccaccccaccctccctgggcagggtcttgaggcagccactgtgatgctcataccttaccttgcctcctaccctcttctctttcctgcctactccccactcctccctgacaaaaaacacccagggatttgtactcattttccaagttgaataaaatacatttttaaaatgaaaaaa

SEQ ID NO: 78998 - DNA, 579 bp, Homo Sapiens
  misc_feature (482)..(501): n is a, c, g, or t
aacccagcagccggggcgagtatgtggtggccaaagctggatgacctcgtcaactgggcccgccggagttctctgtggcccatgaccttcgggcctggcctgctgcgccgtggagatgatgcacatggcagcaccccgctacgacatggaccgctttggcgtggtcttccgcgccagcccgcgccagtccgacgtcatgatcgtggccggcacactcaccaacaagatggccccagcgcttcgcaaggtctacgaccagatgccggagccgcgctacgtggtctccatggggagctgcgccaacggaggaggctactaccactattcctactcggtggtgaggggctgcgaccgcatcgtgcccgtggacatctacatcccaggctgcccacctacggccgaggccctgctctacggcatcctgcagctgcagaggaagatcaagcgggagcggaggctgcagatctggtaccgcaggtagnnnnnnnnnnnnnnnnnnnngagcctgtcgccgtcctgtccccagcctgcttgtgtcccgtgaggttgtcaataaacctgccctcgggctgccgccaa

SEQ ID NO: 78999 - DNA, 795 bp, Homo Sapiens
aggcttgggtgaatcggcacgaggctcgtgccgactcagaggttgtctgaaggccgaggccaagatggcggtgctgtcagctcctggcctgcgcggcttccggatccttggtctgcgctccagcgtgggcctggctgtgcaggcacgaggtgtccatcagagcgtggccaccgatggcccaagcagcacccagcctgccctgccaaaggccagagccgtggctcccaaacccagcagccggggcgagtatgtggtggccaagctggatgacctcgtcaactgggcccgccggagttctctgtggcccatgaccttcggcctggcctgctgcgccgtggagatgatgcacatggcagcaccccgctacgacatggaccgctttggcgtggtcttccgcgccagcccgcgccagtccgacgtcatgatcgtggccggcacactcaccaacaagatggccccagcgcttcgcaaggtctacgaccagatgccggagccgcgctacgtggtctccatggggagctgcgccaacggaggaggctactaccactattcctactcggtggtgaggggctgcgaccgcatcgtgcccgtggacatctacatcccaggctgcccacctacggccgaggccctgctctacggcatcctgcagctgcagaggaagatcaagcgggagcggaggctgcagatctggtaccgcaggtagcgccggcgccgcggcgccggagcctgtcgccgtcctgtccccaacctgcttgtgtccccgtgaggttgtcaaataaacctgccctcggg

SEQ ID NO: 79000 - DNA, 877 bp, Homo Sapiens
  misc_feature (93)..(104): n is a, c, g, or t
actttttttatatcaaatttaagctggatttgggggcataacctaatttgagccaactcctgagttttgctatacttaaggaaagggccaacnnnnnnnnnnnnagtctcttgaaactggctgctggccaagctttatagccctcaccatttgcctaaggaggtagcagcaatccctaatatatatatatagtgagaactaaaatggatatatttttataatgcagaagaaggaaagtccccctgtgtggtaactgtattgttctagaaatatgctttctagagatatgatgattttgaaactgatttctagaaaaagctgactccatttttgtccctggcgggtaaattaggaatctgcactattttggaggacaagtagcacaaactgtataacggtttatgtccgtagttttatagtcctatttgtagcattcaatagctttattccttagatggttctagggtgggtttacagctttttgtacttttacctccaataaagggaaaatgaagctttttatgtaaattggttgaaaggtctagttttgggaggaaaaaagccgtagtaagaaatggatcatatatattacaactaacttcttcaactatggactttttaagcctaatgaaatcttaagtgtcttatatgtaatcctgtaggttggtacttcccccaaactgattataggtaacagtttaatcatctcacttgctaacatgtttttatttttcactgtaaatatgtttatgttttatttataaaaattctgaaatcaatccatttgggttggtggtgtacagaacacacttaagtgtgttaacttgtgacttctttcaagtctaaatgatttaataaaactttttttaaattaaaa

SEQ ID NO: 79001 - DNA, 743 bp, Homo Sapiens
ggcatcctcgcgatatcttaagctgcgactcagaaaacaaatcctactcctggcatcatccacagaaccagctgttcacaccccacatcctcctcagctttctggagtctcagccttaggctggaagcaaggatgggcgccattcctgaggaagagaaccgctggacatgggttctctgaggatggggagcatggaggtgatgtgctgtgacacgagtggtggaatgcttcactggagaaggggatgtgtcctgtgctgtccctgtgctcgccacccacactcccctcccagaggaggcacggtgcccagcctgcaaactcaccccagtcacccagccagcggagaatgtcatacaggtgcttctccttcatcatagcatctttggagaaggaggcaatttttttccagcaagatgaatctcttcttgccctttggatctctctgctgagatttggcattttcttttaaatcatatcctaattcttcctggaagcggttgatgacacaattgacattgtccaaaatgtctgagagctgggtagaaatatcctatagagaagcagcagattgtagtgttagggctgtggacttgagccagaagccacatgctagcagcgtgaccttggacaagtcgcttagcctctttgggtctcagttttcttatatttaaagtgggaatcattatagtacctatgtcacagggtttctgtaaggattaaatgaattaaatattttaaagtgc

SEQ ID NO: 79002 - DNA, 739 bp, Homo Sapiens
tcatagagatggtgactggcaagaggccttggcatgagtatgagcacaactttcaaattatgtataaagtggggatgggacataagccaccaatccctgaaagattaagccctgaaggaaaggacttcctttctcactgccttgagagtgacccaatagatgagatggaccgccagccagctcctcgaccattcgtttgtcaaggtttgcacagatgaagaatgaagcctagtagaatatggacttggaaaattctcttaatcactactgtatgtaatatttacataaagactgtgctgagaagcagtataagcctttttaaccttccaagactgaagactgcacaggtgacaagcgtcacttctcctgctgctcctgtttgtctgatgtggcaaaaggccctctggagggctggtggccacgaggttaaagaagctgcatgttaagtgccattactactgtacacggaccatcgcctctgtctcctccgtgtctcgcgcgactgagaaccgtgacatcagcgtagtgttttgacctttctaggttcaaaagaagttgtagtgttatcaggcgtcccataccttgtttttaatctcctgtttgttgagtgcactgactgtgaaacctttaccttttttgttgttgttggcaagctgcaggtttgtaatgcaaaaggctgattactgaaatttaagaaaaaggttcttttttcaataaatggtttattttaggaaagctc

SEQ ID NO: 79003 - DNA, 1007 bp, Homo Sapiens
  misc_feature (36)..(36): n is a, c, g, or t
  misc_feature (82)..(82): n is a, c, g, or t
  misc_feature (97)..(97): n is a, c, g, or t
  misc_feature (107)..(107): n is a, c, g, or t
  misc_feature (141)..(141): n is a, c, g, or t
  misc_feature (143)..(144): n is a, c, g, or t
  misc_feature (146)..(146): n is a, c, g, or t
  misc_feature (171)..(171): n is a, c, g, or t
  misc_feature (186)..(186): n is a, c, g, or t
  misc_feature (743)..(760): n is a, c, g, or t
gtatagtgaggactttaaactcatttgttatactantacccaattcatatcctccttctcttcccattctatctctctcacntgatctggcatattnttagtgcctntactgatatacctaccctagagtacataaaaatntnntnaaggaggagtagcagttgcataatntaacagatctatatngggtgcctcaaaatatgtatgtgccattccgcaaatttaaaagctattgagggacaatttttttaatttcctaaatgagaccaccttggattttatttttgccatttagatgtttatacgtatttagcttttataaaacataagccaagctaaatcccacataacaactctggtattcttccctcatatgagcagtgattttatttgttacccaccttagatagactaagaaagttctagtcttgtttctccttctccccgcttccctgggggtttttccttaccataagtattctggtccgagggttcagttcctttagtcaagatgtcacaagtttaaaaacaaaacttgagaaactaccaaaggctcaggagttgtccactttgttgaaatccattaaattagagaagtctcactaacagatgtatttaaatataggtacaacaaataatttctttttctccccttccccaaattacagtcagcatttaaagctgtttatggcttgccatcagcattattctggtaggcttgttagtgttaaaatctatttgannnnnnnnnnnnnnnnnngcctcttaaagtctaattttaggatggatgaattcagatgtttaccagagtgtgtattttacataatgttcttgattaaaaagacttgtttgtaaattatccgttgtttttgcatatgcccagttgatgtgataaaattttcattgtcttgccatataaagccttggttatcaacaggtggaatgtagatattgtaaagctttttgtgaattaaaagtgcaaaataaagcaaccacatttaaaaaca

SEQ ID NO: 79004 - DNA, 932 bp, Homo Sapiens
  misc_feature (43)..(60): n is a, c, g, or t
caatttaaacaggcctcacaaaaatcagccggaattcttattnnnnnnnnnnnnnnnnnncagaacattcatggatgggcaaagaaaggaaacaatgcagacgcctttggacttcaagagaaagcccatcaggaatctctgagagtgtcagctgagagagttctgtctctctccatgtaggatcctttctgcatcatgtatatcccaaaaggagttctgcgtgaaggtcatccatcttccctacagttcttagctgagcactgacacacacacatactccaccaatccaccaaactgcagctgtagctgcttatctgacccacactcccctggctctccacttttaggcacagtctttgttctttatcgccaggcccgattcaggagcttcacctgtgccagtctcttagtgatcatggtggcaaaaaccaggccaaagaggacgctgctgattaacacgtagtcatagtcatccttcagaacgtcaaactgcttggatgggtagactcgagtttggtaaatgtccaaaccataggccacaaccaaacaagtggactccagacccgagggagctgtgtagatacctcgcattcgagaaactgtctggttatagttgatgaatcgctctgcgtgtatctgtacatctggagaatacgggattaagttctcctctctgctttgttctgttgggatctcggggcggcggggatccagcaaagccttaggaagggaaagaattgctccagaaggtagtccaatcagcaggtgtcggctggtgatgccccgttcggtgatggtggcctccatggcactgatggaggacgggaagatataggactgctggaggacctggggcagctgggggcggtccagggagctgaaggcggtggcgttgtattgctcagtgccctcatagagctccagtacggtcc

SEQ ID NO: 79005 - DNA, 810 bp, Homo Sapiens
taagctgagcacttccacaagggcatacccctgggggcaggggctggggctgagaactgcagccctgggtcttcccttagggaggaagggcagatgaacccagcaggcttaggaggtggcactgggtgaggacagctgggcaggggctgcagagggaggtggaaatgaaccctgagggctcccccaacttgccatgccctgtcccttagtagatgagttgctcctgattggtcattgggtttgggtgaggcctggaggcttcagaggtgaatttatgcttgggaagcctgatcccaaacctgaagggaagggacttggatctccttatattgaataagctgtttggaggaaggtgtctgtctgggaggatggggcagtaaatgaggttggcagagtggcagtgggggctctgcagagccagccttggagcctgctcattctgggcccttgctgccaaggagcccagcctcacctagcaggaaaggagatgaaggccctcctcccaggaggtagggtcttggctgccccgaacttaaatgcttttgaaatctcttagatgtggaaatattttttcgaacctgaaaatgcagctggtagaatttcaatggaagcataatccatgtaaaatatattttagttgatattttgtaaaatgcactttttgtgtgtgttgatcctggtttcccagatctgtatttcagtgtttacaagggaggaaggacctttcctcacctcccttttgacagagattagaagtacttctttaagaaaaaaataaatttgagaaattgtattgatttagaaaagaaa

SEQ ID NO: 79006 - DNA, 632 bp, Homo Sapiens
  misc_feature (69)..(69): n is a, c, g, or t
ggcgccggggccctgcgaccgcccccgggctcccggcccgtcagccagccctgctgccgacccacgcgntacgaagcggtctccttcatggacgtcaacagcacctggagaaccgtggaccgcctctccgccaccgcctgcggctgcctgggctgagggctcgctccagggctttgcagactggacccttaccggtggctcttcctgcctgggaccctcccgcagagtcccactagccagcggcctcagccagggacgaaggcctcaaagctgagaggaccctaccggtgggtgatggatatcatccccgaacaggtgaagggacaactgactagcagccccagagccctcaccctgcggatcccagcctaaaagacaccagagacctcagctatggagcccttcggacccacttctcacagactctggcactggccaggcctcgaacctgggacccctcctctgatgaacactacagtggctgaggcatcagcccccgcccaggccctgtagggacagcatttgaaggacacatattgcagttgcttggttgaaagtgcctgtgctggaactggcctgtactcactcatgggagctggcccctatttattatttctaagttatttatttaa

SEQ ID NO: 79007 - DNA, 1068 bp, Homo Sapiens
  misc_feature (247)..(247): n is a, c, g, or t
  misc_feature (1008)..(1027): n is a, c, g, or t
ctgcagcagtccgatgaagcgcatgcgcaccatatgtggtgtcatcctagcacccagttacatttgctccgctgttgtgttgatgtggcgatacattcacacagaacagttgacatgatacgattatacgactcatataggattgcccctcgagccagaattcgcacgagggttacgaagcacacaaacactccaagttcagcagtttagcgccaccataacccacttgctttctcatgaaaatctngttaaagttgtacacaggtaacaaaaagtactttaaaagatatataaaggctgtaagctaattgtggtgtctagtaagtagcataatgagatgtgaggagttggaactttgcgtgttttgcgtattttcatctgcattcagcttcttactctgggtttgtactcgagtgttatttctttacaaatgcccttgtaattaccactctgaagtctgctgactgtgtctcttgaacatacttaggatattctgcacattatggaaaaaggtaaattttagaagtttctgctctactaactgtagatatttatgactctgcgagttatctatttttataaccacctgtggtccattgttcattttaattcacatttcttatgaagtatggtaacagggagggagacacctagattagcagctcaatttgtactacttcagccaatctgtgaatgtaaaaactacactgttgccttgctaggatccaccctcctataatatggaacaaatatctgaatgaaatccaccctaggagacggagtcaaactaaacttgtggtttttcatttaacttttgactacagcatggccccatggcatccacaccaagagggtgttgtgatgaggtgccggtgtgcaaagggaactttagtttttccactggttcttatctgctagccttttacatacatgtgtactatatttgtttatagactgtaggtggatatataatttaaaagcttgatttaataaacatttaaccccctnnnnnnnnnnnnnnnnnnnncctgagcaggcggccgcaagcttattccctttaggtgaggg

SEQ ID NO: 79008 - DNA, 482 bp, Homo Sapiens
ttcgcgaacgtgttatcctgtagtatcattagaacttctccatttactgcaagctaactccccctgaacatctagaactttaatacttgtccaaacctgcttgctcatggtctaataataaacccaattatacaatctgtaagaacccctgacaaccttttccttaagaagccataaaggtgatttaacgaacacctcaaactcttagtaaatgtattcaaaaacagatttcatcactccagtctttggcttctgctgagggctagaggctactggttttagagtggctagggggaagatcgcttgaactgagaatgacacacgccggcgtcttgtacagcatggccccatggcatccacaccaagagggtgttgtgatgaggtgccggtgtgcaaagggaactcttagtttttccactggttctctatctgctagccttttacatacatgtgtactatttgttcatacgactgtaggtgga

SEQ ID NO: 79009 - DNA, 596 bp, Homo Sapiens
gccagccccatgcctgtctgtgaccccacagtgggtgagagcccgtcacagtcctgggtgtggctgctctggaagaattaggaggcagccataataagagtcttcagagagatgatgggaggggccagtgaggacaggaacagagagtagatgtcctataataaaggggcttctgggaggtgcctgggcacagatgtctgttcagcaggtgtgtgggcctagaggagagagcagagcccagaaatgtcttttgcaggcccacgttctgacttgaagctttcgtgggcatgttgccattgggttttgcccttgcaaaggcttcctaggtctccagtggcccctcaggacccagggtcccagctgctgcttggggatgtgcactgctggccgccggccttgcagtctctctaccctggggaggaacagtggcttctcagagcctggggcatacagaagaaggcaggagttgatttttgtgttgggtttggggtttctttgtcctcaaggtactgttctgtttctctttacccctctgctttatttattgtaagcattcccacgttaaataaactttggctgttgtctacaagtcaaaa

SEQ ID NO: 79010 - DNA, 1433 bp, Homo Sapiens
tgagatacagattttttgtataaaggagtgtctaggttgtatagaatctttcatttcactatattataaccaggtgattaaagtgacaatttgaaaccaaatttaaacactataataatttttgccttgtgttcataaacattgatatttttgtcttagctagcagcttttaaaatattgaaatttaaacttctaatttgtttttcaggagaaagaccatttatctgcgaattatgtggaaattcttacacagatattaaaaatttaaagaagcacaaaacaaaagtccattctggtgcagataaaactctagactccagtgcagaggatcatactttgagtgaacaggattccatacaaaaaagtcctttatcagaaactatggatgtgaagccttctgatatgactttaccattagctcttccacttgggactgaggaccatcacatgcttctgcctgtcacggatactcagtctcctacatcagatacattgttgaggtcaactgtgaatgggtattcagaaccacagttgatttttttacaacaattatactgactttgtaaggaatatggaattgctaagatatcattggtagcaaacatctctggtaaggtgcatatattcatattaaattcccattcatttgagttgtgaccattatttttcatttcactgaagtaaaaagcacctgatgctgcatcacaactgcaatgtttgtttttatttttggctttatgtctatactccacagagagctttttaagtaatgaattatgtagcactattttgggtggatgagttttattttcttttaaagctgccttaattccatttttattttgcattttagaattgcccttcatttactaaatcagccagttaatgtgattcagttgtgacctgtgggattttaaaattttcctgccctcataatttaagcaaaatccacgatagtatcagcccaagagtgtgttgctatttgtaagccccatggatcaatacataaactatgcataaaaataaaatttcatattttcgctcgtaaaaatttaggcgctgaataagaattgtgctatttctctattaatatattgttagaaataacttttctaatgaaacaaaaatgtttctcaaaatctagaaaagtgcatataaatttttgttcatttagaactgagtattctggagaaaaccaatggtcagcacttttggtttgagttatctgagattgtattttcaaaatgaattttaagtagatatttggtgtttttatcttgtcaaagacagtttcaaaatttgattcagtttatgttttattccgttctaaaatattggagatgaggaaaatgtacttgagttttgaaatattttggtaagcctctcttactcctgttatgcactttttaaaataaatactgaattccagaaag

SEQ ID NO: 79011 - DNA, 1057 bp, Homo Sapiens
  misc_feature (23)..(23): n is a, c, g, or t
  misc_feature (25)..(25): n is a, c, g, or t
cgatttgcccgcccccaggcggnanaaaaaaacagctggtaccggtccggaattcctgcgatatcgtcgacccacgcgtccggtcaaagctggggctcagcctcttgtcatctggagctttgtgggcaaagctgagaagctgcaacccagatttcaacccaaaaaggtcaagctgaatgcctcagactgatgtggaaggcagctggccttcctgggttggaacgaggcagtggccctgagccccttctccagggccaggtagaaaggacaaacttggtctctgcctcggggaagcaggaggagggctagaagccagtccctccccacctgcccagagctccaggccagcacagaaattcctgaggccaacgtcaccaaagttagattgaatgtttattatctttctttttcctttttaccttattgatttgatgaatcttgaaatggattcatttccataaaccaagttaaagtatggcccgaccatttaagaaaacaaccatctgagacacgcaggaaattgtgagcatttcgacccgagctctcatttcctatttgtgaagggtcagacacagtctaccccaggggtgtctgggggacaagggggtctctggagatgtcacccagggagccccctctatgtctgagaggctgccactgctgcacatgctcagtgaggcttggcggccatcctggcacatggctcttcctgggtcaaccgtgacctgtctggctcaggaatgggctctggctgctgggggagccgtgtcactcctgggccatgggggcacctcctgggcacttaggtgtttcagcatagattccagtttcgcaccctgggcagacccccaggcaccatccgggatagggcagaggaggtgctggcggccccagggaaggagggtgtgtaccccaaggccccctggctgtgctgaggggctggggtgagcgctccatgttcacatgagcactgctgcctcttccacttgtgggactttttgcaaaccccaaggatgaactttgtgtgcattcaataaaatcatcttggggaaaaaaa

SEQ ID NO: 79012 - DNA, 703 bp, Homo Sapiens
  misc_feature (687)..(687): n is a, c, g, or t
tttgctgtagtaaaactttactgtcagaggctctgctgggccacaggtcttcagaacaccgggctcgcccggcctcctctaaggcattcaataatattagtaattaaatagcaacgctcatcccccaaccggaatgtacaacagaggtcccattgtgccatgtggtcccaaggggtctggtcccatgaggtctggtactcaagaggcagagggggctccctgatgcagaagggttaaggccacaaaggaaaaggagaagggatggggtctggggacagctgagctggtccatcacatccaggaatctggctcagccctcggggtgactgagtgcagggcatgccatgtccccagctctgcgggtccggaggggcggcgggggccccgaggcgtggggatacgtgagggtttacggtctggctgtgtgtccatccgaccccgtgcccaggtcctcgagggttcagtgcaagccagggggctcccaggtgcatctagtggcccccccatgccagggcaggggctgccttcatcggaggagctggaaagggcttggcttcggggcccaggcagcccattggccgtccggccagagtccccaggttggccacatttgccacccaggacgctgagggacgaagaggaggaactggaggaacaataggcaaagtcaggagctggagggtcggnggcccgagctgggtca

SEQ ID NO: 79013 - DNA, 1279 bp, Homo Sapiens
  misc_feature (597)..(619): n is a, c, g, or t
  misc_feature (782)..(800): n is a, c, g, or t
atggatggtgccgggggtaatcatggccagtcaataattatataaaggagttcaaatactatagctgtcagttgatgaatttgttatgtagtaaaatgtatgactttgtatgggtttcttcagccctttttctgccactagcaaccagaatagcactttaccttttggttggctagataagtggctgactacctgtttttctcactgtggtgtgattggctaaacaatctcgcattaaaaattcaaatgtaaattgaattcacatgaaaaatcatgtttggttgtaaacctccaatgttttgattctctaatcatgttttcgtcacatgctgagtaaaagtgccttacaatgtaaaaattgtacagtacttatgttcccaagtagcatcatcatcttctgggtagtaattacattgtggtattaatatttagaaaaatggacctcagcagtgtatttactgtacatctcttaagtccttaactgtagttttaataagcatgacattatttgataagtatataacatttacatcatttcaaaaaatactgccgttactgtcttttatgcatattttagcctgaaattttgaagcgtcnnnnnnnnnnnnnnnnnnnnnnnggttgtttgctattgatattaaacagtgtaatctttgcaagcgtatattgaagattattctggagcatttattgccttaccagaaatgttagtaggaaatgttctttagagtagaaagatagacttgagtttctatacttttaagaagagctctttgttcctnnnnnnnnnnnnnnnnnnntgaattttactttcatctcaagttattaaaaacccacaactgaagtaaattttatttcaagaatcagcagttttagaatttcagatagtacttgctcagaagtacatgctactcaagatattaagagataacaagatctgtagatctgctattgaatcagaatctgtgtacttgaacaaatgtgtgaatctcaaatatctcaaagcaaaagaaaaagtgttctagagtgttgttgcttttttaaaaaaagcgctgaagttagaccaaggtatacagttttgttctaacagacatttaggttaattgtaaagataaggaatgcattatgggtcaaaaatcaaacattcctctcatgttatgtatattttgttcctgttatattggctttattttcaaaattgtagtttgtagtattagtttccttttattggtattcttgcatatactattcattcaataaatgacttatgactttcaaa

SEQ ID NO: 79014 - DNA, 2632 bp, Homo Sapiens
cctgacggctacttagctgctgtacgaaacaacctgctccgctggagcgccgtgaaacaccagtcttgggggccagtgcctcaagtgtcaatccaggtaacctttaaatgaaacttgcctaaaatcttacggtcatacacagaagagactccaatcgacaagaagctggaaaagaatgatgttgtccttaatacaaccctacagaatatcagtctataacccggtaatcccgtaggttggcaccagttacctgatcagctggagtcctgtgaactttgattgtgatacgtgggcatgttcctagtgacgcagacagattccaggtggatctgcagagatggcagcagcatgaaacctcgagccgatgtggcctttcatttcaatcctcgtttcaaaagggccggctgcattgtttgcaatacttggataaatgaaaaatggggacgggaagagatcacctatgacacgcctttcaaaagagaaaagtcttttgagatcgtgattatggtgctaaaggacaaattccaggtggctgtaaatggaaaacatactctgctctatggccacaggatcggcccagagaaaatagacactctgggcatttatggcaaagtgaatattcactcaattggttttagcttcagctcggacttacaaagtacccaagcatctagtctggaactgacagagataagtagagaaaatgttccaaagtctggcacgccccagcttagcctgccattcgctgcaaggttgaacacccccatgggccctggacgaactgtcgtcgttaaaggagaagtgaatgcaaatgccaaaagctttaatgttgacctactagcaggaaaatcaaaggatattgctctacacttgaacccacgcctgaatattaaagcatttgtaagaaattcttttcttcaggagtcctggggagaagaagagagaaatattacctctttcccatttagtcctgggatgtactttgagatgataatttactgtgatgttagagaattcaaggttgcagtaaatggcgtacacagcctggagtacaaacacagatttaaagagctcagcagtattgacacgctggaaattaatggagacatccacttactggaagtaaggagctggtagcctacctacacagctgctacaaaaaccaaaatacagaatggcttctgtgatactggccttgctgaaacgcatctcactgtcattctattgtttatattgttaaaatgagcttgtgcaccattagatcctgctgggtgttctcagtccttgccatgaagtatggtggtgtctagcactgaatggggaaactgggggcagcaacacttatagccagttaaagccactctgccctctctcctactttggctgactcttcaagaatgccattcaacaagtatttatggagtacctactataatacagtagctaacatgtattgagcacagattttttttggtaaaactgtgaggagctaggatatatacttggtgaaacaaaccagtatgttccctgttctcttgagcttcgactcttctgtgcgctactgctgcgcactgctttttctacaggcattacatcaactcctaaggggtcctctgggattagttatgcagatattaaatcacccgaagacactaacttacagaagacacaactccttccccagtgatcactgtcataaccagtgctctaccgtatcccatcactgaggactgatgttgactgacatcattttatcgtaataaacatgtggctctattagctgcaagctttaccaagtaattggcatgacatctgagcacagaaattaaggcaaaaaaccaaagcaaaacaaatacatggtgctgaaattaacttgatgccaagcccaaggcagctgatttctgtgtatttgaacttagggcaaatcagagtctacacagacgcctacagaaagtttcaggaagaggcaagatgcattcaatttgaaagatatttatgggcaacaaagtaaggtcaggattagacttcaggcattcataaggcaggcactatcagaaagtgtacgccaactaagggacccacaaagcaggcagaggtaatgcagaaatctgttttgttcccatgaaatcaccaatcaaggcctccgttcttctaaagattagtccatcatcattagcaactgagatcaaagcactcttccactttacgtgattaaaatcaaacctgtatcagcaagttaaatggttccatttctgtgatttttctattatttgaggggagttggcagaagttccatgtatatgggatctttacaggtcagatcttgttacaggaaatttcaaaggtttgggagtggggagggaaaaaagctcagtcagtgaggatcattttatcacattagactggggcagaactctgccaggatttaggaatattttcagaacagattttagatattatttctatccatatattgaaaagaataccattgtcaatcttatttttttaaaagtactcagtgtacaaatcgctagcccttaattcttttccagcttttcatattaatgtatgcagagtctcaccaagctcaaagacactggttgggggtggagggtgccacagggaaagctgt

SEQ ID NO: 79015 - DNA, 1322 bp, Homo Sapiens
  misc_feature (59)..(59): n is a, c, g, or t
  misc_feature (782)..(795): n is a, c, g, or t
ccaacgtgagctgagccaagccacaccctgggaaagttggcattatgatgtgtcaccancaggaattttgaccaagttcgtagtaagcctctctccactctcagaaagcatacacggttctcccagaggcagagccttatccatcaaaactcaactgaacgcaaactcaacgtgtcagaacatttgcagcctcaaaataattgttttgggtttccaacccttcttcttcaagtcgactggtgtgctaattatcgacttgcacaccaatatgatgtatttgtctctactatgatgtattctctaaatctcccaaacccaattcaggacaaagctactaggaaagcaactgctttaaatgatctgctaagcaacctgaccagcatctccactctgccattgtcttctccctgctgaggatggcctcactgtgtgaataacggatcctgtttatttgtggcagaattagattagtttttaaggaactgtgtttttcttttcctagaagaggggcccctttctagctatacatctccaccaaagacttgcctttcccttgccagatctaaggacacaggcctggggtctgccacaaactgcaaagtaccatgtctcccagagcatgttccagaacccctgtccacagatgctctgcaaagaaggtttccagggcactgggtttagctgcatgctacgcttctatacaagagcacaccagagtctccacaccactgctaaagtaaaacatccaaactttttgtatttggttggctatttctgaaacnnnnnnnnnnnnnnaaggaatatctgtccaaggggtatggtttgttatggtcgtgtcatagatactggagaaggagcgatttgtgggtagtgtctcatggtacagtggaaacagctcagtcacagggtgtgaatttgagtcctggctctgctttgtgactgggcttgagaactctgggctgacctataaaaacctgacattgggggttgaattaaaccagtgggtttgtccccatgagaagtcatggctaaactatgcatagaaaacgactggaaagaaacattaacagtgactatctttgcacagtggaacaggagtatgttttattcacctctttatactttcaaaaatattttaaagcagtttctaaaatagcccttaaaatcaagaacaaaagtgttattgaaacaagcaaaaatatcttgaaccatgctatacctaatgggtttgcatctgctgtggctgaggtttccccagcagagtttggtacatggcagcaccaggctgcctaccaggccttgtgccaagggctaccagcagg

SEQ ID NO: 79016 - DNA, 994 bp, Homo Sapiens
ggggccgcccccgcctggagtccgacgtggaagttgctggctgactgggcttgcgaggaaaccgcctcggagctgcagccgaaggccaaggaatcactgaagatcggcgagggaggacagggggttcatcatgggtggctttttctcaagtatattttccagtctgtttggaactcgggaaatgagaattttaattttgggattagatggagcaggaaaaaccacaattttgtacagattacaagtgggagaagttgttactactatacctaccattggatttaatgtagagacggtgacgtacaaaaaccttaaattccaagtctgggatttaggaggacagacaagtatcaggccatactggagatgttactattcaaacacagatgcagtcatttatgtagtagacagttgtgaccgagaccgaattggcatttccaaatcagagttagttgccatgttggaggaagaagagctgagaaaagccattttagtggtgtttgcaaataaacaggacatggaacaggccatgacttcctcagagatggcaaattcacttgggttacctgccttgaaggaccgaaaatggcagatattcaaaacgtcagcaaccaaaggcaccggccttgatgaggcaatggaatggttagttgaaacattaaaaagcagacagtaattcagtccattcttctcccctgaaatgaagactacatcacctctctccctttggaaacagtcaagtgtacttcacactactagatgttaaaactatatgattattggcatatactgactgactgcaatatttgtagtaaatagggaaaataagtatttagttggagggataatttgatcgaatcacctgaatgttctatgtaatgtaaaatattcttttcttgctttcttgtgttaaggtatatattctatttgtatggaattcttattcaaatacagttctattaaagagtatactcctattggatgaaaaaaacct

SEQ ID NO: 79017 - DNA, 785 bp, Homo Sapiens
ttgtctgtatagcattctgatgattagttcttcactgtgtattaagattgacttatgttgctgcatgtatggctaattcatccctctgactgcttcagaaatattccactttattcatatttattcaacattttacttatctattcccccgtgtactaaaaagtcaaaagcattactaatttaataatgtcatatttgttcttctaattattttttgctgcataacaaagcactcctaacttagtggcttacaatgataacagtcatttattttattcaaaaatctgcaatttgggctacaattggcagaacagctaatctttgctcctaacagtattggctggagttggcgatgactcagcagatcaaggctggaagactcattctcgtcaggtggttgacgttggctgtcagttggaacctcacctggggctgtttgccagaacacctacacatggcatgtccatggagctatttgacttcctcactgcaatggctgggttccaagagcagttatcccaagagaacaaggcagaagtgcatgacttttagaatcttgtctcacaagtcacacagagtcacttccaccatcccctgttggtcaaggaggacatgaaggtcttcctaggagcacggggagaagacagacttctaccacctgttggaaggagtgtcagtgttacatagcaagagaagcacatggaatgggatgtattgtgatgcccatctttggaacagacaatttggcatatctgtgaaaattaaaagtctgatttggatataac

SEQ ID NO: 79018 - DNA, 1902 bp, Homo Sapiens
  misc_feature (83)..(83): n is a, c, g, or t
agctccacaaaatgccaaatgttcattcgcggtggaaaaaacagtgtcccccagccaggcccatgctggggaacccgccccantgggaatgtacacatccctgattaagaaattatgcagtcccaacatcaaaaatcccttcaacatccccgtgaaactgaacatggtgctcacgcagcgggggagggcgggtggagtgagtccatccaggcgcatgagcagagcaggcacgccaaagagcaccaagtacttcacgtagaaaaagagcacctgggctaacgccagtcctcctaaggtccaacaagagacagtctccaggagggggatgctgctgtagatggcatgcatgtacatcaggtgagccatcagctcggccagccaccaccagcaaagaaggcggcccagccccagggccaggacacacaggctggccttcagggagtcatgctcctgctgctgcatctgtttgatgaactccgagaagctgaggatgggcccattgtgtaagactggataataaaagacatagcccagcatccagggaaaggagtaggaggtcgatgcagcaggcagctgctgccagcagagctccaggctgaagctggtgtagtagaggcagcgaacggtcagcgtgaactgcagcaggtagtactcgttttctgtcttgtaccaccttctcttaacttcttccacaccctgcagcctcagtgtggagaggaggaggagagaacagagccacgtcaggagctgagaccggaactgggccacgcagaaagagatggtggtatggagcaaaaccatagccacaccaggggtccccagcacacaccagcaggcccacatcccatagagcatgagaatccagggtctgtgctttcttgccagcagtgtggccatttgagacactaccatgtggccaaggagaagccacaccagccactgcttcccccattccatccagaagctccactcaaagtcggtcgcatccttctttaatcctccaaataaagtgtcagtctccagctcaaattcctggtccagctcctcttcgtgttctctggagactttgtaaacttcatagaaggaatagaagtggaagcctagtgaggcaagtaggtaaagtgccagttcccatcggggcagcatggctccttggcacgaaggttcccgatgcctacgctgagagtttctccgggctgtcccgggcggcggcgacggcaacgttcacgcgcgccgcgagttcccaacacccctctttcggcacttccgagtcccagcgacatcggcggcggctgcgggcttccccgagacgccaccctctttcccccggagctgccctttggaggagcagcgcagcgcgcgtcctccgagcacgcccctgccgccgtgcccgcgcgccctccgcgcccggactcgggaacccgcggcgctctccgggcgatggcgagcaggcagtgctgctgcagggggcgggccagagcgcggcctgcgtttctgaaccgcgtttgccccgccggcggcccggggcccctagccccgctcacccctcggctgttggttcccactgaccctggcgtgcatatctctcccccacccgtgtgttcattgcaggtctggggctgcctgcaagttaattgcagagtggaagtcacctgaaactcgaggtgggccgtcattccaacaccagtggtccccacctacgttttgtaggcgaaaggaggtagttcggtgcggtggaaagagggtgggctttgcagccctggcagcttcgagggcttactgtgtgaacttagcccctgtgagcctccctgtacacctctgtaaaacagaaatagacttccctgcttttctttgtaaattagagtgaagatcaaatagaataaactttatgaattgtaaagc

SEQ ID NO: 79019 - DNA, 863 bp, Homo Sapiens
  misc_feature (627)..(769): n is a, c, g, or t
  misc_feature (779)..(792): n is a, c, g, or t
gcccacactgtgagcaggagtcttcccacgccctgtcattaggctgcatttactcttgctaaataaaagtgcgagtggggcgtgcgcgttatccatgtattgcctttcagctctagatccccctcccctgcctgctctgcagtcgtgggtggggcccgtgcgccgtttctccttggtagcgtgcacggtgttgaactgggacactggggagaaaggggctttcatgtcgtttccttcctgctcctgctgcacagctgccaggagtgctctgcctggagtctgcagacctcagagaggtcccagcactggctgtggcctttcaggtgtaggcaggtgggctctgcttcccgattccctgtgagcgcccaccctctcgaaagaattttctgcttgccctgtgactgtgcagactctggctcgagcaacccggggaacttcaccctcaggggcctcccacaccttctccagcgaggaggtctcagtcccagcctcgggagggcacctccttttctgtgctttcttccctgaggcattcttcctcatccctagggtgttgtgtagaactctttttaaactctatgctccgagtagagttcatctttatattaaacttcccctgttcaaatnnnnnnnnnnnnnnnnnnnnnnnnnnnnnnnnnnnnnnnnnnnnnnnnnnnnnnnnnnnnnnnnnnnnnnnnnnnnnnnnnnnnnnnnnnnnnnnnnnnnnnnnnnnnnnnnnnnnnnnnnnnnnnnnnnnnnnnnnnnnnnntttggggggnnnnnnnnnnnnnnaaaaagtttttaaaacttttttttggggcgggcgcccccaaaagaaaggaaaaaggggcaaattgtttccc

SEQ ID NO: 79020 - DNA, 2103 bp, Homo Sapiens
  misc_feature (1746)..(1775): n is a, c, g, or t
ctccgacccctggctagagggtaggcggcgtggagcagcgcgcgcaagcgaggccaggggaaggtgggcgcaggtgaggggccgaggtgtgcgcaggactttagccggttgagaaggatcaagcaggcatttggagcacaggtgtctagaaacttttaaggggccggttcaagaaggaaaagttcccttctgctgtgaaactatttggcaagaggctggagggcccaatggctgcaaaatcgcaacccaacattcccaaagccaagagtctagatggcgtcaccaatgacagaaccgcatctcaagggcagtggggccgtgcctgggaggtggactggttttcactggcgagcgtcatcttcctactgctgttcgcccccttcatcgtctactacttcatcatggcttgtgaccagtacagctgcgccctgaccggccctgtggtggacatcgtcaccggacatgctcggctctcggacatctgggccaagactccacctataacgaggaaagccgcccagctctataccttgtgggtcaccttccaggtgcttctgtacacgtctctccctgacttctgccataagtttctacccggctacgtaggaggcatccaggagggggccgtgactcctgcaggggttgtgaacaagtatcagatcaacggcctgcaagcctggctcctcacgcacctgctctggtttgcaaacgctcatctcctgtcctggttctcgcccaccatcatcttcgacaactggatcccactgctgtggtgcgccaacatccttggctatgccgtctccaccttcgccatggtcaagggctacttcttccccaccagcgccagagactgcaaattcacaggcaatttcttttacaactacatgatgggcatcgagtttaaccctcggatcgggaagtggtttgacttcaagctgttcttcaatgggcgccccgggatcgtcgcctggaccctcatcaacctgtccttcgcagcgaagcagcgggagctccacagccatgtgaccaatgccatggtcctggtcaacgtcctgcaggccatctacgtgattgacttcttctggaacgaaacctggtacctgaagaccattgacatctgccatgaccacttcgggtggtacctgggctggggcgactgtgtctggctgccttatctttacacgctgcagggtctgtacttggtgtaccaccccgtgcagctgtccaccccgcacgccgtgggcgtcctgctgctgggcctggtgggctactacatcttccgggtggccaaccaccagaaggacctgttccgccgcacggatgggcgctgcctcatctggggcaggaagcccaaggtcatcgagtgctcctacacatccgccgacgggcagaggcaccacagcaagctgctggtgtcgggcttctggggcgtggcccgccacttcaactacgtcggcgacctgatgggcagcctggcctactgcctggcctgtggcggcggccacctgctgccctacttctacatcatctacatggccatcctgctgacccaccgctgcctccgggacgagcaccgctgcgccagcaagtacggccgggactgggagcgctacaccgccgcagtgccttaccgcctgctgcctggaatcttctaagggcacgccctagggagaagccctgtggggctgtcaagagcgtgttctgccaggtccatgggggctggcatcccagctccaactcgaggannnnnnnnnnnnnnnnnnnnnnnnnnnnnngagcccaccacttggcagggtgtccagtacctaatcacgctctgttccttggcttttgccttcaagggaattccgagtggtccaagactgcccgaattgccagcacaaaacggattttctcctattcaagggtcccttggggccaggaggaatgaccccagtccaccttttactaaatccctttgggaggaccaatttaacctgggtattaaggaagcccccagggccaacggctacaccttcctggcccaaacctgggttgaagccaggaagaggtcctttccccaaggcccctgggtcaatttaagggcttggccgtttttaccct

SEQ ID NO: 79021 - DNA, 1100 bp, Homo Sapiens
taccaccccgtgcagctgtccaccccgcacgccgtgggcgtcctgctgctgggcctggtgggctactacatcttccgggtggccaaccaccagaaggacctgttccgccgcacggatgggcgctgcctcatctggggcaggaagcccaaggtcatcgagtgctcctacacatccgccgacgggcagaggcaccacagcaagctgctggtgtcgggcttctggggcgtggcccgccacttcaactacgtcggcgacctgatgggcagcctggcctactgcctggcctgtggcggtggccacctgctgccctacttctacatcatctacatggccatcctgctgacccaccgctgcctccgggacgagcaccgctgcgccagcaagtacggccgggactgggagcgctacaccgccgcagtgccttaccgcctgctgcctggaatcttctaagggcacgccctagggagaagccctgtggggctgtcaagagcgtgttctgccaggtccatgggggctggcatcccagctccaactcgaggagcctcagtttcctcatctgtaaactggagagagcccagcacttggcaggtgtccagtacctaatcacgctctgttccttgcttttgccttcaagggaattccgagtgtccagcactgccgtattgccagcacagacggattttctctaatcagtgtccctggggcaggaggatgacccagtcacctttactagtcctttggagacaatttacctgtattaggagcccaggccacgctacactctgcccacactggtgagcaggaggtcttcccacgccctgtcattaggctgcatttactcttgctaaataaaagtgggagtggggcgtgcgcgttatccatgtattgcctttcagctctagatccccctcccctgcctgctctgcagtcgtgggtggggccccgtgcggccggttctcccttggtaccgtggcaccggggttgaactggggacactgggggaaaaaaagggcttttcagggccgtttcccttcctgctcccggctgcacaagttgcccaggaatgcttctgccctggaagtctggcaaaaccttcaaaa

SEQ ID NO: 79022 - DNA, 816 bp, Homo Sapiens
  misc_feature (53)..(53): n is a, c, g, or t
  misc_feature (153)..(153): n is a, c, g, or t
taagggtagatcactataaatgtaacatacaggcatctgtacatgttctgatntcagtacagataatagtgatctcaccaaaaacagaagtcagatactgtgctttttccagcaaagaatctcaaggaaaaggaccttcattcaatattactncatgattctggtctgataacaataaacagttcacaagagcacctaactgttcaggcaaaggctccattccatactcctcctgaggaacccaatgaatgtgacttcaagaatatggatagtttaccttctggtaaaatacatcgaaaagtgaaaataatattaggacgaaatagaaaagaaaatctggaaccaaatgctgaatttgataaaagaactgaatttattacacaagaagaaaacagaatttgtagttcaccggtacagtctttactagacttgtttcagactagtgaagagaaatcagaatttttgggtttcacaagctacacagaaaagagtggtatatgcaatgttttagatatttgggaagaggaaaattcagataatctgttaacagcgtttttctcgtccccttcaacttctacatttactggcttttagaatttaaaaaatgcatacttttcagaagtgataaggatcatattcttgaaatttttataaatatgtatggaaattcttaggatttttttaccagctttgtttacagacccaaatgtaaatattaaaaataaatatttgcaattttctacagaattgaatacctgttaaagaaaaattacagaataaacttgtgactggtcttgttttacattaaaaaaaaca

SEQ ID NO: 79023 - DNA, 339 bp, Homo Sapiens
taaggttaagagcagaggtttactaggccaaagaaagagaatagctctctgttgcagagaggggtcctggagaaatgggttaccccagttgtcttatttaaatggttacccatcagattttaattttatcttctctttgagagcttggtaataagaagcacttaaatcactccaaagaagactttaaaaagggagcagtgaaaaggtcttaataatttattgattgaattaagaaatactagctaattaagaatctgagtctaaacagcacagattttttctttctgcttttaaattgtgttttaaaaaaagagacagggggctgggcgtggtggctca

SEQ ID NO: 79024 - DNA, 795 bp, Homo Sapiens
  misc_feature (38)..(38): n is a, c, g, or t
  misc_feature (54)..(54): n is a, c, g, or t
  misc_feature (81)..(81): n is a, c, g, or t
tgcagaatgagtcactacaccaaaatagttctattatntagaatgtgttaattntaaaggaccctgataggtatttattancatatgcgatccacatttgtgtgaaagcatgtgatcatactaacccagcctcctggaatgtcgctgtacgatgattgatgtctttttctcagtccatagttacaattgtttagtatgctaatcagtccagttccctgaggtttaagatcaaatataaattactctgcttttcgactcattcaggtagcattgtacctgaacctgattgctactttttcatcttaaatattatatttcctcatctaatctgccttcccctcatccacagacatttggagaaggaaatgggagggtgtctgttatccctttctctttgctttgtccccgttgttagactggcagcgtcagttgctcggtgggcttggttagagccgtgggtgaggcaggtggctggcggggacagggagaggctgagagggaagtggtggcatttactgctctgacacttccactgtccctgctggggatgctggggccaaggcctgtggggcctgtgaactgcacagccaggagcaaggaacccactaaatactccgtcacctccatgtcccctctacagtgttaaattattacataagcaggtgaaaggtagaaggcgaattatgtgagtaaatatggtctgttttctcttcagcaaaaatgactatttttgtgtgtgactaatttatttttattattgtaaagatacaataaaccggttgaaatatcaaaaaa

SEQ ID NO: 79025 - DNA, 1022 bp, Homo Sapiens
ttagggagagagaactgcagcagaatctgtggggactcaagatcaacatggaagaagagagtgaaagtgaaagtgagcaaagtatggattctgaggagccggacagccggggaggctcccctcagatggatgacatcaaagtgttccagaatgaagttttaggaacactacagcggggcaaagaggagaacatttcttgtgacaatctcgtcctggaaatcaactctctcaagtatgcctataacataagtctaaaggaggtgatgcaggtactgagccacgtggtcctggagttccccctgcaacagatggattccccgcttgactcaagccgctactgtgccctgctgcttcctctgctaaaggcctggagccctgtttttaggaactacataaagcgcgcagccgaccatttggaagcgttagcagccattgaggacttcttcctagagcatgaagctcttggtatttccatggccaaggtactgatggctttctaccagctggagatcctggctgaggaaacaattctgagctggttcagccaaagagatacaactgacaagggccagcagttgcgcaagaatcaacagctgcagaggttcatccagtggctaaaagaggcagaagaggagtcatctgaagatgactgaagtcacactgcctgctcctttgggtgtgattgagtgccctcctggctcctgggctgggacaagtgaggaactagctgcagagggatgagtgaccaccatccaggctgagactgaaaggagcagaggctggaactacagtattctttcccctgctagcaaccatgtgcctcccatcctgactgtggagttgggatgtggaagtggggctggaacaaagcttctgcctagggaggagctaagcaggcccggcagttggaggaaggccagaggaacagctttgtgctccggctttccctcagggaacagcagagagcagttggctctttctgctgcttgtatatgttaatattaaaagagagtggtgtaaaa

SEQ ID NO: 79026 - DNA, 1903 bp, Homo Sapiens
gcatagtactatagaaccagtgttacaaaaagcaggctggtccggtccggaattcccgggatatcgtcgaccacgcgtcggcggccctgtagtggcgccgcctggtgtggtggttagtcgggctaacaagcgcagcggcgcggggccgggaggcagcggtggcgggggagccagaggggcggaggaggaaccgccgccgcccctacaagcagttctggtggccgatagcttcgatcgccgcttcttccccatctccaaggaccagcctcgggtcctcttgcccctggccaatgtggcattaattgactacactctggaattcctgactgccacaggtgtacaggaaacatttgtcttttgttgctggaaagctgctcaaatcaaagaacatttactgaagtcaaagtggtgccgccctacatctctcaatgtggttcgaataattacatcagagctctatcgatcactgggagatgtcctccgtgatgttgatgccaaggctttggtgcgctctgactttcttctggtgtatggggatgtcatctcaaacatcaatatcaccagagcccttgaggaacacaggttgagacggaagctagaaaaaaatgtttctgtgatgacgatgatcttcaaggagtcatcccccagccacccaactcgttgccacgaagacaatgtggtagtggctgtggatagtaccacaaacagggttctccattttcagaagacccagggtctccggcgttttgcatttcctctgagcctgtttcagggcagtagtgatggagtggaggttcgatatgatttactggattgtcatatcagcatctgttctcctcaggtggcacaactctttacagacaactttgactaccaaactcgagatgactttgtgcgaggtctcttagtgaatgaggagatcctagggaaccagatccacatgcacgtaacagctaaggaatatggtgcccgtgtctccaacctacacatgtactcagctgtctgtgctgacgtcatccgccgatgggtctaccctctcaccccagaggcgaacttcactgacagcaccacccagagctgcactcattcccggcacaacatctaccgagggcctgaggtcagcctgggccatggcagcatcctagaggaaaatgtgctcctgggctctggcactgtcattggcagcaattgctttatcaccaacagtgtcattggccccggctgccacattggtgataacgtggtgctggaccagacctacctgtggcagggtgttcgagtggcggctggagcacagatccatcagtctctgctttgtgacaatgctgaggtcaaggaacgagtgacactgaaaccacgctctgtcctcacttcccaggtggtcgtgggcccaaatatcacgctgcctgagggctcggtgatctctttgcaccctccagatgcagaggaagatgaagatgatggcgagttcagtgatgattctggggctgaccaagaaaaggacaaagtgaagatgaaaggttacaatccagcagaagtaggagctgctggcaagggctacctctggaaagctgcaggcatgaacatggaggaagaggaggaactgcagcagaatctgtggggactcaagatcaacatggaagaagagagtgaaagtgaaagtgagcaaagtatggattctgaggagccggacagccggggaggctcccctcagatggatgacatcaaagtgttccagaatgaagttttaggaacactacagcggggcaaagaggagaacatttcttgtgacaatctcgtcctggaaatcaactctctcaagtatgcctataacataaagtctaaaggaggtgatgcagggtactgaagccacgctggttccctggaaagttcccccctgcca

SEQ ID NO: 79027 - DNA, 666 bp, Homo Sapiens
atgcaccccccacctggggtctggcttctccatctccacacccccttgagggcttctgtctccccctgccccttcgatcgcaggaggcagtgcctggccggggtcgcaggcacctgtcaccccagctcctcactcctcacccactcacatccagtccgtttgtaaaatacacccaggatgagacctgcacgcagtggctcacagcagcacgatttgtgacagcccgaggcggagaacaccgaacacccagtgaaggtgaggggatcagcacggcgcggccacccacgcacccacgcgctggaatgagactcagccacaaggaggtgcgaagctctgacccaggccacagtgcggatgcaccttgaggatgtcacgctcagtgagagacaccagacacagaagggtacgctgtgatcccacttctatgaaatgtccaggacagaccaatccacagaatcagggagaggattcgtgggtgccgggactggggagggggacctgggggtgactaggtgacataatggggacagggctgccttctgggtgatgagaatgttctggaatcagatgggatggctgcacggcgtggtgaaggtactgaacgccacctcactgtaagacggtagattttgtattttaccacaataaacaaaacaaaacaaatcc

SEQ ID NO: 79028 - DNA, 1432 bp, Homo Sapiens
  misc_feature (50)..(50): n is a, c, g, or t
  misc_feature (536)..(544): n is a, c, g, or t
  misc_feature (699)..(811): n is a, c, g, or t
  misc_feature (821)..(821): n is a, c, g, or t
  misc_feature (945)..(953): n is a, c, g, or t
  misc_feature (1354)..(1392): n is a, c, g, or t
ctgatagcgaaggatagcaatgtggaaaattgcttagtcccacctgtatntggggagtgggatgtacatgggcgtttgataccaccattgataggcaagcgactggttggatcaaaagccagtatttagggatctgcagcgagagggccctcaggaagactcttgtaaccatgtgcaatatgtttttattctgactcgcagcttgtgctcagcatgttctttggtttagtttggggttgggggacacattgttcacccagcagaactgggaggtgcaaaggaccgtggaagcaatttttgttttgtttgaggaatacctgtcttggattccttagccccttgccagtcctggagactgtggcaggggccaccaggaaggcagctgtctgctgctgagtcagatcggaaggtggtgaatctttccagagcagctgaaaatctcagcatggagacagtaagaaaagagacggggtgtggataagactctgccaccgtgtcacactagcataggaggctgcacgttcatttgttgttgnnnnnnnnncctttgccaacctccgttctatttatgtgcaagcagtttggattcaagttcttgtatctgtctgttctgggacctggggattgtgagggttccctcacagccagcacgacccccagaaagaggcgtcccacaataaacacgtcacctgctcttgnnnnnnnnnnnnnnnnnnnnnnnnnnnnnnnnnnnnnnnnnnnnnnnnnnnnnnnnnnnnnnnnnnnnnnnnnnnnnnnnnnnnnnnnnnnnnnnnnnnnnnnnnnnnnnnnnggaagtctcntttggccctcggcaaaactttttaaaccaataaggttgggggccgggccccaaaaagaattggaacaggataaaggttggttctcgggccattttgtcacggcaaagggttggcatttcttccnnnnnnnnncccccgggggaaaagagggggtttggaaaccttcaaaaggaatttcgaggggcttcattgtttttttacaaccggacttgcgcctcgcggaattactgtgtccccccaccaggcactcccccgactttttgttctaattaaaagggtttttgaccctaatgaaaccccggaaataaggaatttgtaaccctggaatggaaaaggtgcgcaaaaacatgggccctgtgcaaataaatttgtcccatggggcaaaccccgggggccaaaaagttgaaaattttcgcccggtttgattgagaactgggagaaaatcccccaagggttccttataaaacaaaagaaggtttatcaaaaaaccctttgcggaaataggcgaaaaattgttgcggaaaaggcccccnnnnnnnnnnnnnnnnnnnnnnnnnnnnnnnnnnnnnnngacgcgggggatacctctccgggagcggtaaaaccaggtg

SEQ ID NO: 79029 - DNA, 696 bp, Homo Sapiens
  misc_feature (94)..(352): n is a, c, g, or t
  misc_feature (354)..(402): n is a, c, g, or t
ttcatgatgataaatacatagtatccctcagtatctattccaagatactgaggtcataatcagaagctaagctgggtgcagtggctcatgccannnnnnnnnnnnnnnnnnnnnnnnnnnnnnnnnnnnnnnnnnnnnnnnnnnnnnnnnnnnnnnnnnnnnnnnnnnnnnnnnnnnnnnnnnnnnnnnnnnnnnnnnnnnnnnnnnnnnnnnnnnnnnnnnnnnnnnnnnnnnnnnnnnnnnnnnnnnnnnnnnnnnnnnnnnnnnnnnnnnnnnnnnnnnnnnnnnnnnnnnnnnnnnnnnnnnnnnnnnnnnnnnnnnnnnnnnnnnnnnnnnnnnnnnnnnnnnnnnncnnnnnnnnnnnnnnnnnnnnnnnnnnnnnnnnnnnnnnnnnnnnnnnnncagaagctaaagtaaagttcctttcctggtgctaactgtggtcttcttgacacattaagatgtattttgtattttaagagtctcatgctctaccgttggaactagccagatggccattattttgtattttaaatacataaataggattgaatcaactagaaatgaatctatatgttctgtatatatgaatgactatcttgtttttgctacttcttttgactgcttaattttattattttcatctttattgatcaaatttgaaaataaaattcacaatgtaatactactactaaa

SEQ ID NO: 79030 - DNA, 677 bp, Homo Sapiens
tctagaccatggcctggagccaccagcaaagggaggcgcatacaggggctggccacataggaagagataggtagagatagagtataactcaggaaaaagaccaggcaaatccttagcagaaatgaggacgtggctcagtctgccaacacagctacccggagcaatccctggtgaaggaaggcagctctagagaatgccagccacaggcacgcgcacggcttgcaaaggggtactttggggaattcccagaattactagtgatgggagccctggcaggtttccttcctcgaagagaggagaactggatccagggatgggcattcaacagcgaagcggcacagctggtttccagaaccgtctcccgggattagacagttctgccgcctgaaccctccgacgatgggcctgccaaccaggccaagcccactgggtcaaagccacaggctgtgctacggccccaccccatggcctcaccagaacacagaaaccagagcccagcagcactggctgggccatgtgttggtggccccccgggactcgctaagagtagcaaaggggagagggaagctctgacacacaccatttctacgacctaaatcagtggcctccctctttcctcctcttgtgtataggtaccgagctgtggatacaggagagaatgaataaaattctaacac

SEQ ID NO: 79031 - DNA, 1142 bp, Homo Sapiens
gaaacatcggcaaggtacaggcctcggtgttaatcaggcacgaggagcagcctggctcatggctgtgtgcggcctggggagccgtcttggcctggggagccgtcttggcctgcaagggtgcttcggcgccgccaggctcctgtatccccgtttccagagccgcggccctcagggcgtggaagacggggacaggccacagccttcctcgaagacacccaggatccccaagatttacaccaaaacgggagacaaagggttttctagtaccttcacaggagaaaggagacccaaagatgaccaagtgtttgaagccgtgggaactacagatgaattaagttcagctattgggtttgctctggaattagtcacagaaaagggccatacatttgccgaagagcttcagaaaatccagtgcacattgcaggacgtcggctcggccctggcgacaccatgctcctcggcccgggaggctcacttaaagtataccacgttcaaggcggggcccatcctggagctggagcagtggatcgacaagtacaccagccagctcccaccactcacggccttcatcctgccttcgggaggcaagatcagctcggcgctgcatttctgccgggccgtgtgccgccgggccgagagacgtgtggtgcctcttgtccagatgggagagaccgatgcgaacgtggccaagttcttaaacagactcagtgactatctcttcacgctagccagatatgcagccatgaaggaggggaatcaagagaaaatatacatgaaaaatgacccatcggccgagtctgagggactctgaaatcacagaaagtgggagcttggaggatccctccatggcgatggccgtggagagaggagcttgcccttctggggtcctggttcctgaagagctcacccagagaggctcaaagcagccttttgtcccagctcagctttgatctacacctcttgccaccttcctcaagggactgtgaccctttggggattctgtccctgaccctgcttccccaagctctcctgggtcttggagggatgtgggaatgaattggcattgcaggaaagacaggtaaagtgattgctgcaatgagaaggagctgtgcggaaaaggaataaaagttggaaaggctaaa

SEQ ID NO: 79032 - DNA, 836 bp, Homo Sapiens
aatagtgaatatagaaagtggttataaaagcaggctggtaccggtcggaattcccgggatatcgtcgaccacgcgtcgcagctggctcatggctgtgtgcggcctggggagccgtcttggcctggggagccgtcttggcctgcgcgggtgcttcggcgccgccaggctcctgtatccccgtttccagagccgcggcctcagggcgtggaagacggggacaggccacagccttcctcgaagacacccaggatccccaagatttacaccaaaacgggagacaaagggttttctagtaccttcacaggagaaaggagacccaaagatgaccaagtgtttgaagccgtgggaactacagatgaattaagttcagctattgggtttgctctggaattagtcacagaaaagggccatacatttgccgaagagcttcagaaaatccagtgcacattgcaggacgtcggctcggcctggcgacaccatgctcctcggcccgggaggctcacttaaagtataccacgttcaaggcggggcccatcctggagctggagcagtggatcgacaagtacaccagccagctcccaccactccacggccttcatcctgccttgacagacgctgtcctccagttccccaagtgccctccaggtcctcaccggtccctcccaggccctgcctactctggagcagcgtgcccgtcgggaggcaagatcagctcggcgctgcatttactgccgggccgtgtgccgccgggcacgagagacgtgtggtgcctcttgtccagcatgggagagaccgatgcgaacgtggccaagtttatacaccagactcagtgacta

SEQ ID NO: 79033 - DNA, 710 bp, Homo Sapiens
gaatgaggacaggtatactgttagatgagacgggattaagtctgtggtattgagctgttcagggtgttgctgtattatctcaaactacctgtagtgtatttgtaggtatgggtgagagtaactgtgcttggaatagaaaagccctgctgcatcgagacacaatgctggcagctgcggcagtgtacagaggtaaggggcgaccactctttcacccgcctcaccaaaggcacttgtgctgtatcatgttgattcccttcacgttgccaatgcattttccattcctgttaaggctccctcagacttcttgtccttcctctcaaaacacagatcctgtagctttttccagacagcctttactatttccttaccctcagtattaagaatttttcatgtaagatgttctcagaatcttacaagtatccttgtacccatttctttttgaagaacatgacctttattgagcagaaattttttcctacttgcattttttcagactttaaccattattgtctttttagaaatgtacagaaatgaagatggttcagtacctgctacataccagatctattacatgataggatggaaatatcatgagtcacaggcaagaccagctgaaagaggttccgcaactgtgtcatttggagagctaggaaaaataaacaaccttatgccaccggggaaaaaatcacaataaatatttattcagtgtt

SEQ ID NO: 79034 - DNA, 985 bp, Homo Sapiens
gctaggtacgaggcagggtgttgaatcggcacgaggatgctgcggccggcagggctctggcgcttatgtcggcgaccttgggcggcgagggtcccagcggagaatcttggccgtagggaagtcacctctggtgtctctccccgcggtagcacctcgcccagaaccctgaatattttcgaccgggatttgaaaaggaaacagaagaactgggcagcccggcagcccgagccgaccaaatttgactacctgaaggaggaggttggaagtcggatcgcagaccgtgtatatgacatacccagaaatttcccccttgctttggatcttggttgtggaagaggttacattgcacaatatttgaataaggaaactattggaaagtttttccaagctgacattgcagaaaatgctttgtttgcattgggtgaatgaccttcctagagcacttgagcagattcattatattttaaaaccagatggagtgtttatcggtgcaatgtttggaggcgacacactctatgaacttcggtgttccttacagttagcggaaacggaaagggaaggaggattttctccacacatttctcctttcactgctgtcaatgacctgggacatctgcttgggagagctggctttaatactctgactgtggacactgatgaaattcaagttaactatcctggaatgtttgaattgatggaagatttacaaggtatgggtgagagtaactgtgcttggaatagaaaagccctgctgcatcgagacacaatgctggcagttgcggcagtgtacagagaaatgtacagaaatgaagatggttcagtacctgctacataccagatatattacatgataggatggaaatatcatgagtcacaggcaagaccagctgaaagaggttccgcaactgtgtcatttggagagctaggaaaaataaacaaccttatgccaccggggaaaaaatcacaataaatatttattcagtgt

SEQ ID NO: 79035 - DNA, 1211 bp, Homo Sapiens
tcgctagtacgaggctgggtgtggaattcggcacgaggaattggggtcgcagctggagatgctgcggccggcaggctctggcgcttatgtcggcgaccttgggcggcgagggtcccagcggagaatcttggccgtagggaagtcacctctggtgtctctccccgcggtagcacctcgcccagaaccctgaatattttcgaccgggatttgaaaaggaaacagaagaactgggcagcccggcagcccgagccgaccaaatttgactacctgaaggaggaggttggaagtcggatcgcagaccgtgtatatgacatacccagaaatttcccccttgctttggatcttggttgtggaagaggttacattgcacaatatttgaataaggaaactattggaaagtttttccaagctgacattgcagaaaatgctttgaaaaattcctcagaaacagaaatacctactgtcagcgttttagctgatgaagaattccttcccttcaaagaaaatacatttgacctggtggttagcagtttaagtttgcattgggtgaatgaccttcctagagcacttgagcagattcattatattttaaaaccagatggagtgtttatcggtgcaatgtttggaggcgacacactctatgaacttcggtgttccttacagttagcggaaacggaaagggaaggaggattttctccacacatttctcctttcactgctgtcaatgacctgggacatctgcttgggagagctggctttaatactctgactgtggaccactgatgaaattcaagttaactatcctggaatgtttgaattgatggaagatttacaagaacaaaagtccagaatgttgacctaattttacaaaacaagctgcatatcagctgatgaatgcatgagaaattttcaaggctttcacagtggtcttaaggtatgggtgagagtaactgtgcttggaatagaaaagccctgctgcatcgagacacaatgctggcagctgcggcagtgtacagagaaatgtacagaaatgaagatggttcagtacctgctacataccagatctattacatgataggatggaaatatcatgagtcacaggcaagaccagctgaaagaggttccgcaactgtgtcatttggagagctaggaaaaataaacaaccttatgccaccggggaaaaaatcacaataaatatttattcagtgtta

SEQ ID NO: 79036 - DNA, 334 bp, Homo Sapiens
ctgaagaatattcaaagcattttctgcaatgtcagcttggaaaaactttccaatagtttccttattcaaatattgtgcaatgtaacctcttccacaaccaagatccaaagcaagggggaaatttctgggtatgtcatatacacggtctgcgatccgacttccaacctgaaggattacacgaggcgtaggttaacggggaagtaacactctttttccagtattcaacaatccacaagttacttatgttttaaaataagtacttccctttatccccttttcaatttcaccacaggaactttcttctcaaaccaccaggaaacaaaatgaaccaagt

SEQ ID NO: 79037 - DNA, 707 bp, Homo Sapiens
  misc_feature (454)..(462): n is a, c, g, or t
ttggagccacagaagcagtgcactcattggatgtctgttcttaacacagcttctctttctacattaaaaaaaatcattattgcattttggaaagcagtgctcatcaaaagcaacttttaaaacctattttattgttcctttaaatttctctcccgctgaaactgccctggagaggctatctgctgctcttccatttacccacatcaggttattctccatgtcactcagtggagatgactccagatgtgtttaaagactggacaattcacctatactgtgtaggaaattacctccttaattacctggtagaattgtcagcagacatgttcatccgatgatagtactgcagttttctattaataatttgcagacttttatctaacctgcactcatgtacagattattaaaagttttaaaatgtaactgatcagtattgatcaatcattgtcttgannnnnnnnnacagcgtatatttctaatcatattttttaaagccaagagaactggttgaatgaatgtttattttcctgaaggtatttttaagataaagcttcctaatggcgtgtaaactttgcatatgtatgtagtttgatacatattgtcacatttgaaaatcttgtgggttgtaactggttttatacaaaatatcgaatagtggaaattgtataattacaatcatgtaattaaaagtattaacccaaaaaaaa

SEQ ID NO: 79038 - DNA, 1093 bp, Homo Sapiens
gggggcagcttcagcctcctgcagatgttcctccagtcctacaacaacgaccagtggacgctgatcttcggagacccaaccaagtttggactcggggtcttctccatcgtcttcgacgtcgtcttcttcatccagcacttctgtttgtacagaaagagaccggggcttcaggcagcgcgcacaggctctggcagccgtctcaggcaggactgggcaccaagcttgcagccgaaggccttgccccaaactaccagcgtttctgcaagcagcttgaagggctgaccttgcagccgggtgagccaagggcactttgctgccaccactgcattcccagagatcaagcagcccggtgccgtggccagtgaactcagaggtgctggtggacgggctaggactttggggttaggccatggggctctttctctgaaggccactttcctgacgtactctctgtacataactcagcgtccgtgactgcagtaacagccagccctacccagagtatttctgagccatgaggggcccaccagattggttctgaattggattcatgcccagcgcattagcatagtaactcctttcagattttttggagggacgtttggaagtggcttactctcttctgccctctctcctacctccaccttctcagatgagccccatctgagcacatccagctgctccttacccagcatctggagtacaggacatagctctctcctgctaccagtctgtgccttagaggtctgttaggcctgccaaacggcgaccagctcccctggagcgagggcaggccccttccctctctttccccagacacctacttgagactcaccaatttctggcctgttcaggagcctcagataagtatttgtacttgagaccacctcacacaatctgtatgggcccaaccctgatctcaaacctccttccctctgcccaaagctgtccttcctatggcaggaggggtgggggtcccaggacgtgcctcatacatgacttgagcttgtcagtccactgagtttccttctacgagatcaacgcgaggggcctgtatcttgaattaaaacctactcgcttccattaaaaaaaa

SEQ ID NO: 79039 - DNA, 928 bp, Homo Sapiens
  misc_feature (57)..(108): n is a, c, g, or t
  misc_feature (112)..(146): n is a, c, g, or t
ttctcccctcgttcctcccccgacccgtccccaacgctcgctcctatagggcgctannnnnnnnnnnnnnnnnnnnnnnnnnnnnnnnnnnnnnnnnnnnnnnnnnnnccgnnnnnnnnnnnnnnnnnnnnnnnnnnnnnnnnnnncagtcgacggtaccggacatatgcccgggaattcggccattacggccggggttttattagtgtgctgttgagagaggtatcctgttgttcttactcactcttctcataaaataggaaatattttagttctgtttcttggggaatatgttactctttaccctaggatgctatttaagttgtactgtattagaacactgggtgtgtcataccgttatctgtgcagaatatatttccttattcagaatttctaaaaatttaagttctgtaagggctaatatattctcttcctatggttttagatgtttgatgtcttcttagtatggcataatgtcatgatttactcattaaactttgattttgtatgctattttttcactataggatgactataattctggtcactaaatatacactttagatagatgaagaagcccaaaaacagataaattcctgattgctaatttacatagaaatgtattctcttggttttttaaataaaagcaaaattaacaatgatctgtgctctgaaagttttgaaaatatatttgaacaatttgaatataaattcatcatttagtcctcaaaatatatacagcattgctaagattttcagatatctattgtggatcttttaaaggttttgaccattttgttatgaggaattatacatgtatcacattcactatattaaaattgcacttttattttttcctgtgtgtcatgttggtttttggtacttgtattgtcatttggagaaacaataaaagatttctaaaccactc

SEQ ID NO: 79040 - DNA, 714 bp, Homo Sapiens
gtctatgcagcaccaaaaaaggactcacctcccaaaaattccgtgaaggttgatgagctttcactctactcagttcctgagggtcaatcgaagtatgtggaggaggcaaggagccagcttgaagaaagcatctcacagctccgacactattgcgagccatacacaacctggtgtcaggaaacgtactcccaaactaagcccaagatgcaaagtttggttcaatgggggttagacagctatgactatctccaaaatgcacctcctggattttttccgagacttggtgttattggttttgctggccttattggactccttttggctagaggttcaaaaataaagaagctagtgtatccgcctggtttcatgggattagctgcctccctctattatccacaacaagccatcgtgtttgcccaggtcagtggggagagattatatgactggggtttacgaggatatatagtcatagaagatttgtggaaggagaactttcaaaagccaggaaatgtgaagaattcacctggaactaagtagaaaactccatgctctgccatcttaatcaggaaaaactagaccagacctctgttatcttctgtgaaatcatcctacaagcaaactaacctggaatcccttcacctagagataatgtacaagccttagaactcctcattctcatgttgctatttatgtacctaattaaaacccaagtta

SEQ ID NO: 79041 - DNA, 1139 bp, Homo Sapiens
taaggctaggtagcgaggcctgggtggtgaattcggcacgaggccaggcgcgacgcgctgcggctcagcgacgcggcttctagaaccgggtgattgaactaaaccttcgccgcaccgagttggcagtacggccgtcacccgcaccgctgcctgcttgcggttggagaaatcaaggccctaccgggcctccgtagtcacctctctatagtgggcgtggccgaggccggggtgaccctgccggagcctccgctgccagcgacatgttcaaggtaattcagaggtccgtggggccagccagcctgagcttgctcaccttcaaagtctatgcagcaccaaaaaaggactcacctcccaaaaattccgtgaaggttgatgagctttcactctactcagttcctgagggtcaatcgaagtatgtggaggaggcaaggagccagcttgaagaaagcatctcacagctccgacactattgcgagccatacacaacctggtgtcaggaaacgtactcccaaactaagcccaagatgcaaagtttggttcaatgggggttagacagctatgactatctccaaaatgcacctcctggattttttccgagacttggtgttattggttttgctggccttattggactccttttggctagaggttcaaaaataaagaagctagtgtatccgcctggtttcatgggattagctgcctccctctattatccacaacaagccatcgtgtttgcccaggtcagtggggagagattatatgactggggtttacgaggatatatagtcatagaagatttgtggaaggagaactttcaaaagccaggaaatgtgaagaattcacctggaactaagtagaaaactccatgctctgccatcttaatcagttataggtaaacattggaaactccatagaataaatcagtatttctacagaaaaatggcatagaagtcagtattgaatgtattaaattggctttcttcttcaggaaaaactagaccagacctctgttatcttctgtgaaatcatcctacaagcaaactaacctggaatcccttcacctagagataatgtacaagccttagaactcctcattctcatgttgctatttatgtacctaattaaaacccaagttaaaa

SEQ ID NO: 79042 - DNA, 697 bp, Homo Sapiens
atgcagcgaccgtagccagaccaagtgcatcttcagcctccacggtgccaggttattctgaggacggcggggcgctgcgaggagaagttattcctgaacatgagtttgcgacgggaccagtgtgtcttgatgatgagaatgagtttcctcctataatcttgtgccgtggaaatcagaagggcaaaacgaagcagtcatgatgagaagcacacctcagaaatcaggacatcccccctatcaggtggttttggagaaaacaaggaaggcggaagaatggagtgcaattgtgtgagcagaaaggggggcaggaatcccgggtgctccactgcttaaaccacaggacctggttaactcctcaccaagcttcccacgaccctggttgccaatgggcgcgggagacattgtatacacatcatgctatttaaaatacgttcaaactatagtgtaaatgctaattaaccatattggtatataaccggaattttatattaaaaggggcctcctttttaaatatatgccgtgtaaaaaatgtacttataggaacatctctttgaattgtatttcttgtatattacatacttagagagagactcttttagccaggcaaagtcttttttggctgtggctggaataaatcatttattacttgggagtcccattttggacactaataataaaatcatggcaatgcaaaaaa

SEQ ID NO: 79043 - DNA, 711 bp, Homo Sapiens
  misc_feature (135)..(135): n is a, c, g, or t
aatgtctatcgccagccccacccatacaagactcggcctggccaaagaagtctctctcacacgtatgcaatacactagcatcacaatccatacagatgttcctataagtacatttttgacacggcatatatttanaaagcaggccccttttaatatgaaattccggttacatgccaatatggttaattagcaattacactatagtttgaacgtatttcaaatagcatgatgtgtatacaatgtctcccgcgcccattggcaaccagggtcgtgggaagcttggtgaggagttaaccaggtcctgtggtttaagcagtggagcacccgggattcctgcccccctttctgctcacacaattgcactccattcttccgccttccttgttttctccaaaaccacctgataggggggatgtcctgatttctgaggtgtgcttctcatcatgactgcttcgttttgcccttctgatttccacggcacaagattatctaccaaaatcaaaacagaatggccttactcttctcaggaagaggctggtaggcaggtgcattatcaacaggtctgtgcccatgcagagtgagcagggagaggctgggcactgtggaatttttctgtctgaactcgctcatggccacagaatggtcacccagcttatttaggtgtagacaagtatgacacagttctagaaaatactgactataaaaatgaaa

SEQ ID NO: 79044 - DNA, 762 bp, Homo Sapiens
tttagtgtgtagtgacagggaataggacatgatggaaaagggtacagatggagaggcctacgaccattccagtttttacctatgtggcgatcacacagtgcattcactgtgataatgagtccagttgtatgcttataatttgtgtagttttcagcatgttttacttctctaaaaatgtttatagtaaaaaaaattaacatcttactattcaattcttgtgttcgttgtagtttagaaagaataagaaacaatggttttgctgtgttgttgatgttatttggaaaactgtttttaacgtttacagggagaaataaattttcagctgctaaaactaaattctgaaatcatttggtcctcttgaaggaaggtcaacaccggcatcatgtagcactagagtctgtgtgtcactactcagcaccaatcacccggaaatcacattttcttcctacctgtgtttctgtctgttgatcctaacttctttaattacactaaacgtgtctgtaacttctccatctgtaaagacaaaaagctgtagggggtggcctgggatggagggtcccctgtaaatgttctggagtggtgccaagatttcagtgccccctaggtcggcctgcataagcttcactctccccagagcctcctccattgtttgctgagtgtacttcacactctccggaaagcatgcctcataggaagagccaaatccatagatgttgaaataacagcctataggtaaactcttcagcagcaaaatcagtgttt

SEQ ID NO: 79045 - DNA, 862 bp, Homo Sapiens
  misc_feature (127)..(127): n is a, c, g, or t
cttgtatgtcgctttggacagaggaaagtggggtaaaatgctacctgtacgtctgacatgaaaacttctcaccgcctcagcagctgaactaaaaacctgaatagccatgacaagagtttgcatttcnttgatgattcatctccatgagtgcacaatccctgaactcactgtcttttctccacacttgtcctaagccaaggtagatttgtacgtagacagactggtgagcaagcattatatttaatttttacccttgcatgacattttccattttaatcaataacattatttggcctgagcttgtgggtctgttcagactgtctcctctcaagggtttgaaactgcatctgaatgcctgccttcaatcctggccaagttggagtagactggtatgagaaaactatgattagttcacatttactggtgcatccttgatcctctcacagatagaggtcttaaaggttggatcatgtaacattgcttagtagaagaatcttcttctaaggatgatgggctttctacagcctgcttaccactaacagtaaggaatctttcataaacacacctcagtttgttcccagtgggcttagagggaggacctgatgactgattccaggatacttgtacttctaataacatttttcatgaatcatgagaaaatttccacagatacttcccttagaaaatttgctataaactctgtatcattggtagcacaaatttgagcgaggccttgtcaattttaaggtggaaataggaaggaccacaacatgacccgtaagtcaagaaggtagacatttcatatccagcttccttgcttagtctcctttcagtatttggcaataaaagaaagaagaaatag

SEQ ID NO: 79046 - DNA, 2008 bp, Homo Sapiens
cggcattagtgaatatagaacagtgtcaaaaagcaggctggtacggtcggaatcccgggatatgtcgaccacgcgtcggtcgcgggagccggtgcggtgtgaggggcgcgttcgcagcagccgccggacgggcatgtgttgggcgccgggcccgcctcgcctgtctcggggagcccagggtaaaggcagcagtaatgctaacgctagcaagtaaactgaagcgtgacgatggtctcaaagggtcccggacggcagccacagcgtccgactcgactcggagggtttctgtgagagacaaattgcttgttaaagaggttgcagaacttgaagctaatttaccttgtacatgtaaagtgcattttcctgatccaaacaagcttcattgttttcagctaacagtaaccccagatgagggttactaccagggtggaaaatttcagtttgaaactgaagttcccgatgcgtacaacatggtgcctcccaaagtgaaatgcctgaccaagatctggcaccccaacatcacagagacaggggaaatatgtctgagtttattgagagaacattcaattgatggcactggctgggctcccacaagaacattaaaggatgtcgtttggggattaaactctttgtttactgatcttttgaattttgatgatccactgaatattgaagctgcagaacatcatttgcgggacaaggaggacttccggaataaagtggatgactacatcaaacgttatgccagatgataaaaggggacgattgcaggcccatggactgtgttacagtttgtctctaacatgaaacagcaagaggtagccccctctcccgtcctcatgctccctctcagtcccctggattgccccagtcctgtgaccatgttgccctgaagaagaccatcttcatgactgctcattgtagatggagaattcaacataaatacagcaagaaaatgtgtttgggcttctgaagagttgtctgcttaccttaacatgtttacttttttgaacttgtactgtataggctgttggtgaaattcttaagaagttgtaatgaactcaaaattgaggccagagcttgctttcccttttcccaaacaaaattggttttctgcacaagcgatgctaatgatgtgttcagtgtaactcgcagattggcaataagatacccgctacaaactgtgattggatgcaaaatctcttagcttctttcacgaatgttggccctgcctagatgttgtgaagcctcccagaatgcatagagtcattcactgtagatctcttattgaaatgcgtattttatttaatgtaagtatattttggaacagatttgtaatttgtacaattcaatgctttaattattttttctattctcatttagtttgtattttcattgtatagagcagacagaaagatgttgggtcaagcaactattgaagagaaatacaaagaaaatatgaaaggcacattattcattttgtccaaatgcaatgagaatctcactcttaaaaatcagctcttgctttcgggtccggatgtggtgagcacattttggagccctttgaagctagatttggatgatcaaaacaaaaaggcagggagcccattctaacatgctgcccagaggaaactggctggagcctggaccagctggggctgatgcttttgcagtggtcatgtgattgtgacctggtagctacttatcagagagccagaccctgctgtcctgggagacaggagcgatgcctcaggaatcagcccaatgtctgatgtcactgagactgtacctgtggccttcttctgagtttgctatggctccaggccctgccggtggggtgagcctcctaggccttggaggaccaggagtcaacagtggcatatgccatcctcggccaggttaatatactgcagaggaaaagccctgaagagaggcaagtggatttactccagcatgtagacatttgaaccagtgaaatcaaacacaaaataaatgtctgtctagtttc

SEQ ID NO: 79047 - DNA, 706 bp, Homo Sapiens
  misc_feature (80)..(80): n is a, c, g, or t
  misc_feature (336)..(393): n is a, c, g, or t
cataaagcacaacttgaaggaatactgtgtctacctattccagtttcgttttctcatcccaggagctcgggacctcaccngtctctcaccagaactacaactgtcccctaactttgatcctattttccccagattttggcagctgtttatagcctggatgcccctccaccatggctctgagtacatcccttccctggctcaacaaccttcaaggtctcccctgtggggtccaacttcaagcccctacctctctcacactgtcatctctcattccccaaacaaggcccagctgcatgaaagtgctgctttccaagaacaggcctcacattgagattnnnnnnnnnnnnnnnnnnnnnnnnnnnnnnnnnnnnnnnnnnnnnnnnnnnnnnnnnncctgacacataagcactcctgcagcgtgcagtcaccctctcccctgagctgagattccacttccaaccctagatccagctcaaagccaccttctaggtgatgaacttcccaaattcttcaagataaaaacactgggaaacaaaggatgaaattcctgtcaatctcctccaggagctcaggccagagatcatggacaagtctcctgcatccttcactacctcccctcctcactcacacttgtaccaagacatctctgagtacaaagtaaatgctggaaaaagtgggctatgttaggggagaaacagtagagtaa

SEQ ID NO: 79048 - DNA, 1605 bp, Homo Sapiens
ggtaccggtccggaattcccgggattgcaattgccccggtggtgggagctgggagacccctgtgcttggacgggacagggtcgggggacacgcaggatgagccccgcgaccactggcacattcttgctgacagtgtacagtattttctccaaggtacactccgatcggaatgtatacccatcagcaggtgtcctctttgttcatgttttggaaagagaatattttaagggggaatttccaccttacccaaaacctggcgagattagtaatgatcccataacatttaatacaaatttaatgggttacccagaccgacctggatggcttcgatatatccaaaggacaccatatagtgatggagtcctatatgggtccccaacagctgaaaatgtggggaagccaacaatcattgagataactgcctacaacaggcgcacctttgagactgcaaggcataatttgataattaatataatgtctgcagaagacttcccgttgccatatcaagcagaattcttcattaagaatatgaatgtagaagaaatgttggccagtgaggttcttggagactttcttggcgcagtgaaaaatgtgtggcagccagagcgcctgaacgccataaacatcacatcggccctagacaggggtggcagggtgccacttcccattaatgacctgaaggagggcgtttatgtcatggttggtgcagatgtcccgttttcttcttgtttacgagaagttgaaaatccacagaatcaattgagatgtagtcaagaaatggagcctgtaataacatgtgataaaaaatttcgtactcaattttacattgactggtgcaaaatttcattggttgataaaacaaagcaagtgtccacctatcaggaagtgattcgtggagaggggattttacctgatggtggagaatacaaacccccttctgattctttgaaaagcagagactattacacggatttcctaattacactggctgtgccctcggcagtggcactggtcctttttctaatacttgcttatatcatgtgctgccgacgggaaggcgtggaaaagagaaacatgcaaacaccagacatccaactggtccatcacagtgctattcagaaatctaccaaggagcttcgagacatgtccaagaatagagagatagcatggcccctgtcaacgcttcctgtgttccaccctgtgactggggaaatcatacctcctttacacacagacaactatgatagcacaaacatgccattgatgcaaacgcagcagaacttgccacatcagactcagattccccaacagcagactacaggtaaatggtatccctgaagaaagaaaactgactgaagcaatgaatttataatcagacaatatagcagttacatcacatttcttttctcttccaataatgcatgagcttttctggcatatgttatgcatgttggcagtattaagtgtataccaaataatacaacataactttcattttactaatgtatttttttgtacttaaagcatttttgacaatttgtaaaacattgatgactttatatttgttacaataaaagttgatctttaaaataaatattattaatg

SEQ ID NO: 79049 - DNA, 768 bp, Homo Sapiens
  misc_feature (21)..(21): n is a, c, g, or t
  misc_feature (378)..(402): n is a, c, g, or t
aaatgcccttaaagtaccaanaaataccattaagtaaaatgaaaagttatggttggtattatttgggtatacacctaatacctgcccaacatgccataacatatgcccagaaaagctcatgcattattgggaagagaaaagaaatgtgatgtaactgctatattgtctgattataaattcattgcttcagtcagttttctttcttcagggataccatttacctgcaatgtgtaagaatgaatatgggcaggagttagtcagggcatggatacttttagattttgagcaaagcaaattatggcaaggagaaagtttccatcttcttaatacaatgtaaaataattacattgcattatttctctgtatttggtttttttnnnnnnnnnnnnnnnnnnnnnnnnnttctaaattagtcttctccttcttggaccaaagctataatattttgtatttcccaagaggtacagtctgaaaattcctcccacaataaacaaaaagaatggaggttaactgcaggatgtataactgtaccttttaatcgtggcttttaaaaaaatatcatgtgggctggtagggcagagaaaatgagaaaacctgaaggggcatcaaacctaatggtttgggcctagtccaaaagttagtgcaattgtcagcttttaactgctctattatcccagctagtgctcaagtccaggaacacaacaccagcagctagttcatttcttaaagcttcgataggaatttaaaagaaaacaaggaaaaaaatga

SEQ ID NO: 79050 - DNA, 453 bp, Homo Sapiens
tattaaaagtatgtgagatgtatgcctttctgaaatagtttattgaatgcccaatgtgccataatgtcttattattttaaaagataaaaatacttcataagtttttcaaattgatgacccatcaggctaatatatgattttaaatatatgttgttttatttctttttgacctagcatccaactggtccatcacagtgctattcagaaatctaccaaggagcttcgagacatgtccaagaatagagagatagcatggcccctgtcaacgcttcctgtgttccaccctgtgactggggaaatcatacctcctttacacacagacaactatgatagcacaaacatgccattgatgcaaacgcagcagaacttgccacatcagactcagattccccaacagcagactacaggtaaatggtatccctgaagaaagaaaactgactgaagcaatgaatt

SEQ ID NO: 79051 - DNA, 1657 bp, Homo Sapiens
gggaacgcagcggcggacctgtgaggggatccgacttgccggcagaacttacgctgcgggaccccgggcactgttgctgctgcgggaggcagatgtgattctccttgtcacgtgctctatcagggagaaggctgagcagaccatctggaaccgtttacatcagcttaaagccttgaagacaaggcggccccgctcccgggttcctctgaggattggaattctaggctgcatggctgagaggttgaaggaggagattctcaacagagagaaaatggtagatattttggctggtcctgatgcctaccgggaccttccccggctgctggctgttgctgagtcgggccagcaagctgccaacgtgctgctctctctggacgagacctatgctgatgtcatgccagtccagacaagcgccagtgccacgtctgcctttgtgtcaatcatgcgaggctgtgacaacatgtgtagctactgcattgttcctttcaccccggggcagggagaggagtcggcctattgcctccattctagaggaagtgaagaagctttctgagcaggggctgaaagaagtgacacttcttggtcagaatgttaatagttttcgggacaaatttcggaggtccagttcaacagtgcagtgcctaccaatctcagtcgtggctttaccaccaactataaaaccaagcaaggaggacttcgttttgctcatcttctggatcagggcctccagagtagatcctgaaatgaggatccgttttacctctccccaccccaaggattttcctgatgaggttctgcagctgattcatgagagagataacatctgtaaacagatccacctgccagcccagagtggaagcagccgtgtgttggaggccatgcggaggggatattcaagagaagcttatgtggagttagttcaccatattagagaatctattccaggtgtgagcctcagcagcgatttcattgctggcttttgtggtgagacggaggaagatcacgtccagacagtctctttgctccgggaagttcagtacaacatgggcttcctctttgcctacagcatgagacagaagacacgggcatatcataggctgaaggatgatgtcccggaagaggtaaaattaaggcgtttggaggaactcatcactatcttccgagaagaagcaacaaaagccaatcagacctctgtgggctgtacccagttggtgctagtggaagggctcagtaaacgctctgccactgacctgtgtggcaggaatgatggaaaccttaaggtgatcttccctgatgcagagatggaggatgtcaataaccctgggctcagggtcagagcccagcctggggactatgtgctggtgaagatcacctcagccagttctcagacacttaggggacatgttctctgcaggaccactctgagggactcttctgcatattgctgacctgagaggatggcctcagagctgacttgggcaatcctccccaacaggaaggggagacattgcctgccactgaggaaacaggtcatgaaggtggagataagctgcaaggggcgaagcaactttatgtcagtggaaaacgtgtctctttaaagctgctatgtgaacagcttttacagtcattaaatttacctaaactaaggttaaaaaaa

SEQ ID NO: 79052 - DNA, 1095 bp, Homo Sapiens
ataaggctaggtacgaggccgggtggcgaattcggcacgagggaatgttaatagttttcgggacaattcggaggtccagttcaacagtgcagtgcctaccaatctcagtcgtggctttaccaccaactataaaaccaagcaaggaggacttcgttttgctcatcttctggatcaggtctccagagtagatcctgaaatgaggatccgttttacctctccccaccccaaggattttcctgatgaggttctgcagctgattcatgagagagataacatctgtaaacagatccacctgccagcccagagtggaagcagccgtgtgttggaggccatgcggaggggatattcaagagaagcttatgtggagttagttcaccatattagagaatctattccaggtgtgagcctcagcagcgatttcattgctggcttttgtggtgagacggaggaagatcacgtccagacagtctctttgctccgggaagttcagtacaacatgggcttcctctttgcctacagcatgagacagaagacacgggcatatcataggctgaaggatgatgtcccggaagaggtaaaattaaggcgtttggaggaactcatcactatcttccgagaagaagcaacaaaagccaatcagacctctgtgggctgtacccagttggtgctagtggaagggctcagtaaacgctctgccactgacctgtgtggcaggaatgatggaaaccttaaggtgatcttccctgatgcagagatggaggatgtcaataaccctgggctcagggtcagagcccagctggggactatgtgctggtgaagatcactcagcagttctcagacacttaggggacatgttctctgcaggaccactctgagggactcttctgcatattgctgacctgagaggatggcctcagagctgacttgggcaatcctccccaacaggaaggggagacattgcctgccactgaggaaacaggtcatcgaaaatgaagataagctgcaaggggcgaagcaactttatgtcagtggaaaacgtgtctctttaaagctgctatgtgaacagcttttacagtcattaaatttacctaaact

SEQ ID NO: 79053 - DNA, 866 bp, Homo Sapiens
cagtaactataacggtttaaggtagcgaggcctgggtggcgaattcggcacgagggacctgtgaggggatccgacttgccggcagaacttacgctgcgggaccccgggcactgttgctgctgcgggagactgtgggctgtttagtgccatgcaccctttacagtgtgtcctccaagtgcagaggtctctggggtggggaccattggcctctgtgtcttggctgtcgctgaggatgtgcagggcacacagcagtctctctagtaccatgtgtcccagtccagagaggcaggaggatggagctcggaaggatttcagctccaggctggctgctggaccgacttttcaacattttttaaaaagtgcctcagctcctcaggagaagctgtcttcagaagtggaagacccacctccctatctcatgatggatgaacttcttggaaggcagagaaaagtctacctcgagacctatggctgccagatgaatgtgaatgacacagagatagcctggtccatcttacagaagagtggctacctgcggaccagtaacctccaagaggcagatgtgattctccttgtcacgtgctctatcagggagaaggctgagcagaccatctggaaccgtttacatcagcttaaagccttgaagacaaggcggccccgctcccgggttcctctgaggattggaattctaggctgcatggctgagaggttgaaggaggagattctcaacagagagaaaatggtagatattttggctggtcctgatgcctaccgggacccttcccggctgctggctgttgctgagtcgggccagcaagctgccaacgtgctgctctctctggacgagactatgctgatgtcatgcc

SEQ ID NO: 79054 - DNA, 879 bp, Homo Sapiens
gtatcgctgtgtatgaacgcagcggcggacctgtgaggggatccgacttgccggcagaacttacgctgcgggaccccgggcactgttgctgctgcgggagactgtgggctgtttagtgccatgcaccctttacagtgtgtcctccaagtgcagaggtctctggggtggggaccattggcctctgtgtcttggctgtcgctgaggatgtgcagggcacacagcagtctctctagtaccatgtgtcccagtccagagaggcaggaggatggagctcggaaggatttcagctccaggctggctgctggaccgacttttcaacattttttaaaaagtgcctcagctcctcaggagaagctgtcttcagaagtggaagacccacctccctatctcatgatggatgaacttcttggaaggcagagaaaagtctacctcgagacctatggctgccagatgaatgtgaatgacacagagatagcctggtccatcttacagaagagtggctacctgcggaccagtaacctccaagaggcagatgtgattctccttgtcacatgctctatcagggagaaggctgagcagaccatctggaaccgtttacatcagcttaaagccttgaagacaaggcggcccgctcccgggttcctctgaggattggaattctaggctgcatggtgagaggttgaaggagggggattctcaccgagagaactggtggatttttggctggtcctgatgcctaacggggacttccccggtgctggtgttgctggtcggggcagcagctggccacgtggtggtctctctgggcgggaccttgctggtgtctgccgtcagacagcgccgtgggcctttgcccttgggtcactgcggggtggacaa

SEQ ID NO: 79055 - DNA, 1326 bp, Homo Sapiens
  misc_feature (41)..(79): n is a, c, g, or t
  misc_feature (83)..(117): n is a, c, g, or t
aagatgtataagactcactatagggcgctactcggtcatannnnnnnnnnnnnnnnnnnnnnnnnnnnnnnnnnnnnnnccgnnnnnnnnnnnnnnnnnnnnnnnnnnnnnnnnnnncagtcgacggtaccggacatatgcccgggaattcggccattacggccgggcgtttaaatcctgactgttggaagaggaaaagaaccaattcaggctcacaacaacattaaaccaggatgcttatgttcttaagtctatatttgcatatacattgactcttgatggaaagacttaagaagatcaaggtctcaccatttgtcctcaattcgtgtgaccataagatactgatagcattgagtcttgaaatgatttaataatatgagtgaggatttgctttctccattagagcattaagctaaaactatcaacattttaaaccaaattgccttatttttcttccaaacttcatatatgtctatcaggtaataataggcttgaaaattgatatcctgtggtgctaaagtacagtagaaagagaggagaagtgtatacatgttttattttaaattgtaccgaaaggggaatttaaaaaatatgtaactgctgtttatacattgggctccttactgcttattaatctgtattgtacacatgatgaaatgaagcagaagctgggagtcggcctttcctctagtaaccaccacatggctcagcatctgtgccaaacataggcgctcctagtctggtcagtgccaagaggctaccagaacatggggcaggtggctggtgttggtgtcccagcctaagagccacctgctgcagttaccatggcatgctgagttgatgcaccaggtggcagcagccatccgttattatttccaatggagacctagcccaggccaaggtaaagttagttaatagcattgggatatagtcactgtaatggtgctattaacaaacagtcaacaccattgtattttttaacttcgtgttctgtatctcctcagccatgtatcttaaatatattttgtcatcataatctttatggtgggggcagactttgcacttactgcagtgcaacacttgcactttaattttcctccaactgtctaaaattagagcaaatacattggcaatacagctgcttttgctctgagctacaatcatggcttttcatgttacttaccaagtggtgtttctggttaggaatcacagctgtaaaattgatttcagttcatcacacttcttcatgatgttgcccctaaattttgcacactatattcttgtatattatttcaaataaatggaaaaaaaagttgcttatctctg

SEQ ID NO: 79056 - DNA, 471 bp, Homo Sapiens
tacaatttaaaataaaacatgtatacacttctcttctctttctactgtactttagcaccacaggatatcaattttcaagcctattattacctgatagacatatatgaagtttggaagaaaaataaggcaatttggtttaaaatgttgatagttttagcttaatgctctaatggagaaagcaaatcctcactcatattattaaatcatttcaagactcaatgctatcagtatcttatggtcacacgaattgaggacaaatggtgagaccttgatcttcttaagtctttccatcaagagtcaatgtatatgcaaatatagacttaagaacataagcatcctggtttaatgttgttgtgagccctgtggaaataaaattaaactcagtgaatgtttacaaatcaatacatagtaatcctatatatgaaagctaagatgtataagatgtttataaatttactattagaaaataaa

SEQ ID NO: 79057 - DNA, 1140 bp, Homo Sapiens
  misc_feature (821)..(821): n is a, c, g, or t
  misc_feature (849)..(849): n is a, c, g, or t
agatgaatgtgaagaagtagaacatcagtgccaaaagactattcagcaactggaaactgtcctgggagagccactccagagctatttctaagactttctgtggtgtttcatactctactcagagttcacactcatatttcatatttttatttttgggtgttgggtgccatgttacttttggtgccttaatacacctacttggattacttacaaatgttttatcacttcgttacaaaatccccacctggcttgtgctgccacataagcctctcctgcctatcgtatagagctgcagaaagagtaaatgatacacggtatttttatacagactgctgtgtttgtttaaacatttattattctcttcctgattgatggtaataatattagacttgttaattttagcacccaaagctgacgcctcatttgcactgtaagccttaactcttctgtacagcagtatcttatatacatggtatccatgttgcagatttcactcaaagttgctctatttcaagaaaatgaagttatttagcaatcaacagaagtacttttgactgtaaagcctacttttcattttgggtaggcgaacttcagccttcgtttctttgttgtgcccataaagagaagtggttctggaatgctttttttaacccaggagtgtgactgtcacctttatcctttgttcttttgggaaacgggagagatgaaggcaacacgctgcttctaaaacagctcataactggctgctcacacagagggcccagaaacactgggtggcacgaggaagctcctccaggatttcagaatgaacccagttccanttggtggttaactaagaactacttgtcntaagaaagtaagtatcagtagatttttttcaatgctttgaagtgccctaatctctagtactgggtcatggtgaagttggaaagtgagggttcaaataaaattagatctgccccctttttaaaggcatctaagaacatcccgtagaatgttcgcattgagtttaaaagcctttgaagctaatatagaagtttaatgcagaaatgtggcaagcaaaaggccaacttgcattttagagacagagcttgctagtatagaagtgcatatttctaagaaatgtctcagtaaaattct

SEQ ID NO: 79058 - DNA, 1097 bp, Homo Sapiens
attaatccgatccctgtagggaattgcccctggagcccaaaattcaccaggggggtgttaagaaagatagcgccacctttctaaatgctcaccaaagatgccccccgatccttcaggcagagcatataccagtcccttgatcgatatgtttaataacccagcaacggctgccccgaattcacaaagggtaaataaatcaacaagtacttccgaagatcccagttcacagcgatcagtttcggttgcaacgggactgaacatgatgaagaagcagaaagtgaagaccatcttcccgcacactgcgggctccaacaagaccttactcagcttgcacagggagatgtcatcacgctgctcatccccgaggagaaggatggctggctctatggagaacacgacgtgtccaaggcgaggggttggttcccgtcgtcgtacacgaagttgctggaagaaaatgagacagaagcagtgaccgtgcccacgccaagccccacaccagtgagaagcatcagcaccgtgaacttgtctgagaatagcagtgttgtcatccccccacccgactacttggaatgcttatccatgggggcagctgccgacaggagagcagattcggccaggacgacatccacctttaaggccccagcgtccaagcccgagaccgcggctcctaacgatgccaacgggactgcaaagccgccttttctcagcggagaaaacccctttgccactgtgaaactccgcccgactgtgacgaatgatcgctcagcacccatcattcgatgagaggacagccaaggactctcccgggcctctccggttctcccttgcggaatgatgggcgcgtcctgtctgccacgtgctgacggtcgggaagcttcagtggagaggcctaactctaatgtcgcctgcttaagcaaatcatgcttctctgtttcacgtagttgggttgacaagtttctgcctttaagataaatgagtaatagtctaatgaccagctcagccatttaaaatattttcttcctattctgttcaagaaacagtaaacttggtttcaatctttaccctcgtgctgagaacgccacccaggcctcgctcct

SEQ ID NO: 79059 - DNA, 1784 bp, Homo Sapiens
ggcaggctggtaccgtccggtataatccgggatatcgtcgaccacgcgtcgctcccactctcggccgacacccctcatggccaaccgttacaccatggatctgactgccatctacgagagcctcctgtcgctgagccctgacgtgcccgtgccatccgaccatggagggactgagtccagcccaggctggggctcctcgggaccctggagcctgagcccctccgactccagcccgtctggggtcacctcccgcctgcctggccgctccaccagcctagtggagggccgcagctgtggctgggtgcccccaccccctggcttcgcaccgctggctccccgcctgggccctgagctgtcaccctcacccacttcgcccactgcaacctccaccaccccctcgcgctacaagactgagctatgtcggaccttctcagagagtgggcgctgccgctacggggccaagtgccagtttgcccatggcctgggcgagctgcgccaggccaatcgccaccccaaatacaagacggaactctgtcacaagttctacctccagggccgctgcccctacggctctcgctgccacttcatccacaaccctagcgaagacctggcggccccgggccaccctcctgtgcttcgccagagcatcagcttctccggcctgccctctggccgccggacctcaccaccaccaccaggcctggccggcccttccctgtcctccagctccttctcgccctccagctccccaccaccacctggggaccttccactgtcaccctctgccttctctgctgcccctggcacccccctggctcgaagagaccccaccccagtctgttgcccctcctgccgaaaggccactcctatcagcgtctgggggcccttgggtggcctggttcggaccccctctgtacagtccctgggatccgaccctgatgaatatgccagcagcggcagcagccctggggggctctgactctcccgtcttcgaggcgggagtttttgcaccaccccagcccgtggcagccccccggcgactccccatcttcaatcgcatctctgtttctgagtgacaaagtgactgcccggtcagatcagctggatctcagcggggagccacgtctcttgcactgtggtctctgcatggaccccagggctgtggggacttgggggacagtaatcaagtaatccccttttccagaatgcattaacccactcccctgacctcacgctggggcaggtccccaagtgtgcaagctcagtattcatgatggtgggggatggagtgtcttccgaggttcttgggggaaaaaaaattgtagcatatttaagggaggcaatgaaccctctcccccacctcttccctgcccaaatctgtctcctagaatcttatgtgctgtgaataataggccttcactgcccctccagtttttatagacctgaggttccagtgtctcctggtaactggaacctctcctgagggggaatcctggtgctcaaattaccctccaaaagcaagtagccaaagccgttgccaaaccccacccataaatcaatgggccctttatttatgacgactttatttattctaatatgattttatagtatttatatatattgggtcgtctgcttcccttgtatttttcttcctttttttgtaatattgaaaacgacgatataattattataagtagactataatatatttagtaatatatattattaccttaaaagtctatttttgtgttttgggcatttttaaataaacaatctgagtgtaa

SEQ ID NO: 79060 - DNA, 376 bp, Homo Sapiens
  misc_feature (282)..(282): n is a, c, g, or t
tctagaggctcccagatgatgagagaacaatatatatatctataataaagtcgtcataaataaagggcccattgatttagggttgcaacggcttggctacttgctgttggagggtaatttgagcaccaggattccccctcaggagaggttccagttaccaggagacactggaacctcaggtctataaaaactggaggggcagtgaaggcctattattcacagcacataagattctaggagacagatttgggcagggaagaggtgggggagagggttcattgnctcccttaaatatgctacaattttttttcccccaagaacctcggaagacactccatcccccaacatcatgaatactgagcttgcacacttgggg

SEQ ID NO: 79061 - DNA, 897 bp, Homo Sapiens
  misc_feature (39)..(39): n is a, c, g, or t
  misc_feature (47)..(47): n is a, c, g, or t
  misc_feature (55)..(55): n is a, c, g, or t
  misc_feature (73)..(73): n is a, c, g, or t
  misc_feature (114)..(114): n is a, c, g, or t
  misc_feature (133)..(133): n is a, c, g, or t
  misc_feature (190)..(190): n is a, c, g, or t
  misc_feature (205)..(205): n is a, c, g, or t
  misc_feature (250)..(250): n is a, c, g, or t
  misc_feature (453)..(453): n is a, c, g, or t
ccttatcacgaccggagcaggagagtactgacgctcttnttgcatcntctcgatntactctgtgggccctctntcagagcagcatctccagcccctgagccaaaccagcctcantcaccacagggggcctttntgcactgggcctccatccgatcataggcagaaagccattcctgagaagatcctgacntgacgggaggcctcntaaagcaaggctgccgcctgctcagctggaggcctcaagaatttntgcaccagttgctggagacagtgccccagaacaatgagaacccttctgtcgacctgttgccccctaagtctggtcctctgactgtcccatcttgggaggaagcccctcaagtgccacgtattccaccgcctgtccacaaaaccaaagttcccttagccatggcatccagtcttttccgggtccctgagcctccctcctcccanttcacaaggcagtggtcccagcagtggttccccagagagaggtggagatgggcttacattcccaaggcagctgatggaggtgtctcaactgttgcgactctaccaggctcggggctggggggctctgcctgctgaggatctcctgctctacctgaagaggctggaacacagcgggactgatggccgaggggataatgtccccagaaggaacacagactcccgcttgggtgagatcccccggaaagagattccctcccaggctgtccctcgccgccttgctacagcccccaagactgaaaaacctcccgcacggaagaaaagtgggcaccctgccccgagtagcatgaggagccgggggggagtctggagatgagcccccctaccctctctcctctttgttctctcattgttgttattttaataaatgctcattagtctgtaaaa

SEQ ID NO: 79062 - DNA, 1526 bp, Homo Sapiens
gaggccttaagagcttccggacatctccatgggatcctaaggaaaaccttcctcaagattatgctcgaatatttcagtttcagaactttactaacactaggaaaagcatctttaaagaggttgaagaaaaagaggttgaaggagctgaggttggctggtatgtcacacttcatgtctctgaagtccccgtctcagtggtcgagtgcttcaggcaaggaacacccttgattgcattttctttactacctcatgaacagaagatgtcagtattgaatatggtggtgaggcgtgaccctggcaacactgaacctgtgaaagccaaggaagagctcatatttcactgtggattcaggcgcttccgagcctcacctttattctctcagcacactgcagcggacaaacataaattgcagagattcctgactgctgacatggccctggtggcgacagtctatgcgccaatcacttttcctcctgcatctgtgctgcttttcaagcaaaaaagcaatggaatgcacagcctcattgctacaggccatcttatgtcagtagatccagacagaatggtcatcaagagagttgttctgagtggtcatcctttcaaaatttttactaagatggcagtagtacgttacatgttcttcaacagagaggatgtgctgtggtttaaaccagtggaactgagaacgaagtggggccggagaggacatatcaaggaacctttaggtacccatggccacatgaaatgcagctttgatgggaagctaaaatctcaagacacagtactgatgaacctgtataaacgagtcttccccaaatggacttatgatccatatgtaccagaaccagtaccctggctgaaaagtgagatttcttcaacagtgcctcaagggggcatggagtaatggattcaaagagattctgtcttaccggtgccagtcagtactccagggatgggaggcacaagttgtgattgggcaaagtttattttctatgtcagcctgtcagtccactgccccattttgcaagacttttttttagccttgacaaaatgtctcagttaagtataaaagtttttccactacttagtccaaaaaaaactattaaatcttaatgaaatagccactctccattaagaatctgataactaagagttgacaatactaggaaacaaaatgtcttcagtatctaaagacactgaattcccaccatttccttttctgtaaattaaacagaaacagactgataagaagctggcctttcagcctgcttcacccaagttatggaggaggttaagtctacatttccaccactgagcacaatacaaatgttctttacttctggggaaacagtttgaaaatgttgagacagcacagcagccactccaacaccagctgtaggttcaatgagtagtttcatcctctcccacaccagctgggttgcacactgttgatatggaagggagtaggaattagtgaaaaggggagtctagttgggttttacctataaagttccagatggagtta

SEQ ID NO: 79063 - DNA, 807 bp, Homo Sapiens
acaggcgaaggccctgcagttcctccagattgacagttgcagactgggcagtgtcaatgagaacctctcagtattgctgatggccaaaaagtttgaaattcctgtttgcccccatgctggtggagttggcctctgtgaactggtgcagcacctgattatatttgactacatatcagtttctgcaagccttgaaaatagggtgtgtgagtatgttgaccacctgcatgagcatttcaagtatcccgtgatgatccagcgggcttcctacatgcctcccaaggatcccggctactcaacagaaatgaaggaggaatctgtaaagaaacaccagtatccagatggtgaagtttggaagaaactccttcctgctcaagaaaattaagtgctcagccccaacaacttttttctttctgaagtgaaagggcttaaaatttcttggaaatagttttacaaaaatggatttaaaaaatcctaccgatcaagatgagttcagctagaagtcataccaccctcaggaatcagctaagtaattattacttgattcttttagcaaatcaatgcacgttatcctacttaatccttaaataagtttagatttaactaacccaaagtccaggaggatgttcttacaaaaatagctatatcaagggctggcacctagacattaaactgtactttgaaaataagcaacgtgttgcataacttgttggaataattccttgttctgtttaacacttgtcataaattagcagaataaaaatagtcgtgcaacaccgggggtatctggtatgcaacgaagggaaaatt

SEQ ID NO: 79064 - DNA, 847 bp, Homo Sapiens
ttctacgatggtttgtttggtccttttgaaccaccccaaagaactcaacatggcaaagcaaatggtaaaagcttcccgactgttctactttgggtccgcgcgaagcccactcacgtgtgatctgtgttgcccctctcggtggtcccaggcgatccagccatgccccctgcccctctgcccagatgcttcaggggcccggcttttcaggcttgccctcaccagcggccgtcagccgacactcagggatgtagctaacaccactccgccagtgctttcagtaggaagagctgaggctgcctgggaggcccggggcgaccggaaaagggctctctcaagttctgaaaagagaatctgccaccagatcgaatttcgacccctgagcttgttcggacgtatggtccaaattcagattaaggtggtcacccaacccgagatgtcaggaaaggccttctgcagagaaaatgtccccccacccgccatctgcagccaggtgtgtgccacacggcagccttcccgaaacatagtatggattttaaaaatgtgtttatttttgtttctcaaccactttataacgtattttttaatttattttgtaatgtcttgttttgaagtattgctgctatccttgttatccttcccactgtttttatcactgatttattttgtgaaagttgtacactaatgttctatgtcaaaatcaaaagtatttaatgaaatactagttctatttaatgtggttatggaaacagctggaaacacaaaacaaacagtgattgtacagcaggctggggcccaggaggtcaggttcattttggtacatatgcaataaactcacgactttacattt

SEQ ID NO: 79065 - DNA, 951 bp, Homo Sapiens
ctgagccactgcgcccagccaggatttgaattattttaactcatccatgggctgccctagaatgtcacaaatgagggttgtttaatgcctttcttatagctgctactggaacactattatgacctaatttatgagccatccttactcatctacaagtgctgaagcaatgttacatacttttttgctaaactcagattttttagcctaatttcttgtcctcctatccacctgcatccacacatggcctgcatggggctgccttccctgcagtgttctgcagccatgcttcagggtatagctgttggtggacagcctcaggtcttgggggcactatagccactaaacgaggtgtgaaaggctcaagaggatgaccagcaattaattatccccagaaagtgaaggaaaagagacctttagggatgttgctggtcaagtcttgatttgaccggagtcaaatcaatcttcaagcaatcttggaatcctcaactgcagtaagcatttcaaaatgcaaacaaactgcttaacaactgacaagacaccagcccatacgctgctcttccaacagtgggttctagctttgaacaaaagtgctaaacatttccttgaatatattcttcctctttttgtcctcatcactcaatactggtgctcttgtcacaggtagaacagcttgtttcttttccatctattcaagtgtgtttctaattctaaaatgctgatcttctctggagtctatggtaggcaattatggtcactggaatagtttgtcttgttttaaaatattattggtgcatgtacaacagcatccaacatatctgtcttgttcctagatatatagctctgattttaggccttttgtgcataccattacaatatggtggggtaagacattctacagtagcctgtgctgaactgatctcttaaataaacttgcttctggttaactatgtt

SEQ ID NO: 79066 - DNA, 652 bp, Homo Sapiens
ggaaataaagaaggaaataaagatggcttcacatggaaatttaagttctttcagggtggagatttacttggttcatacaccttttgcctgaattaaagtatttcatgtaggaggacttttatcctttttgatagacagtttcatatatcttgaactcaatatctcagatctcttctactgtattactgaatagcatacatacatagacaatgttcgccattcactagatatttttttctattatcttacacttattcaagcttgtctgtgattaatggaattggtgtcagatgctggaatttattctgaccaatgaacacagctgactcaggggagtacaatctcctgccaagtaatagaaccaaacccaatatgcataaaagaaatacaatactccaggctttagctgaaggaagcaactacctgtgtaataacaaagcagcaaaaactatttctcatgtggctgcataggctgtatattatatctgatctctaatgtagcttactggtttgccttttttaaaaccaaaattggaaattttcctttgtaaagaaaaaaagtcttatgagataattgcttgattaatgttttgaacaataccaagaaattgtttaattaaaataaatatttttgtttgaaattgaaaaaaaa

SEQ ID NO: 79067 - DNA, 2043 bp, Homo Sapiens
  misc_feature (829)..(842): n is a, c, g, or t
ctgtggcttcctccatcttccacctcagatatggccagcctggcctgatctttagggaacactttctcctgatagagagcaaagagtgttgcagaaattctgaaatgtgaatgacgtcactctccctcattctttgaatctgccctggatcctgcccagtctaatggtggagctcatggctgagaggagtccttggggacagtagggggccaagttaggattcccttagaaatggggacactcatagacattcttctacctcaccttagggagaagacagttctgcagtctaccaatcgaaaactggagcggaaagttaaagaactatccatccagattgaagacgagcggcagcatgtcaatgaccagaaagaccagctaagcctgagggtgaaggctttgaagcgtcaggtggatgaagcagaagaggaaattgagcgactggacggcctgaggaagaaggcccagcgtgaggtggaggagcagcatgaggtcaatgaacagctccaggcccggatcaagtctctggagaaggactcctggcgcaaagcttcccgctcagctgctgagtcagctctcaaaaacgaagggctgagctcagatgaggaattcgacagtgtctacgatccctcgtccattgcatcactgcttacggagagcaacctacagaccagctcctgttagctcgtggtcctcaaggactcagaaaccaggctcgaggcctatcccagcaagtgctgctctgctctgcccaccctgggttctgcattcctatgggtgacccaattattcagacctaagacagggaggggtcagagtgatggtgatnnnnnnnnnnnnnntcatcagcaataagctgatagatggactttccactgtaggagtggacgtttcaagccaactgagccttttcctcaagtgccgacacctccctcatctctcttatagtggaaggatggtcagcattaggctgatggggactgagaaggataggaagggatacgaaattgccatgtgtataaagctttattctttagcccttaaccctaaggctcagggaaataccctatgttattgtgctccctggattcctgcaactcattttccttccactctggagcagggtgaggggaatgttatgggtaacagacatgcaggcatggctctacccatttctttgcacaagtatggggcccatgtggtacgttcacccacaattacccctccagttcctatatttcttgtcttcttcctttcccctctttgccattcctaccttgcatttttcctgtcagtgccttagccaaggcaaggagataaggatgctcttcttgctttttatatctgcacattcatacctctccaaagaccagcttttccccagccagggccctcagccttccctgctgccccagtgattgattgagagagctgttggggtttctctgccaatgacccctgggagagggactttggtagggtcatgataaagtggcgggggtctggtcctgctcagggttttcatccttcctcctctccctcctctgtgactgtggatatggttataaggtggttgcacctgggagccctgacaactggctgcacaaattccaaaagtaaaggtgtcagtccctgtggccttccttggggcttctctgaccacatgtgcccaacttcaataagagaaccaagggaccctcattttctgaggtgcttggctctgattcagggctttgcaaggggttagaagctgactgtaaaaatgggaagaggcaacggaagacatttatttctcctttggattttggggagaaccaagccctggtagggaagaggtaagggggatgattcacctccatatttcctaagcaggttgtatagggagccggtggcaggaggaaggctgttttcacaaatgacttgtaatgtcgtgattaaaaaaattcctatattcttctgcaaatcaaacgttctttcccaatccaatccagccttggttttattttaaattaaatattaaaattacacatttatattgaaaaa

SEQ ID NO: 79068 - DNA, 663 bp, Homo Sapiens
  misc_feature (23)..(23): n is a, c, g, or t
  misc_feature (28)..(28): n is a, c, g, or t
  misc_feature (414)..(428): n is a, c, g, or t
atggaaccctgcctggtcacatntgccnagagacacacctgcccctcagggggctgagctggagactgagctggggctggccgggacgtgacaaggcaggacagaggcggcccctccgctgctcctttttggaatgcgagctcccaccagaagaaggttccggcacgaatcccatccccacgtctgggccgagaaagcagcccgggtccggaaggtgtagagagtcccggcctcactcagctcacagggcgtgccaggcggcaacaccagaatcttccagaagcccagctccacccgcacacgcagcttcccatccagtccttcaactcaattcttacccaacacgcgtttctgtttgttttgagacaaaatcaccacctgtcaaaaggcaggtggctccagaggggtcaagannnnnnnnnnnnnnngctccaccctggagcccacccccatgggcaccgcgtgccgcctgcacgtgggctgtcttcacaggtctgatgtgaaaattcaatcacgacgttaaccggctcgagagagcgccggcctagaggctcattatctatttattttaccaaacgcgaattgagacggactttgacaaaacacgaaatggtaatgtgaagctaagagcagagagtgaccaacagtaaacaacacgcgcag

SEQ ID NO: 79069 - DNA, 429 bp, Homo Sapiens
ccaaaaaaagcccagaccattaaacaagtgaaactccaacaaataagtcttccccaacagcgagaaaaactgtacagttacccaaagctgattctgccagtggggccggggacaaaagtgggtagggagggtgaaatcatggaggaggccctggggagggggctggagcggcaaagggtcagggccctgcccaacagagtggggccgcctgcgtcctgcacactctgctgtcaggtggggtggggggcagctcttgcctccctgtgtgtgtgagacggtgtccctcaccacctcccagtgccaggcacagtcagctcaccctgatggagagtgaacaagacaggacaggctgggggagaggggagggtcccatgagagggacaccctgctgattccaaacgaggtggcccatccatcccacttcctgca

SEQ ID NO: 79070 - DNA, 697 bp, Homo Sapiens
ggggccatgtgcactgtaggtgctgcaatgtctctctgtaaggaaaatcactgacagcagctccttctggacccagtctggaaggtctagagggggatagaatttttatttcatatccctatgtggtgcttggaaaatgtttttaaccttgaccatgtattatgtttataattaaaaacccaaagaaccagctcatgtttggaaaaggaatcttccactgaaacatttggatacccgacgttctccctggacacttggcccggcaatagttggggtctcctgggaagctgagtgctggcttctagcctctccagttccctcagactctgtcttcagctcgggcccctccgttctgtctccctcgactccaagtcaggaataccgtgggcttcctgccctcaccccacacctcaagaccatcccactgcttgcctgcttgccccctgccatctcgcactcagccctgggtgcctgtgaagcctggccccactgcctgccgggggttcctgcagcacccccctactccaggctccccatctccctgaagcttccagggtagcagctggtgggacactgatctgtgagctctggaatgtctgcttagaattctgagaggcaggaactgctctgtctttgtaactactcaaggccaactgtcacatgaaggaatgaataaagagtttttactgacttgtgc

SEQ ID NO: 79071 - DNA, 711 bp, Homo Sapiens
  misc_feature (26)..(26): n is a, c, g, or t
gcacgaccccacgtcggcgccgtggnccacggccctggcgcgccgcgtggctgctgaactgcaagcggcggctgccgagctgcgaagcctcccgggtctgcctccggccacagccccgctgctggcgcgcctgctcgcgctctgcccaggaggccccggcggcctcggcgatcccctgcgagcgctgctgctcctgaaggcgctgcagggcctgcgcgtggagtggcgcgggcgggatccgcgcgggccgggtcgggcacagcgcagcgcgggggccaccgccgccgacgggccgtgcgcgctgcgcgagctcagcgtagacctccgcgccgagcgctccgtactcatccccgagacctaccaggccaacaattgccagggcgtgtgcggctggcctcagtccgaccgcaacccgcgctacggcaaccacgtggtgctgctgctgaagatgcaggcccgtggggccgccctggcgcgcccaccctgctgcgtgcccaccgcctacgcgggcaagctgctcatcagcctgtcggaggagcgcatcagcgcgcaccacgtgcccaacatggtggccaccgagtgtggctgccggtgacccctgcgccgcgcggactcctgccccgagggtccggacgcgccccagctcgcgccccttcccatatttattcggaccccaagcatcgccccaataaagaccagcaagcaaccggc

SEQ ID NO: 79072 - DNA, 713 bp, Homo Sapiens
  misc_feature (109)..(109): n is a, c, g, or t
agcatggagatgatattcagggagccatacgtgctgaagccaccaggagagggccaccattctcatgcctggattcccaaaaggaaaactgaggcagaggggcaaactntggtccaggatggccaataaaagggtcacaaaatagggttgtcatttcaaggggattggccccactctctgaatgcccagtaattgggtgctttcctctccctgagcagctttaccgtggctcagctttcaccttgaaccagcccttactgagcagtcagaaaccataccgtgaggtcaggagaggctgcgcggccttagtttggtggccagcaacccatgtccactgagaataagcttgggcagagaaaagggaaaggggcactggtctggccccccggaaggtggctgctgcttctggttcccaggctgctgtggccaaaggtctgtttgtgtttgccaggtgcagaggcaggtggctgcagctcaccttccctccatggcatgatctcccagctctgacccttgacctgttccctcgcggcatctccacagggctagaaggtgaaccctacttcctttaccaggtcctctggtttctcttcccaggccaggacctaaaccgttcacaactcccagcaggccagagctgcagagacctcagatagagactataaagtgctgtggaagccttgttcaaataaaaacattcatgaatgtccagt

SEQ ID NO: 79073 - DNA, 2813 bp, Homo Sapiens
  misc_feature (1496)..(1543): n is a, c, g, or t
  misc_feature (2046)..(2046): n is a, c, g, or t
  misc_feature (2067)..(2075): n is a, c, g, or t
  misc_feature (2352)..(2363): n is a, c, g, or t
  misc_feature (2417)..(2417): n is a, c, g, or t
  misc_feature (2479)..(2479): n is a, c, g, or t
  misc_feature (2481)..(2489): n is a, c, g, or t
  misc_feature (2606)..(2606): n is a, c, g, or t
  misc_feature (2611)..(2611): n is a, c, g, or t
  misc_feature (2641)..(2641): n is a, c, g, or t
  misc_feature (2644)..(2645): n is a, c, g, or t
cggctaggtacgaggctgggtgtgaattcggcacgagggacctgtccatgatcctgtgtgaccccttcgccatcaacacgctggcactgagcacagtcaggcacctgcaggagctggtcggccaggagacactgcccagggacagccccgacctcctgctgctgctccggctgctggcgctgggccagggagcctgggacatgatcgacagccaggtcttcaaggagcccaagatggaggtagagctcatcaccaggttcctcccgatgctcatgtccttcctggtggatgactacactttcaatgtggatcagaaacttccggctgaggagaaagccccagtctcatatccaaacacacttcccgaaagcttcactaagtttctgcaggagcagcgcatggcctgcgaggtggggctgtactacgtcctgcacatcaccaagcagaggaacaagaacgcgctcctccgcctgctgcccgggctggtggagacctttggcgacttggcctttggcgacatcttcctccacctgctcacgggcaaccttgcgctgctggccgacgaatttgcccttgaggacttctgcagcagcctcttcgatggcttcttcctcaccgcctctccaaggaaggagaacgtgcaccggcacgcgctgcggctcctcattcacctgcaccccagggtggccccatctaagctggaggcgttgcagaaggccctggagcctacaggccagagcggagaggcagtgaaggagctttactcccagctcggcgagaagctggaacagctggatcaccggaagcccagcccggcacaggctgcggagacgccggccctggagctgcccctccccagcgtgcccgcccctgccccgctctgagggccctccagacctgctcgggtgctggggccatgccgagtcgcggccctgctcagccggaagaggctcccggacctggatgtacagggcagtctctcttcccggggctatggctgggcctgtcctgccgtcatggccccctgcttcctgctccttggagctggctcccggaccttgcccaccatccatgcagtggctcccagggcagagcctctccttgtactttggcagccatagaaagcgtgctcattttctgttttcctgtgttaggaaaaaaccacctgttttccaaggggagagggcggggcctgagggtgggggcggggcctcttcattggcccagcttggcgaaagcgaggcacactgcttactgccttggggttgtggagatggacccgtgacctcgtggaggccgtgtgggggcagcagcctggcctgtgccatggtgggtgtcctggggcctgtgcggagggagccacctcaccctgcagcccaggttgcaggtgtggccttgtttctccttgcccagcagtgctgccttcagcggccgtgacggggccagctggacacacggtgagattttctcgtatgtaaataaaaggcaatttggtnnnnnnnnnnnnnnnnnnnnnnnnnnnnnnnnnnnnnnnnnnnnnnnnccttgtccggccgcctcggtccctcaaagaacctttcctaaacccattccgtttggccgccccggcgcccctgcaccgtaaaggtgacacagtggctcattacgctgcttcctcctaacgaaaaatcccccggcgtccactgaaccaaggcgcgcttggggattttcttccacctaactaaacaacaaccggccccgcggccgtctaaaccccgaacgcccccctctgcataccgacaatcaccctacacgcggcccccctcccttagaagggagtcaatctttcctggggcccatcctcctcactcccacaccaggtgctaattcttcttaccccgccggagagtccctccgcggttatactgtcagggtatttcacacggccccggcgcgggatactcttcatggcacataacctcgcacacagtctgagagaccaagggagaatacgtcggccgcgcgtgagataacacattttgtctcacctcctcctgacgccgagcnccctgtctttctctttctggnnnnnnnnngggaaatacaacattataatgtttagaataaaaacgccccccacttttttcacccacctgttgaaaaaatacacgggccgcttggcgttttttgttagccccacgggggataaatccccaccccctcactaaaaacttatttgggccccgtaccccccgggggacgcggggaacaaatcaacacgattcggccccaatgtcgtttatagtatgttccctccccccctcctcctctcgcaccacgaggggaccccacccgtggttcgatatgttccgnnnnnnnnnnnntatcatgatgagatgtgaccaacacccaacccaccccccgcctctcgtgtatantcctcaccacatcacactcacgtgtccatggtcttcttcccccccttataattatgcggtgngnnnnnnnnnaccgcatgctggcgcgtatacgataacgtgccctcaacacccggtgctgtgcgctgctggaaacaacacaatcgccccccacgccccctccgggcggcgatacacctgcgccgtcgnctggntgagcatcatcccccccacccacacacgcnganntctggtttccgccgcccaacaatataacagactacctcctgcttgcttctcagggcgggaccaatcacaatggagccgcacgacgcgctttcgtttacctacgcgccgccgcctaagcacatcatcctcaatacctatgtatttgcccgcaagcaaatcatccctggg

SEQ ID NO: 79074 - DNA, 2052 bp, Homo Sapiens
  misc_feature (47)..(99): n is a, c, g, or t
cctctgtatactcctttcactcttcgcgtctgtgcgcgtctccttgnnnnnnnnnnnnnnnnnnnnnnnnnnnnnnnnnnnnnnnnnnnnnnnnnnnnnccccctgtgtttgctccacatgtgggctgcctctttggtccgtccttagcgcgtcccccacccttccggctgcttccgtgcccgctgtcccgtttcccagctggagtaagcccttccgctttcgtctgctgtagctccaggccttctgcacgcctccagctaagatgggcccaccctgggtgcaggtgaatgaggacccccagcgcgtgccggtgcacgttctcccgtccttggagagccgtgaggaagaagccatcgaagaggctgctgcagaagtcctcaagggcaaattcgtcggccagcagcgcaaggttgcccgtgagcaggtggaggaagatgtcgccaaaggccaagtcgccaaaggtctccaccagcccgggcagcaggcggaggagcgcgttcttgttcctctgcttggtgatgtgcaggacgtagtacagccccacctcgcaggccatgcgctgctcctgcagaaacttagtgaagctttcgggaagtgtgtttggatatgagactggggctttctcctcagccggaagtttctgatccacattgaaagtgtagtcatccaccaggaaggacatgagcatcgggaggaacctggtgatgagctctacctccatcttgggctccttgaagacctggctgtcgatcatgtcccaggctccctggcccagcgccagcagccggagcagcagcaggaggtcggggctgtccctgggcagtgtctcctggccgaccagctcctgcaggtgcctgactgtgctcagtgccagcgtgttgatggcgaaggggtcacacaggatcatggacaggtcccccagcacctgctcctggcccttcttgacgccatcgagaaacccctgcagctcccgcgccctcttgctgtccacgaaccgctctcggatgcaggcgtccaggcaccaggtgaacttgtggcacgggtccacggtgcagatttcacccacgtccaggtcgtgcagggacatgagcagctcagcccgcagcgtgcagtagtgcacattccgcgtgcgcaggaagagcgtgcgcagaaactgcagcaccatgtcgtacagcttcacgttcttccccaccatccgcgtcagccgctgcaccacctcgccctggcgcctggtcttgggggaaggactgaaaaagttgtgcaggacagagagctctgtactgaagagagcgctctccttctccaggatgtactgcttcaggagtggggaaacctcgtccccgaagagggcctggttgtcttgccagatctgccgcttcacctccacggcgcaggctcgatacagctccttgtcagccataaccagcttcagttttttctccggaaccttgggcaggtgcttcatgacgcacatcaccacgggctgcagggacggcatcttcaccagagaaaagctcttctccagaaggtcttccagcttcttgtacctttcctcagccttcccctccgaagcgatggctgacactcgctccagcagcttgtcccgcagctcatcgaataccgactggtggaactccagccgcggcgtcccgtgcaggtccaagaaggggagggctgactgaagagatggcagcagcacaccattctctgtctggaactgctcgatggccttgagcggctccgtgcagttggtcagggtctccttcaggtcctcgccgttggccacgcccaggtcctgcagccccgcgaacatggccgaggccccggccaccgcccggctaggcgccccatccccagcccgttcccccggcgccgccgcagacaccccagaagcccgctccgccgggcctcggggaccgcccgagccccgctccccggcgccctccagctcggccaggtcccgcccgccgcgcgactccgcgcgcgtcccacagccgcccacttccgccctcgtgctggaatagccacccaggcctcgctacctaggaccg

SEQ ID NO: 79075 - DNA, 770 bp, Homo Sapiens
tttgcaagaaaagagctttaatggagcctgctcatgactcttcagtgtcttcacccatcaattctgagggcaataacataaagcataccagcccaaggttgtaatttagtgggaagctggggcttccttctgcctcctgctgcttagcagtggctctctcctcacagattttagctctgcaggcagatctgggagctgtttgatttctttctgctttgcatcaaattctactcccatttactgctgaagagaagcagagctttctgaactatccaaaagtttccattgttgtctgctcaactataatgcttccttagaggtggaagacagttcttgatggtcttacacttgggaatgtgttgctcagccaccttgggagcaaagtggtggctacactgaggacactgaatgcagtctgggttttctgcaggcaggatgggaggcaagtgtgaacagtttccacctttggcagttacctgctggacctctcgagcctggcggaacgtatggataaaagattcatgcttctatctccagttgctcttctgaggaggttcagccttggctgaagctggccccttccagttcaagtactgctctagttctgtgcccttagcccgggccctggaggagtcaacactttcctcttggaaccccgcatcctgctgcagatgttggagtgtctctccagcctgaacgagaggaatttgcgcccacagtggctgcactcacccagctgtggctcttcattggagccgctggaacctgag

SEQ ID NO: 79076 - DNA, 1047 bp, Homo Sapiens
  misc_feature (75)..(75): n is a, c, g, or t
  misc_feature (122)..(123): n is a, c, g, or t
  misc_feature (140)..(140): n is a, c, g, or t
  misc_feature (340)..(340): n is a, c, g, or t
caacccagcatttttgtgcacaccaggttgtactttgttgggaggtgtatgtatccgggtagtgccacgttgtgnacttcattccaggagatgagaaacgtgtgaggtcagacctcccattnntggagccctgggagccngcccctaccccagaacagaagctccctgaggagtcccagctccagccacgactgttgagtgccccacccacatggctgctggtcctcgcagaagtgaggtctcaagccaggaggacctgaacaagtatgacatcatgtactggacacctgcacgaagatcttcctgtggcttgaggaagctgcaagtgagtggaaggagncggtgccctgggaccaggagtacctgaagactcacccagcagggaggagcccggccacacccatcgtgctggtcaagcagggccatgagcctcccaccttcattggatggttcttcacttgagacccctacaagtggactagccacccgtcccacaaggaagtggtggatggcagcccggcagcagcatcaaccatctctgagataacagcagaagtcaacaacttgcggctatccagatggccgggcaatggcagggcaggtgccgtggccctgcaggccctcaagggctcccaggacagctcagagaatgatctggtgcgaagccccaagtcggctggcagcagaaccagcagctccgtcagcagcaccagcgccacgatcaacgggggcctgcgccgggaacaactgatgcaccaggctgttgaggacctgccagagggcgtggaccctgcccgcagggagttctatctctcagactctgacttccaagatatctttgggaaatccaaggaggaattctacagcatggccacgtggaggcagcggcaggagaaaaagcagctgggcttcttctgaacccaagccctctcgactgcccctatcccctggaccccaacatacctacaatgctggggaggccctgcttccactcccctcagaggcttttggtcatcctctgcgtgtcagtaaaagcaggcagcccat

SEQ ID NO: 79077 - DNA, 630 bp, Homo Sapiens
ccacagaaaccatgacagcagctgtcacaaatgttgggcatgctgttagcagttcaaaagaaatagaagactttcagtcaaccgagtctgtcagtacccagcagatgaacctcagtattggtgatgacaccactggtaggctggtccaatttaagttttgaaggatgaacaccaagatgaaagcagcagttttcatcatctaagtgaaagtgatggaccagatgataaagatgaagagcatgaggacgaagtagaaggtttggggcaagatggaaagacactgctaattacgaatattgacatggagccatgcacggtagacccccagctaaggattattcttcagtggctcattgcctctgaggctgaagttgcagaactttattttcatgactctgcaaataaggagtttatgctactttcaaaacaattacaagagaaaggatggaaagtgggagacctcctgcaggctgtgcttcaatactatgaagtgatggaaaaagcttccagtgaggagagatgcaagtcgctgtttgattggctcttggaaaatgcatagagcaaaccccaaaccagtatattttagtatttgtttggggaggggaacaagccaataaagatgtttaggat

SEQ ID NO: 79078 - DNA, 743 bp, Homo Sapiens
aatatatatatattcttgtagtgccagaaaattgaatacattaataaatggggtagaatagatgaatctcccatgaagaagaattccaaataatttatgaactctgccctcaaggatatggagcagaacttcctacttctctagtgtgagctgaatagtgacttccttccaaaaattacatatggaaagggggaaaataactttgtagtggagaaatctgataaacactatctcggctaggttatcaagattaacactaacagtaataagtcacactgatagtatgtacctttgagatgaagtgatgagaaggccactttacctctctgttgtattcctctcaaaaaccataatgcagtctaaccatgagaaaaacatcagacaaacccaagttgaagaatattctacaaatacctgactacctcaaaactgtcaagatcatcaacaaagaaagtctgagaaattgtcccggaataaaggggcctaaggagacataacatctaaatgtaatgtagtatcctggatggactcctgcaacagaaaaagaactttaagtaaaaattaagggaatattaataaagtatgcattttggttaataatgtatcaatattggtttattagttgtgacaaatgtaccagaggaatgtaaaatgtcaacaataaaggaaattggatgtggggtacatgagaatgctgtactatttttgcaacttttcttaaatctaaaactcttataaaattt

SEQ ID NO: 79079 - DNA, 1487 bp, Homo Sapiens
  misc_feature (128)..(128): n is a, c, g, or t
cgttcatgattctattggcactagaaattagaatttcagtactgtagtgctcacagggcttcctggagaacatttgcccgtatactagtcccttctctgctgcctagaaaacagaccgggtctcaccncctgtgaaatcttggtggtttacgaagtcctctggatttcttgatattatcagggatattcataagcatatatcaaaaaatggacctattttgatattctgttatgaaaatgttattagaaccccaataaattattatttttcccccttgaatctgctaaagaaaacagatcctgacttagcttacttgaaataagcagggcagggagccctgttttggaagagacagactgtggaagagattacaaacaaggcccgaggctgcacgaatgatgagttttgtgtatataatgttaatgtccaccgccacttccctaacgactatgagatcttttttttgaagatcctcatggaaggttgtacagagccccacatttgaggggaagtcctttcagttgatatgagatctctttaacacccctcagtctatgtaggaaatgccttgtgatacatagagaaccctcagcttctctctgcctctggaggaccaaggtctttcctgacagtcggagacacaccttgatgtatgttaataaaagcatttcaggctgtggggccaccatgtatattaatactccttatgtgtccagcatctgtgtattcattcgagtgcccaatccctggatgagatgaactaggccttataaaaagtcaaagcctcaaagaaatggcacaaccatgttcttcggcactcaggctcctaattgcagatcctcaccgaagggtggtatgtggagctggaaggtcttgtggccacaggacatgctggtgagccctgagctggccttgtgcagagggctccgttcaaaggctcggggtgtctttgaggttgtttatcaagctggggaactcttccaagtctgacaatgtttcgaaccctttttgcaaggttgcactattagtataccatcatgtccggaaaacttttaatcttctcaaatatctgatgtaactaccagaaagtcccttacttcctatgaccaatcaggaccaagtcttggaggtgatgtgttacattacgtgcagcacaatagtaccgatcagttaactcagcgctgaagggcttgttttatgaaaggtactattccttctttcacattaactggaaacctctttttttacctgttgttcacaactagttttcttattgactgtattggactgtctcttcttgtagagactgattttggccaacatattaatgcatgttttatgcaaaacacaaatatgatattagttgcttttaaggagttctggcattgtatgtgcatttttgtagaaattgttactggacttataattacatacttaactctgatcaggtttctgtaaaatttaaataaaaccaatacaaaataaa

SEQ ID NO: 79080 - DNA, 2081 bp, Homo Sapiens
  misc_feature (688)..(696): n is a, c, g, or t
  misc_feature (1514)..(1556): n is a, c, g, or t
  misc_feature (1997)..(2022): n is a, c, g, or t
aggaagggcaacctaaaagcccacttagaaactttttggatatgccactgcaattcatttcaaaatagcattccccagatttttaatgggaggaaaaaaagctttaatgttgagcatgctgcgagctgctgcgtggaaaggcctctgtatgggccgaagacccttcttccctggctgccaggctcgccaggagcccactggaaacgcccaccacgggggctccttgttacacatgttctttttttatccgatcaacctgtgcacttttgatattttgatattatatttgcttccttaattcctcgcgtagagacggtctcaggtgccgtggtctatgctcgtggtcctgtagctgtccgcctcagctcccaccgtgtttgtctggtgtcagcacgaggcagagctgtgtgctccatagcgtgtagctttagactcggagatgagtgctttgacccagcgaggagctcagctaagtgtatccacgctgtggttcagcagcctttagatcatacggcattgtggttcatgtttgaaattacagattttaaatgccatgttcattaagaaatccagggtattcagattctggggtttttcatattgtattattattattcttaggaatagttcaatgtaacaagaagaaaacttgacctttgctctggttaaaacagtaataggcacttgnnnnnnnnngataaattattgaatgagtagtattacctacaaattccagaattttctgggttttaggacgttgtgaagcatgactgattaacagaattttatacaactgtaccaataaaattccaaattggaattgttttgttactctggttgttgtgccaaattgtggtacacttagaaaattctacagtcgtcgatttttagggtgttctctttcaacacctttttgttagtaatcattgccagtagtgccttcatcagttaagggaggtgtcccagcacagatcattctcaaaagccgagcagggaagagctagtgggcatgctgaaggccagcgtggacagcaggtgaggcaggtgctcctcacacccagacctgggcatcttcattgagggaaagaaaacagtcattgtgcaaaattctgttagtcagtgattctttacttgcaaattcaggggcttagaaaatgaaagcaaacacaaaaccttgagtgtgctttgggaaccaaatggaccttctgggacaagctgagcaagctgtatgaacgccacgtttgtgaagagctgagggtatcaggagggccgacgctgtgttggcatgcgcagtaggggatgagggttagccatagtattctttgcaaatgtgaaagcgagacattatatcttctcttgcttggtgtaactaatcactgttaatttcaggaaacagaactcattaaaactccttagcaaaccaggtctacatcctgttttgtttgctgagtgaggttagtgggagtggtcaaattggtactcttggaggaagaaaaactgtccttccttctccnnnnnnnnnnnnnnnnnnnnnnnnnnnnnnnnnnnnnnnnnnnaattctgtttcctggaataagcatttcttattcctagttgtagggactcctatttttaccttccgttacagtgttgattcataagaaatattgttacatttgagataacttcatctgtatggggtatttatttgcaatgatgtctgagtactgtattttttctgtgcattaccttagtgtcagaatgttggtctttattttaaagtcatatgcatgttctcctgccaaggaacctttacacagacccaaacaaaaaaataataatcaaatgccttcaatttctgagaaaatgaggcagagcatggaaaaggaataggaaggagaaattaattgagattttcaggacacagacatatgatgtgaatgcctacaaagccagtgcgcataggaacagtgggcctgggtaaagagtcacattggtaggaccaataaagaataatnnnnnnnnnnnnnnnnnnnnnnnnnncctgagcggcggccgcaagcttattccctttagttgagggttaattttgagattggcac

SEQ ID NO: 79081 - DNA, 752 bp, Homo Sapiens
cggcacgaggacgctgtgttggcatgcgcagtaggggatgagggttagccatagtattctttgcaaatgtgaaagcgagacattatatcttctcttgcttggtgtaactaatcactgttaatttcaggaaacagaactcattaaaactccttagcaaaccaggtctacatcctgttttgtttgctgagtgaggttagtgggagtggtcaaattggtactcttggaggaagaaaaactgtccttccttctccaaaaaaggaaaaattataataatataaatgacaaaaataaaagaattctgtttcctggaataagcatttcttattcctagttgtagggactcctatttttaccttccgttacagtgttgattcataagaaatattgttacatttgagataacttcatctgtatggggtatttatttgcaatgatgtctgagtactgtattttttctgtgcattaccttagtgtcagaatgttggtctttattttaaagtcatatgcatgttctcctgccaaggaacctttacacagacccaaacaaaaaaataataatcaaatgccttcaatttctgagaaaatgaggcagagcatggaaaaggaataggaaggagaaattaattgagattttcaggacacagacatatgatgtgaatgcctacaaagccagtgcgcataggaacagtgggcctgggtaaagagtcacattggtaggaccaataaagaataataaaaagacaaagcgggaa

SEQ ID NO: 79082 - DNA, 1879 bp, Homo Sapiens
  misc_feature (17)..(17): n is a, c, g, or t
aaggaagcgaggcctgngtggcgaattcggcacgagggttcctagagatcaagatggcagagcgcagagagctggagcgccagatgaagatggaaaacctgtttgtaacctggcagcagcgttctaccccagccaccatgcccatcagtgctggagagctggagaccctgaagcagtcatcccgcctggtgcattactgtgcaacagccatgctcttcgacccagctgcctggctgcatgggcccccagagacctctggaccccctgacgggcagcggcgccatcgccctgagtcagggtctgggagccgagaggcccccacaagctgtgaatccttggatgtgtcgcccccgggagcccgtgaggagccttggctgaaggagctgagcttggctttcctgcagcaatatgtgcagtatctgcagagcataggttttgtgctggtaccactgcggcccccctcacccgcccgcagcaccagccggccacgggccatggctatccttggaacagagggtcgaggctccttctcctgccctaaaaccaagactgatgggagccccaagagcactagctctccggtaaccacctaccacctgcagcgggcactgcctgggggcatcatcctcatggaactggcattccagggctgttacttctgtgtcaaacagtttgccctggaatgttcccgaatcccaatggggcaggctgtcaactcacagctgtccatgctgttcacagaggagtgtgacaaggtgcgggacctgatgcacgtgcactcgttcagctatgacttccatctgcgcctcgtgcatcagcacgtgctaggtgcccatctggtgctgcggcacggctaccacctcaccacctttctgcgacactttcctggcccaccaccctgacggaccccactttggccgcaatcacatttaccaagggacattggagctccccacaccactcattgctgcccaccagctatacaactacgtggctgatcacgccagctcttaccacatgaagccattgcgaatggcccggccagggggcccagaacacaacgagtatgccctggtgtcggcatggcacagttctggctcctacctggactctgagggacttcgacaccaggatgactttgatgtgtctctgcttgtctgtcactgtgctgcaccctttgaggagcaaggagaggctgagcggcacgttctgcggctacagttcgtcgtggtgctcaccagccagcgagagctcttccccaggctcactgctgacatgcgccgcttccggaagccacccagactgccccctgagccagaggctcctgggagttcagctggcagccctggggaggcctcagggcttattctagcgcctggaccggctcctctgttcccaccactggctgcagaggtgggcatggcacgagcacggctggctcagctggtgcggctggctggagggcactgccgtcgggacaccctttggaagcgcctcttcttgctggagccaccggggcctgatcgactgcggctaggggggcgcctggccctggcagagctggaggaactcctagaagcagtccatgccaaatccattggggacatcgacccccagctggactgcttcctatccatgacggtctcctggtaccagagcctgatcaaagttctcctaagccgcttcccccagagctgtcgccatttccaaagcccagacttgggaactcagtacctggttgtgctgaatcagaagctctcccatcttcacagcaaccctggcactggcttctcaatgggagggaagcagcagagaaactgaagtgttagacactatgtgtcccaccaccccattacagagacataagacaatgttaaaa

SEQ ID NO: 79083 - DNA, 1071 bp, Homo Sapiens
gaggaactcctagaagcagtccatgccaaatccatcggggacatcgacccccagctggactgcttcctatccatgacggtctcctggtaccagagcctgatcatagttctcctaagccgcttcccccagagctgtcgccatttccaaagcccagacttgggaactcagtacctggttgtgctgaatcagaagttcactgactgctttgtgctagtgtttctggactcccacttaggaaagacgtctctgacagtggttttccgagagcccttcccagtacagccccaggacagcgagagcccccctgcccaactggtctccacctaccaccacctggagtctgtcatcaacacagcctgtttcaccctctggacccgcctcctctgagggagtggactggaccactgaatgtcactgttccttgaatcatgggcctaccagatgtgcctgccagaggcaggactgaccaacccttctgggccccagggcaagccagacactgagtgacacccaaaggctttgtaactatgtcttgagggtctgctgccccagcctggcagcaggaaccgccctccccaaacacccacagccactgacccatccaggactccagagagtcaggtcaaccccgaggaccccttgggcccttctggggtactcctttcggcccccctggtagagtctcgggagttcacacagggtggcaaacaccccctagagctcctctgcctgaatcctgccccctagcctttgaccactgtcagccacctgtgtcccttgagccttcgggtcttcacttcccacttggacatcactgctggacattcccatcgagatgacacctgggttccaatcccagctctgcctttgaagcacttgcggccaccgtcaagtccctttgctctcggaccctgggtttctcatcctttaatgaggtgggttcagaagctctcccatcttcacagcaaccctggcactggcttctcaatgggagggaagcagcagagaaactgaagtgttagacactatgtgtcccaccaccccattacagagacatatgacaatattcaa

SEQ ID NO: 79084 - DNA, 1207 bp, Homo Sapiens
  misc_feature (53)..(53): n is a, c, g, or t
  misc_feature (75)..(109): n is a, c, g, or t
  misc_feature (166)..(186): n is a, c, g, or t
tcgatcacctatagggcgctagctcttgcagccgaacgacgagcgcagcgagntcagtgagcgaggaagcggcgnnnnnnnnnnnnnnnnnnnnnnnnnnnnnnnnnnncagtcgacggtaccggacatatgcccgggaattcggccattacggccgggggtttgnnnnnnnnnnnnnnnnnnnnnaagtgaaatttattgaggaaaaatatgtgaaggaccttcactctaagatgttatatttttcttaaaaagtaactcctagtaggggtaccactgaatctgtacagagccgtaaaaaactgaagttctgcctctgatgtattttgtgagtttgtttctttgaattttcattttacagttacttttccttgcatacaaacaagcatataaaatggcaacaaactgcacatgatttcacaaatattaaaaagtcttttaaaaagtattgccaaacattaatgttgatttctagttatttattctgggaatgtatagtatttgaaaacagaaattggtaccttgcacacatcatctgtaagctgtttggttttaaaatactgtagataattaaccaaggtagaatgaccttgtaatgtaactgctcttgggcaatattctctgtacatattagcgacaacagattggattttatgttgacatttgtttggttatagtgcaatatattttgtatgcaagcagtttcaataaagtttgatcttcctctgctaaattgatgttgatgcaatccttacaaatgattgcttttaaaattttaagctaggaaaagaaatctatagaaagtgttctgttacaaaatgtaactgttaccattggaaatttcacgtcataggaagttagcctttatctaccaactttcaagaacttgtttaataaagcgaaaaactcaaccaaatggtacaaaaccacagtgtaccattaaaatatgcactaagtctcttttttacaaaggctgtattcagcaaggcgctaacttgcttaaatgtgaattactaacttctaaaactgtactttgattcacatgttttcaaatggagttggagttcattcatattacaatatttgtgtgctaaacgtgtatgtttttcagttcaaagtcatgatgtttttaaaatcttattaaagtttcaaaaatctgaagattgtttatctagatgtaaatttttattaaaaagttgcacttatg

SEQ ID NO: 79085 - DNA, 1077 bp, Homo Sapiens
actccccatcccactccttctcctctatttccttctttactttttttaatatcctacctcttctttatctagaacattatgaattcaatatttcacatacattgtaggacaaattactgttactctgatcatgatatagcaacatttaagtcagtttccccaaatattcattcaacaaatacttattgagcaactattgagtgctagccccctctctgttcatcagggatttagtagtaacaaagcagacaaatacatacacacagactatgtcaggtggtgttcagagctgtgaaggagagtcagagtgagggaatcaagggtgatgggtgctttttcagacagggcctttctctattaaacaggcttccagtggaagactctgctaatgtttagcagataaccaaaatgcatcagttagaaaaaaatatgatgagaatgagggactggttataggaatgcaattgggcacaaatgtgggaagagctgggtagtgaagctctagaagggagaggtagagaattggaagaagaagcactggtacaggtagacaattcagaacttgcacagaatctgagaagctgaagtaggactgtgattgggagcttgtggagaggtctatggaaattatcatgctgctgaaattgttgcctctatttatctgctacccttctggtccgtggccaagatcctggtgggtgggcttggagccagccttcgtcagcaggcctgcggtaagaaagatgggatggacacacagtggtggagatcaaggatcagctgcagcaggctgggtccctctgcatctgtccatcactgcgactgatggcaatgactgagtataacacctttcttcatggtcaactctacccaggaaccacgtagggaaggaaattctggaaaacagctcccagccttagccaacttgacatatcataatccaacagaactcaacctctaccaacttggaaatcatgtacatttgtcaggactgtatttaatttccacatagagagaaagcaaaattatacttttgaccaaactaatagaattatccattaaacaaacaaaactgtg

SEQ ID NO: 79086 - DNA, 1068 bp, Homo Sapiens
  misc_feature (29)..(29): n is a, c, g, or t
  misc_feature (42)..(42): n is a, c, g, or t
  misc_feature (46)..(47): n is a, c, g, or t
  misc_feature (96)..(96): n is a, c, g, or t
  misc_feature (353)..(353): n is a, c, g, or t
ttacattcacccggaacgtttgactgatngaattatagatcntttnnggattgcctcgaagccaagaatcgcacgagttatatgccttctccaccntagagaccataatactctctgtgaagtgattgcttaatggggtgaggagtgggagattctctgtcatacactgctattattctagaactcactatcagtgagcagtccagagtgtttctctttgacctagaggtttcacatcatagcaaggagggaaaagtctccccatctccttacaaactgtgtgctaagtaagtaacttggccaacggtagttttcagctcaatttatagaatagtccaaagagactttgaganacatggtgataggcaggggcctttcctaccatgtttcaatacctacaaacctattgaaagagaacagtagggtaaaacatttcctaaagttgaagcaatagcttcgtagattcttgggttactttattttttttaatgctttacattttgatacaactattgaagatcaattttaaaaatagctttccagtaatatattttaagtaatatatattttaatatctgtaaaaagtgacagtggaagactttgaatttctcatatatggtatgtttgatgtaggacctcactgttaaggcacaaattatttcaaaggaagttactctaaagacactcagattatttcagaaaaatgcaataaggggaatagttttggggtttattttttattttaaaagaaaattgacttatttaccacaagctatttttttcccttctggctgtaaggtttgtacagactggtttggtaaatgctaaacttttgtgtcttttgcctttttaaaggaattgttaacattggaattgagggtatgtacagagaagttggtgtcaacaccatttaaaaagtcatattttttcacaaatatagaaaatcattttacataagaattttaagtatttgcaataaatatatgtatatagattgtatgtattcctatattcttatttttcattttattattaagtaaaagatcattaaaagtgaaaataaaaaaa

SEQ ID NO: 79087 - DNA, 526 bp, Homo Sapiens
taccattgccctcactttaaggggcacacgagcagatggtagcaagccctggagagcagcactcgggcaagtgaggtggctctggcactgcccctggactttcatgtttgtagcttgagctggttttaattggaagctctgtgatttacataatcacttacaatctctgtaaataaggaactatttatgaggaattgtaaatttcctctctcccccttcttaccctgtctgtgatcttgtctgtgatgcagtaatgatattccactctaggttcccatgatcagtggtgaaatatagtgattttcacctgtgcttccattctgaagttctggaaagaagtactggatggactgaagtccaggacaacgtcccaaagaaaggcagagtccaggtaggcttggaggaccaagccctggatgagcactggagggcagaggcctcagtgtccagcactgtgccctgcacatggaaagcccctacgtttgtggaatgaatgaataataaaaatgttttcataagtgaaaaa

SEQ ID NO: 79088 - DNA, 1360 bp, Homo Sapiens
aaaaaaaattatattcagtttgcagtagacattccttaagtatttgtatttatttatgattatcaattttacataacattaatattgtatcagacctccttatgaaaatgagtatggatgtgcacagtatgtttgatttttatccacaagaatgaatctgattcagaatgcttttctcagctgacatacagagcactaaatattttaaggcaagtccataggtctgaatctcttaagaattctcggcctctgtgggatttagggaagcattataaatgcattaatccttatagtcaattctgtgcctaggattttgccagggaacagttcactgactaggaaaagcactacattttaaattcagcattagtgcattgggaaggatctttactgctttgtgcttggcatgtcattattttccatttgacattagggcctttccaaaatgaatgtgaggaattgctttcacttcaagactttccttcttttcactaaaactctagaaggtgttacaagggggagggaaggggggcaaagtccttgaacattttctttggctcgtgccatgttatgatcatataccttttaaataaggggaaatagtatctttaaagttaatgtctagccaagagtttagtaaacgaagaattaaactgcactgttgatcggtgctttgtgtaaatacatctttaacatttgggtggagaggggccttaagaaggacagttcattgtaggaaagcaattctgtacatgagtttaagcattcttgttgcattgtctctgcagattctatttttgtttacaatattaaaatgtatgttagcaaaatgggtggattttcaaataaaatgcagcttccacaaaagttttgttatggtattctggtctgagatgcattttcatttttcctttctctttttattatcaatattgtcatttttccctaataaaatatacccaggggattatatttgttgatctaataacatggaaggtttgatttatatgaattttcaaaaagatgtctctttacactttttgttaccttgtagactcttattgataaatgcaactacttattaaaattgttcactttttgtcttttgatcagatgcctttagtcaggtaagtttaagggaaaatacgcagtttaatgttttggtacatataattatgtctgccaaagaaacctttgattgtatcatattgcctatttagtagtgcatagggttcagagtacatgataaaggatcaaaagctttgcattgataagtgtctcataatatttgatgtgattggagaaaaaatgtagtcgtagccaataaattttatcagcttttaagtttcagcctcgtgcc

SEQ ID NO: 79089 - DNA, 627 bp, Homo Sapiens
  misc_feature (133)..(133): n is a, c, g, or t
caccctgggaaggacactgtccccagccagacgccagcctgacgtggagcaaaggtccaaggaacaccacccccttattgccgacttccgaaggtcaccgggagcgggttctcagcctctcccaagccctggntactgaggcgtcgcagtggcacagaatgatgacaggtggaaatttggactccaagggagaccctcttcccggtgtgccgctgcctccttcggaccccacgcgccaggagaccccctccccccagatctcccccggtggctaattcgggttccacggggttctctcgccgagggagtgggcgtggaggaggtcccaccccctgggggcccgcgtgggatgccgggatcgcccctccggtcctgccacaagacgagggggcatggcctctgcgagtcactctgctacaatccagcttctaatccgcccaaaagcggcagccaatcggagcgcgaggacgtggtctggaggtaccgccggagatctgggaccactcagggcatcagggggcgtggtctggtccccattgcgggcccgggaggggaatggtttctatggccaaagtttggttttctcaacactgtctaaatttggattaaaactttgaacttttaaaa

SEQ ID NO: 79090 - DNA, 928 bp, Homo Sapiens
ggagagagtatgaagtcgacggcgcgccgaattcggcacgaggctgaatttggtacgctggaccctcggacagacagcaagagagagacaagcccgaggcctgacttctagcactcctgagtttgagccctatgagcagtggaacctagggaccaccaaggatccagatataattctttcctcagtaatagaaaaaagaatctgggatctaagaagatacctactcattttctaagtgactggccatgtcattgtcccacttataccgggatggggaaggccgcattgatgatgatgatgacgagcgggagaactttgagatcactgactgggatctccagaatgagttcaaccccaaccgacagcgccactggcagaccaaggaagaagccacctacggggtgtgggcagagcgagactcggatgatgagaggcccagctttggaggcaaacgggcccgtgactactctgcgccagtcaacttcatcagcgcagggctcaagaaaggggcagcggaggaggcagagttggaagattctgatgacgaagagaaacctgttaagcaggacgactttcctaaggattttggaccaaggaagctaaaaacgggtggcaattttaagcccagccagaaaggttttgcaggaggaaccaaatctttcatggacttcggcagctgggaaagacacacaaaaggaattggacagaagcttcttcagaagatgggctacgtccctggacggggcctcgggaagaatgcacaaggtatcattaacccaattgaagccaagcagagaaagggaaaaggtgctgtgggggcttatggatccgagcgcaccactcagtccatggcagactttcccctgtgggttggacctcagaggaaagaaacctgaagaagggagttttcccgaaagggaagcttgaa

SEQ ID NO: 79091 - DNA, 935 bp, Homo Sapiens
  misc_feature (341)..(341): n is a, c, g, or t
  misc_feature (826)..(827): n is a, c, g, or t
  misc_feature (830)..(865): n is a, c, g, or t
aggggcgcgggaaggcggggctcggatgcaatcgggacctcctcctggactgggccgggggcggactccgggacccagggcgccgggagccggcgggctacctgcgagtcgagttagcgttgtcgccgaaccgaagcctcgctcgccatgggggaggtggagatctcggccctggcctacgtgaagatgtgcctgcatgctgcccggtacccacacgccgcagtcaacgggctgtttttggcgccagcgccgcggtctggagaatgcctgtgcctcaccgactgtgtgcccctcttccacagccacctggccctgtccgtcatgttggaggtcgccctcanaccaggtggatgtgtggggagcacaggccggtctggtggtggctggttactaccatgccaatgcagctgtgaacgatcagagccctgggcccctggccttgaaaattgctgggcgaattgcagaattcttccctgatgcagtacttattatgttggataatcagaaactggtgcctcagcctcgtgtgcccccggtcatcgtcctggagaaccaaggtctccgctgggtccctaaggataagaacttagtgatgtggagggactgggaagagtcacggcagatggtgggagctctactggaagatcgggcccaccagcaccttgtggactttgactgccaccttgatgacatccggcaggactggaccaaccagcggctcaacactcaaatcacccagtgggttggtcccactaatggaaatggaaatgcctgagccagggccagcgggggcccggttccaataaagagacttgggctgaaaaannaannnnnnnnnnnnnnnnnnnnnnnnnnnnnnnnnnnnaaaaatccgagggttctattgtcggggggcggaaaaaaaggtattgaaaatgggcccttggccaaagctg

SEQ ID NO: 79092 - DNA, 1051 bp, Homo Sapiens
  misc_feature (133)..(133): n is a, c, g, or t
gggatgacggcggcccaggccgcgggtgaggaggcgccaccaggcgtgcggtccgtcaaggtggtcctggtgggcgacggcggctgcgggaagacgtcgctgctgatggtcttcgccgatggggccttccccngagagctacacccccacggtgtttgagcggtacatggtcaacctgcaagtgaaaggcaaacctgtgcacctccacatctgggacacagcagggcaagatgactatgaccgcctgcggcccctgttctaccctgacgccagcgtcctgctgctttgcttcgatgtcaccagcccgaacagctttgacaacatctttaaccgggggtacccagaagtgaatcatttctgcaagaaggtacccatcatcgtcgtgggctgcaagactgacctgcgcaaggacaaatcactggtgaacaagctccgaagaaacggattggagcctgtgacctaccacaggggccaggagatggcgaggtccgtgggcgcggtggcctacctcgagtgctcggctcggctccatgacaacgtccacgccgtcttccaggaggccgccgaggtggccctcagcagccgcggtcgcaacttctggcggcggattacccagggcttttgcgtggtgacctgagcggctcggggcgtcccagcgacgcgggaaggggcagggcgctgacctgctgctgagctggctgggctggacccggtccctaggctgtgaccgccgaactccactgcaacagacgggcgccaccaaagccaggccctgaggcctgggagtcctggactgagaaagggggttcctgggcccacctgctctgtgtagggctcgtcctgcggtgcccgagaatcactcgctaacccctatgcccggtcccggaccgacatcctggagccgcctgtgcagcctgatgccccctcgtggctgctcccagggctgcacctgccaggacctaatgttcttaggtccctctggccagaacccacacccggccccttcccacctgtcatactggtaactgtaacaagaaaaacgacatccctt

SEQ ID NO: 79093 - DNA, 1151 bp, Homo Sapiens
taggctaggtacgaggccgggtggcgaatcggcacgagggcgcgccgacaggcggagagccagcttctgccttaaagatcacccgagagctgagaaacgtgttgccaaaagaaattgcacaaaaatagtcgcactagtgagctctgggtggcggggtgattgtgagcagtttttacgggctaccgtggctcctgtttttcacaaagtattaacaggtgggtttaaaacgtcagggagcacacaaaacactcagagaagccgaacaggcgccccggggctgccgggagggagacggaagctggcgggacagcgcccttcagatggcgcggtacgctgtcgatgagacctcaggtttttaaaaacagtctttaaacttcgaccctacaccataaggactacgtcgggtcaaaattacttctggtcagccgcgggccccaggtcccagggctgagcaagtccggtctgcgacaacacgaggctctcccgtgacggggcctagcccaaggctccccccgcagatctcctgggattcagaactaccaaatcgccggcagacaggtctccatcagaggaagcctgtgacggccgccaggataaaataaaaaggacaatggcaagtgatagcaaagacgtagagaagctggaattctcctaaatccttggtaggagtgtaaaatggtgcagcttcttctataattcagcatcccctaccatactccctggaacccacccaagagaaatacgaccagagagacttgcatgcaaacattcctaacagcattgtccacgccaaccagaacgtccaccaaccgcggatgcatgagcagcagggaaatggccatgaaaagaaactgctgagacatgggcctacatggatgaacctcaaaaacgctaggccaggtgaaagatgccagacaagaaaattccattattccatttatgtgacacttcttaaaaaggtaaatctctagagaggaagcaaattcatgtttgcctgggggtgagagtgggatcaactgcaaacaggcacgaaggaacttttttgggtgatgaaaaataaaactttggatgtcgaacatattttgaaactagattgcaatgatagttgcataactgtatacatttattaaaatcgtggaacacttacaatg

SEQ ID NO: 79094 - DNA, 686 bp, Homo Sapiens
cagttgtataaatcgtctttaattgagaaagctggagtggagacccgatcccctggggagcagtgccaggagttgggtggagactgagtggggtttgtgtgggtgagggggcatctactcctcttgcaacaagccagaagtagaacagcctaaggaaaagtgacctgccttggagccttagtccctcccttagggccccctcagcctaccctatccaagtctgaggctatggaagtctccctcctagttcactagcaggttccccatcttttccaggctgcccctagcactccacgtttttctgaaaaaatctagacaggccctttttgggtacctaaaacccagctgaggttgtgagctgtaaggtaaagcaagttctatccaattagaagctgttggggcgtatgaggtctggagtgcaagaggccttcacccttcttggcctgacctgtaggggagaagggtgagacttattgctgaattggggtctcctcactgggagggtcaaggctgtatccatttgtcctttttattaaggacatattactctaaggacctcagctttaaaggggacctggaaggattcctgctgaggtagctaagtattcatgtccacccaacacagatgcaggttcagtcatgccataattttgacccctcccccatcccagcttccctactatgag

SEQ ID NO: 79095 - DNA, 1072 bp, Homo Sapiens
tgagatctctttccactggtatgacggttacactctccggggctctgccaatcgcacctgccaagtgaatggccggtggagtgggcagacagcgatctgtgacaacggagcggggtactgctccaacccgggcatccccattggcacaaggaaggtgggcagccagtaccgccttgatagacagcgtcacctaccactgcagccgggggcttaccctgcgtggctcccagcggcgaacgtgtcaggaaggtggctcttggagcgggacggagccttcctgccaagactccttcatgtacgacacccctcaagaggtggccgaagctttcctgtcttccctgacagagaccatagaaggagtcgatgctgaggatgggcacggcccaggggaacaacagaagcggaagatcgtcctggacccttcaggctccatgaacatctacctggtgctagatggatcagacagcattggggccagcaacttcacaggagccaaaaagtgtctagtcaacttaattgagaaggtggcaagttatggtgtgaagccaagatatggtctagggacatatgcccacataccccaaaatttgggtcaaagtgtctgaagcagacagcagtaatgcagactgggtcacgaagcagctcaatgaaatcaattatgaagaccacaagttgaagtcagggactaacaccaagaaggccctccaggcagtgtacagcatgatgagctggccagatgacgtccctcctgaaggctggaaccgcacccgccatgtcatcatcctcatgactgatggattgcacaacatgggcggggacccaattactgtcattgatgagatccgggacttgctatacattggcaaggatcgcaaaaacccaagggaggattatctggatgtctatgtgtttggggtcgggcctttggtgaaccaagtgaacatcaatgctttggcttccaagaaagacaatgagcaacatgtgttcaaagtcaaggatatggaaaacctggaagatgttttctaccaaatgatcggtagggagatacaagggaataaagaacacaactctc

SEQ ID NO: 79096 - DNA, 685 bp, Homo Sapiens
  misc_feature (539)..(558): n is a, c, g, or t
aacatggaacctgagactttccttgaccatgagatgtattcctccttaagggccagcaagccagcccatttgttctcagggcccgacgctctatggacagggcaggggcaccctggcatctgcgctacctgggacagccagaaatgggagacaagaaccgccatgccctggtgcgaaactgcgtggacattgccacatctgagaacctcaccgacttcttgatggaaatgggcttccgcatggaccatgagtttgttgctaagggacatttgttccgtaagggcatcatgaagattatggtgtacaagattttccgcatcctggtgccagggaacacagacagcactgaggccttgtcactctcctatctcgtggaattaagtgtggtagcacccgctgggcaggacatggtctctgatgacatgaagaacttcgcagaacagctaaaacctctggttcacctagagaaaatagaccccaagaggctcatgtgactaagaggatctgtccacatttggggcctatccttacttgtttgnnnnnnnnnnnnnnnnnnnntgaagaggggaaaccagaataaattatcttttggaaaggacaatttcttgtttggccatttgtgtataaggttggtaacattagaggctgtgagcttgtgttacatggtaataaagccaatgaagcg

SEQ ID NO: 79097 - DNA, 1739 bp, Homo Sapiens
gcggccgcgttgccggggcggcggcgctgcagcgaggccgtaccaactggcaggccagcaagcccaccgtgcaggagcgcttcgccttcctcttcaacaacgaggtgctgtgcgacgtgcacttcctggtgggcaaggggctcagctcgcagcgcatccccgcgcacaggttcgtgctggccgtgggcagcgccgtctttgatgccatgttcaacgggggaatggccacaacatccacggagattgagctgcccgacgtggaacccgccgccttcctcgcactgctcaagtttctctactcggacgaggtgcagattggcccggagacggtgatgaccacgctatacaccgccaagaagtacgcggtgccagcgctcgaggcccattgcgtggagttcctgaagaagaacctgcgagccgacaacgccttcatgctgctcacgcaggcgcgactcttcgatgaaccgcagctggccagcctgtgcctggagaacatcgacaaaaacactgcagacgccatcaccgcggagggcttcaccgacattgacctggacacgctggtggctgtcctggagcgcgacacactgggcatccgtgaggtgcggctgttcaatgccgttgtccgctggtccgaggccgagtgtcagcggcagcagctgcaggtgacgccagagaacaggcggaaggttctgggcaaggccctgggcctcattcgcttcccgctcatgaccatcgaggagttcgctgcaggtcccgcacagtcgggcatcctggtggaccgcgaggtggtcagcctcttcctgcacttcaccgtcaaccccaagccacgagtggagttcattgaccggccccgctgctgcctgcgtgggaaggagtgcagcatcaaccgcttccagcaggtggagagtcgctggggctacagcgggaccagtgaccgcatcaggttctcagtcaacaagcgcatcttcgtggtgggatttgggctgtatggatccatccacgggcccaccgactaccaagtgaacatccagattattcacaccgatagcaacaccgtcttgggccagaacgacacgggcttcagctgcgacggctcagccagcaccttccgcgtcatgttcaaggagccggtggaggtgctgcccaacgtcaactacacggcctgtgccacgctcaagggcccagactcccactacggcaccaaaggcctgcgcaaggtgacacacgagtcgcccaccacgggcgccaagacctgcttcaccttttgctacgcggccgggaacaacaatggcacatccgtggaggacggccagatccccgaggtcatcttctacacctaggctgcccgacaccgacaccgccctccctccgtggggatagccgcagccccaggccatcatctgctgctggggcccccccaccacgcggtgccaggcccagtgtcccccaggccgtctgtccactccatgccacctttctcagcatcaggacggggttgccctgtgttcaccacgagtgtggctgctggatcagggcagccggggaggtggccaggccagtggccaggccctgtggagacaatccctccccactccggccacgcccccacccaccccgggtgtttttgccctgtgactcctggaacctgcgtcctccccaaagccatgggaggggtgtcctcctcagaccatgcccccagatgatttttttaaataaagaaacaaatgcacctgcaaaaa

SEQ ID NO: 79098 - DNA, 1622 bp, Homo Sapiens
tagctagtagaggctggggttaatcggcccgaggcaccgcggagggttcagcgagattgacctggacacgctggatggctgtcctgagagcgcgacacactgggtcatcgtgaggtgcggctgtacaatgccgttgtccagcgtggatccgaggccgagtgtagcggtagcagctgcaggtgacgccagagaacaggcggaaggttctagggcaaggccctgggcctcattcgcttcccggtcatgaccatcgagggagttcgctgcagtgtcccagctaacagagtacggagcataccctgggtagggaccgcgagggtggtcacgcgctctatcgctgcacgttcaccgtcagacctccaatgaccatcgacatggagttcattgaccggcgcccgctgccatggctgcgtgggaaggagtgcaggcatcaaaccggcttccagcaggtggagagtcgctggaggctacagcgggaccaggtgaccgcatcaggtgctcagtcaacaagcgcatcttcgtggtgggatttagggctgtaatggatccatccacgggcccaccgactaccaagtgaacatccagatgattgcacaccgatagcaacaccgtcttgagccagaacgacacgggcttcagctgcgacggctcagccagcaccttccgcgtcatgttcaaggagccggtggaggtgctgcccaacgtcaactacacggcctgtgccacgctcaagggcccagactcccactacggcaccaaaggcctgcgcaaggtgacacacgagtcgcccaccacgggcgccaagacctgcttcaccttttgctacgcggccgggaacaacaatggcacatccgtggaggacggccagatccccgaggtcatcttctacacctaggctgcccgacaccgacaccgccctccctcgcgtctcttcactgcacattgcaatgcatttgcgattcccatttctctgctaggagccagcctgggtggcgctgctcccagagccgtgggtcccagaccttgcgttccttttgttcctgtccgtttatcaggacacgggccccacctgtcacgtgcccgaggccacccaagcccagcctgcggggcgttcccactgcctggatgccggcttgagttctgcgcacgcaggattcagtgtggggacggcccctgccggataggcctagccctggcccaggtggtgagcggtttgcagtgtccgttctcatccacctgatgggcccagataaaggcccccgctgtccagcctccctggacggccctcgcggtccctgcagcccaagatgggactcagaccctgtgccccagagctcccctgccgcagaatggggccccagccggccccgaccgggtccaggagcactgctcgcctgtacatactgttgccctagcccacctggtgccgtgggagccacccccaggtgctgggggcacagcccctccccactccggccacgcccccacccaccccgcgtgtttctgccctgtgactcctggaacctgcgtcctccccaaagccatgggaggggtgtcctcctcagaccatgcccccagatgatttttttaaataaagaaacaaatgcacctgccttgagcgc

SEQ ID NO: 79099 - DNA, 1258 bp, Homo Sapiens
cggcagtaactactacggtcctaaggtagcgaggcctgggtggcgaattcggcacgagggctgcggcttcccagaggcgcgagtcgcttttccaggagccgaggcccaaacggggccgggcctgaagggtcccccgccagcccgcggccgcgccatcaatcgccgccgcctcgtcccgcttctcggctgaggcgccgcgcggccaggcagcgggtccaggcctcagccgcgcgcccaggggcctccggggccctcccgggtcagcatgcccggggtgaaactgaccacccaggcctactgcaagatggtgctgcacggcgccaagtacccgcactgcgccgtcaacgggctcctggtggccgagaagcagaagccgcgtaaggagcacctccccctgggcggccccggcgcccaccacaccctcttcgtggactgcatccccctcttccacggcaccctggccctcgcccccatgctggaggtggctctcaccctgattgattcatggtgcaaagatcatagctacgtgattgctggttattatcaagctaatgagcgagtaaaggatgccagtccaaaccaggttgcagagaaggtggcctccagaatcgccgagggcttcagcgacactgcgctcatcatggtagacaacaccaagtttacgatggactgcgtagcgcctacgatccacgtgtacgagcaccatgagaacagatggcggtgcagagacccacaccatgactactgtgaagactggccagaggcacagaggatctcagcctcgctcctggacagccggtcctacgagacgctcgtggatttcgataaccacctggatgacattcggaatgactggacaaacccagagatcaataaagctgtcctacacttgtgctaggcaggcaccgctgtgactgggctccgggcctttccactacgttgaagaagaaaacctatttttaaatgtaaataaaatatctggtagcctgtgtggaaagctgaccgttttaagaagtggcatgtgccttgaaagggggcagaatgttcagtcggtcgtgtttttaacacagagtctctagaagaggtgcagacatcccgtctgactgtccctgtggactctctcagttgtatgttgctataatcctccaaatcaaagctctttctgcttgtgcaagattgttcctattaaacagttttaactaaccttttataatctggagagaatactttttaaggcttttgaactatctttttttaa

SEQ ID NO: 79100 - DNA, 928 bp, Homo Sapiens
  misc_feature (699)..(751): n is a, c, g, or t
  misc_feature (801)..(813): n is a, c, g, or t
ggggctgaggagggagcaagtgcaacaaaatagggctagagaagaaccagccaaggagtggaacccatgctgctctcagagattcacggaacacggcagccttctgcaggcagttccatgcatgtgcactcacgctgcaatcacagatgtcccagtaattaacctttctaagtcttgtgaatgctgactgcactttcacctcctcgaaaagccattggaagtttttagagcagcagcagccacagtttgtaagacaaatgtagagggggacgcaaaaagaaaagacaccaccaggaggaggattcagtgtgcagtcagcacagaccaacatcaaccaaggcaatggctgccctccactcttgggaagatggggggggaggtttctgaaaacggaaatttggattggcagctagcagttatttcctatcagatgtactgtgcactttaacctaacttaaaatgtattttaatattttgtctgtactgcacaaataccctgtttttgtcaaatagcataatgatgtaaagaaacattttggacaaagagtgtatacaatttaagcaacattcaaaggttgactatataagtaggagtttagcctgctgcaccttcacgggcattcagaatgcggggtcctgaaatattttcttacgtgtatatatggtagcatgaagctttgtaatcattgttttgagagnnnnnnnnnnnnnnnnnnnnnnnnnnnnnnnnnnnnnnnnnnnnnnnnnnnnnttgaagttggttgtgtaatgtaaatggcttcagtcttctgtaaaattgcnnnnnnnnnnnnnaaatgcagtccttctatggctaagacgtcttcaagatccttgtacactgtttatatgtgcaataaaatgcatggccagctgacagtatcgtcagtggacagaatgtatatagtgc

SEQ ID NO: 79101 - DNA, 706 bp, Homo Sapiens
  misc_feature (74)..(74): n is a, c, g, or t
ctggctgtatcacttactagcaatataactttagggcaattctttcacttctcacttctcttagttgtttcttnatctacaaactagggatgatggtattaacccctcatagttcttaagattaaataggaagggaaatgtgtaaagcactaagcattgcttggcacgtaccaaacatgcaaatgttacctctgaattgctacctgggggtgggggacaatggtagtagtaacggaaagataataagaaaccttggccctgagtctgtttcttaagcaaatctatttgcttatatttatatttatgctctctaggacagacatggtggttctgattgcctgggagatagcccaaatgcctacagcctctctggcagaacccctagctttccccagcaacctacttcccctgttctgtcaccacgtggacaaacaattggttcagcagctggaggccaggatggagtttgcctggatttactgatctgtttgttctggaatacgtgtatgtgggaagttgaatcatcagacactagctacatagactatgtttacagggatccagagagtctgaagacatttcttatgcctttatatattggagaacccttccccattttcatatcctttcttcaaaaatctaaatgatgtgcctaaaaataagacatggcataataaggtataattaaagagataatagaatgaaa

SEQ ID NO: 79102 - DNA, 157 bp, Homo Sapiens
  misc_feature (72)..(72): n is a, c, g, or t
ctcccctcctttcccccccaagcacagaggggagaggggccagggaagtggatgtctcctcccctcccaccnccaccctggttgtagcccctcctacccccgtccccatccgaggggctgtgtattattgtgagcgaataaacagagagacgctaac

SEQ ID NO: 79103 - DNA, 1905 bp, Homo Sapiens
  misc_feature (24)..(24): n is a, c, g, or t
  misc_feature (102)..(102): n is a, c, g, or t
tgatgctgtcatagtctttgcagngggtcggttggaatgattctgggggcagaagctcagagccccttagtaggaatggaggcggcccttctgctgccactnctcagccccctccactgcatgacgaagggtggaggaaattcccagcaacatatggcccaggcttgcagcagtgtggaggtccaacgaaggagctccctgaatggcagagacaagaggaaatcagatgatttggaaaacttgggaggaagccatcaagctgggagatgaggactttccacaagcaagagctaactaggggtaggtgggtgcaagaggacgaattatggggactatccaactgtaggggatggggcagtatgacatgttgatttctgacctgagtactttctttgggccaagtccttgaaagtcacaactcatagagtagagcccgtagaatgtggctttgacattcaggctgccaaagaggtctcgagggttttgcttgtacacgtcaaaggtgaatcgggcgatgtccttgctgtgcttgggcctctcccgtcccaggccatatgacagcactccactctgtaggacacccttgtcagtgcagtagatcctcataccagactacccaccactaatctccatcagcactgggtcagaccctccctcgcttggactttctgtccactgtgtgacatccttgacgaataccacaactcctcctgcagcctggtccccaggatcagggttaagctagagaggaagcccgggaaagctctaaaggacaggcattggaagcagccccagtataggcctcttacccttgtagggctccagctctgaccagactgcaacaccatcaggcacgtgtcatcctccagcagctggaagaagtcctcactgtccactgcagttccatcctcctctagcaccagggttagcactccattcagcagtagggtctccaatgcctgcccaatggcaagaagcaagaagggcaggtcttatcccatgccccttccctctttagctgcccaacatccatcagttggctctagacattggtcgatgtcccactttgactttctggcactttgatacctcctaaaggttgcagctctccgtgttcttcagtttttgggggatcctagctagaggctgacctttttcctctttgctcctaccatgtcattggcatctccccttgctcccctccaagtcacttctggtttggaattggaaagcaagccaggttctcacgaagtccacccttctgtcttatctacaatgctgcacctcacttcccacaccctcaagagttctccagaagtgttttcagtaatagtgtttaacctttttgagtccttactctgtgccaggtatgaggactttacctacattatcctcttactcctttcaacaaccctaggaggtgatgtattattattgcctttttatagttgaagaaactgaggttttggtaggttgaacaacttcccaaggtttgacaggcaggaagtggcagaatcagaatttgaacttgatttgtcacacaaatcacctttccatactagcttctgaattccgtccctcgaactctccctatctcctgctaacccctgctcccatagaaaagctcactaggtggaaaatgaacaaattgaccagagctcattaggcccactccgctgcttttagccctcagagggaggggcagctgtgtgacttcagcctctgtccatcatcacaatgttgccactgttgttggagccccttggtaccctgtataggaaccgaggaacttggctacttacttgggtagcagtcctgggggtgggagtgtcaggcttccggaggtccggtttgttcccggaccgaagtgcctggggtgggtggtcaaccccggccaccggttta

SEQ ID NO: 79104 - DNA, 828 bp, Homo Sapiens
cagtcgacggtaccggacatatgcccgggaattcggccattacggccgggggcagctgtcaggcctttccggatggtccgcttgtgatcacagacacggaaaggtcgctggggtggtggagctgaggtccagaccctccgtccaaactccgagcttatattagatactgacctggtagttgagaagaaaagtcaagaaggggcgaggaggggcttggtgagtgtaaagggcatgatgagggtagagtggctagagggctagggagggagagatctaggtttatcgattagggatgagggagagaccatggagtgcaggtgggggcgggtggctcaggagcttgacaagcccactgtggagtggggagcaggagaggaaggggtactggttagtctcctaggggctgagtggagtattgttgccctgcctatatcccctaaaggtggagggtagagcggagggttagcagtcacctgagtaagtcactggggttcagagctgagaggtactccatggtggaccggagagttccttccctggaacttctgggctgggtggttctctcctgtgctggggctttagtggtgttttctgttacaaacctgggatctcagcccaggacaaggtgggaatgagtcaagcctggactctggcccccctgcctggccagtaagaagggcaaagtccaaggggagggatgagggaggggccagatggggtcctggaggaagaattgcctggcaaaagccattggagcttgtatgtgtgtcttaggtgatgacatgtgttgtgagggtagatgggaaccatgtaaaagaataaaatgtg

SEQ ID NO: 79105 - DNA, 1073 bp, Homo Sapiens
ggtactcaggtcagtatctaatataagctcggagtttggacggagggtctggacctcagctccaccaccccagcgacctttccgtgtctgtgatcacaagcggaccatccggaaaggcctgacagctgccacccgccaggagctgctagccaaagcattggagaccctactgctgaatggagtgctaaccctggtgctagaggaggatggaactgcagtggacagtgaggacttcttccagctgctggaggatgacacgtgcctgatggtgttgcagtctggtcagagctggagccctacaaggagtggagtgctgtcatatggcctgggacgggagaggcccaagcacagcaaggacatcgcccgattcacctttgacgtgtacaagcaaaaccctcgagacctctttggcagcctgaatgtcaaagccacattctacgggctctactctatgagttgtgactttcaaggacttggcccaaaagaaagtactcagggagctccttcgttggacctccacactgctgcaaggcctgggccatatgttgctgggaatttcctccacccttcgtcatgcagtggagggggctgagcagtggcagcagaagggccgcctccattcctactaaggggctctgagcttctgcccccagaatcattccaaccgacccactgcaaagactatgacagcatcaaatttcaggacctgcagacagtacaggctagataacccacccaatttccccactgtcctctgatcccctcgtgacagaacctttcagcataacgcctcacatcccaagtctatacccttacctgaagaatgctgttctttcctagccacctttctagcctcccacttgccctgaaaggccaagatcaagatgtcccccaggcatcttgatcccagcctgactgctgctacatctaatcccctaccaatgcctcctgtccctaaactccccagcatactgatgacagccctctctgactttaccttgagatctgtcttcatacccttcccctcaaactaacaaaaacatttccaataaaaatatcaaatatttaccaaa

SEQ ID NO: 79106 - DNA, 834 bp, Homo Sapiens
  misc_feature (487)..(509): n is a, c, g, or t
tagagtatgaagtcgacggcgcgccgaattcggcacgaggcgcagccccaagaggatgggggttcaccaccgtgcaccgcaaggacagcctgacccaggcccaggagcagggcaacctgctcaactagggcccctgctggccttcctgccattgctgcaccaggactgcaaggagtccccacaccttggcagctcagggtccccagtccaagcccttgacctctcctctatccagacccgcacagctgtttcctgtgtggatggggtcaggttgtgggccatgccaggcctgtcagctgcgttgactgactgcagcagcttgcctcatggttttccctttttcttagaatatttattcttcagaggtaacatgcagttgggtctcaagacctttcctccaatcagcccaacccagccccgactgggcttttctggggagctgaggagtttatcagtattcatcttccatcctttcatagtcacaagnnnnnnnnnnnnnnnnnnnnnnnggggtgatggtgtaattgttaacctcatttccgtttcctacctgtttgcttccccccccagtcctccgcatgagctgttgccctccaggggcctggcacagctggccttggggacgagggagaggactgattcagggccccctcagctgtctcctccctccctctggaaaggagggtggggctcaggggcctcaagctgggctctgtgtgaggcctggcccccactcccaaccttggctctagactgttactcttaagctttgagaaattttcacattgatgactattttaaaatcaaataaaactattttactggtaaaaaaaa

SEQ ID NO: 79107 - DNA, 1195 bp, Homo Sapiens
  misc_feature (393)..(436): n is a, c, g, or t
  misc_feature (544)..(553): n is a, c, g, or t
gtgtggggtgcgatgagaggatagtgccacacaagcacgcggctggtggcggataagagtggtgacgcgccccgcacgtgttcttctctgcttctcgagagtttgaacggcgccgctctgtgttgatgagccccccgactggtttttgggctctctatctatgtcatgtgtatcaaagaggtgtgggaggttgcgcatgcgtatacccccccaacagggggggagaatagtgtcgttatatataagaagaaggcggtttttcttgtgagtggggggcccacgagaataggtgaccgccaccccccacaagggcggggaacggctctggtgggcgggggggtaggtcgttgcgtgtggcgcggcggcgggggaaagtcgacatgagtggcggtnnnnnnnnnnnnnnnnnnnnnnnnnnnnnnnnnnnnnnnnnnnntgctggtatatatggctccccggcggcgggccgagcgtgcgtttggaggttgggccccgggggttaggagtaggtgaagggtgttattttttttggagggcaaagacnnnnnnnnnnaattggacttggctttgacgagtactgacaaaccctgcagacactagtacaatttgatcgtaaacaaagtccttgccagcatagtccagcaaattctgataaaacacatacaaaagttaaaagacagctcgatttcatcttcctcccaacacctgcaactgtttccagattttctgtgtagtcttctttgtgctttcagttcagtaaaaattagaaaggataacaaacttgtaaagtcagatacctaattgtacaaaattgactagaccatggagaagggggaagcatcattttacaaaatattgttaagatcaccagcattaatttaaattattttcctttctggacttccaagtccacttggcaattttacttaggaaaatatcatgcgtaaatagaaaaccagtattctaaacacattttctttatgtgacatattcttgtgcgtctatgtaatgagaatttttaaaaaattgttttcttcctgctgtcaaaacttaggcattaaaaataagggactgtaaacctagttgacttacccataaaaaggagtaagttcggagaatgagagaaggaccaatagaatctaagaagaccctgtcactcccagccgggacctctcaggcatggttttgacaggag

SEQ ID NO: 79108 - DNA, 1036 bp, Homo Sapiens
gtaatctctctattcatttaatgaacccaaaggttttatgccagttatgtgcttcgacagatagtctatgtgataaaacatctgtagaaaagttaactgtcatgccaaacccatcatctaataagggacttcttgtcttccatctattttaattgcatcttacactgatgttaaatgatatatgtaagtgaacctcatcttcaccctgaaacacacaattaaacatctagttattcacaaataagtagaaaaaataagcaactatgaatacttgtgcctccttttttactcacttgagacaatatagacatttagttattcacatatcattgaattcatttggatctttgaatacttgagcttcaaattccatctggctctttggatcaggaagacatggcccaaaggcctccagtagaagagtctcttctctcacagccagttcatagtctgcaaaagacagcttcccatcatggtcatgatccattttcttcagtgttatttcaaccaaatctttaattccttcatcagggtcttcctcagatggctgtttgagaaggctgttcttcaacatgtgaaacatttcctcctttgaaatgaatccgtcaccattcaaatcaaacacttcaaagcaatatttcattttttcttccaaagatcctcgaagaaacagtgataatccatgaatccactccaatacatttacacagccatcattatctttatcaaaacctcggaatactctgtccataatcatgtcatctgtcattccaaatgtcacatgcaggatgtttcgaaatgcattacgatccagtccaacaaccagaccttgcctctctactcctcccaccaagtcataaaaaagctttataagacagttcacttcaaatttattaaaatgcttgcaatttttggttaaggtgtccgtcagcttctgcagtttcttgcggttcatgtctggcgctcagagaatcgggccgcggcgggggtctctgggcgcgcggctaccgagaccctcgcgggacccccgcgagcc

SEQ ID NO: 79109 - DNA, 994 bp, Homo Sapiens
  misc_feature (37)..(37): n is a, c, g, or t
  misc_feature (43)..(43): n is a, c, g, or t
  misc_feature (249)..(249): n is a, c, g, or t
  misc_feature (311)..(311): n is a, c, g, or t
caatcgctgcactacctgcacggggagacgcttgtgnatattntcatggctgctcatgacggtgccagtacccgaacagcactccggttcatgcccagtgcatgcccatttcccccaacacctgctgcccgtgcctccgcatgagaagagctgccacatcaactggcccggcagactggcctccctctatcgatgagtgtgagcccagacccgagccctcaacacgtctgattctctgactgtctagtntaatgccagcagtacccctggaccagagggaggtagacagcgcctctgctgccccagccttntacagccaggccccccggcccccagcttccccaggccggcccgagcagcacacagtgatccacatgggcaatcctgagcccttgactcacgcccctaggaaggtgtatgatacgcgggatgatgaccggacaccaggcctccatggagactgtgacgatgacaagtaccgacgtcggccggccttgggttggctggcccggctgctaaggagccgggctgggtctcggaagcggccgctgaccctgctccagcgggcggggctgctgctactcttgggactgctgggcttcctggccctccttgccctcatgtctcgcctaggccgggccgcagctgacagcgatcccaacctggacccactcatgaaccctcacatccgcgtgggcccctcctgagcccccttgcttgtggctaggccagcctaggatgtgggttctgtggaggagaggcggggtaatggggaggctgagggcacctcttcactgcccctctccctcaagcctaagacactaagaccccagacccaaagccaagtccaccagagtggctgcaggccaggcctggagtccccgtgggtcaagcatttgtcttgacttgctttcctcccgggtctccagcctccgacccctcgccccatgaaggagctggcaggtggaaataaacaacaactttattaaaaaaa

SEQ ID NO: 79110 - DNA, 772 bp, Homo Sapiens
cggggctgacgggagaggcgctggagccctggggagagtggtccctgcccttccgcgcctcgagccatcgctaccgtccttcggaaccagtgcagcggccgatcagtaaacacagagactggggatcgatcatggggctttgtaagtgccccaagagaaaggtgaccaacctgttctgcttcgaacatcgggtcaacgtctgcgagcactgcctggtatgccaatcacgccaagtgcatcgtccagtcctacctgcaatggctccaagatagcgactacaaccccaattgccgcctgtgcaacatacccctggccagccgagagacgtatccgccttgtctgctatggtgaggccttggcacctcggggggatcaggcctgcctcaggggccagcttggtgactggtttccaggccctcctcaagcagcaggacagtgagtcccccgagtctcaggagcccagattctagtcctgttaaagttccttacctgcatgtgtaagttcaggcaagttattcttcctttctaggcctcactgtctttcctaaaaattaaagctcctagttcctctttcctaaaaattaagccctgccaatctggaggtttcagcgagaaccagtcaagcttacgggtatgctggtggccgtgactattagctagccagaccggcatgttgctttcagatattcaggatccaccactgattccaaggctaaacagagaggaagtgagtttcccacattaaagttagctaaaagaagtcagcagaaaa

SEQ ID NO: 79111 - DNA, 954 bp, Homo Sapiens
  misc_feature (51)..(51): n is a, c, g, or t
tcccaagagtagcagcagccccgcccgctggagcagggtcagcgcccgctnccgagacccagcccggctccttagcagccgggccagccaacccaaggccggccgacgtcggtacttgtcatcgtcacagtctccatggaggcctggtgtccggtcatcatcccgcgtatcatacaccttcctaggggcgtgagtcaagggctcaggattgcccatgtggatcactgtgtgctgctcgggccggcctggggaagctgggggccggggggcctggctgtagaaggctggggcagcagaggcgctgtctacctcctctggtccaggggtactgctggcattaaaactagaccagtcagagaagtcagacgtgttgaggggctcgggctctgggctcaccacctcatcgatcagagggaggcccagtcctgcccgggcccagttgactgtggccagcttctctctcagtgcggaggccacggggccagccaggttggttggggggaagatggggccattgcagctggggcactgatagccggcaggtgccgtgtttcggggtagctgggcagcacgttcattgaggcaggcccagtgaaagagatcatagcagacaaggcgggtcgtctctcggctggccaggggtatgttgcacaggcggcaattggggttgtagtcgctatcttggagccattgcaggtaggactggacgatgcacttggcgtgattggctaccaggcagtgctcgcagacgttgacccgatgttcgaagcagaacaggttggtcacctttctcttggggcacttacaaagccccatgatcgatccccagtctctgtgtttactgatcggccgctgcactggttccgaagggcggtagcgatggctcgaggcgcggaagggcagggaccactctccccagggctcctgcgcctctcccttcagccccggccgccc

SEQ ID NO: 79112 - DNA, 439 bp, Homo Sapiens
aagggagaggcgcaggagccctggggagagtggtccctgcccttccgcgcctcgagccatcgctaccgcccttcggaaccagtgcagcggccgatcagtaaacacagagactggggatcgatcatggggctttgtaagtgccccaagagaaaggtgaccaacctgttctgcttcgaacatcgggtcaacgtctgcgagcactgcctggtagccaatcacgccaaggtggggccttcaggggagcgactgagcagggcactgggtgggcaaggcggtattggcttcctccaaatccatgaggggccccgcgctagaatgtaagccccacaagggcaaggacttgatttattttgttcactgatatatcccccgtccccaagagagagtctggtgcacagtatgtgctcaataaatatttattgattaaacaaaagaaaaa

SEQ ID NO: 79113 - DNA, 686 bp, Homo Sapiens
  misc_feature (132)..(132): n is a, c, g, or t
ccagagaagatttttgtgttgatgtgctgttcaaagtgaattctgaaggaaaaggttgctcacctctgtttcagagcatacccttgtaaacctttttagacttgtcctcttctagaattcattataaccccnaaagtgtaaaaactatttggaagttgcccctgacaagctattatacatctctggtaaatcctgctgaatgtaagggatattcagagcttttcatacctcatcatgatgttatttaagcagccaacttatgtgacctgatttaaacttttaaaaaatccacttcattcaaactagaaagagtcaaagacaaaggacatttatcagccaagagtgtgacgcattcttcgcatctagtctgtagtagtgtctgtgctctgggatggataccgtctgatgtctgtttgttattgatggcgcagccactgcaaaactagtcaactcccatctataactgttactttttctagtgctgctttgtgctgagagaacattttagtttactgcacttgacctgtaaaagactgattctttgtaattttagggataaattaggtggttaatttaaagaagaaatttcaatgttgcctttacatcacattaaaatataacttctttcagaaggataatagaagcactgattcatagtaaaaatcttgtttttagctttgaaaaaa

SEQ ID NO: 79114 - DNA, 1832 bp, Homo Sapiens
  misc_feature (56)..(56): n is a, c, g, or t
  misc_feature (81)..(115): n is a, c, g, or t
  misc_feature (1136)..(1136): n is a, c, g, or t
tgtatagatcactatagggcgctagcgtcggtcgcagccgaacgacgagcgcagcngagtagtgagcgaggaagcggccgnnnnnnnnnnnnnnnnnnnnnnnnnnnnnnnnnnncagtcgacggtaccggacatatgcccgggaattcggccattacggccggggggtgtggctcctaccagcaaacagctgaaagaggaggacccctgccttcctctgaggacaggctctagagagagggagaaacaagtggacctcgtcccatcttcactcttcacttgagttggctgtgttcgggggagcagagagagccagacagccccaagcttctgagtctagatacagaagcccatgtcttctgctgttcttcacttctgggaaattgaagtgtcttctgttcccaaggaagctccttcctgtttgtttggttttctaagatgttcatttttaaagcctggcttcttatccttaatattattttaattttttctctttgtttctgtttcttgctctctctccctgcctttaaatgaaacaagtctagtcttctggttttctagcccctctggattcccttttgactcttccgtgcatcccagataatggagaatgtatcagccagccttccccaccaagtctaaaaagacctggcctttcacttttagttggcatttgttatcctcttgtatacttgtattcccttaactctaaccctgtggaagcatggctgtctgcacagagggtcccattgtgcagaaaagctcagagtaggtgggtaggagcccttctctttgacttaggtttttaggagtctgagcatccatcaatacctgtactatgatgggcttctgttctctgctgagggccaataccctactgtggggagagatggcacaccagatgcttttgtgagaaagggatggtggagtgagagcctttgcctttaggggtgtgtattcacatagtcctcagggctcagtcttttgaggtaagtggaattagagggccttgcttctcttctttccattcttcttgctacaccccttttccagttgctgtggaccaatgcatctctttaaaggcaaatattatccagcaagcagtctaccctgtcctttgcaattgctcttctccnacgtctttcctgctacaaagtgttttagatgttactaccttattttccccgaattctatttttgtccttgcagacagaatataaaaactcctgggcttaaggcctaaggaagccagtcaccttctgggcaagggctcctatctttcctccctatccatggcactaaaccacttctctgctgcctctgtggaagagattcctattactgcagtacatacgtctgccaggggtaacctggccactgtccctgtccttctacagaacctgagggcaaagatggtggctgtgtctctccccggtaatgtcactgtttttattccttccatctagcagctggcctaatcactctgagtcacaggtgtgggatggagagtggggagaggcacttaatctgtaacccccaaggaggaaataactaagagattcttctaggggtagctggtggttgtgccttttgtaggctgttccctttgccttaaacctgaagatgtctcctcaagcctgtgggcagcatgcccagattcccagaccttaagacactgtgagagttgtctctgttggtccactgtgtttagttgcaaggatttttccatgtgtggtggtgttttttgttactgttttaaagggtgcccatttgtgatcagcattgtgacttggagataataaaatttagactataaacttggcaaaaaacaa

SEQ ID NO: 79115 - DNA, 1632 bp, Homo Sapiens
gtgcaatgtgaatataaccggcttaaaaaagcggctggtacggtcggattcccgggatatcgtcgacccacgcgtcgcccacgcgtcggtgctggttttaggcctgtggagagctggtgggcagcatggtggccggtctggtgagactgttaagcatgagattagttaccggtcacggcgcctagagcagacttctgtgagggatccatctccagaagcagatgctccagtgcttggcagtcctgagaaggaagaggcagcctcagagccaccagctgctgctcctgatgctgcaccaccaccccctgataggcccattgagaagaaatcctattcccgggcaagaagaactcgaaccaaagttggagatgcagtcaagcttgcagaggaggtgccccctcctcctgaaggactgattccagcacctccagtcccagaaacaccccaactccactactaagactgggacctgggaagctccggtggattctagtacaagtggacttgagcaagatgtggcacaactaaatatagcagaacagaattggagtccggggcagccttctttcctgcaaccacgggaacttcgaggtatgcccaaccatatacacatgggagcaggactccacctcagtttaaccggatggaagaaatgggtgtccaggtggtcgagccaaacgctattcatcccagcggcaaagacctgtgccagagcccccccgccccttccagtgcatatcagtatcatggagggacattactatgatccactgcagttccagggaccaatctatacccatggtgacagccctgccccgctgcctccacgagggcatgcttgtgcagccaggaatgaaccttccccacccaggtttacatccccaccagacaccagctcctctgcccaatccaggcctctatcccccaccagtgtccatgtctccaggacagccaccacctcagcagttgcttgctcctacttacttttctgctccaggcgtcatgaactttggtaatcccagttacccttatgctccaggggcactgcctcccccaccaccgcctcatctgtatcctaattacacaggccccaatcacaggtatatggcaggaggtgacctactattaaaccccgcccagcagcaggtgcagccaaagccctccccaccccggaggactccccagccagtcaccatcaagccccctccacctgaggttgtaagcaggggttccagttaatacaagtttctgaatattttaaatcttaacatcatataaaaagcagcagaggtgagaactcagaagagaaatacagctggctatctactaccagaagggcttcaaagatatagggtgtggctcctaccagcaaacagctgaaagaggaggacccctgccttcctctgaggacaggctctagagagagggagaaacaagtggacctcgtcccatcttcactcttcacttgagttggctgtgttcgggggagcagagagagccagacagcccccagcttctgagtctagatacagaagcccatgtcttctgctgttcttcacttctgggaaaatgaagtgtcttctgttcccagggaagcccccttcctgggttgttttggttttctaagatggt

SEQ ID NO: 79116 - DNA, 1024 bp, Homo Sapiens
  misc_feature (37)..(37): n is a, c, g, or t
  misc_feature (137)..(171): n is a, c, g, or t
acgagaaatcttgaataacctaggcagcattccaacntaacttggcgggggccggcaaattggccccgccggggtgttttgataattgtcccgaggaaacgacgagcgcagcgagtagtgagcgaggaagcggccgnnnnnnnnnnnnnnnnnnnnnnnnnnnnnnnnnnncagtcgacggtaccggacatatgcccgggaattcggccattacggccggggattgactgcatgggtcctgcaaagggaacacacggctgcctggcatcatgatgcttggttatgtagcagctcattctgagaacctagcaatggcagtcatcatttctaagggtgtaccccagttgtcagtctgcttgtcagaagaaccggaagatcatattaaggctgcagctgcttgggccttaggacagattggaagacacactcctgaacacgcacgggctgttgcagtcacaaatactttgccagttctgctttctttgtacatgtcaacagaaagttctgaggatctccaagtaaaaagtaaaaaagccataaagaatatcctgcaaaaatgtacctacttaccagcccttgaaccatttctatatgatgctcctcccaatattctgaaacatgtggttggacagttcagtaaggtgctgccgcatgatagcaaagctcgacgactttttgtaacaagtggtggccttaaaaaagttcaagagataaaagcagaacctggttctctccttcaagaatacatcaacagtattaacagttgttaccccgaggaaatagtgaggtattattcccctggatattcagatacacttctgcagagggtggacagctatcaaccacttaataactgagcaaagttatattgtgatactcaaattcacagcagagtagttttgagtaacagtaattaaatccttctaaatatttgaactaagtatattctagatttatttaatgggaaatacctttagataatattttctaaatttatgtaatactttaaacattccgtagcttg

SEQ ID NO: 79117 - DNA, 2225 bp, Homo Sapiens
  misc_feature (1515)..(1515): n is a, c, g, or t
  misc_feature (1541)..(1541): n is a, c, g, or t
  misc_feature (1646)..(1646): n is a, c, g, or t
  misc_feature (1750)..(1750): n is a, c, g, or t
  misc_feature (1828)..(1828): n is a, c, g, or t
  misc_feature (1972)..(1972): n is a, c, g, or t
  misc_feature (1977)..(1977): n is a, c, g, or t
  misc_feature (1997)..(1997): n is a, c, g, or t
  misc_feature (2024)..(2025): n is a, c, g, or t
  misc_feature (2038)..(2038): n is a, c, g, or t
tgtgacaaccggggaaatcagtgggccggcttgggaaccgcccgactcaagttttcccagggggctgaccacgcccccaggcgtgacgtggtttgccggctccgccggccccgccttcgttcagagcacggggtgactccgaacatcagcgtcaatcctccaatcactaatgtgaagcaaaacacaaaaaccgccccaatccctcaggaggtccatggcatccgaaaccagcatctgcacctaaacccatacccacccgtgtgcgcccacagggggatgtgtccgaatgggcagcttaaaatgtggtcacctgtgggggaaactcttcaggcacctgaagtgagaacccagctgtccgtcctcaggccggcctttcttccggcgacacccgtccatggctggctgggtccccttcgcagtgtttgtctgtcttgacatctaaaccccggcgtgtgcagtgcccatcttccaggactaccttattttccagaattaaacctgttttataattcaagttaatgcaaatgactgtcagttgccaaatatcttgatcctatgagtgtagttgatgactgtttgttagtcagtagagtaaaatgctgtgtccacggggtgtcacagcctcaccataccctgttgaggtgtgaaatgccccgtcagaaattaaatacaaacttaaatgtgcctattggtgtctaaacttcatacaatgtaaggtcagattccttttaggaatactgggtgctgtcaccaggtttgatagttagacttaaaaacttgaaattcactttttggggggagggatatactgaaatagagagttgagacttgccagttgggggaaaatagcatttaaaatggaaagctgtgtttggaaaattgtgtatgagtatttttgtattaaaaacattttaaaggcttttttcttaacttaaaccgaaccacgctgcagcccgcgcttactcccccccgtgccggtgtctctcctactccgcattaccaccctcctccttccttttacctcggtatcccccgctcctccgccgccccattgcttactctagggttcgggccgccccccggcccttctaaaaaagcttttctctaaaacaccttcttgttttgggggcccggggcgcccctcaccctgaggtccacccgaaccctgtgcccccactatcctctgtttcccctccatgaagatactcctcgcgcgcacatcagaacaaagcccgggctgtggtatttctctccacaccaaatacaacagacactgggccgccgcgggaggcgagaaactcacaacgcgcgctttcttcgcaccacacacttcctcacagaaatgggtggaggctcctcttcgaggagggtggttatctgtctgcggcgtgtgtctttctatcttacaccacgcggaggcattctctccacagcgcccggcgtcgcgcttctcacgtttatcatctcttatattgtatatgacgcgctcccctccgcgcgcgtcgtcttgtccancatatgtctcacccgcgagcacccgngatgttgctgtgtctcggccagccttcctacgtatatataagacccacatttgttccgcgcgccacacatctggtgggagacacgcgtgctacactctacacacnaacacgctgtcgttatctgccactatacacacacctcctttaaataatattctcgcgctcgcgccgcgcgctccatctcgtgtggcaaccatccccgtgtatangcgcggcgttgcttgtctgtccgcgctatactcatcaatatccacatttgtcgcgtgcgcccgcgggcgtgtcgccantgaatcacacgcgagcgttgtgtgggtgtccacgtcgaccgtagagcgcgctcgtgttacatcacttcttgttgttgcgcggctgtcttcacccgacgcgtctcgtcagatatctctactgaaatgtggtgcgtgtcgcggggncgagnagacactcttctttcgactnactctacctgtgactatatatgtgtgnnctcgttccgcctnactacgcatttagcacactatccctcgttagtctctcgtctccccataatacgagtaccacgcgctcgtctgtcatatcagataggatacatagtctggggcctctcgtatgattcatttcgctcgcccgccacgagtaacaatcttgcgttcccaccctccttcgtccctctgtcgttggaaggcc

SEQ ID NO: 79118 - DNA, 1255 bp, Homo Sapiens
cagcccagtcacctgaggagcctgtaggggcccctgctgtgcagtccatccttgtggcaggcgaggaggacatccgctgggtgtgtgaggacatggggctgaaggaccctgatgtagtcgcaactacatggagaggatccggggcagctcctgaccctccacagccacctggtcagccaccagctggggcaacgagggtggaggtcccactgagcctctcgcctgcccccgccactcgtctggtgcttgttgatccaagtcccctgcctggtcccccacaaggactcccatccaggccccctctgccctgccccttgtcatggaccatggtcgtgaggaagggctcatgccccttatttatgggaaccatttcattctaacagaataaaccgagaaggaaaccagagctgggactgctgccgtctgtccggtagagtgaagcaagggggctggaatagggcctgttcagcccctgtccctgctgaaacggctgtgggaggctgggccctgggacgccctctcatagcgtccagcgatccagacaaataggagagccgtgacggcctgaatgccagccagcaggaagaagtagaggtccatccggcaattgttgatgttcccaaagtccttggggcagtgcagccagcccccgggcaaggacagcagtgccactaggctggagcccaacagtgagcccacccccgacaggcagaagaagatgcccatgatggcgccctgcatggagcgcggggcctctgagtaggcaaactccaggcctgggatgctggcaaagatctcactgatcccaatgagcaggtactgagggatctgccaccagatggacagtggtgccgcgttgtacaggacctccccaatctgctgggacacggtctcgttgtggtggatgtagtgtaagcgctccatctccaggactcctgccacaatgacggaggtaaaaccaaagaacatccccagcgccatcttctgcagagcagagggaagcagcttgcaccgcagcagtaaagggtcgatcaagcggtccttcagagggaccagaatcagcaccaccacaacattggccaggaggagccaggcttccgggatcgtgtagctgctgcctgggctctcagggccacagagatgttggccgggttggctgggaaaatgtttgggatgtggaggtgaagaccctgcaggacataggtggactgcatctggaagtagaccatccagtagggcaccagggtcaccatga

SEQ ID NO: 79119 - DNA, 772 bp, Homo Sapiens
tcaacctgggtgctgtgctgtcgctgctggtggtggcgtttattcagcagaacatcagcttcctgctgggctacagcatccctgtgggctgtgtgggcctggcatttttcatcttcctctttgccacccccgtcttcatcaccaagcccccgatgggcagccaagtgtcctctatgcttaagctcgctctccaaaactgctgcccccagctgtggcaacgacactcggccagagaccgtcaatgtgcccgcgtgctggccgacgagaggtctccccagccaggggcttccccgcaagaggacatcgccaacttccaggtgctggtgaagatcttgcccgtcatggtgaccctggtgccctactggatggtctacttccagatgcagtccacctatgtcctgcagggtcttcacctccacatcccaaacattttcccagccaacccggccaacatctctgtggccctgagagcccagggcagcagctacacggagtcctggagatggagcgcttacactacatccaccacaacgagaccgtgtcccagcagattggggaggtcctgtacaacgcggcaccactgtccatctggtggcagatccctcagtacctgctcattgggatcagtgagatctttgccagcatcccaggcctggagtttgcctactcagaggccccgcgctccatgcagggcgccatcatgggcatcttcttctgcctgtccggggtgggctcactgttgggctccagcatagtggcactgctgtccttg

SEQ ID NO: 79120 - DNA, 1118 bp, Homo Sapiens
  misc_feature (45)..(79): n is a, c, g, or t
aaaacggacgagcgcagcgaggtcattgagcgaggaagcggccgnnnnnnnnnnnnnnnnnnnnnnnnnnnnnnnnnnncagtcgacggtaccggacatatgcccgggaattcggccattacggccggggcatggtagaaactgaagatttaacagagaactgtgttttacccgagtgccaaaaatgctgtgagcctccttgcacaaaatttataccactttcgcatttttatctatcagtccagatagttgtctcccctccttctcccaggacctctccaccattaaaatgcacaaaccacatggccgatttcaccatttacatttattttcaaaagttactacaaccaaattaattctattagaagaaatgtagacaaattctataaagactatagattgtgacctaagaaagaaatgaggcaaagaaccaaacattgaattaaatgctacatgggtgactaagatctgtttcaagtcagtgataatatagccacttctgggtacttcagtatcagagatcagttctcgtggtttagacagttcctatctatagctgactatccttgtccttgaatatggtgtaactgactattggctctacagttttattgggccacttaagaaatatttccttgaataattattttgagaaaaagtctaaaagtaataaaaataattttaaacacactgtagtaagaaatgactgttggaaaattatgctttcactttctaccatattctcagctatacaaaaccatttattttgaagatttttagactactgttaatttgaaatctgttactcttattgtggaatttgtttttttaaaaaagatgtttctaattggatttttaaaagaagaatggaatttggttgctattttacaatagaacctaagctttttgtggttcttagtgtcctatgtaaaacttagtgtcaaagtaatcaactttgagattttcccttctattctgctttatattaaaagcccattagaaaatgggaacctggtgaatatataatgaattgtaaaatattttaatgtgtaactttttcaactgtgaaactgacttgattttttgatgaaaacagctgctgataaagtattttgtgt

SEQ ID NO: 79121 - DNA, 999 bp, Homo Sapiens
ctggtcatgggtacctccttgcaggtgcagccctttgcctccctcatcagcaaggcacccctctccacccctcgcctgctcatcaacaaggagaaagctggccagtcggaccctttcctggggatgattatgggcctcggaggaggcatggactttggactccaagaaggcctacagggacgtggcctggctgggtgaatgcgaccagggctgcctggcccttgctgagctccttggatggaagaaggagctggaggaccttgtccggagggagcacgccagcatagatgcccagtcgggggcgggggtccccaaccccagcacttcagcttcccccaagaagtccccgccacctgccaaggacgaggccaggacaacagagagggagaaaccccagtgacagctgcatctcccaggcgggatgccgagctcctcagggacagctgagccccaaccgggcctggccccctcttaaccagcagttcttgtctggggagctcagaacatcccccaatctcttacagctccctccccaaaactggggtcccagcaaccctggcccccaaccccagcaaatctctaacacctcctagaggccaaggcttaaacaggcatctctaccagccccactgtctctaaccactcctgggctaaggagtaacctccctcatctctaactgcccccacggggccagggctaccccagaacttttaactcttccaggacagggagcttcgggcccccactctgtctcctgcccccgggggcctgtggctaagtaaaccatacctaacctaccccagtgtgggtgtgggcctctgaatataacccacacccagcgtagggggagtctgagccgggagggctcccgagtctctgccttcagctcccaaagtgggtggtgggcccccttcacgtgggacccacttcccatgctggatgggcagaagacattgcttattggagacaaattaaaaacaaaaacaactaacaaaaaa

SEQ ID NO: 79122 - DNA, 1101 bp, Homo Sapiens
  misc_feature (1032)..(1032): n is a, c, g, or t
taggctaggtacgaggctgggtgttgaattcggcacgaggcgaaagcgcgtctgcggccgcaatgtctgctgagagttgtagttctgtgccctatcacggccactcccatttctggtgccgtcacgggacagagcagtcggtgacaggacagagcagtcggtgacgggacacagtggttggtgacgggacagagcggtcggtgacagcctcaagggcttcagcaccgcgcccatggcagagccagaccgactcagattcagactctgagggaggagccgctggtggagaagcagacatggacttcctgcggaacttattctcccagacgctcagcctgggcagccagaaggagcgtctgctggacgagctgaccttggaaggggtggcccggtacatgcagagcgaacgctgtcgcagagtcatctgtttggtgggagctggaatctccacatccgcaggcatccccgactttcgctctccatccaccggcctctatgacaacctagagaagtaccatcttccctacccagaggccatctttgagatcagctatttcaagaaacatccggaacccttcttcgccctcgccaaggaactctatcctgggcagttcaagccaaccatctgtcactacttcatgcgcctgctgaaggacaaggggctactcctgcgctgctacacgcagaacatagataccctggagcgaatagccgggctggaacaggaggacttggtggaggcgcacggcaccttctacacatcacactgcgtcagcgccagctgccggcacgaatacccgctaagctggatgaaagagaagatcttctctgaggtgacgcccaagtgtgaagactgtcagagcctggtgaagcctgatatcgtcttattggtgagagcctcccagcgcgtttcttctcctgtatgcagtcagacttcctgaaggtggacctcctcctggtcatgggtacctccttgcaggtgcaggccctttggcctccctcatcagcaaggcacccctcttcacccctcgnctggtcatcaacaaggagaaagctgggcagtccggacccttttcctggggaatgatatggggcctccgt

SEQ ID NO: 79123 - DNA, 793 bp, Homo Sapiens
ggcacgaggggtgacaggacagagcagtcggtgacgggacacagtggttggtgacgggacagagcggtcggtgacagcctcaagggcttcagcaccgcgcccatggcagagccagacccctctcaccctctggagacccaggcagggaaggtgcaggaggctcaggactcagattcagactctgagggaggagccgctggtggagaagcagacatggacttcctgcggaacttattctcccagacgctcagcctgggcagccagaaggagcgtctgctggacgagctgaccttggaaggggtggcccggtacatgcagagcgaacgctgtcgcagagtcatctgtttggtgggagctggaatctccacatccgcaggcatccccgactttcgctctccatccaccggcctctatgacaacctagagaagtaccatcttccctacccagaggccatctttgagatcagctatttcaagaaacatccggaacccttcttcgccctcgccaaggaactctatcctgggcagttcaagccaaccatctgtcactacttcatgcgcctgctgaaggacaaggggctactcctgcgctgctacacgcagaacatagataccctggagcgaatagccgggctggaacaggaggacttggtggaggcgcacggcaccttctacacatcacactgcgtcagcgccagctgccggcacgaatacccgctaagctggatgaaagagaagatcttctctgaggtgacgccagtgtgagactgtcgagctggtgagctgaatcggt

SEQ ID NO: 79124 - DNA, 661 bp, Homo Sapiens
ggtgtgggggtgggcagtgctcagggcctcctcggagccaaaggacagcatggtcggcacagaggaaggggtacctgggctgggtgcagggccatcccactgcccttgagctgtggctctggcaggaaggaggggcagcccatccctcttctccctcctggggattctggggaatgggatgcaacttaagacttctgcctgagaagcctcctccctgctgcctccagggggcaccaaggcacaagcctgtgcagtaggggcgggatgggggtgtggaagagcaggtccaggctcctagcacaactggcctggggccttggcacctctgtaggccctgcctgtgcctgtccgctggcctggggggcctgggcttatctgggcctgctcactcagggactctcttgacgctgacttgcccccgcagcggtggccagtgctgcctctgctccaagctgcccctgcgctgggaggggtgggggcggtgccattggtctggtgcagcatagccctggccagtggcctcatccccagcaggcctcccgtgcctctgccagcaaggaggggccggccagctctgcttgcacagggggccccatgtggggtcagcgcacgctcatgtcactgagttccagccgcttttagagtaaagtcgtttatcatc

SEQ ID NO: 79125 - DNA, 690 bp, Homo Sapiens
  misc_feature (18)..(18): n is a, c, g, or t
cccaggcccatgccctcntggtgcccctggcactgaggcacagatcgtcaaggcaggtaccccctcaacccttcttccactggagcccctgacaccacaggtgccctggagcccttgtgtgactcagcctctgttagctgggtgggtgtcatcagcccctgcctcccaggccagaacctgagaacgggcccagggtgctgtggagatcaacttcaaaagagctaaccccttcccacactccacccacccacctacatttcctctgtgaaatctacctcagagttgtaccctcagaaggacgggtaagcaggaggccagggggtccccagggctgaggtggggagccttctacggcgaaagcctgccaccccacaatgaatccaccctgctccactgcgcgcctctcccaggtctcagctctgggtggggagcagtggccgctaccgacagcgcatgtcccgctcttatccaactcttccaggccccacctccctgcacccctcccctctatagagcaggggagtgaaggggtatgtcaggcggggaaggggccaaggacacgtcattgtaccctgagcgtccccagggagtggaaatggggaagggggcctggagaggggaggcaggggcccctgtgctctctgaacaagttgaaagtccaaataaaacttacctgttccatctgtgctc

SEQ ID NO: 79126 - DNA, 1140 bp, Homo Sapiens
  misc_feature (987)..(987): n is a, c, g, or t
  misc_feature (1077)..(1077): n is a, c, g, or t
ttttttttcactttgtatgaaactaagctctttataatgaatgcctttaatcacaaccaccccacgaggtgcgcatattcattcccattttacatattaagaaaccaagactgagggtgtatgcagcatgctcaggttcacctggctaatgcagagagctgggtttgcagccacacttttacttcaaggggctgctgacaccctccaagagacttggtggttcaaaactatttctcatcccctctctgcgagccaaaagcctatttcctgaggtgttcagagagattcagagcagattgacaccttttccatcactgacacaaagaggagggtataaaaaacagtatgtagccctggggatctaaaatattttcccagccaaatcggacaggcattgaaagtcacacaggctggggtggttttacaaaatgccacttgtttaaatttcctttcatcactctgtcaggaataacagcaacgtagtggagcctcagagtcctgttgagaggggcgagctgttccggggaaatttatttcaaaagttattctgaagtaaaaacttgcccactgtggagtgaggttggacagtgatcctatatcctaggtaatgaggctattaaagcagctggtctcttcagcttatgtaagtggggcccagtctctgggcgacttgggtaaaccggtatagaatttaacagggtgactaggagtgacagcagcagtaagacccccatttctaatgtggcgttagggctggaggttagatgtggacaggggtgtctgagtcctacataatggggctggatgactagtctgagatctgggttcacgcagcaaccacactcttttttactcacactgttcatctgggcttgggtggaaagaggctgatgaggatttgggggaaatcaaggggctctccctggcattgcatgaagtcgcagaaccagtggcaaaagtccaactttggagacaattacttctcgnggtgggagccccagccctgcctcttgcctgcgatgtcgccaatctgactgcgcttgctggagacgggaaatgtggcacggcactgcatcncccaacacgtgtagaaacttagagaatgccagttattaaaataccccttatgataacaccaat

SEQ ID NO: 79127 - DNA, 1750 bp, Homo Sapiens
  misc_feature (857)..(857): n is a, c, g, or t
  misc_feature (1042)..(1042): n is a, c, g, or t
  misc_feature (1074)..(1088): n is a, c, g, or t
ggctgctgcgaggaagacccggtcagctgtcccttcccccatcggtcctcttaggggaagtggagatgtgggcctcggagctgcgtggcccgggctgtgcggattccctaaacgccgcacttgcgcacagccccttacgtaaccgtcagtgccggggattccctggagggggtcattctattcaaccattatacacaccccgggctcctgccgccgcgccgccgccgcctcacaaaatggcggcgcccatagaggagaccgcggccgcctccccggccccattttgtgggaggcgagagatctgtcaacatggaaaacctctgctgaggatgcatccgagtttggaaaccccacttaagggatggagcctgggggatcacattaaacggaaaatgccaacgacttctaccacctctacgcgtttttagtttttcattttctcgaaggaagcgccagaagcctgtggagtaattgtaactagagggagaacggaaagctgaggtgactgctccggggacttggcgcggcgccttggtggctttggttgctcttccacgctcccggcagctgaccagaatctcttggagggtctcctgggccacctcggccgcgccagtcgtgcagtgagacttctgtagttttaaaatgccacagtccacggcccggtcggcaccgctcgcctgaatcgtgggctttgggaaccttggaggctgctgctccaggaactcgcggtcggccgggagccggggagcttcgttgctgggagcgggcggtattcgcggactccggcgcccctggcgggtcgcggccgggatccgagccggggatgacgatgctgatggagctgatggggcaangagtgggaacggaggcacgtacactgaaatttaagtcatccaaagttgggacttaagatagcaggttaatattgtctcagggcgagacttagaacgtcttttctggtatcccagtctgcagtgggcaaatctattgtctttatttctcatttaagggcagaatggaggatgacatattttacttntcaagaggcgttgccacttgtaagtcactgtnnnnnnnnnnnnnnnacatacacaaacatacgatagtgtgttttcagagcaagtatcaaaggctaaagacttggagtgatactagtgtttaaaagcctttttaaaaaaattaagatgtgatgagaaactggagaattgacttttaaaaatttcttttctgtagaagaggctatcttcaaaatggagtcctaaagtatatctgatggatagaatttaaattcttaacactgtatataccctgtggtcaaaagcatcaacgtaaaacttgatgtttatcagattacttatgtttcaattttcctgtggttagaaaaattaagacagaagtaagctattaacggtatttgcttgtaagagtaacgttaaaggtttaaggaaaggtttgttgaaatcgatatgcatcacacgaatcatttattttcaatgttgttttccagttgcagcaatcatttgtgtttacatgactttgaaaaagggtttagtttatgttgattttgaccctcttatttaatctctagtgcagaagtgcagctttctgcaggctgcgcctcaatcgctaagttccactctccatcctctgccgcgctactcctggcatgtggatcaccaagatacaatttctggtcctgtctgttcttattgatgtcctttacagttaataaatttgattgccacta

SEQ ID NO: 79128 - DNA, 891 bp, Homo Sapiens
  misc_feature (14)..(14): n is a, c, g, or t
  misc_feature (52)..(52): n is a, c, g, or t
  misc_feature (338)..(352): n is a, c, g, or t
  misc_feature (679)..(693): n is a, c, g, or t
gcacgaggtgattntggaattatggaagtctaaatataatgttttctcactntaaaatggaaaaaactttcgtgctgtttctaaaacacaacataaaaagggaaaaccatttggcactgtgtacacacaggaacatcccagttttagtttttaatcatgtttttcaaggaaacaattactttctccaaatgcatggtttttaaagagtacttcgtatttccaggacatcttcttttgacctagtgtgtttcttcttaaaaatcaatgacagttttgtctctaggtttctgactttttgaagcatgatccccaaagaggtcataatcactcatattttnnnnnnnnnnnnnnntttcatttttgttaaagtatcccatcaatgaaaataaagttgtacagaggtttgagataaagataaggtattagattttcttcacaatcagcctactagcttgactggctctcttttcccaaaatgacatttcaaactcttttgaaggacaggaagttataaaatgtaaacaattaagaattgtcatactcggttattctacctagtgtcctccagttggtaagcaagaccaaggagtgtgtcgctaagagagagagacactggtatccttcctgttggctactgctcaagttaagaaaatatcttaaaatacgcctacctttaccnnnnnnnnnnnnnnngtatattttaaatgataccaataaagaacacatgcaggcttttcttttcctcctaaaaattaaagccagctttcacagttggtaaaataatggtaggacagcattaagacattttacggggggaaaaatgtttgtgacagcgagagtggaaatcagcgttaggatccagccaagaacaacagagggagtaagtgaaga

SEQ ID NO: 79129 - DNA, 791 bp, Homo Sapiens
  misc_feature (493)..(506): n is a, c, g, or t
ggcctgggtggcgaattcggcacgaggaacaagtccaacgagggtgttcaagcagttaatggttgtgctaactcttgtttctactgaagcgggttttgcaaagctgacatcccttaaagataacttgggctttcggaagcggcaaggaaatggcacccgtagttgccaggacaggtggtgtcctcggccaggactaagagccagctcatctttgtaacattcataatacgggaaactgaggaccaggtggctcggaaaagagatgagttccagcttttacctaacacagggttctctcgtcgtcccccaacccctccagctcggcttctttgtgtccagggttgtagatttttggatagaggtgtttctgattctagtgagtctgagaactggaaaagaccaaggaggggttgatgatttacaaggtccatagaaaaactttttgtgtggtcggaagttggccaagcagaggcccacagcctgatgctactgnnnnnnnnnnnnnnaaagatctgaattccctaaagatcaagagggttcagctggccttgggagatgtttgctggagaatgacttcagttttctcctaaggcaatcagattgcaaccattagcattgtatcttatctgcaaatcagtttactccgaggttccccaaggatagttttattaggaccacaggactttactaaccactgaggtaacacgctgcttgtgcagcaattattttgaggtggaggtatttatgggacaagtttataattccatttattaaagggactaacctaaaaa

SEQ ID NO: 79130 - DNA, 722 bp, Homo Sapiens
  misc_feature (30)..(30): n is a, c, g, or t
  misc_feature (92)..(92): n is a, c, g, or t
  misc_feature (176)..(176): n is a, c, g, or t
tgcccactgaatgaggactccctggagagngacacgcgagaggcaggccaggctgcaccaccccaagagccacgcccctcgctggcgccccnagagccgtggtgcttgccaagggcttgtgcggagctggtgctgccttgaaaccccagaccgagaaagttgatgctcggcccacngccgttagctcgtgtgcgtgtagtctgtgcgtgagactccttcgattgtagctctgtgctgtcggattggaacagtagttcccgccaagtcctcccaccaccgcggcctcggaggcctgggccgtggccagataggagtttgcatcatccacgtggctccgttgcctctgcattgcgccctgtcctgtcatgtgtcctcaccggggtatcggccgtcactcagctctcctgtgcccctgcgtctcaccctaggcgggctgggcggggcaggcctcctttgttctccacaatctactgtctccgagtgtacacgttgcgctgtttgtgtttgatccccctgacttgtagccagcttgtgtaagatcccttgcagaacgagaaagttaaaaacaagcccacccagtactcacaccatcaagtctgttatagagtgtacgactgtattaacacggaggcctgcctggctacttttttaacatattgttaagtaatattaaaatcatgtctttctttttgaaagatggaatacattagtacagcaggaaa

SEQ ID NO: 79131 - DNA, 1254 bp, Homo Sapiens
tttatggcagtgcctacaatatacaccaagctgatggagtactacgacaggcattttacccagccgcacgcccaggatttcttgcgtgcagtttatgaagaaaaaaattaggctgatggtctcaggctcagctgccctgcccctcccagtactggagaagtggaagaacatcacgggccacaccctgctggagcggtatggcatgaccgagatcggcatggctctgtccgggcccctgaccactgccatgcgcctgccaggttccgtggggaccccactgcctggagtacaggtgcgcattgtctcagaaaacccacagagggaagcctgctcctacaccatccacgcagagggagacgagagggggaccaaggtgaccccagggtttgaagaaaaggagggggagctgctggtgaggggaccctccgtgtttcgagaatactggaataaaccagaagaaactaagagtgcattcaccctagatggctggtttaagacaggggacaccgtggtgtttaaggatggccagtactggatccgaggccggacctcagtggacatcatcaagactggaggctacaaaggtcagcgccctggaggtggagtggcacctgctggcccacccccagcatcacagatgtggctgtgattggagttccggatatgacatggggccagcgggtcactgctgtggtgaccctccgagaaggacactcactgtccccacagggagctcaaagagtgggccagaaatgtcctggccccgtacgcggtgccctcggagctggtgctggtggaggagatcccgcggaaccagatgggcaagattgacaagaaggcgctcatcaggcacttccacccctcatgacccggcagactgggactgcgggtctggtggggagcagcagacgtccccttcacaccgagaaccacgggggcccgtccaagacctggcctcccttaaacctgaaccccccaaatcaggtcacgtagaatcaagaactgtttgggatgaaatcaccatgtggggtccccagcctcgggccagttgttgcagctcaaggagaccgtccctggtgtcacctctgcctggtcaccgccgacctcatctgtgcagcgcggtgcagccagcccctggccccacgtgctgaggcacctcccgccccacagtgccctgcagttgccaggctctccagggcaggtcccagaggtttcccacaaaaaacaaataaagactccaaaagaggaaacaaa

SEQ ID NO: 79132 - DNA, 745 bp, Homo Sapiens
  misc_feature (15)..(15): n is a, c, g, or t
aatgctgcgtgagtntacccacattcagactccagccagacccagctgcggctgctgcagggcctctgccggctggccaccagggagaaggctaacatggaggctgcgctggacagcttcatccagatagcgcaggctgagaaggacagcgtccctgccctgctggccttggcacaagcctacgtgttcctgaagcagatccccaaggcgcgtatgcagttgaagcgcctggccaagaccccctgggtgctgagtgaggctgaggacctggagaagagctggctcctgctggctgacatttactgccagggcagcaagttcgacctcgccttagaactgctgcggcgctgtgtgcaatacaacaagtcctgctacaaggcctatgagtacatgggcttcatcatggagaaggagcagtcctacaaggatgcagtcaccaactacaaactggcctggaagtacagtcatcacgccaaccctgccattggcttcaaacttgctttcaactacctgaaggacaagaaatttgtggaggccatcgaaatctgcaacgatgtcctcagggagcaccccgactaccccaagatcagggaggaaattttggaaaaggcccgaaagtccctgaggccctagctggggtcaaggggcctggaccagtagaagccatcaacctactgaagttgtgtggagggatggaaagtgggtcagtggagaagggattcagaaaatgacacattcttcccca

SEQ ID NO: 79133 - DNA, 1153 bp, Homo Sapiens
cagtcgacggtaccggacatatgcccgggaattcggccattacggccggggcctcttgcgctgtcctgttaatggcgggcagtagccgctgaggggattgcagataaccgcttcccgcacggggaaagtctaccctgcctgccactttctgctcgccgtcagcgccggagctcgccagcatgtctgtggtaccgcccaatcgctcgcagaccggctggccccggggggtcactcagttcggcaacaagtacatccagcagacgaagcccctcaccctggagcgcaccatcaacctgtaccctcttaccaattatacttttggtacaaaagagcccctctacgagaaggacagctctgttgcagccagatttcagcgcatgagggaagaatttgataaaattggaatgaggaggactgtagaaggggttctgattgtacatgagcaccggctaccccatgtgttactgctgcagctgggaacaactttcttcaaactacctggtggtgaacttaacccaggagaagatgaagttgaaggactaaaacgcttaatgacagagatactgggtcgtcaggatggagttttgcaagactgggtcattgacgattgcattggtaactggtggagaccaaattttgaacctcctcagtatccatatattcctgcacatattacaaagcctaaggaacataagaagttgtttctggttcagcttcaagaaaaagccttgtttgcagtccctaaaaattacaagctggtagctgcaccattgtttgaattgtatgacaatgcaccaggatatggacccatcatttctagtctccctcagctgttgagcaggttcaattttatttacaactgaattcctgcgcagtggagaagtaaaagaagccgcttgtctctgtgagcacagctatatacagtgtagaataaatgtggtagaaaagtttttttggttttatctcttttgcgatccctaaattgccacctttcaattgtttgaatagtaaaattaatatgaagaactagatagtggtgtaaacaaatgtgataatgtttatttactttcggttctgctcatacttttttgtacaacattaaagaaaatggactttttttattttaatttctcattaaacttctaaaattctt

SEQ ID NO: 79134 - DNA, 678 bp, Homo Sapiens
atgcataaaatttttaattttagcaggaaccaaaaagagcaaaaaaggtaagaaaagaacaacaataataaatctttattgagattttttaacaaaataatttttgaaaacaaaagctcccacatgtaaacaagaacgtaaataagttagatggcattattatgtacattcaagaatcaaaacatgttctggtaaacattccataatccggtaaaatgttttcacccatcactgttaagagaaactgtgtatttaatactatcaataacaaaacctaatctttgaacattataaaatggtttacggaatataaactatacagtttagtttttcattcctcctagcaatccgtgtcacatgtatactagtcctaagatgtattttgtcagtattagcccaaaatgtccaccatcccaaattaaccaggttacacatatctcctccagtttttatggtaggatgtgttagaacccatatattacaacatcatttttcaaaactaacctaatcctaaattctattctaactagtctggcaatccttcattttatctccctgtctacacattcattagataccaaggcaatttcaccttaaaaaatactgctaatacacatttagatagtaatttctgggaaaactgtagtttatttatcaaaaaatgtgaatttttatttt

SEQ ID NO: 79135 - DNA, 771 bp, Homo Sapiens
  misc_feature (140)..(140): n is a, c, g, or t
aactcctttgaatgcagccagtctgaggtatgtttctgagcttggacaaaaagccagagagcaagagaaatgaggaagcttgcaacatgcccagttcttcttgtgaagaaagttggttcccaaagtatatagttccatcncaggacttaaggccctataaggtaaatatagatccttcttcagaagctccagggcattcttgcaggagcaggccagtggagagcagctgttcctccaaattttcctgggatgaatatgaacagtacaaaaaagaataaattctaccagaagataaagaaaaaaagcaagtattgcataggcacctgagcataggtatgaccttgggaagacattggctccataagcaatgccaagagaatgatcaatagtgagtttgggtgatgcagataaacaatctggataattccatttcttttttcccaaaccctcaaacagagtgccttaaaaaattgttttatcaggataattgtctcatgaccaaatccacgctcaattagagccattcaaaattccttaagatcatgggttctgacttcagccaaacaaaacaatcaaaacctaccaaaaagggactggattgtaatgtcctctccatcatcctcagtgtgagtcctcagagcctccatctgccaagaacattcagttggattccatcgtttggtttagcttgcttgcacgggttgtaggaaatgtctaatttgtaaatgttaatagatacctttggaaagaatcaccttgttattctgattg

SEQ ID NO: 79136 - DNA, 715 bp, Homo Sapiens
  misc_feature (73)..(73): n is a, c, g, or t
cattttcaaagtttatcagctgtagtccaagctaaatatcttttgtaatctgcaacattttccttactgtttntgggcagtgataaatgctgttctcgaaatagactttattcttacctaggcttcagccaacagttttatagagcagttactgtaatacaatataaaggaaatatgctgttgaaattttaaaggtatgcccagttcctaacttttaaacgaattaccgttcttcctcttggctgatcttggcagagatgacaaaaaaaaccccaaaacaacccatgcatgtataatgtgtgtatacacatatacataagtatacatatactcccacattataacttagaatatttagttttttacctgttactaggtttgagttacatggttgagttgccaaattatttacatgctttgtttaaattcttcatcacctagcaactgtttgctgatcatggatttacttagttactttaatttataaaattaccatttggaaaagaactcaattgggaaatgtgatgacgtattgtacatgttactttttcctttgctataatcatctagggagactgataagaattttggaaatgggagcctggaaactcatctttgtttttttaatgctatgcctcttacgaggaatacgaattggtatgtcctaaaataagaacttaataaaggagggaaatcccttttgtctgctataaaa

SEQ ID NO: 79137 - DNA, 851 bp, Homo Sapiens
  misc_feature (54)..(54): n is a, c, g, or t
tgaccgccatgccttgactgcgggccagaggcgagcccaggtcagcaacgatgnccgtggagaggctgacgttccctttgctgatgcccccaatcagcctggaggccaggaaggccgcaaagctccgagaggtggcccagactgcatatgaggtggccacacccatcaggcacagcagcatcaccgggcgcctccccaagcagtcagaggtggccccagtgagtggcgcacacagaaactgcaggacagagaatgccgagccaatgagacctccgaacaggacactgttgtacctcttctccactggcatcccgatggcggtggcaaaccagtccaccccgccctgccaggagccatagagggggtcgtgggcacggccgtggctctccaacagcccgggcagcaggggcagcagcagcgtgaaggccaggaggtccagcaggaggccgagaaagacaacggtgaccacgcggcgctccggcggctgctggtggatgggtgggcgcggggtgcagcctccaccccctccccatcccatggtgggctgctctgacctggcctgggtggggtgcggcgggtcgggttagcggggaagccgagtcctccggggcctggcatacccccacacccgacagccggcgagcaccctaaaggggctgatggcaggggctctggcctacggacgcaggggccgttctggcctgcgcgatgcccccgccccgaacccaggcagcaggaaacgcaggcttcggggattgcacaaaaaatagccgcaaaggcaacggtcctgagagaccagggtgagcacatcgcggacctggccccaccccaccccacgccgcgcctcccac

SEQ ID NO: 79138 - DNA, 1019 bp, Homo Sapiens
  misc_feature (109)..(109): n is a, c, g, or t
  misc_feature (115)..(115): n is a, c, g, or t
  misc_feature (119)..(119): n is a, c, g, or t
  misc_feature (133)..(133): n is a, c, g, or t
  misc_feature (141)..(141): n is a, c, g, or t
  misc_feature (203)..(203): n is a, c, g, or t
  misc_feature (209)..(209): n is a, c, g, or t
  misc_feature (211)..(211): n is a, c, g, or t
  misc_feature (215)..(215): n is a, c, g, or t
  misc_feature (221)..(221): n is a, c, g, or t
  misc_feature (224)..(224): n is a, c, g, or t
  misc_feature (262)..(262): n is a, c, g, or t
  misc_feature (276)..(276): n is a, c, g, or t
  misc_feature (332)..(332): n is a, c, g, or t
  misc_feature (397)..(397): n is a, c, g, or t
catccagtgcttgcccgcgatcaccctgcgggagttctccgtgagccgtagggcttcctccaagcggtgcagcagtcccctgagtctgcaggcacggctgtctgagctncgtgcncacntgcagccctcttgntgctgtgncccgccttcctcctcatcggctggggacgttctctgcccgtgctggcctggggctgttgctntactcntntgtngagtgnccntgccttgcagggggatccgatgggcagcaggggctggntgatgcaccctccnctgggctgacgggcacctcctcgatgtctcccaccagccgccgccgttgtgtgccntgcctgtcctccgtggtcgctggctatggtgagcccccttccctcggccgaagccacctgagcgngagaagggcagtggtgcctgactgtgcctcttcccacaggctcaccagggcagaagggcacggtcatgggtacactgcgcagcctaggtgctctggccaggcccgcggggcccctggtggccgcttcaggtgagggcgcgggatggtgctggggcaggctgggggccaagcacctgccctcgcctcccaagtgccagccccctcggggactgggtgacgccaccgtctctccgcagtgtactggctggccggggcccaggcctgcttcaccacgtggtccgggctctttttgctccccttcttcctcctgcagaagctgagttacccggcacagacgctcaaggctgagtagctgagccactgtgcccaggctgtgggcaccaggcagagtgggagcctaggtcaggcccctgcccactgcctgacccccaccccccgccagtccagggagaccctgtgggtgggggccggcccctaagcaggaagctcaggcagctcctccagacttacttactccttcagtgactccgagctgcagcactccaaggctgtcagggcttctgtttgttttttaaactatgcaccaggtttctgatgatgaaataaagcacctgtttgtttt

SEQ ID NO: 79139 - DNA, 1739 bp, Homo Sapiens
cgcccctggcggcgtgcctggtgccctgttccgcgtctgtgcgaccgtccgtcccgagcgcgcagccgcggcaggccaggtcagagcagcccaccatgggatggggagggggtggaggctgcaccccgcgcccacccatccaccagcagccgccggagcgccgcgtggtcaccgttgtctttctcggcctcctgctggacctcctggccttcacgctgctgctgcccctgctgcccgggctgttggagagccacggccgtgcccacgaccccctctatggctcctggcagggcggggtggactggtttgccaccgccatcgggatgccagtggagaagaggtacaacagtgtcctgttcggaggtctcattggctcggcattctctgtcctgcagtttctgtgtgcgccactcactggggccacctctgactgcttggggaggcgcccggtgatgctgctgtgcctgatgggtgtggccacctcatatgcagtctgggccacctctcggagctttgcggccttcctggcctccaggctgattgggggcatcagcaaagggaacgtcagcctctccacggccatcgttgctgacctgggctcgcctctggcccgcagtcaaggcatggcggtcattggggtggccttctcactgggcttcaccctgggccctatgctcggagcctccctgcccctggaaatggcaccctggtttgccctgctcttcgcagcctccgacctgctgttcatcttctgcttcctgccagagacgctgcccctggagaaaacgggcgccctctatcgccctggggttccgtgatgcggctgatctgctcagccccctggccctgctgcgcttctcggctgtcgctcgtggccaggacccaccctctggagacaggctcagcagcctgcgccgcctgggcctagtctacttcctctacctcttcctgttctcgggcctggagtacacgctgagcttcctcacacaccagcgcttccagttcagtagcctacagcaggggaagatgtttttcctcatcggcctcaccatggccaccatccagggtgcctatgcccggcggatccaccctggcggggaagttgctgccgtgaagcgggccctcctgctgctggtgcccgccttcctcctcatcggctggggacgttctctgcccgtgctgggcctggggctgctgctctactcctttgccgccgccgttgtggtgccctgcctgtcctccgtggtcgctggctatggctcaccagggcagaagggcacggtcatgggtacactgcgcagcctaggtgctctggccagggccgcggggcccctggtggccgcttcagtgtactggctggccggggcccaggcctgcttcaccacgtggtccgggctctttttgctccccttcttcctcctgcagaagctgagttacccggcacagacgctcaaggctgagtagctgagccactgtgcccaggctgtgggcaccaggcagagtgggagcctaggtcaggcccctgcccactgcctgacccccaccccccgccagtccagggagaccctgtgggtggggccggcccctaagcaggaagctcaggcagctcctccagacttacttactccttcagtgactccgagctgcagcactccaaggctgtcagggcttctgtttgttttttaaactatgcaccaggtttctgatgatgaaataaagcacctgtttgttttaaaaaa

SEQ ID NO: 79140 - DNA, 1043 bp, Homo Sapiens
ccaccatgggatggggagggggtggaggctgcaccccgcgcccacccatccaccagcagccgccggagcgccgcgtggtcaccgttgtctttctcgtgcctcctgctggacctcctggccttcacgctgctgctgcccctgctgcccggtgctgttgtgagatgccacggcctgtgcccacgaccccctctatggctcctggcagggctggggtggacttggtttgccaccgccatctgggatgccagtggagaagaggtacaacagtgtcctgttcggatggtctcattggctcggcattctctgtcctgcagtttctgtgtgcgccactcactgtgggccacctctgactgcttggggaggcgcccggtgatgctgctgtgcctgcgaccgcccctgcctctttggccccttgccccttgggcaagattgggttgtggccaacctcaattattgcaggtctggggccaccttcttcggagcatttgctggccttccgtggcctccaggctgattgggggcatcagcaaagggacacgtcagcctctccacggccatcgttgctgacctgggctcgcctctggcccgcagtcaaggcatggcggtcattggggtggccttctcactgggctttcaccctgggccctatgctcggagcctccctgcccctgtgaaatggcaccctggtaagccctgctcttcgcagcctccgacctgctgttcatcttctgcttcctgccagagacgctgcccctggagaaacgggcgccctctatcggccctggggttccgtgattccggctgagtctggttcaaggcccctgtgcctgctggcgctactcgagctggacgctccttgggcaaggacacacccatctggaagacagggctcagacaacttactcacgcactgggcctaaatctaattacctctaaccacttacctgtaatcgaggacatgaactaaaacctgaagatacagtcaaaaaccagcgttacaaatcagataggactccttgtactgatccagacatccatacaaa

SEQ ID NO: 79141 - DNA, 882 bp, Homo Sapiens
gggagagagtatgaagtcgacggcgcgccgaattcggcacgaggctcatgtgaagaatgtctgctaatccacccaaaatgtgcctggtgctccaaagaggacttcggaagcccacggtccatcacctctcggtgtgatctgagggcaaaccttgtcaaaaatggctgtggaggtgagatagagagcccagccagcagcttccatgtcctgaggagcctgcccctcagcagcaagggttcgggctctgcaggctgggacgtcattcagatgacaccacaggagattgccgtgaacctccggcccggtgacaagaccaccttccagctacaggttcgccaggtggaggactatcctgtggacctgtactacctgatggacctctccctgtccatgaaggatgacttggacaatatccggagcctgggcaccaaactcgcggaggagatgaggaagctcaccagcaacttccggttgggatttgggtcttttgttgataaggacatctctcctttctcctacacggcaccgaggtaccagaccaatccgtgcattggttacaagttgtttccaaattgcgtcccctcctttgggttccgccatctgctgcctctcacagacagagtggacagcttcaatgaggaagttcggaaacagagggtgtcccggaaccgagatgcccctgaggggggctttgatgcagtacccaggcagccgtctgcaggagaagatggctggcgaaagatgcactgcattgctgtgtcacacagagatgtgccacatcgcattgatgaaaatggagctgtgcacacacatgcatgcactgacgagcacgatcctgctcacaatgatatctctgctgctgaagaatgcaacatacccctg

SEQ ID NO: 79142 - DNA, 1103 bp, Homo Sapiens
  misc_feature (1064)..(1064): n is a, c, g, or t
  misc_feature (1069)..(1069): n is a, c, g, or t
agagtatgaagtcgacggcgcgccgaattcggcacgagggatagagagcccagccagcagcttccatgtcctgaggagcctgcccctcagcagcaagggttcgggctctgcaggctgggacgtcattcagatgacaccacaggagattgccgtgaacctccggcccggtgacaagaccaccttccagctacaggttcgccaggtggaggactatcctgtggacctgtactacctgatggacctctccctgtccatgaaggatgacttggacaatatccggagcctgggcaccaaactcgcggaggagatgaggaagctcaccagcaacttccggttgggatttgggtcttttgttgataaggacatctctcctttctcctacacggcaccgaggtaccagaccaatccgtgcattggttacaagttgtttccaaattgcgtcccctcctttgggttccgccatctgctgcctctcacagacagagtggacagcttcaatgaggaagttcggaaacagagggtgtcccggaaccgagatgcccctgaggggggctttgatgcagtactccaggcagccgtctgcaaggagaagattggctggcgaaaggatgcactgcatttgctggtgttcacaacagatgatgtgccccacatcgcattggatggaaaattgggaggcctggtgcagccacacgatggccagtgccacctgaacgaggccaacgagtacactgcatccaaccagatggactatccatcccttgccttgcttggagagaaattggcagagaacaacatcaacctcatctttgcagtgacaaaaaaccattatatgctgtacaagaattttacagccctgatacctggaacaacggtggagattttagatggagactccaaaaatattattcaactgattattaatgcataaatagtatccggtctaagtggagtgtcagtcgggatcacctgaggatctaatctcttcttactgctactgccagatgggtatctatctgtcagagaatgtgagtcgaaatgggaccgattttgattcttgaggntactntcacaaacgacatttgctcgcgggatcgacctag

SEQ ID NO: 79143 - DNA, 846 bp, Homo Sapiens
  misc_feature (658)..(658): n is a, c, g, or t
tgggagagagtatgaagtcgacggcgcgccgaattcggcacgaggagatagagagcccagccagcagcttccatgtcctgaggagcctgcccctcagcagcaagggttcgggctctgcaggctgggacgtcattcagatgacaccacaggagattgccgtgaacctccggcccggtgacaagaccaccttccagctacaggttcgccaggtggaggactatcctgtggacctgtactacctgatggacctctccctgtccatgaaggatgacttggacaatatccggagcctgggcaccaaactcgcggaggagatgaggaagctcaccagcaacttccggttgggatttgggtcttttgttgataaggacatctctcctttctcctacacggcaccgaggtaccagaccaatccgtgcattggttacaagttgtttccaaattgcgtcccctcctttgggttccgccatctgctgcctctcacagacagagtggacagcttcaatgaggaagttcggaaacagagggtgtcccggaaccgagatgcccctgaggggggctttgatgcagtactccaggcagccgtctgcaaggagaagattggctggcgaaaggatgcactgcatttgctggtgttccaacagatgatgtgcccacntcgcattggatggaaattggaggctgtgcagcaccgatgccagtgcacctgacgagcacgagtacctgcatcacagatgatatcatcctgctgctgagagatgcagaacactcactctctgcatgcaaacataagcgaagatttcgctgactgacagggattatgaccaatttccgttagccaatcgg

SEQ ID NO: 79144 - DNA, 346 bp, Homo Sapiens
  misc_feature (137)..(137): n is a, c, g, or t
gcggccgcctactactatacggctgcgagaagacgacagaagggtcggagtctgtaaaaccagcatacagtttggcttttttcacattgatcatttttatatgaaataaaaagatcctgcatttatggtgtagttcntgagtccctgagactttgcgtgcgtgatggctatgccttgcacacaggtgttggtgatggggctgttgagatgcctgttgaaggtacatcgtttgcaaatgtcagtttcctctcctgtccgtgtttgtttagtacttttataatgaaaagaaacaagattgtttgggattggaagtaaagattaaaaccaaaagaatttggtggttgtc

SEQ ID NO: 79145 - DNA, 2705 bp, Homo Sapiens
aaaatcatccacacaacatttgcactaccaaaatccatcaacaacataactgcgactagaagtgccataatcaggcaaaaccaacttccatgactgtgataagcgtcacctaattcccatgtcttcagaggcatcttccaacaaaaataactatagacaggcaactcaatcagccaatttcagaaacaccaaccattttagtacagcccgaggtaccagaccaatccgtgcattggttacaagttgtttccaaattgcgtcccctcctttgggttccgccatctgctgcctctcacagacagagtggacagcttcaatgaggaagttcggaaacagagggtgtcccggaaccgagatgcccctgaggggggctttgatgcagtactccaggcagccgtctgcaaggagaagattggctggcgaaaggatgcactgcatttgctggtgttcacaacagatgatgtgccccacatcgcattggatggaaaattgggaggcctggtgcagccacacgatggccagtgccacctgaacgaggccaacgagtacactgcatccaaccagatggactatccatcccttgccttgcttggagagaaattggcagagaacaacatcaacctcatctttgcagtgacaaaaaaccattatatgctgtacaagaattttacagccctgatacctggaacaacggtggagattttagatggagactccaaaaatattattcaactgattattaatgcatacaatagtatccggtctaaagtggagttgtcagtctgggatcagcctgaggatcttaatctcttctttactgctacctgccaagatggggtatcctatcctggtcagaggaagtgtgagggtctgaagattggggacacggcatcttttgaagtatcattggaggcccgaagctgtcccagcagacacacggagcatgtgtttgccctgcggccggtgggattccgggacagcctggaggtgggggtcacctacaactgcacgtgcggctgcagcgtggggctggaacccaacagcgccaggtgcaacgggagcgggacctatgtctgcggcctgtgtgagtgcagccccggctacctgggcaccaggtgcgagtgccaggatggggagaaccagagcgtgtaccagaacctgtgccgggaggcagagggcaagccactgtgcagcgggcgtggggactgcagctgcaaccagtgctcctgcttcgagagcgagtttggcaagatctatgggcctttctgtgagtgcgacaacttctcctgtgccaggaacaagggagtcctctgctcaggccatggcgagtgtcactgcggggaatgcaagtgccatgcaggttacatcggggacaactgtaactgctcgacagacatcagcacatgccggggcagagatggccagatctgcagcgagcgtgggcactgtctctgtgggcagtgccaatgcacggagccgggggcctttggggagatgtgtgagaagtgccccacctgcccggatgcatgcagcaccaagagagattgcgtcgagtgcctgctgctccactctgggaaacctgacaaccagacctgccacagcctatgcagggatgaggtgatcacatgggtggacaccatcgtgaaagatgaccaggaggctgtgctatgtttctacaaaaccgccaaggactgcgtcatgatgttcacctatgtggagctccccagtgggaagtccaacctgaccgtcctcagggagccagagtgtggaaacacccccaacgccatgaccatcctcctggctgtggtcggtagcatcctccttgttgggcttgcactcctggctatctggaagctgcttgtcaccatccacgaccggagggagtttgcaaagtttcagagcgagcgatccagggcccgctatgaaatggcttcaaatccattatacagaaagcctatctccacgcacactgtggacttcaccttcaacaagttcaacaaatcctacaatggcactgtggactgatgtttccttctccgaggggctggagcggggatctgatgaaaaggtcagactgaaacgccttgcacggctgctcggcttgatcacagctccctaggtaggcaccacagagaagaccttctagtgagcctgggccaggagcccacagtgcctgtacaggaaggtgcctggccatgtcacctggctgctaggccagagccatgccaggctgcgtccctccgagcttgggataaagcaaggggaccttggcgctctcagctttccctgccacatccagcttgttgtcccaatgaaatactgagatgctgggctgtctctcccttccaggaatgctgggcccccagcctggccagacaagaagactgtcaggaagggtcggagtctgtaaaaccagcatacagtttggcttttttcacattgatcatttttatatgaaataaaaagatcctgcatttatggtgtagttctgagtcctgagacttttctgcgtgatggctatgccttgcacacaggtgttggtgatggggctgttgagatgcctgttgaaggtacatcgtttgcaaatgtcagtttcctctcctgtccgtgtttgtttagtacttttataatgaaaagaaacaagattgtttgggattggaagtaaagattaaaaccaaaagaatttgtgtttgtctgataaaaaa

SEQ ID NO: 79146 - DNA, 654 bp, Homo Sapiens
  misc_feature (25)..(25): n is a, c, g, or t
tgggaggtggaagcggggtcctctntacacagcagtcaggaccccagatggtaaagcccttcacgccatctgctgggctcctacctgagcaagctcagaggcacatgagaaggggaggcagctgcctggagaccctctctcccccaggcccacctgtctgcaacccagctgaggccatgccctccccagggaccgtctgcagcctcctgctcctcggcatgctctggctggacttggccatggcaggctccagcttcctgagccctgaacaccagagagtccagcagagaaaggagtcgaagaagccaccagccaagctgcagccccgagctctagcaggctggctccgcccggaagatggaggtcaagcagaaggggcagaggatgaactggaagtccggttcaacgccccctttgatgttggaatcaagctgtcaggggttcagtaccagcagcacagccaggccctggggaagtttcttcaggacatcctctgggaagaggccaaagaggccccagccgacaagtgatcgcccacaagccttactcacctctctctaagtttagaagcgctcatctggcttttcgcttgcttctgcagcaactcccacgactgttgtacaagctcaggaggcgaataaatgttcaaactgt

SEQ ID NO: 79147 - DNA, 979 bp, Homo Sapiens
  misc_feature (203)..(203): n is a, c, g, or t
  misc_feature (208)..(208): n is a, c, g, or t
  misc_feature (221)..(221): n is a, c, g, or t
  misc_feature (376)..(376): n is a, c, g, or t
cccccatggttttgtgcccacaaggcttgatgcaatgcgtccccaggtgaagacaagtgaagccattcggtgcctggagcgcccacaataagagctgccaatgacatccagagccgaccttgaagagatttcctaacagatggggggagtccgggaaagaaaacctcccagaggagaggaggccagcttgcagccaagcgacntgacnatccgtgtgcccngagagggagtgaccgcagctgcggctctgtgaagtccacacccttgactcctacgaggacagcagaaaatcaagcggaccgagatcatcagccgctcctggttcccctctgcccccggatccgcctccagcagcaaggtcagcggcgtcctgaangaagctgccacagagccgcagaaccgcgcttgccaacctcccccagtcaccgtcggggacctgggcatcgtgcggcggaggtctcgggacgtcccggagagcccccagcatgcggccgacacccccaagtctggggaaccgcgggtaccagaggaggctgcccaggaccggcccatgtcccccggagactgtcctccggaaacaactgagacccccaagtgcagcagcccgagggggcaggaagggagccgtcaggacaagcccctgtcgccagcaggctcctcccaggaggcagctgacacccccgacacgcggcacccctgcagtctcggctcctccctcgtggcggactactccgactcggagagtgagtgagcgatccccatcctggagactggacccgctctagaggcccggacacacccaggaggcccctcacagactgcagacccccggctcgcccaccagccctgggagagctcagatgccgcatcctccccagaccgcgccttcctgcaaccgtggagttatttatttggtcctggtgagggtgtttgtgccttgtgagactccgtacattaaagacctgtctcttcaaaaaaa

SEQ ID NO: 79148 - DNA, 830 bp, Homo Sapiens
tttaataaggctttataactatggctggatcttttgctctagtcttctaagaagggccattttattttttagagtcacttctaaagtcatgtggtaattaactttggagactgttttgcgtatgagtgctgatacaaattaaaacccaagtagacctcattgcatgtcaccctatgaatgttgacaatggaaggaataccttgcctgtagtatactgtcacttctggattgataagctgaggaagaaagttaagtttcttttttacataagtcagaaaaacttacagctggtgttcctagtttcctggttgacctcagcagatgaagtgaacagatagtgttaattcagattgaagaaattatctgaatcttggtttgtgtagatttacaatctacatgcaatattaactaaatcagatagcttttacagtttcacatgtgtacataggttccctcccggtcccttccatatccattagttattgaactttctaaactggcattgaaacattacaacaatgttttgttgcaccaattttataaacttaagcagtgcaatacgtgttacttttctgaggcaaaccaaaggtaaatttctcaaggttcttgctgccttctttagcagcatttgatggaagatcttttatacatttgtaatagataaaaataaaccagattgcaaatccttttttaaaatcctaaaccatgtaccaagtttttggtccaaattatgtaggataagttaaacttaaattgcattctattaaccaatatgagtgtatttctgtaagcatagttatgttgaaataaagttttaaaaaccaaaaaaa

SEQ ID NO: 79149 - DNA, 554 bp, Homo Sapiens
  misc_feature (153)..(176): n is a, c, g, or t
  misc_feature (275)..(296): n is a, c, g, or t
aacctgcaagccatgagcctgtacgcgcccggcgagcgcgggggccacttgcagggcgcgcccgggggcgcgggcggctcggccgtggacgaccccctgcccgagtactctctgcctccggtcaccagcagcaggtcgtcgtccctgagtcannnnnnnnnnnnnnnnnnnnnnnngggaggccaggaggccggccaccaccctgcggcccaccaaggccgcctcacctcgtggtacctgaaccaggcgggcggagacctgggccacttggcgannnnnnnnnnnnnnnnnnnnnncgcaggctacccgggccagcagcagaacttccactcggtgcgggagatgttcgagtcacagaggatcggcttgaacaactctccagtgaacgggaatagtagctgtcaaatggccttcccttccagccagtctctgtaccgcacgtccggagctttcgtctacgactgtagcaagttttgacacaccctcaaagccgaactaaatcgaaccccaaagcaggaaaagctaaaggaacccatcaaggcaaaatcgaaact

SEQ ID NO: 79150 - DNA, 1224 bp, Homo Sapiens
  misc_feature (52)..(52): n is a, c, g, or t
  misc_feature (741)..(760): n is a, c, g, or t
  misc_feature (769)..(806): n is a, c, g, or t
  misc_feature (975)..(984): n is a, c, g, or t
  misc_feature (1001)..(1012): n is a, c, g, or t
caggacaaccccagtttgtcatccacgtgtgaatcagaccaatgcccaagcncagcaagagattgtctactatgtgctgtctgaagccccaggggagcctcccccagcccctgagccaccttcagggggcatcatggaaaagcttcaaggaatagctgaggagccagagatccagatggtttgaaggccgcagagccagaccatttcttccccaggtcctgaagtttgagccaggcaagtggcagtgcccctagtgggcagccgttgccaatggatgcctttaggagtggtgccgagagcagtgtggtccactctggcctgggtttgcatcattctgcagactctaaagacttcccttttctgccagactacattttgtggggagcctgaggactctggattctttgaggggatcctggatgtgtgtgttcttgttaaagaggctgttatcaggcttaaccataaccctcaagatctgcttgacagtgattaaatccttagctcacatccattcccatctttcgggctccttaggcccaaggatggcatgtgactggtccctgcaagggtcctttctttgtcaccagccaaggcattgataaccaagtagccattttcctcttaaggtttcctctacaaccccaaggactttcatgattatcctcagggacaggattggaggcattgagcgtgtttattaacaaattgtttttggtaataaaataaatgcttggactcttnnnnnnnnnnnnnnnnnnnnctcgaggcnnnnnnnnnnnnnnnnnnnnnnnnnnnnnnnnnnnnnnccatggtcctaagctgctccctgacccccagctttcctgtacaaagggggtaaatctgccgggtcctcccctattggggaggccgcatctaatttccgataagccccagggtttacaccctgcaattaaacggaattcggggtgcccccaaccccggggaaattttaannnnnnnnnntaaaggaagcgcgggcnnnnnnnnnnnngggggacccccaacgggcccttcccttgaagaaccctatttttctcccgggcaaacaaacctggacggctttggccaccataaaataaacccccccgcttaccaccaccggagcgccctggctttgccccggaatccccccgttttcccattccgctttttctcccccaaaaaggcgcccccggtcttcctcaccaaaatcttgccacaatt

SEQ ID NO: 79151 - DNA, 317 bp, Homo Sapiens
  misc_feature (47)..(47): n is a, c, g, or t
atcagctgccagagtggccagaataaaagcaggtagaagaacgtggnaaattctagactggtttagtcttccagcctacatcttttctcccgtactggatgcttcctgcccgcgaacatcagactccaagttcttcagctttgggactcttagaccttcgaccacagactgaaggctgcactgttggcttccctacttttggggttttgggattcggactggctttcttgcacctcagcttgcagatggcctattgtaggacctcaccttgtgatcatgtgagtcaatactccgtaataaactccccttcatctata

SEQ ID NO: 79152 - DNA, 478 bp, Homo Sapiens
ttccaggcctcaatgaggagtccaaacatggagccattcaagcagcagaaggtggaggacttttatgacatcggagaggagctggggagggccacccgttcatcgtgcagttcaatgatggaaatgccgccgtggtgtccatgtgggtgtgccgggcgctggaggagaggcggagccagcaggggcccccgtgaggctgccgcagggcactgaaagcccaggaccagtaaccaaggagaacaacccacccgtcgcccttctccgtatgctgcctgcgccagaagagctttgctgggccctggcttccctgccctcgccttcacctctgtcagcaagtggccttgcctggggagccccatgtgtggcccaccccaccaggccatccccataccttctggtttgaaagcgctgacactggcagagaggtaaagggtggggcattgagaatggaggctcccagggtccctgcccacttctg

SEQ ID NO: 79153 - DNA, 939 bp, Homo Sapiens
  misc_feature (35)..(35): n is a, c, g, or t
  misc_feature (827)..(861): n is a, c, g, or t
ctggattccccgtacaatctttgtgtacattgatnaagcaacagaggacaaaggagcctgacatgcttcaaggtcaacaaccatagtaaattttaaaaagtgaaaccaaatctggcctccccaacccaggttcactggtattttccatcccatcatgttgtaaattgaattcctgtgttgagtagtgtgatggttaatattgagggtcaacctgattggattgaaggatgcaaagtattgttcctgggtgtgtctgtgagggtgttgccaaagaagattaacatttgagtcagtggactgggagaggcagacccaccctcaatctgggtgggcaccatctaatcagctgccagcatggctagaataaagcaggcagaagaaggtggaaggactagacttgctgagtcttctggccttcatctttctcctgtgctggatgcttcctgccctcgaacatcagactccaagttcttcagcttttggactcttggacttacaccagtgatttgccaggggctctcgggccttcagccacagactgaaggctgcactgtcggcttccctacttttgaggttttgggactcggactggcttccttgctcctcagcttgcagacagcctattgtgggacttcaccttgtgatcgtgtgagtcaatactccttaataaactccctttcatatatacatctatctatcctattagttctgttcctctagggaaccctgaataatacaagtaggatagaatagatgacattttaagggtatattatcccggccgtaatggccgaattcccgggcatatgtccggtaccgtcgactgnnnnnnnnnnnnnnnnnnnnnnnnnnnnnnnnnnncggccgcttcctcgctcactggactcgctgcgctcgtcgttcgcctgtagcggcagcgcccatgtagttcatatagct

SEQ ID NO: 79154 - DNA, 1689 bp, Homo Sapiens
  misc_feature (1531)..(1551): n is a, c, g, or t
  misc_feature (1555)..(1557): n is a, c, g, or t
  misc_feature (1559)..(1564): n is a, c, g, or t
  misc_feature (1587)..(1587): n is a, c, g, or t
  misc_feature (1636)..(1636): n is a, c, g, or t
aaggtagcgaggcctgggtggcgaattcggcacgaggaagtgatgaggaaatgaaggcaatgctgtcatattattattccacagtaatggaacagcaagtaaatggacagttaatagagcctctgcagatatttccaagagcctgcaagcctcctggggaacggaacatacatggcctgaaggtgaatactcgggccggaccctctcaacacagcagcccagcagtctcagattcacttccaagcaatagcttaaagaagtcttctgctgaactgaaaaaaatactagccaatggccagatgaatgaacaagacatacgatatcgggacactcttggtcatggcaacggaggcacagtctacaaagcatatcatgtcccgagtgggaaaatattagctgtaaaggtcatactactagatattacactggaacttcagaagcaaattatgtctgaattggaaattctttataagtgcgattcatcatatatcattggattttatggagcattttttgtagaaaacaggatttcaatatgtacagaattcatggatgggggatctttggatgtatataggaaaatgccagaacatgtccttggaagaattgcagtagcagttgttaaaggccttacttatttgtggagtttaaagattttacatagagacgtgaagccctccaatatgctagtaaacacaagaggacaggttaagctgtgtgattttggagttagcactcagctggtgaattctatagccaagacgtatgttggaacaaatgcttatatggcgcctgaaaggatttcaggggagcagtatggaattcattctgatgtctggagcttaggaatctcttttatggagcttgctcttgggaggtttccatatcctcagattcagaaaaaacagggatcttataatgcctctccagctcctgcagagcattgttaatgaggattcgccagtcattacagttgcagagttctcggagccatttgtacatttcatcactcagtgtatgcgaaaacagccaaaagaaaggccagcacctgaagaattgatgggccacccgttcatcgtgcagttcaatgatggaaatgccgccgtggtgtccatgtgggtgtgccgggcgctggaggagaggcggagccagcaggggcccccgtgaggctgccgcagggcactgaaagcccaggaccagtaaccaaggagaacaacccacccgtcgcccttctccgtatgctgcctgcgccagaagagctttgctgggccctggcttccctgccctcgccttcacctctgtcagcaggtggccttgcctggggagccccatgtgtggcccaccccaccaggccatccccataccttctggtttgaaggcgctgacactggcagagaggtaaagggtggggcattgagaatggaggctcccagggtccctgcccacttctgttttcctaatgtttttctctataaagggtcaggcccgtcagcatcactgatgggaataaaagtattaatgggctttgtgnnnnnnnnnnnnnnnnnnnnnaaannnannnnnnaaaaagggcgcccgctctaaganttattccctcgcagggggcccaagcttacgccgtaacccagctttttcntttgtacaaagtggggccccccctaatagtggagagtcggaattaataagcct

SEQ ID NO: 79155 - DNA, 1602 bp, Homo Sapiens; identical to SEQ ID NO: 6533
  misc_feature (291)..(352): n is a, c, g, or t
  misc_feature (372)..(385): n is a, c, g, or t
  misc_feature (736)..(765): n is a, c, g, or t
  misc_feature (1076)..(1076): n is a, c, g, or t
  misc_feature (1081)..(1081): n is a, c, g, or t
  misc_feature (1143)..(1143): n is a, c, g, or t
  misc_feature (1181)..(1181): n is a, c, g, or t
  misc_feature (1237)..(1237): n is a, c, g, or t
  misc_feature (1312)..(1312): n is a, c, g, or t
  misc_feature (1358)..(1358): n is a, c, g, or t
  misc_feature (1417)..(1417): n is a, c, g, or t
  misc_feature (1429)..(1429): n is a, c, g, or t

SEQ ID NO: 79156 - DNA, 712 bp, Homo Sapiens
  misc_feature (650)..(659): n is a, c, g, or t
aatatgcctctttcccaattttatgtatttttggatctgcgcacacagatttatcaatgaagtacatttgcctctggctttatcacaaggaaaaaggaatcaaacattgaacacaaatgtgttccaaaccagtcttgtccatcttgtcacttttatgtgactgctcctctgaaccagaaggggcacgatagaaggccataggaatgaaagtaaatcattcaggtgaagtgagaaattcttccatatacagagtgaaaatgtgtgatttcattcctgccttcctttaaacgttgtcttgatctctgcctagtagtagttgagccctcagtcgcccaaacatgaggagagacccaactccagcagccagaatttagtatttacatttgccttcccaagttgagaatagaatgtggtgttctgtgctttctgtttttattattccaaaatatttttttaaagaagtgttatttttcaacagattcataaattagttcctgatgtacggtaaattaaaactcccactgtgtcagtcaaactgagatgtgctcatttcataaccactcatttctagtctgtcagagctgcactggtggcttattgctggtttttaaaggtgtttttaacttacatgtaacatgtttaggacatgnnnnnnnnnnctaatttgtgtgtctttacaactgattaaacagtagtttaaaaaacctcgtgc

SEQ ID NO: 79157 - DNA, 897 bp, Homo Sapiens
  misc_feature (46)..(46): n is a, c, g, or t
  misc_feature (407)..(452): n is a, c, g, or t
  misc_feature (643)..(678): n is a, c, g, or t
atgtctgaagtaagacccctctccagagacatcttgatggagaccntcctgtatgagcagctcctggaacccccgaccatggaggttcttggcatgactgactctgaagaggacctggaccctatggaggacttcgattctttggaatgcatggagggcagtgacgcattggccctgcggctggcctgcatcggggacgagatggacgtgagcctcagggccccgcgcctggcccagctctccgaggtggccatgcacagcctgggtctggctttcatctacgaccagactgaggacatcagggatgttcttagaagtttcatggacggtttcaccacacttaaggagaacataatgaggttctggagatccccgaaccccgggtcctgggtgtcctgcgaacaggnnnnnnnnnnnnnnnnnnnnnnnnnnnnnnnnnnnnnnnnnnnnnncagcgggggcctgcacctgctgctcaagtgaggccccggcggctcagggcggggctggccccacccccatgaccactgccctggaggtggcggcctgctgctgttatctttttaactgttttctcatgatgcctttttatatttaaaccccgagatagtgctggaacactgctgaggttttatactcaggnnnnnnnnnnnnnnnnnnnnnnnnnnnnnnnnnnnnctaaaagatgaattcctatggctctgcaattgtcaccggttaactgtggcctgtgcccaggaagagccattcactcctgcccctgcccacacggcaggtagcagggggagtgctggtcacacccctgtgtgatatgtgatgccctcggcaaagaatctactggaatagattccgaggagcaggagtgctcaataaaatgttggtttccagcaaaaaaaa

SEQ ID NO: 79158 - DNA, 656 bp, Homo Sapiens
  misc_feature (454)..(463): n is a, c, g, or t
ctgattccccattaatcaagatttgtcagacttcaccttctataattagaaaacacagttataagaacagtcaattttttaaattttccaaattaaaaaattgcaccatgattttgaacaagcacttccaattacattacccatcttgtatgccataggtgggagtataattgtcacagcctttaggaatgtagttttctgggatttattgaaactttgaaccttttggcctactaagttcattcctaggaaactgcctaatgggaatgatctgacaagtgtacacaagcaaagtcattgcacctttgttctttaatacttaaaactagcccaaatgccctgtcagtaagggactggtttaatagatggtacctttatgcaatttgtttctaagtattcgttaagagagtgaggaatgtctggattattagggcaagatttctaaacttgggtnnnnnnnnnngttgtgcaagcatttttgtggacaacttgatgctctaaaatataagtaacaccacattactaacagtggctttgttaggaagcagaattatggaagaactttcatgggtggctttacatatttctataatgttttaattttctataagcatgtatttcgtaaacttaaataaagaaaaaagaacactaaaaaa

SEQ ID NO: 79159 - DNA, 851 bp, Homo Sapiens
atagaggatacagcaagtgatccaaaaggaaacggggcgccctcgaaaaaagtcaggtggaagtggggaaaggaattctacccctctcaagtcagcagctgccatggaatctgcccagtcctcaaggttaccatgggagacatgggcatcaggaggggaaggcaactcagctggaggggcagagaggccagggccaatgggagaggctgaaaagggggcagtacttgcccagggtcagggagatggtactgtttccaaaggaggaaggggccccggttcccagcataccaaagaagcagaagataaaattcccttggtcccctcaaaagtgagtgtcatcaagggcagcagaagccaaaaggaggcttttcctttggcaaagggagaggtagacactgcaccacagggtaataaagacttaaaggagcatgtgcttcaaagttccttatcccaggagcataaagacccaaaagcaacacccccatgatacaggtctgtggggaagagtgtttatatccctacgttaactttgcctagtagaggcccttctttgcacttgcttctcatttggctattcttttcctaaggaagtccattctcctctgtacagacagctgagtcacccagtctacttagtacctggttgctgcctctgaccttttcagcttgataccctgggctttagtgtaaccaataaatctgtagtgaccttacctgtattccctgtgctatcctgtgggaaggtaggaatgggctaagtatgatgaatgtataggttagggatcttttgggttttaaatcacagaaacctaattcaaactggcttaaaattaaaaaggatttaatgggtt

SEQ ID NO: 79160 - DNA, 963 bp, Homo Sapiens
ttcagccaaggcccccatgcccttaaagccacatgggccatgtgccagatcgggcaagagatgaagattttgctgtagcaggaaagcgggcgacctcaaacgatggaactgaagggaccgtttccaggatccgctcttgcccagtcaccaggtcagggcaccacgctgcctcccaccagttcatctcgagggtgctggggttacttcctgggcccatttctggactctcagaaccctttaggtcaagtccaggcagggggtggcatagacaccaaggtcttcctccttatgccactgtagcaatatttggactggccccggccaccaagccttcgagctttgatgtcagggaagatctctctgatgatcttgccaaagttggctgtgctgagtgggcggcaacaggcaagactctcacagtacttccgataggcatcataaacactttgctttggcagacaggtgtcagtgtgctcttccaggtggttgcggatccacctataggcatacatgtactcctcattgctcagtgtacttggctctgagcttttgtctccagtggtgggtcctgaggggagctgaaggtagagatacagcttgtcattgtcagaaaatttctgtacatcttgcaggatcccctctactttgttctgcacggccttggaaatggtacctcggagcctctgaagaagggtggtaggttccccagcctcagcaccacctgggggggcccttcccccagtcttggggctcttagcatcaggctcatcttctgccatcccggcatgagggcttctccgaaaattagaaattattccattacttcgccaggcccatatatgcccaaagagatctttgccatctccattctatctgccccacctttctgaagtctcctaaatctggaaaactcgtagccaccttcactccagcccagccccaaggtcctggccggacgcgtgg

SEQ ID NO: 79161 - DNA, 966 bp, Homo Sapiens
  misc_feature (185)..(477): n is a, c, g, or t
  misc_feature (494)..(638): n is a, c, g, or t
tcagggaccctgttttagtcttggttccccttgattgggtgattttgtgtctcagggcgactatgaaacccagcacgcgcctttacgtcttgcctttctgccttgtcacattcttctgcgtatccctgtctgtgataccgtatacgccttgatgagctatccgctgccgcaccgacgaccgagcnnnnnnnnnnnnnnnnnnnnnnnnnnnnnnnnnnnnnnnnnnnnnnnnnnnnnnnnnnnnnnnnnnnnnnnnnnnnnnnnnnnnnnnnnnnnnnnnnnnnnnnnnnnnnnnnnnnnnnnnnnnnnnnnnnnnnnnnnnnnnnnnnnnnnnnnnnnnnnnnnnnnnnnnnnnnnnnnnnnnnnnnnnnnnnnnnnnnnnnnnnnnnnnnnnnnnnnnnnnnnnnnnnnnnnnnnnnnnnnnnnnnnnnnnnnnnnnnnnnnnnnnnnnnnnnnnnnnnnnnnnnnnnnnnnnnnaagaattcggcacgagnnnnnnnnnnnnnnnnnnnnnnnnnnnnnnnnnnnnnnnnnnnnnnnnnnnnnnnnnnnnnnnnnnnnnnnnnnnnnnnnnnnnnnnnnnnnnnnnnnnnnnnnnnnnnnnnnnnnnnnnnnnnnnnnnnnnnnnnnnnnnnnnngtgagctgagatcgttcacctttcactccatcctggatgaaagagccagactctgtctcaaaacaaacaaaaaagcgtggggacttctggggacagacaaggtgcctgttatatatttactcagtctttgccctgaatggtctcagcttgagaccatttcaaactggagagaagcaagccagccaatagaatggggtgatttacagggatttctgtttactgtcaaaatatttctcatctgcactatgtttccatttgtggtcctgaaggaaattcttataactcaacatttgtctggtcttataagtaaagacagctttaaaatctg

SEQ ID NO: 79162 - DNA, 2611 bp, Homo Sapiens
  misc_feature (2524)..(2538): n is a, c, g, or t
aaacctctcgctggggctaggagttcggcggggcgcgcgccggcggctgcggagctggcaggtgcgaagcgtctgcacctggcgggcgatggcgcccgatgcgggcgccccgggatagcgtgggcgaggctgcggggccccggcgcgcacgcccgcacctctccccagccccggcgtgggcccagcccggcccaggcagcaatggggttcctgcagctgctggtcgtagcggtgctggcatccgaacaccgggtggctggtgcagccgaggtcttcgggaattccagcgagggtcttattgaattttctgtggggaaatttagatacttcgagctcaataggccctttccagaggaagctattttgcatgatatttcaagcaatgtgacttttcttattttccaaatacactcacagtatcagaatacaactgtttccttttctccgactctcctttccaattcctcggaaacaggcactgccagtggactggttttcatccttagaccagagcagagtacatgcacttggtacttggggacttcaggcatacagcctgtccagaatatggctatcctactctcctactcagaaagagatcctgtccctggaggctgtaatttggagttcgatttagatattgatcccaacatttacttggagtataatttctttgaaacgactatcaagtttgccccagcaaacctaggctatgcgagaggcgtagatcccccaccatgtgacgctgggacagaccaggactccaggtggaggttgcagtatgatgtctatcagtattttctgcctgagaatgacctcactgaggagatgttgctgaagcatctgcagaggatggtcagtgtgccccaggtgaaggccagtgctctcaaggtggttaccctaacagctaatgataagacaagtgtttccttctcctccctcccgggacaaggtgtcatatacaatgtcattgtttgggacccgtttctaaatacatctgctgcctacattcctgctcacacatacgcttgcagctttgaggcaggagagggtagttgtgcttccctaggaagagtgtcttccaaagtgttcttcactctttttgccctgcttggtttcttcatttgtttctttggacacagattctggaaaacagaattattcttcataggctttatcatcatgggattcttcttttatatactgattacaagactgacacctatcaagtatgatgtgaatctgattctgacagctgtcactggaagcgtcggtggaatgttcttggtagctgtgtggtggcgatttggaatcctctcgatctgcatgctctgtgttggactagtgctggggttcctcatctcgtcagtgactttctttactccactgggaaacctaaagatttttcatgatgatggtgtattctgggtcactttctcttgcatagctatcctcattccagtagttttcatgggctgcctaagaatactgaacatactgacttgtggagtcattggctcctattcggtggttttagccattgacagttactggtccacaagcctttcctacatcactttgaacgtactcaagagagcgctcaacaaggatttccacagagctttcacaaatgtgccttttcaaactaatgacttcattatcctggcagtatggggcatgctggctgtaagtggaattacgttacagattcgaagagagagaggacgaccgttcttccctccccacccatacaagttatggaagcaagagagagagcgccgagtgacaaacattctggaccctagctaccacattcctccattgagagagaggctctatggccgattaacccagattaaagggctcttccagaaggagcagccagctggagagagaacgcctttgcttctgtagatgcccaggggcttggtcagtgtgcctcagctttggagttcatgcctggagtggttcaacagtctctggtgcaagtctaataagagatcaggcatatatatctgttctttgcataatattatggtgcccttattgatatatggtaagggtgtactaggggattaggatgattgtaagagaatgagaaagatgaccaaaaggttggtggtagggaggctttttcttatttccaaatacttgagaaattaccttttggtttacaaatctatgatcaacttattccattaaatagatacattaaaaaaattaaaaactgattcttctgcagagcactggtgtttctttttataaccccttgaaacaagtctctcacctgagcctgtctaaactttcggagggagtttattattgagtctttatctgtgacagtatttggagatttagggatttgatacttaggcctttgaattttagaatacaaaaagagaagcaagccagacatggtggctcacacctgtaatcccaatactgggaagccaaggtgggagtatcgcttgagcccaggagtttgagaccgacatgggcaacatgacaagaccccatctctacnnnnnnnnnnnnnnnttagccaggcatggtggcacatgcctactcccagctcccaaggagactgagatgggaggatccctggagccct

SEQ ID NO: 79163 - DNA, 712 bp, Homo Sapiens
  misc_feature (58)..(58): n is a, c, g, or t
  misc_feature (92)..(102): n is a, c, g, or t
tgagtcccgaggctcaggcccaggagggatgcagtccggctgagggcgaggctgtccncaggacatggagagggtgagatcccaaggccacnnnnnnnnnnncagggagaacccctcctaccctggatgagtgggtgactggagagctagagaacgtggcagacccaagacctctcagtgctgagcccatggaggatgccccaggctggcgggactgggaagcagagggctggtcttaacacaggtgtgtccagtgctggaggcaagtccttgtcgtgactgtccagcgccactccatgtctctcctgtccttggatgttggggggctcagcctcttgcatgggtgtcctgctgggcgctgggccccgccactggccccctgcttgctttggggtctgagttagctcctggctccactgagcaggccgtcagctgccagcccaccacgcggatacccaggccctgttccgaggcctggaacagctgcttccgaagaaggggctgccttcagggaaatgcgtgcaccgtgcagcctgtgctgtgcccagggaggcctcttcagcgggattggcagttgctgtgccctgagaacaggcagaactgtgtgatccctgaatgtgaacctgaagttcaaaggacttggaaagctctggaatgtgttggtttttccccccccaaaatgggtcctaaggagggtaaagtgacttgtttc

SEQ ID NO: 79164 - DNA, 271 bp, Homo Sapiens
gcggccgcctactactactatacggctgcgagaagacgacagaaggggctgccttcagggaaatgcgtgcaccgtgcagcctgtgctgtgcccagggaggcctcttcagcgggattggcagttgctgtgccctgagaacaggcagaactgtgtgatccctgaatgtgaacctgaagttcaaaggacttggaaagctctggaatgtgttggtttttcccccccaaaatgggtcctaaggagggtaaagtgacttgtttcaagttgttggagt

SEQ ID NO: 79165 - DNA, 1257 bp, Homo Sapiens
  misc_feature (729)..(729): n is a, c, g, or t
  misc_feature (1185)..(1210): n is a, c, g, or t
tataactttgtgatcctccacgccagggcagacgaacacatcgccctgcgggttcgggagaagctggaggcccttggcgtgcccgacggggccaccttctgcgaggatttccaggtgccggggcgcggggagctgagctgcctgcaggacgccatagaccactcagctttcatcatcctacttctcacctccaacttcgactgtcgcctgagcctgcaccaggtgaaccaagccatgatgagcaacctcacgcgacaggggtcgccagactgtgtcatccccttcctgcccctggagagctccccggcccagctcagctccgacacggccagcctgctctccgggctggtgcggctggacgaacactcccagatcttcgccaggaaggtggccaacaccttcaagccccacaggcttcaggcccgaaaggccatgtggaggaaggaacaggacacccgagccctgcgggaacagagccaacacctggatggtgagcggatgcaggcggcggcactgaacgcagcctactcagcctacctccagagctactttgtcctaccaggcacagatggagcagctccaggtggcttttgggagccacatgtcatttgggactggggcgccctatggggctcgaatgccctttgggggccaggtgcccctgggagccccgcacccctttcccacttggccggggtgcccgcagccgccaccccccccagccttccntacggcctcacccgcaccccctcagagcccagggctgcaacccctcattatccaccacgcacagatggtacagctggggctgaacaaccacatgtggaaccagagagggtcccaggcgcccgaggacaagacgcaggaggcagaatgaccgcgtgtccttgcctgaccacctggggaacacccctggacccaggcatcggccaggaccccatagagcaccccggtctgccctgtgcccggtggacagtggaagatgaggtcatctgccactttcaggacattgtccgggagcccttcatttaggacaaaacgggcgcgatgatgccctggctttcagggtggtcagaactggatacggtgtttacaattccaatctctctatttctgggtgaagggtcttggtggtgggggtattgctacggtcttttaattataataaatatttattgaatgctnnnnnnnnnnnnnnnnnnnnnnnnnnacctgagcaggcggccgcaagcttattccctttagttgagggttaat

SEQ ID NO: 79166 - DNA, 1137 bp, Homo Sapiens
  misc_feature (18)..(18): n is a, c, g, or t
tgtcttagtggcatcttntgatgaaattggatcagatatatgtagatgctgatatatgggacacatgtttaggttttggtgcagttgcacaaaactgtgttagtttatatgttactgtgttgcctttatttattctctccaaagtgtctctttatatttgttttacaatctgtgaaagagtataccataatacagaagtattttcatagtctttacctctggattgtcctgtcagtatagccacgttgatgagattacaccagtgcctttgatcatctttaagtatttgagccctgataaatattttggtaacataatccaaattagagacttagagctctggttagcaatcatgtttaaagagaagcttcttaaagctctgtatgctgggagattcatgattattaccaacgttttgatttcatgaaggtgttctcaaatttaaagcacattttcagtaagaacaaaaatatttaatgtttttatcttagacttaacttgatacatttgcatattactatggaagttattcaccttgtccctgtttttctttaagatattttaaaatcatagttatactacagtccttttttaaatgtatcctgatacattgtaaaatattttaatttcattgtggaaaataatgttggataaggagatatttttcactgttaacttttagcccatgcattttcataatttatttttttcacttgctgctttatatgacatatgtgacatttgattatttaacacttgatgtgatctgcataaacccaagttgcacaaccctcctgctgaagataaaattgaggttaaagataaagatttattttcatatttgtacagtgatcggcttcagtgatggtttttgtgggcatttattgtgtgtgtgtaagaaatttcatatgtatatattaagtaggcctctgagtattgaataattgttttatgattttgatttatatggtttacattttcattgtgtgggccatatttcgtttatactgtttatttctcttcaaaccttaataattataccataaagtgtaatttttatagcaatgcaaatgtctaaggaactacaaatattttctacgttgtaaattcaataaagcttgcttcctttggcctttt

SEQ ID NO: 79167 - DNA, 1108 bp, Homo Sapiens
  misc_feature (286)..(345): n is a, c, g, or t
aaaacctgagctttaagactcccactagcttcgtgtcctttggcatgttaacgtgcctcagtttcctcatctgtataatggggatatatgaaaggcaccagtcctaaggtgaacattaagtgagatgattctagttacagacttagaacaatttccagcacatagttaaatatccaggaaattctggtactgttatgtgtgggtgagctgacctggatgtagatgttttcctctctcttgctgacccctccgccagttttgtcttgtgatgccattaacacatctnnnnnnnnnnnnnnnnnnnnnnnnnnnnnnnnnnnnnnnnnnnnnnnnnnnnnnnnnnnnctttagaactcagaacacccaatagtcctaggcccccatcctcgcatggcagcaagctaaataagcatcttcccactgcgagttggggcatgacccagcctatggtttgccatactccctctttttctccgttttttcattaattgtgaacctgacctgcatcaccctttcatgtcagtgctctccaaacctgcttgcttgcacccctctagtcgaaatattttgtgcttaccccaatatatgtgtgtgactattgaactctattcgtagactgcttgtactaatgtcatttgcatcataaaatattcatatccaataaacatattaaaaggatgagacccccaaaacccaacccacaagccaaaaacccttgtcggcccgcctcggcccttcaagaagctttctagaaccatttctttgggccccccgggccccaaaaaggaaagtgaaacatgggcccttagcctggttccccaaggaaaattccggggccatgaaattaggggcttgggattcccccccaataaaaaaccccccggggcgggaaacccgaacggttcttgaaaaaaatcccaaatgggagtttctgaaggccctttattgggattctctccacagggaggtcccaacgcaacctccaatatcaaaattaaccccccggcccgtggacatttattggaaaaaactgggtggaaattcctttaaacctttttcgccccaaagtggagaaacccatcccacaacggggttttgagcgcacccc

SEQ ID NO: 79168 - DNA, 706 bp, Homo Sapiens
  misc_feature (461)..(482): n is a, c, g, or t
  misc_feature (551)..(572): n is a, c, g, or t
ctaaacattatcaggaaggagccaggacaaaggctttgttcaggtttatgaaaaccccagatgaaatcatgagtggccgaacagaccgtctggagcacctagagtcccaggagctggatgaacaaatataccaagaagatgaatgctgaaggaaccaacagtccacctcagcgggccagcagcccagggaacccctgcccaccaggattgctggaagtgtgacggagcaggcgggctgaggagagtggaaaaggaagcgacccagaaatggcagggacacttctcttgcagaccaagagggaccctggagcaccttagacaaactacccagcacaggcggggctggaattctggcggagggcatgagcctgggactccatgtcacgtttccttctgatttggaatctctccatctgtaattcctcaccctcacccttccaccgttgttagtatcatggtgnnnnnnnnnnnnnnnnnnnnnnaagaacctgcagtttgactcttcatcgttcatctaggggaagacatctgatgttgttttcctatggaannnnnnnnnnnnnnnnnnnnnnttttttgcaaatctcacaaagtgcggcaagcccagctggtcaggaaagagaatacttgcagaggggttcaggttcctctttttcctgccacgtggatcaggtctgttcctgttactgttgggtaataactgaaa

SEQ ID NO: 79169 - DNA, 2087 bp, Homo Sapiens
  misc_feature (674)..(684): n is a, c, g, or t
  misc_feature (850)..(858): n is a, c, g, or t
  misc_feature (1606)..(1606): n is a, c, g, or t
cggcactgcttcggatgtgtactgtatcagccagcaatttaggcacagctgacatggccactttcatggtcaattcactatatatgatgaagacaacattagctctatttgaattcactgacagacgtctggaaatgctacagtttcagatcgaagcacatttggacacacttataaatgagcaagcctcttatgttttaactagggtaggcttgagttacatctataacactgtacagcaacataaacctgaacagggctctttagctaatatgcccaacctagattctgtgacactgaaggctgcaatggttcagtttgatcgttatctgtcagccccagacaacctattgataccacagctgaactttcttctaagtgccacagtgaaagagcagatcgtaaaacaatctacagaattagtctgcagagcctatggtgaagtgtatgcagccgtgatgaatccaatcaatgaatacaaagatccagagaacattcttcaccgatcgccgcagcaagtgcagacgcttctttcctgattatcttatttcattgtgttagcaaaatatgacctccctaaaacactgaaggttattttttattctttgaatttttactttataatttgatagttacagttttctttgtatcataagattgtaagtcccgataannnnnnnnnnngggtctcagtaacagggaagtaagtaacatgttggacctgagctagtatggctggtgtatctactctaaatgagatgatctattttttggctagccatctctccagctctgcagttttcactggtattcaggaagcataaagtagtaatgaaagggttggaagaannnnnnnnnacaagactagttctaaattaacagcttataaaaaatttgtctaaatttaataattagtataaggatatgacctaataaatgtctccttacctaaagattcatttgctttcttttaatatgagtaggcatacttagtagcttttctgaacctagcctatgtctctgtccccaaaatagctgcccttaaagagttgttagcagagagaaaaataacagtgaatgtgctcctggtgtatatggcagtgaatctcctttctgttctactttagcatactatatatatttgactgtgtacattcttatgcaattttaagtatacactcagcaataattagaaaaaaaggagagagaaaagtgatttaaacagggtggattccactctgtgggagccttcgatggaactcaaggtggagctcagcctttccaatgagctctaagcatgtagatagcctgagctgtgtctaagcctggtgtttaaagatgggtatttgtcatacaatatgggtcctaaatccaaccaactacacattttatctggtgttcaaaccaaagaaacaatgatctactcaaacattggagaaaaaaactgccagaggaggagttgccaattggcagtgtgtcttatctccatgttgtaactggactctgactttagaccattacctattaggaagattaaaaatgactgtatttttaaaggaataaatcccagtgtgcctgatttgacattcttgtcggcaaaaaaaancttaatttctagtaaatctataaaaatgggtaagtccctaaattacaaatgagaaaattgaagcacaaggaaaaaaataactagtttgaaatattttgaaaagtaataacataaaactagtatttgtagaagattatgtgttgtatataacaaattagtatttatagaatatgacctatttatctgaagtttataattgtttatacctaatacagttctttttggagtaagaatgattatataatcgttatccatttgggtataaatctgtatttttagttttttccctttgattagtatgtgttacatataaagacagaaaataaagtataaatcaagagcttaaattgtatataatttatttctacagagaaagaagattgataccttgctatgagtgaattcctttgttttatagggaaaatttattgtgctttttacctggttttttcaaataaaatattaaaatatttctagagca

SEQ ID NO: 79170 - DNA, 690 bp, Homo Sapiens
gcccatcctcagcctgatggcccaggagctggggatcagtgagaaagactccaacttccagaacccatgtaaaatcgaccgcacagagttcattcccagcactgaccctttccagaaggccctgagagaagaagagaaacgccgaaagaaagaggagaagcggaaggagatccgaaaaggcccaaggatctccagatcccagtctgagttatagccctggagcagctcagggctcagggggccacaaggaggcaggtcgggaggaagaagaggtggaggtgtggttgtggtggagagcaccagctagccccttccagaaggggaggccacatttgcccggccccctggagctgggtctgagccccagctgaagggactgagcctcagatggctggattttctctcaggggcctcctgctgaaggggccttcagaggattttatgctggaaatatgaccctgtgcagactgctgggggaggcaggaggatgcctgcctggaccctgttggtggctgaagacctctggccagctggcttccgcccttggtggggaagcagcagaactaggttctgagccacgggtcagggtgccaccctgctgctggccccactgtgtcacagagctgcctggcacaggtcccagcccctctgcagagacacaataaaagccagcagaccctttggaccgac

SEQ ID NO: 79171 - DNA, 1952 bp, Homo Sapiens
  misc_feature (1504)..(1504): n is a, c, g, or t
  misc_feature (1611)..(1611): n is a, c, g, or t
  misc_feature (1614)..(1615): n is a, c, g, or t
  misc_feature (1635)..(1635): n is a, c, g, or t
  misc_feature (1646)..(1646): n is a, c, g, or t
  misc_feature (1665)..(1665): n is a, c, g, or t
  misc_feature (1671)..(1671): n is a, c, g, or t
  misc_feature (1703)..(1704): n is a, c, g, or t
  misc_feature (1761)..(1761): n is a, c, g, or t
  misc_feature (1803)..(1803): n is a, c, g, or t
  misc_feature (1829)..(1829): n is a, c, g, or t
cagtaactatagcggtttaaggtagcgaggcctgggtggcgaattcggcacgaggggagtccggcatgaccgccttgagcgcgaggatgctgacccggagccggagcctgggacccggggctgggccgcgggggtgtagggaggagcccgggcctctccggagaagagaggctgcagcagaagcgaggaaaagccacagccccgtgaagcgtccgcggaaagcacagagactgcgtgtggcctatgagggctcggacagtgagaaaggtgagggggctgagcccctcaaggtgccagtctgggagccccaggactggcagcaacagctggtcaacatccgtgccatgaggaacaaaaaggatgcacctgtggaccatctggggactgagcactgctatgactccagtgcccccccaaaggtacgcaggtaccaggtgctgctgtcactgatgctctccagccaaaccaaagaccaggtgacggcgggcgccatgcagcgactgcgggcgcggggcctgacggtggacagcatcctgcagacagatgatgccacgctgggcaagctcatctaccccgtcggtttctggaggagcaaggtgaaatacatcaagcagaccagcgccatcctgcagcagcactacggtggggacatcccagcctctgtggccgagctggtggcgctgccgggtgttgggcccaagatggcacacctggctatggctgtggcctggggcactgtgtcaggcattgcagtggacacgcatgtgcacagaatcgccaacaggctgaggtggaccaagaaggcaaccaagtccccagaggagacccgcgccgccctggaggagtggctgcctagggagctgtggcacgagatcaatggactcttggtgggcttcggccagcagacctgtctgcctgtgcaccctcgctgccacgcctgcctcaaccaagccctctgcccggccgcccagggtctctgatggccgcatggctctggccgaggtgccgctgtggccaccgtctgtgaagtggctttacgcttcaggaagccacgcctgttgaataaagctttggtgtgtttgcccaaaacaaaccagagaaaccaatcaaataaaagaagaaagggcgggcccgctctaaagtattcccttcgaggggctccaagttttacggcctaacccccgtcttttctgtgaacacaaagttgcgcccccacaatagctcaggtcccaaatgcattaaggcctagcgcccttcgggcacggtccctttttatacaaaacgccccctcgaaacctgggggaaaaaaacctgggcaaaaacactttgggggaatatccttctggggggagaaggaggaaacctcctctatacactttcttaagtggggggcgtgtgtggggaaacccccagtaaccttgtgtgcgcgtgactagcacgaccgcgacaacactcctccatttctcccccggcgagcccccattatctttccttgtaacacganaaccgcctccttcacctcacaatacctcgagggggtgcgggcgtggaaaacattaacacctaaccaatgaataggcagaggcccgcgcaagcaaaacttatccgggnttnncgctacagcagtaaaacaanactaggattgntgtagggggggcatatacncatcgntcataacccgttgcccctggagaaaagcggcnnatccaatttatccacacacaaaagatccgaattctaagataaatttttggtgtgagngccaacccaacgcatccaggttcgacacttcactccgcttgntgccaccattatgtgtagtaacattncggggtgacaacgcacactaaacacgcctacttattctttattaacgcccgcggtatagggccggcgccgggccaaggaggaagactcccaccgggtaaagaccacaatttaacagcaagtcg

SEQ ID NO: 79172 - DNA, 682 bp, Homo Sapiens
tttaaaaattagaataattttatttttatacattatatacatatttatacattcacatgacattttatgtacatggattaggtagttcttgacaatgttatatgtttactgaaaaatgactttttataaaaataaagcttggaaaataacaaatcaatttagaagactaaaattatccatggatacacagaacagatataggttttcataattaagaacagtattttcaccctctcgtacctctgaccacctctttcctaggcagtcagtatagggcagaaaattataaattaatcaaggatagtgcttcaaggtactggttcccagactgtgatggacataaagaaagagcaatagacaaacaagcattttagtatttgccaaagccttgcgtcttcctccacccagaatggagatgtcctgcccactgaaaaaatgatgggcctcctgttgccagcttctctgcagtgatctcaatccctttgcctcacaagagcatcagaaaggtcccctgcccttccagctttagattcctttcattggctacatgtagaagacagacatgggccaggggtatagagaggctctacgccagaggtgtccaatcttttggcgtccctgggccacactggaagaagaattgggccacacaaaaagtacactaacaacagctaatgagctt

SEQ ID NO: 79173 - DNA, 726 bp, Homo Sapiens
  misc_feature (41)..(41): n is a, c, g, or t
tttctccagatgagttgggccttccattatctaatttattntacttaggaagaattccaggtttggaaactcaagactcagctgattctccctgaaataatctaatcacctgcttttcccttccctgccttagcctttcagcaatggattggtgactgtgatggttccccagctgcggagggaaaacagccttctcctgtggaatgtctttgacttgaacaccccagtccacaccttcgtggggcatgatgatgtggtcctggagttccagtggaggaagcagaaggaaggtgagtgggagaggcctgctgcccactttccttctgagctctggtgacagcggtgccagtcagtgttgccatggagtccagtaaagaagacatagagagagctgggctttaggaaccagagagccagggctgttgccacctttcgtcataggtgagtaaagggactatataaggctgctgttactcttccaaattctgtcctcttccacaattgtcagcgtagtctctcttgcttggaagagatatgctccagtaagagacggaagatagagatttgctgttggattgtttctgggactgaaagactctgggctcagaagtccagggcatttgccccttgccactctgttgatgagggagacccaaggtggtctttagtactgcctactcacataccctcagttgtcttcacaagcatgtagtgctctgtctcaaa

SEQ ID NO: 79174 - DNA, 948 bp, Homo Sapiens
  misc_feature (241)..(241): n is a, c, g, or t
ctggagttttcattcttctttactaatccatctagacaatgatgcagaacagcaaggagaatttgggaacccagacccccaccttcagcagcttagctttcatggtggatgtgatggttgtggggttaataaactggaaggaagaatattgaggtatttccgaggctggcggtaatcccagaacttcacagaattgtcttgactggaggtagcaagaatgtgctcgctgtctgggtgccantccaggccatggattttggagaggtgggcggctagatattccactgctgtactgggtttcctcttatcccatatccgcacatcgccgtcatggctggtggcaaggcagatagcattttttttattccatttgacctgggaggcacccgcaacagcagacagtgcaacagtaggtttccttgtgtctttgatatcccaaatgtagatgtaggtgtccacagagctggtaaccaggaggtcaggctcaaacaccgcccagtccaagtcgctgatgacacgagtgtggccttgtaaggttgtgccaaacttccccactgccgtctttccacttgtaaaggtctactcgttggttactcgaagccgcaaaatagtgtgcaaagctgtcatgaggattccactgcacagctccaatgtcccatttgctctggcgagagatctttcggtgaccttcagaaaggggcatctagattgacgatgtataagaatctgcggccagaaagcactgcatgctgcccaagacagtccacagacatcgcagttgcctgggagtcacggaactctacaaccacgttttcgctgctccatcgcgccgccatctcccccacccaggccgccgcggccccaggacggcgccctcccaccccgccgtccccagtatcccgggaccgtgcgccccacacagccagagaatcagccccgacacgcccc

SEQ ID NO: 79175 - DNA, 1365 bp, Homo Sapiens
ggcgatgtgcggatatgggataagaggaaacccagtacagcagtggaatatctagccgcccacctctccaaaatccatggcctggactgtcacccagacagcgagcacattcttgctacctccagtcaagacaattctgtgaagttctgggattaccgccagcctcggaaatacctcaatattcttccttgccaggtgcctgtctggaaggccagatacacacctttcagcaatggattggtgactgtgatggttccccagctgcggagggaaaacagccttctcctgtggaatgtctttgacttgaacaccccagtccacaccttcgtggggcatgatgatgtggtcctggagttccagtggaggaagcagaaggaagggtccaaggactatcaactggtgacgtggtcccgggatcagaccttgagaatgtggcgggtggattcccagatgcagaggctttgtgcaaatgacatattagatggtgttgatgagttcattgagagtatttcccttctgccggaacctgagaagaccctgcacactgaagatacagatcaccagcacactgcaagccatggggaggaagaagccctaaaagaagatccccctagaaatctcctggaagagaggaaatcagatcaactggggctgcctcagaccttgcagcaggaattctccctgatcaatgtgcaaatccggaatgtcaatgtggagatggatgcggcagacaggagctgcacagtgtctgtgcactgcagcaaccatcgtgtcaagatgctggtgaagttccctgcacagtacccaaacaacgccgccccttccttccagtttattaaccccacaaccatcacatccaccatgaaagctaagctgctgaaggtgggggtctgggttcccaaattctccttgctgttctgcatcattgtctagatggattagtaaagaagaatgaaaactccagtagatgagattcggaagtcatctgtttcgtacacacactagtattagcaacgtaacctctgaacctgccatttactttgtgcagaaaacatcagagcagtggttcttaaccttttttgggtcatagacttcctttgaattctaatgaaaattatggacccttcctcagaaaaatctgcacaatgattgcatatgatttgagaaatattgcctgtaaatatgtgaattgcatagaatctgcccacagatctcattaatactatgcattcatctccggttaggagatttgcaatccaatttcatttagcagcccaggttaggagccctgcagtccaatttcatttacctgaaaacaacaagcaagatgtattctgaagctaaaagatattttataattagaaa

SEQ ID NO: 79176 - DNA, 995 bp, Homo Sapiens
cgagtgcaagcctcactcccagtccctggcaggcagccctgttcgagaagacgcggctactctgtggggcgacgctcatcgcccccagatggctcctgacagcagcccactgcctcaagccccgctacatagttcacctggggcagcacaacctccagaaggaggagggctgtgagcagaccctggacagccactgagtccttcccccaccccggcttcaacaacagcctccccaacaaagaccaccgcaatgacatcatgctggtgaagatggcatcgccagtctcctatcacctgggctgtgcgacccctcaccctctcctcacgctgtgtcactgctggcaccagctgcctcatttccggctggggcagcacgtccagcccccagttacgcctgcctcacaccttgcgatgcgccaacatcaccatcattgagcaccagaagtgtgagaacgcctaccccggcaacatcacagacaccatggtgtgtgccagcgtgcaggaagggggcaaggactcctgccagggtgactccgggggccctctggtctgtaaccagtctcttcaaggcattatctcctggggccaggatccgtgtgcgatcacccgaaagcctggtgtctacacgaaagtctgcaaatatgtggactggatccaggagacgatgaagaacaattagactggacccacccaccacagcccatcaccctccatttccacttggtgtttggttcctgttcactctgttaataagaaaccctaagccaagaccctctacgaacattctttgggcctcctggactacaggagatgctgtcacttaataatcaacctggggttcgaaatcagtgagacctggattcaaattctgccttgaaatattgtgactctgggaatgacaacacctggtttgttctctgttgtatccccagccccaaagacagctcctggccatatatcaaggtttcaataaatatttgctaaatgaaaaaaaa

SEQ ID NO: 79177 - DNA, 710 bp, Homo Sapiens
  misc_feature (42)..(42): n is a, c, g, or t
  misc_feature (49)..(49): n is a, c, g, or t
  misc_feature (117)..(117): n is a, c, g, or t
gcccacatcttatactccaatgagtgtgtttgtgagttttantcctgtntgaattttgatgtcgtccaggcgtcctgggatcagggtagacacgtggagtgctggtgctgagctgtntgagaagctctgtgtgggtgtttctgtggtcaggtaggctgggctgtgaacagcactgctccacatggtgtcggctcacagagccaccgcaactctgcccagcgggagtgacaccactgatgccacagaagcctttatcgttaggggcaaaagcagacatctctggtagcaggagctcagtgtggtgctcttcagccacgcagaaagctcacgtgcctgcagggccaggaaagggaaatgatcgtttcttttgtattaggaaaaacaagacttagacttcccgagttgtgcagagtgacgtctgtactttttatacttagaacatttggtcaagttttgtaaccaaaccttagggaattgagagggaaactttatggtacgtttaccttttttcctttttatatgaattattttgtacaaagttcagagagcggtacctttcctactgtcttttctttgactccatggaggaatttgtaacgatcggtgtgacctgaaagggtttgtgatacagcggtcactattttctcttaacacataggaaaaaagttcagacatcgctacaataaatgtgctttatttgatccaccaaa

SEQ ID NO: 79178 - DNA, 1033 bp, Homo Sapiens
tgtttttttaataccttcttgaaggtgtggtgcttatttccctggcactatgtgcagatgccgtcattggaaatgttcaagagaaagctatgaaacttcataatgcttctaattctgaaatggtattgtattcgtattcaattggttttgtatacattttactgggattgacatgcactagtggattaggccctgcagtaacattttgtgcaaagaatccagttcggacctatggttatgcgttccttttttccctcactggatattttggaatctcctttgttctggctttgattaaaatttttggtgcacttattgctgtaacagtgacaacaggaagaaaagcaatgaccattgtactttcgtttatattctttgctaaaccattcacgtttcagtatgtatggtctggtttgttagttgtccttggtatatttcttaatgtttacagcaaaaatatggataaaataagactaccatcactgtatgatttgataaacaaatcagtggaagcaagaaagtcaaggacgctggcacagactgtatagacagtgattgtcctatttaaaatagaattttaagggaacaatcatcaattaattaactttccaaagggactgataaaaaccaaaggatctggaggcattgctatcccatttgtggacagatttcatatgaagttgttttgcggtgtcagccttttcttcagagcatttgtttgactgacttccaaagcaatcaagagagccacgtctagcagactttacaataaaatgtcaatatgaaggactgtaattcctagcagtttattgagaatttcactggaaatggaccatgtgttgcaagactaattggctataattatatcctatcaaagaaatcgatacgtaatagcagattgttttatattcattccattttgatggtgttatttaaattgattctctgttataagagtaaactgatgagttgaagtctggagagaataacattcattataaataaaattattctgtgatcttttttcaaaaaa

SEQ ID NO: 79179 - DNA, 1518 bp, Homo Sapiens
  misc_feature (65)..(65): n is a, c, g, or t
  misc_feature (96)..(96): n is a, c, g, or t
  misc_feature (124)..(124): n is a, c, g, or t
  misc_feature (138)..(139): n is a, c, g, or t
  misc_feature (148)..(237): n is a, c, g, or t
  misc_feature (241)..(241): n is a, c, g, or t
  misc_feature (247)..(247): n is a, c, g, or t
  misc_feature (253)..(253): n is a, c, g, or t
tcataggagagcgaggcccatacgcaacgctctccgcggttgcgatcatatgcactgcagacagnttccgatggaagcggcatgagcgcacgcaantatgtgagtagctcactcatagcacccnccagcttacacttnnatgctccgnnnnnnnnnnnnnnnnnnnnnnnnnnnnnnnnnnnnnnnnnnnnnnnnnnnnnnnnnnnnnnnnnnnnnnnnnnnnnnnnnnnnnnnnnnaatntggccntcgagnccaggaattcggcacgagggtattaagccggataggtaagcacggtgacaatggcaatagaaatctaatggaaaacgattgaatgacaactacaccaaagtttcatggatgaaactcaccccagaaacttagtgttcaaatcagagtgatacacaattcaaaatgtgattttaaacttctggaaatatgtgtgtttgtgaagatccaaatccaattcagcaacctccatcaggcagaaaccttcttcaatcctcacatgaggaactggttcacagtgtacacagcatggagccattagtgacgttatccaaaggatgagacaagacaaaagttactgtttaataaaaggaaaattaggaacaggaatgctctttaaactcaggaagatcttttggggtgtcaaactggacagcacagaatcattagaaaaattagcttggcgtgagaagagacattgaggtcttctctgtaaaatttacttagatacttgtgaataggactgaaatttatattttgggcactctttacctcagattcagagttcctaggattatttaaaattcatatgctggatgttgtcaagtataaacaataagaaaactgcaacttcaacttaaaaggcactgctgtatgtgcaccctatattttgacctgtcgttaggtactgttgaatatttttatctgtaagcatttatgaagtgcaaaataaacatgttattatatagaagcgtctgctgcttagttttaatcaccagctacgtttctgcagggcctttatgtcgttttgttctacatttttttctgaatacagtttcagaacttcaaagtcacatcaagtaactagaatttgaggtagaaaaaagctggatgtaagttgtaaataggaggttgacatggaatatgaacagtttcattagtagaacaaaagggcatggagtaaaaatgctaattttgcataaatttttaaaactctagggtctcagaaaatatagcatggacttaaagtctagatgtgttttgttgacatttaaatatgaatagattgatgatttaatgtattggattttttcttaattatgaagtattatttaggtatactaataacaaaatggagacgtgtgaagaaaaatattaatctttcttctccctcagtaccacctgtgaggaaatcagtgttaacagtgtgtacatttttctttactcatgaatatgtatagggttcattttcatatttttaataaaaattggattatattcttttcagt

SEQ ID NO: 79180 - DNA, 1048 bp, Homo Sapiens
  misc_feature (32)..(33): n is a, c, g, or t
  misc_feature (80)..(80): n is a, c, g, or t
ccaggaacgcttgctgatacgattatcgaccnnttaggaattgccctcgagccagatcgcacgagggtgactgatgatcntcccaacctattgtccaccccctggaaagccatgtgccagttgaaagtgctagctacctgagccttgatattcttcatgctgccgcacatctccacccttgcccagaacaggttctgaaaaccacttctctaccttcaccaccaccactgcccatcttgatctctttgagggttttcccatttcacttgatcttatttgtgtgtatcccttcctgcactttgtcaagagagtcctccagtttctatccaggaatgttcacatccaaagggttggacccacggatcattctgaatcttcctgcccctcctcactgcttaaccctgagaaccacaaatataatggaagcagttccccccaccctcaccccatctctttaagctcatcctagcaagacctctagagaccctagagactcgactttagtccttccccgccatggcacagtggggaaggtgtcaatggggagtgtcacggacaggaggtaggatcctgccgctcgcgtcttagtgtttctccctcaagactttccttctgttttgttgtcttgtgcagtattttacagcccctcttgtgtttttctttatttctcgtacacacacgcagttttaagggtgatgtgtgtataattaaaaggacccttggcccatactttcctaattctttagggactgggattgggtttgactgaaatatgttttggtggggatgggacggtggacttccattctccctaaactggagttttggtcggtaatcaaaactaaaagaaacctctgggagactggaaacctgattggagcactgaggaacaagggaatgaaaaggcagactctctgaacgtttgatgaaatggactcttgtgaaaattaacagtgaatattcactgttgcactgtacgaagtctctgaaatgtaattaaaagtttttattgagcccccgacctcgtgccgcctcttgccgaattctt

SEQ ID NO: 79181 - DNA, 915 bp, Homo Sapiens
  misc_feature (43)..(77): n is a, c, g, or t
gaaacgacgagcgcagcgagtttgtgagcgaggaagcggccgnnnnnnnnnnnnnnnnnnnnnnnnnnnnnnnnnnncagtcgacggtaccggacatatgcccgggaattcggccattacggccggggtcggtgtctactgtaacaccaccagatttaacaatgttaatgttacgccatatttgtttcaaatatttttgtaatattgaacattatggatagagttaaagcttgtttgtatccatcccgttgtttacattctccatcccctacataggtaaccactattctgaagttgatgtgtattctttgtgtacatgcttttataccttttctgcatatgtatgtatccataaataatatgtagtctgttgtgtgtttttaaactttacacagtggatgtcgtactcttacatgtattctgcagcttgcatttttcacacattcattttgaatattcgttcatgttaacaatgtagatctagttttctttttaaactctgtatagtattcttatgtatgacatacacttgttgttatacatttgaattatttccaggtattcttttttgtgtgtggtatgtaaagtcacgatggcagagatttttgaaggaagataaattattttaggattacatttacagcgtcagtgcccacttcaaggtttatgaaaatttggatgcccagaaacaagtacttcgtagttggaggaataaaattctgtctgttgtgcagcttattattacaaagtcttactgttagaacaattatgtatataacacattcttaatcagttatttgaaatactttaaaattttcaatattcaattcatagcttttttctctgtttagaaaatattgtgtgtcttttttgatggagaagcaaattaaacatttgtcctgaattgaaaacctg

SEQ ID NO: 79182 - DNA, 827 bp, Homo Sapiens
  misc_feature (702)..(702): n is a, c, g, or t
  misc_feature (706)..(706): n is a, c, g, or t
  misc_feature (723)..(723): n is a, c, g, or t
  misc_feature (743)..(743): n is a, c, g, or t
  misc_feature (771)..(771): n is a, c, g, or t
  misc_feature (787)..(788): n is a, c, g, or t
gcaatacaaataaaatttttatatttattttttattcctacagagaagaagaaacacattcgtacaagggttcatttcccagtggttaaatgtactgagaaaaatacattaacaaagtaactcaaggatacaactgctgtgaattcaaaagacagactactacaggaaaagtgagtgcacttactttcatattttgcagctgttaatagaagtcttaaacatttaaaatttaactaattcacacaacctccaccaagtatcagtaaataaacttctaaacaataaaaatggataaacatggtcaggttgttaggttaagagctaaaaatttcattttgcttccatggttgcaaccatgagtcttaaggccttcaaagcataaacatcacagaacacctatcacaaaccacaaaccaaccacaggaaaaccctttttatactgtgtatcttctgtatttcattaaacctaataagccatcagttgtaagatgcatcctaattcagagatgtcacaaagtgaaataagtatctctggatcaataaaatatggtatgtatatatacccgagatatgagaggaaactatttaccagtttgaattacttccatactattgtgccaaacaacaattaagtgtcaaaacattgaaattttatgtaggtaagctttttattattgttttctttacaggaacaataatcanacanatcttgaaccaatctantaacagaaaactgttatgtnaattatatctatttttgcaatacatcanatactgtattgatgannataatagatacaaaaacatatacatcattctatgttgct

SEQ ID NO: 79183 - DNA, 1495 bp, Homo Sapiens
aaaattagacacaaaaaatttatgcaaaattcaaactgtatataattcacatttatgcttctaaacaaatagaagctcacatctgtactacttttacaatttacaaagtgcttttatatacattttctcatttgctattcatgacagacacgtgagacaaatattcttattttacagatggaaatagacccagacattattcagtactttaaccactaatagtggaaccctgagactttagatctgcaaaggggtttaataatgcaaatatcacatatatttccatttttaacaccatatttaagttttccattttcttaatagaaaatgataaaaaatgttttccccaatataataatacaaatggaaaatattatagacagtcatatactaacccaatgaccaagattcaccagaagcaaaacctatttggaggggtcctatattgttacatatatacagggcaccagcaccagaaccacatttagactaatactttttatttctaattaaaagaaaacaatgcagggcactcctgcagcctgcaagtctaactgtacatacgtatgtgtcagactatgcaggtggccaagaagaatgcaaagagatattttatccaaatttggagtttagggcctgattgtcctagcttaagcccataggaacctgacaactcgttcatacctctcatctttagtcatagtttctccttctccatccccttttctccgtaactaccctgtgccatttagactggaaattctaacaggtagctttttctttctgaattatctttactactgtataatttttattttcagaatattccttatttctacatctcgaagacatttctttatagtagatgggggagctagagcttacattcactgccagaaaagggtcagttccagtgttaatttcccagcaaacacctgagagaaaaactgaacagaaaaagaatagtgataggtggcagagcagtgacacctgtgcccagaaagccgcactgcaattgtctaatatttgaggctctcctttgttataactctgccaatttaaactagaaaattctggctgcttgaaaattcaaagcagatcaatacatttaaatcaccggttcaaaaaatcactctttttcatgttataatgtttttattgcaattgaggatgttttcaataagtatcttgagcttgaggccctggctaagtattccttttgtactagaaatcagatttctctggcacaattccattgcctgcaatggtctttatcaaaactacaaaagccagcacactatttcaatatgtattcagttgttcatatctaaatacctcattagctatgaaacaaaccaaatataaatgctgaatatacagtacatagcaacagattcttcacagaagaaaacaatgaaagactaattttctacaatatgttacctgttcattagttcttcaataacatcggacgcgtggtcgacgattcccggga

SEQ ID NO: 79184 - DNA, 1297 bp, Homo Sapiens
gtgagctggaaggaacagatttaatatctaggggctgggtatccccacatcactcatttggggggtcaagggacccgggcaatatagtattctgctcagtgtctggagatcatctacccaggctggggcttctgggacaggcgaggacccacggaccctggaagagctggtccagggactgaactcccggcatctttacagagcagagcatgatcacattcctgccgctgctgctggggctcagcctgggctgcacaggagcaggtggcttcgtggcccatgtggaaagcacctgtctgttggatgatgctgggactccaaaggatttcacatactgcatctccttcaacaaggatctgctgacctgctgggatccagaggagaataagatggccccttgcgaatttggggtgctgaatagcttggcgaatgtcctctcacagcacctcaaccaaaaagacaccctgatgcagcgcttgcgcaatgggcttcagaattgtgccacacacacccagcccttctggggatcactgaccaacaggacacggccaccatctgtgcaagtagccaaaaccactccttttaacacgagggagcctgtgatgctggcctgctatgtgtggggcttctatccagcagaagtgactatcacgtggaggaagaacgggaagcttgtcatgcctcacagcagtgcgcacaagactgcccagcccaatggagactggacataccagaccctctcccatttagccttaaccccctcttacggggacactaacacctgtgtggtagagcacattggggctcctgagcccatccttcgggactggacacctgggctgtcccccatgcagaccctgaaggtttctgtgtctgcagtgactctgggcctgggcctcatcatcttctctcttggtgtgatcagctggcggagagctggccactctagatggcacatttcctagaggcagaatcctacaacttccactccaagtgagaaggagattcaaactcaatgatgctaccatgcctctccaacatcttcaaccccctgacattatcttggatcctatggtttctccatccaattctttgaatttcccagtctcccctatgtaaaacttagcaacttgggggacctcattcctgggactatgctgtaaccaaattattgtccaaggctatatttctgggatgaatataatctgaggaagggagttaaagaccctcctggggctctcagtgtgccatagaggacagcaactggttattgtttcagagaaataaactttggtgg

SEQ ID NO: 79185 - DNA, 584 bp, Homo Sapiens
taacccccttcttagcggaactttacacctgtgtgcaagagcacttgggcctcttcagcccatctttggggattggacactgcgttgtcccccatgcagaccttgaaggtttctgtgtctgcagtgactctgggcctgggcctcatcatcttctctcttggtgtgatcagctggcggagagctggccactctagttacactcctcttcctgggtccaattattcagaaggatggcacatttcctagaggcagaatcctacaacttccactccaagtgagaaggagattcaaactcaatgatgctaccatgcctctccaacatcttcaaccccctgacattatcttggatcctatggtttctccatccaattctttgaatttcccagtctcccctatgtaaaacttagcaacttgggggacctcattcctgggactatgctgtaaccaaattattgtccaaggctatatttctgggatgaatataatctgaggaagggagttaaagaccctcctggggctctcagtgtgccatagaggacagcaactggtgattgtttcagagaaataaactttggtggaaataa

SEQ ID NO: 79186 - DNA, 1023 bp, Homo Sapiens
  misc_feature (23)..(23): n is a, c, g, or t
  misc_feature (38)..(38): n is a, c, g, or t
  misc_feature (85)..(85): n is a, c, g, or t
  misc_feature (100)..(100): n is a, c, g, or t
  misc_feature (123)..(123): n is a, c, g, or t
  misc_feature (151)..(151): n is a, c, g, or t
  misc_feature (160)..(160): n is a, c, g, or t
  misc_feature (196)..(196): n is a, c, g, or t
  misc_feature (201)..(202): n is a, c, g, or t
  misc_feature (220)..(220): n is a, c, g, or t
  misc_feature (228)..(228): n is a, c, g, or t
  misc_feature (236)..(236): n is a, c, g, or t
  misc_feature (267)..(267): n is a, c, g, or t
tgaagactgggtaatatagtatntgaggatatagctcntgaagtacattactcactacagtacaccctacatgctgagggagttntgcaagtaaattttntccagttgactctgtcactgtangagattggaacactctcccaaggtgatntcttttctnaagtgactgtgtcaaatgttgcagtagatggcagcntcagnnagaagaatttaaactctntgtctcantgaaagtntggttaaagaacttgaacatatttctaaatntgatatattctctgatgatccctttgcacagaactatgcttatctcatgtttgtcctccataaacaaatggccatttttttcttcttggttcccatccctttaaaaagagtggaacataggagcacttccaagggagtggcttttcttgaaaattaaaattgtttaccaaaacagtattttgaagcaagatcatatttttgtctgtattcactttattatttgaacatgtccaaattaggacaaagcatttctgttagctgcttctcagtgtgactgacaacccaaaacatatatacagattgttggcatttgcaaaaggaagcatcaatagtggacccagaggcagtgcataaaaccttaggatagattcctaagggacatgcccaacagagttttaaaatggatgttttcatgatgacaacagaatcatagatttagatttttcaccttgtaagtttggatcaaattttgctggttctttggataatggagttcttgtgttaacaaattacgtgctatatgattttttgttacattgttacaagtgttaatgacattttcattaatggatgaaaacttcagggcttcttttctgtatataacaaattaagtctgtacatatttttgtaccttttatgtaaattttgcacagaaatttttggcataagtttattttctttcagtttagttcagtgcatgcactaataaaactggttgtttaatttaaaaggaatatataagactttacccatgtt

SEQ ID NO: 79187 - DNA, 1289 bp, Homo Sapiens
cggtccggaattcccgggatatcgggttctttcccaaagtgcttacttggaaagagtgtggctgctggactcttttcgaaatgcccctctgagtcaggagcctggtggggacaagatggaggatgtccacagaggctgacctgtgggggaaaagaagtgctcaggtaaggttgtctcctctcctgtcctaaaaaaatccatgcttgcaggagagggttggtgcctgctcagtttctgtcgagggaatgggagtctcctcggctccctcctgggccctctgcttcttggaggccgaccgctggagactgcggctcctgtgcttggatctttgacatctgtcagtcactggaggctagagaagttgactttaccttggctttctgtgggttcccgatgggcttggaagtgccgtctacttcctaagcatcctgtctaaagctttgtggcaccctcagtgcaacctcagaacagacaaatcatgaatgagctggaactttgcaagaatattcatattataaatgtctcatctgatggaggaacgtgtgcatttagagagagggagagttttcaaggtttatggcaactttgtggaggacctgggtaactcttacccttggccaaaggaagaggttttcctgtctggcttctgaggttggagggggcacttagcagtgaaccttaagtctgggtacatgtaaccctgctgaggggctgtgcaggccgctcctacggtcctttggcctgaggcagggcgggaggcatgcaagccagtgggggaaaacccctctgaagctgggcagccctctacctgggccccgggagccgtgctccttggaacgcaaagggccgaggagcatctggttttcatggcaaagctctactccagagctcctttaacatctgctaattaagtgcaataaatttttctagaaaatggcaaagatgacttccaggtggatattgctctcttacggtgttggggatgccagaacaccacttggttttatttttctaagtgcatgtgatgtgatagagtgtgtggggctctgtgtccttccctgggagctggcattccagcgggcccctctctttacctttgttgggggaaggaggcaagagagaaattccttcttcccagccagagagggcagaagcagaccgtagcccattggccttatgtgcgtgtgtgcgtgcgagtgtgtcactgctggtgggccggagtgatgtggtgggagggaagccgggaatgtatccttttcagacaaaattaaatattttgaaatgagaaa

SEQ ID NO: 79188 - DNA, 1080 bp, Homo Sapiens
  misc_feature (17)..(17): n is a, c, g, or t
  misc_feature (60)..(60): n is a, c, g, or t
  misc_feature (535)..(549): n is a, c, g, or t
  misc_feature (691)..(702): n is a, c, g, or t
ctggtctcagatgttancggactgacatggaacatctctctccagagcatgaggttatgntaagttccatgataaaagaatgtgaacaaaaagttgaaaacaagaccgtccaagagcctcaaggctcaatgtcaattgctgcaagcttagtgagtgaagatacaaagaccaagtttttgaacaaaatgggccagttgacaacatcaggtgccatgttggccaatgtatttcagagaaagaagtagaagcaggaaagaagcccccagtaaacactaagatggacctcaagccgactggttccttgtacttgaagtacttgccctttttgtttcctcagttttatgttcttgcaatataattttatcctaacctccaaagatatttgcactgcttttaattactgctgtatatttgttgattttggagtcacaactgtggtgatagaaaattgagttgatggtctgtaccaagtcccttgtatatgttcgtgtctttcagaataatttttatataaatatatatatagtgaagaagnnnnnnnnnnnnnnnggatgggatattcgcaaatatctgtattatacactaagctattacaatggtacttaaaataatgtaaatttgaagtcattgttataaaataataaagtggagattacttaagtatttaaattatgaaagaataatgcagacnnnnnnnnnnnncttaactgactagaaagagccaccagcattactctgtgccttttggacatcagtttgtgtgttctgtaggaattgtgtgcattccattcacacagtatttctttaggatgctgtgatgatttgaattacaaatcctacagtcaatagctaaagacgaaaccttcatttcagaactctcatgaatattctttaagtgctatttaaacctccccagcacttagatgcatataatggacttacctgaggaaagacagcacataggcatggggagaggtaaccaaggtgaattttacaaactggtgtatagtagatttaaatgactcaaaatagatgtaactgagaagagttaataattgtgagatttttcccaattgagat

SEQ ID NO: 79189 - DNA, 1022 bp, Homo Sapiens
cactgtgtggggctggcggccggcgggagaggcggccggcctggactggcccgagagggatcccggttcccagaacagacctaggaggcggcctcgagggcggacggcagggagggccagcatgccccgactgctgcaccccgccctgccgctgctcctgggcgccagcgctgaccttccgggcgctccggcgcgcgctctgtcgcctgcccctacccgtgcacgtgcgcgccgaccccctgcgcacctggcgctggcacaacctgctcgtctccttcgctcactccattgtgtcggggatctgggcactgctgtgtgtatggcagactcctgacatgttagtggagattgagacggcgtggtcactttctggctatttgctcgtttgcttctctgcggggtatttcatccacgatacggtggacatcgtggctagcggacagacgcgagcctcttgggaataccttgtccatcacgtcatggccatgggtgccttcttctccggcatcttttggagcagctttgtcggtgggggtgtcttaacactactggtggaagtcagcaacatcttcctcaccattcgcatgatgatgaaaatcagtaatgcccaggatcatctcctctaccgggttaacaagtatgtgaacctggtcatgtactttctcttccgcctggcccctcaggcctacctcacccatttcttcttgcgttatgtgaaccagaggaccctgggcaccttcctgctgggtatcctgctcatgctggacgtgatgatcataatctacttttcccgcctcctccgctctgacttctgccctgagcatgtccccaagaagcaacacaaagacaagttcttgactgagtgaggggcacagagcctgggacaacaaaaacggacaaggccagaaacagcttcatatggacactgggacttagccccaagcctgggtgtcctctgaggccagcctctccaccttctgagcctgcgcccacactattgaaaacactaatgaaagtaaaaa

SEQ ID NO: 79190 - DNA, 764 bp, Homo Sapiens
agaagacggcggcatgagcagcgtgactcaggagggcagacaagcctctatccggctgtggaggtcacgtctgggccgggtgatgtactccatggcaaactgtctgctcctgatgaaggattatgtgctggccgtggaggcgtatcattcggttatcaagtattacccagagcaagagccccagctgctcagcggcatcggccggatttccctcgcagattggagacataaaaacagctgaaaagtattttcaagacgttgagaaagtaacacagaaattagatggactacagggtaaaatcatggttttgatgaacagcgcgttccttcacctcgggcagaataactttgcagaagcccacaggttcttcacagagatcttaaggatggatccaagaaacgcagtggccaacaacaacgctgccgtgtgtctgctctacctgggcaagctcaaggactccctgcggcagctggaggccatggtccagcaggaccccaggcactacctgcacgagagcgtgctcttcaacctgaccaccatgtacgagctggagtcctcacggagcatgcagaagaaacaggccctgctggaggctgtcgccggcaaggagggggacagcttcaacacacagtgcctcaagctggcctagctgcctccaacacactacgtcagaaggacccgggtctttgaaactgtgtcttgaagctaatgtattaatgtgacatggaggaactcaataaaactcctgcttcactggtgaaaa

SEQ ID NO: 79191 - DNA, 655 bp, Homo Sapiens
gtgagcccccaaacagcaaacactttaatcaacaactcttacctgggcacaaaagactgagtacagggtttggtttaaaggggattagacatcagtgactcaacacagacaacaaaaagtgttcatttctttaaggatgcttcaattgtctcagtgagtgagctcttcatgattctccttaagctttcattaatttcccataagacagtaccttaaaaatatctctgttcatgcagtgagtatttcttcagagggtagcttggtctttcaatgatataatttacttcagaggtagaatcttccttgttttggtgcagctgtgctctgtgggatgtcagaagactgcataccctctcatggatattcttccatgtggactgagaaccaggatggaacctttctctgagaaggggctgatccaaggggccaggagaggtggaatgctggtaggtggcaaatgaagctttcccgtggaaatcagcatccccttgtttactggatgaagactttccaaactgacttgaatctaaacatgatgatgagtcactccttaaaacaatccgttcatctggctctttgataacctttacgttagctgcaaggctgtcaagagaagaactcttctcgttggaaacggaaagtctgaaaacttaga

SEQ ID NO: 79192 - DNA, 690 bp, Homo Sapiens
  misc_feature (16)..(16): n is a, c, g, or t
  misc_feature (58)..(58): n is a, c, g, or t
gtacgccaggcgagcncagggcacagatgctgagacagcctctccttctcagtgcagngacgtcacccctgccaggcaagcccagggcacagatgccaggatggttctccctctcagtgcgaggcttcacccctgccaggcaagcccagggcatagatgttgagacagcctctccctctccagtgcagggacgtcacccctgccaggcaagcccagggcacagaggccgggacggcctctccctctcagtgtgaggcttcacccatgctaggcaagcccagggcacagatgccgggatggcccctccctctcagtgcgggaacgtcacccctgccaggcaagcccagggcacagatgctgcgatggcctcttcctcttaagtgtggggcctcacccctgcttttctttctttttttgtattgtcaaaattgtatttccatattgaagcagcttgagtttctactgaaaatgagcccgaattatttcactattactgtaaagggttcatcttactctggcattctgagaatcagactgaaagtttaatttctgcagttccctcacattcagattctttctttgatgttataacacaaagtcattcctactcaaatgtaataaaattgaggctccacggaggcccgtgtccacatcagctgcagtcccgctcagacagacggcctgccccac

SEQ ID NO: 79193 - DNA, 724 bp, Homo Sapiens
  misc_feature (404)..(421): n is a, c, g, or t
tagaatctcactgatagcctgcaagaaacagatgcagtgcctgcttccgtatcagtccaaggagccctcgtgtttgccacctttacctttgaacctccccctgcctccctgcctgtgtccgcttttgcagctcaatgcagccatgacaaggaaagaaaagacaaaggaaggccagagagccgcgcagttctctgcaggtgcagatgcaggcagtggaggtggcctgagcaggcagaaggacaccaagcgccctatgttgcttgtcattcatgacgtggtcttggagcttctgactagttcagactgccacgccaaccccagaaaataccccacatgccagaaaagtgaagtcctaggtgtttccatctatgtttcaatctgtccatctaccaggcctcgcgatnnnnnnnnnnnnnnnnnncgctgccaggttttagaagcagttctggtctcaaaaccatcaggatcctgccaccagggttcttttgaaatagtaccacatgtaaaagggaatttggctttcacttcatctaatcactgaattgtcaggctttgattgataattgtagaaataagtagccttctgttgtgggaataagttataatcagtattcatctctttgttttttgtcactcttttctctctaattgtgtcatttgtactgtttgaaaaatatttcttctataaaattaaactaacctgccgttaaaagtcatttccagt

SEQ ID NO: 79194 - DNA, 1757 bp, Homo Sapiens
tatgggggagagagtatgaagtcgacggcgcgccgaattcggcacgaggggcactgcagtgggaagctggggaggcctcatctgacagcatcgagctgagccccatcagtaagtatgatgagtacggcttcctgacggtgcccgactatgaggtggaagacctgaagctgctggccaagatccaggcattggagtcacgatcccaccacctgctgggcctcgaggctgtggatcggccgctgagggagcgctgggctgccctgggcgatcttgtgccctcagccgagctcaagcagctactgcgggcaggagtaccccgtgaacaccggcctcgtgtctggaggtggctggtccacctccgtgtccagcacctgcacactccaggctgctaccaggaactgctgagccggggccaggcccgcgaacaccctgctgcccgccagattgagctggacctgaaccggaccttccccaacaacaaacacttcacctgccccacctccagcttccccgacaagctccgccgggtgctgctggccttctcctggcagaaccccaccatcggctactgccagggcctgaacaggctggcggccattgccctgctggtcctagaggaggaggagagcgccttctggtgcctggtggccattgtggagaccatcatgcccgctgattactactgcaacacgctgacggcatcccaggtggaccagcgggtgctccaggacctgctctcggagaagctgcccaggctgatggcccatctggggcagcaccacgtggatctctccctcgtcaccttcaactggttcctcgtggtctttgcggacagtctcattagcaacatcctccttcgggtctgggatgccttcctgtacgaggggacgaaggtggtgtttcgctatgccttggccattttcaagtacaacgagaaggagatcttgaggctacagaatggcctggaaatctaccagtacctgcgcttcttcaccaagaccatctccaacagccggaagctgatgaacatcgccttcaatgacatgaaccccttccgcatgaaacagctgcggcagctgcgcatggtccaccgggagcggctggaggctgagctgcgggagctggagcagcttaaggcagagtacctggagaggcgggcatcccggcgcagagctgtgtccgagggctgtgccagcgaggacgaggtggagggggaagcctgacttggccacctcccctccccaccagccttcctcacccttggctggcagacccactggaggtcaggcacggaccagtggcccagccctgggtgtcccatcaccatgtgaccttggacatgtcccttcccctctctggccctcagtttccccactgggacattgtgtgctgcaaagccattggttgggctacttcttcataggcacttacttacccagggatgccaccctttcgtcacctcttccacagagcactttggcatgtaaacaagcaagagcactgcctctatagggtaacctggaacattctctaggttatatcaatataaaacaatgtaaatggtggaaatcattcataagctttggaacttaaacagttctcagttaccagttgttcctggatgggcccacggtgccagggtgtgccaccaccagcttccagcctagggcatctctggctgctatttctgtgagcgtctgcagggccagccctgcctggttcctgagatgttaactttgtctttctggtagccctaa

SEQ ID NO: 79195 - DNA, 1638 bp, Homo Sapiens
  misc_feature (525)..(525): n is a, c, g, or t
  misc_feature (545)..(545): n is a, c, g, or t
gaccggcccaggtacttgctttccacctgggcagtttctgccttggaggtaggcgcacttcgtcagaagggccttctctttctcagccaccttctcccagatctttgtgacctggtggatctcggagtgagggaagcagtctgggtccggtaagcttccatgtcatccttcaggtgctctatcttcccctgctggctcaggaagtccctgttggcagcgtcggggcgcaaaggagactggtcaggggggtgcgtgaagtcctgggtgaccttctcagagagcttgcagatgacctgctgcttggcgtggttcttgtccataagcagctgcacgtgctgctgtagctcctgcacctgctgctcccgcaggctcgctgtgtgcgccaggctctcccgctcctgctccagggcctccacccgccggcccagctccgcgatctgccgcactttgtgccgcaccagctccagccggtccttgtcctcagccgccgcccaggtatgcgctggacgccccgcttctccctgncggggcggcccccagtgccnttgtgcaggatcttcactagctcccttctgagactttaactccttggtgagcatcagaacctgttgctccaaggctgccactttctcctgggcagttcggttccgtgtgattccttcagaaaagaatgggaaggtgttgttctggcgcttggctttctgagcgaaactgatggtcagagaaggcttgggtgcaggctttggagaatcctctggctctctccctggggtgctggcgtcagaggccaagggctgctcctccctctgaggctccccactctgtggagaatcttcccctggaggttcatggcctgttccctgggcctgcttgttgccacggatgttgtgcattgtgttctgtatttcagtccccaggtgcttgagggaaatattctgaagggcagggaagggctgcaaggcagctgccacgcccactagcccagggggtgttttcacagggcacaggaactcctccagctctgcctcttcttgccctagctcgaggtgcaggacgggcccattcccagccagggcggcatcaggggtggcaggaggtgccggcgggctgttgtggaattcccagcgcttcatctgcagctgctgcagccagtacagcatcgcttgcttggtggcggccttcagggtaataacccggctgggagtcttgatttcgaagatcccctcctcagcgtccgccttacagtcaaacactgcactggagaggtcgatgctgtccaagggattggcatcctgagcggtccgcgagtaatacagctgacatttcctttcgtcgtagaagaaccagcgggatttccagccccggatgggccctttgccgccgaacttacttaaatacccacagagtttcttggggaccgcctccagggaccgggcgcagtcccccgattcttcctccggaggcggcacctgtggatccctggcagactcttcggacccaggggcagaggagctggactccggggcgttctccccagcgccctccatcgctgccagccggagactgcggagggacgaggggtccgcgggaccaccagggacaaatctcgcctcgtgccgaattcgccacccaggcctc

SEQ ID NO: 79196 - DNA, 726 bp, Homo Sapiens
  misc_feature (71)..(71): n is a, c, g, or t
  misc_feature (226)..(226): n is a, c, g, or t
gagcctcatcaatcttggccgagccatcaaaggacaggtcctgatgtcctcggagctagaggaagtcttanacagcatgcttgtgggtaaagtgccagccatgtgggcagccaagtcttacccatcactgaagcctctggggggctacgtggctgacctgctggcccgcctgaccttcttccaggaatggattgacaaaggggccccctgtggtattttggatctnctggattcaacttcacacagtcttttttgactggcgtctctcaaaattatgcccggaaatataccatcccccattgaccacattggatttgagtttgaggtaaccccacaagaaacagtgatggagaataaccccgaagatggggcctacatcaaagggctcttcttagaaggtgcccgttgggacaggaaaacgatgcagattggggaatctctccccaaaatcctctatgacccactgcccatcatttggctgaaacctggggagagcgcaatgtttctgcatcaggacatctatgtgtgtccagtctacaaaacaagtgcccgcagaggaaccctctccaccacaggccactctaccaactatgtcctctccattgagcttccaacagacatgccccagaagcactggataaaccgaggggtggcctcactgtgccagctggataactgatggcatttgtctcaagacagaaaataaaaagcatttcattcttaaaa

SEQ ID NO: 79197 - DNA, 521 bp, Homo Sapiens
acagtgtgtatttgggaggctgtatgcctagctaaaaatcaggaggcttattactaactaagaaggaagaatgtgatactgaaggtcaactggcaggttttgccacagtgtaaaaatcaggatttcatagatatacagaatttttgaataagtgactttaaaatcattccatacaaatccctctttttcagatgagggaagagaaacacagaagttaagtgatcagttatgatcatgtattggtaggagcatgattagaaaccaagtttcttgggccgcagtttcatattcttgatgctcaactaacctatgaaattaaattagggatgatggtttaagaaaacgattcacatggaacccccttaaattagtttatttattacatattttaaaaatttatcctgatgtacttatttaaaccttaagaaccacataatactatataatgcttttctgtacaaatctcaagaaacactttcattcaataaaacaccatgaaaatccttaaatgtgttaaatgg

SEQ ID NO: 79198 - DNA, 691 bp, Homo Sapiens
gaaaaatgtgagggtctgagaggccacgttcctgttcctgagtcatacgacagagtcccagtgacttgggtctgatgtctgtcccacagtgggacatccctgctgcatcccaatgccaccccgtgtcctggggacacccaaatgtgccattctctcagtatcacaagtcggggactgcaggaggctcaggtgccaggtgccttctgatgttcatgccacaagctcttcccactgtctctggctccccagacgatgttccaggaggcgggtgtgccagaaggggccacgtcttgcaaaccaccgcgctgtcctctttgagaaggagtcttactcaggactggggcctgtgcacacattgtcgcctcttttcagcacttagagattccttcctttgtctagtggctgaagccagggctgaagttggcctccaaatctgggccgtctcagaggcggcgcagcctggagttttccatctgtggccaagacccagtttttgggaggaggccctcatgggtcaagccagcctgtaccaggatggggggagggggttcccaacctaggccccagccacccagactcccccacccccactcccttttccactgctctgacctcgggcactgttgaaatatagtttttattgcatttctgccgttttacaaaaatatgacaaaataaattaaaaacaaat

SEQ ID NO: 79199 - DNA, 713 bp, Homo Sapiens
  misc_feature (35)..(35): n is a, c, g, or t
  misc_feature (60)..(60): n is a, c, g, or t
gagcaaagaaaacaatacaccaaatgaaaatgctntgaaagtaaatgaaaacagcgcttntgaaaggctggtatagtatgaccctggagtcagcctttgtgtaacagcgaaaatgttggtgctataaattctgattgtttacagatgttgattctgcttatgctccaaagtgtgcatgatgtattttacgtagtactctgaggaagtctctttataaaacctactaccacttagtataaatttgtttgaatttatatcatttgttactgtaaattcagcttattccaattaggttggcacagatttaaactgatacacattccacaaaaaccaattcagtgtataagtattgaagtataagcagtcattgcagcttgatgccagatcatgtatgtaataacaagtggaagttaatagggccttctaatactgtatgggtactcctaagaattatttcattttggatataaagaagttatgaggcctcctgtcacattcacagctggttctccaaaataatttggttgtttcaaaaacaaatggtaatcatttggttggattcttcagtatcatgactagatcatgtggttttaccatagttgccaagtggtgggaggtagcatacctgaaaatgtacgtgtgtgtttgttgtattttttcacattttgtgaacaaagcacatttattaaaaattttaaattttctagtaaaaa

SEQ ID NO: 79200 - DNA, 721 bp, Homo Sapiens
  misc_feature (93)..(93): n is a, c, g, or t
gtgtgcaaaatataagtaagtatatattgaaaatataaaatatttcatatatgtatccaggtggaaatttagaatccaaattttcttaaactntaataacttgtctaacaactctctaatagggactaaaaatcaactcaatatatcatacatttacacttacaaagagtctttagacaacataatttttggaaaaataaagcaaattcaactttattggagttattggacagatcagcaaattgttattttaaaaagttttcttgtttaggcaatttggtaagtggtttctagttataaactagccactgttgattaacttgagaaggtgaagcaggggagttctgaagagattacctagagctacttaaccctaagttaagtaaaattttcactttcattcttttcattctctcataaactggttgaaaaaacactgtactaccaacaaaggtgtcagttgcttgtgctgccctgtctatgttatgctctgaataggtctcggtaaagattatatggaaatactataaagaatacataaggtaaaatactagtcagaaagggttcagaagaagttagcatcaactgtatgaaaattctaggtaaagctaagtactattgagttggaaaaaagtaattctatcatgtttgcttgttttcctctactgtttttaatgtgatgttgtaatatattttaaaaataaaacttgaaaacgttaaa

SEQ ID NO: 79201 - DNA, 1068 bp, Homo Sapiens
  misc_feature (60)..(80): n is a, c, g, or t
  misc_feature (586)..(586): n is a, c, g, or t
  misc_feature (869)..(869): n is a, c, g, or t
  misc_feature (876)..(876): n is a, c, g, or t
  misc_feature (887)..(887): n is a, c, g, or t
  misc_feature (890)..(890): n is a, c, g, or t
  misc_feature (895)..(895): n is a, c, g, or t
  misc_feature (938)..(938): n is a, c, g, or t
gtgccaagctaaaattaaccctcaactaaagggaataagcttgcggccgcctgctcaggnnnnnnnnnnnnnnnnnnnnngcagtgcagagttcctttattttgggggcagtgcccaggccagttggtggaaagaggcaggcatacaacccactgtcaggctggggggcccagcaggggcgatggaggagacgaggtggttgagggattttctcagctgcaggttccaggcccaggacaggaggagatgtcaggcatcagacactgagcctgcttggtgcccgcaggagccaaaaactggcggccagagtttttcccgcccccgccccccgcttacccacaagggtgcccagaggccaccctctgcatcctcctttcccctcaggatggagtccaggcccaaaggggtcagattctgcagaggccaaagaggacactcaggaaggtgacactgcctcagccagccaaggaccccctgcctcgagaggaggcagcagaggaagagcaaacactttaacacaggctgtggcgacccgccccacagcacacacggcacacagagggcctcaggcacagctccccttctncagagcaaaacccaactagacacaaggcccagctcctgcccacagccacagaaacgcgggccacaggcttgcctgggctggcacctactggttctcttccctgctggcagcatgaagggaaaagacacaggagggctcagctgggctcctagactggcccaggctgagtcctggtcccagtcaacatctgacaaaggaaacaccccactggaggagacaaaggggtgtggctacatggagcagctgtcacgtcctgagggctgccatggagaaacacacctgngtctgangggacggtggngangacangagggactggactcagtctgctctggcagtatcacactcggtnagtctgtctggctgagctctgcgatctggctcaggcaatcctaaggatcgataatcgatcttcaactttcctgggattgttcgtcaatcaaacaacgacgacaaatggagcgggtgcagatgcatcatag

SEQ ID NO: 79202 - DNA, 1097 bp, Homo Sapiens
  misc_feature (718)..(734): n is a, c, g, or t
  misc_feature (882)..(917): n is a, c, g, or t
tttttttacctatccctggagcaagtaataggaagagaatgggcaaactggttgcacgagagaaaagagaatggagttgggagcaacacatgaacttgcgttataacattctgctgtccagatctgccctactgtgctggtggtcggtctgtccctcttctcattagccactcacaggagaggtgcttgtgcactctgattcacaggggatgaactcaggatctcaaaagacatacaaaaactagaggtatgtatcacttaaatagctacgaaactcacaccgtgatctcccttctgacacacatctgcgccatctcttccaacataaaataaactgtttcaatggtttgtcagttatttttcaaatcactaaaatgtacagtcatccaccaacaatttaagaaagaacctaagaggcaaatcactggggactgctatttgagttttatcagtcaaaggctcaagcatcaagaccctcagttagcatttcaaagtacatactagaaacaagaggctgggtggcgtgtgtgtgcgttatggctgattcaccaggtggtaaaaaaacaagaggttaatctcctctttttgattgttaattgaccatctctattcctccaaaggctggatttggattgcaaacagcttttctctgagattctgctgttaattgagacttacagtatttttgtgtctctgagtgctgagtgggaatattttnnnnnnnnnnnnnnnnnttatattacacttgattcaagaacaacaaagatttcaatgaagtccgtctataaagaaacattcttggggaagggtttcaagaggtgtgtgtgtgtgaggagtggaggggattttaaaaggagaagcattttcctgcctcactttatnnnnnnnnnnnnnnnnnnnnnnnnnnnnnnnnnnnngtttaaggagcttgggttgttctccatgtccccatccgagtctcccctaagtgcctcctgctggaatgaagtaggaaatgaaaggttgggtttggaggaaagggtctggttaacccttgagatgtatataacatttaaaaataaaaacattgggagctgcaaacagtgaggatccacata

SEQ ID NO: 79203 - DNA, 1444 bp, Homo Sapiens
  misc_feature (379)..(379): n is a, c, g, or t
  misc_feature (385)..(385): n is a, c, g, or t
  misc_feature (1009)..(1142): n is a, c, g, or t
cgggaggtttatggggtgtgccccactcctcgcaaaaaatggacgggggcgggcactatatttgattttgagacccgcgtgggattccctgttggttggattccaagtaacgacccccgagactcccctttggggtttgtttaaaaaccggtttgagtttccccgcgggcggttgtttttttggtgggggaattccaaagcccttgtttcattgccccaggttttttcttgggggaaccagggtttgggcccagagttccgctttcccttcatggggcccggcggcacccaaaaaggaaatggttttaggaaaagcttttttcgaggggccgggagggcgggcccgaccaggggctgtgcgcgtttaaccgcgtggctntgtggngttggggtccaacgtcccccagccctttaattcgcagggagaaaggcaggttatccccccaagttaccccagaaggcaaggggggggccagggagatgatagacccccttctccaccccagccagcccatcccctcctgcactgttcccaagaaagctgcggccagcgcagttcactggacgttagtgggggctcaggtcctgggtgctggcgctgagggtccgaggggccgttgtccaggtgccagctggggaaactgagtcccaggagcccttggagcatccacgttcagtgtgttgagtgacatggctctcttcattcccggctgctcctgccgccgcctcgcctcggagccgggagaccagcttctcacttcctcgcctgatagactcacggatcttggagagtgagctgctgcggcgaagggcctgttctgcgtcaccagctgtgcctgtgttgggggcaccgagaggggcgggtaggtcctccttgtggaggatttctttgtacagctcttccgcttgttgatacttgttctgtttcaggtaggctgaggcctgcggagaagggagtgtctgggaacttttcggaccccagttcccaacactgcatccagtcccgccnnnnnnnnnnnnnnnnnnnnnnnnnnnnnnnnnnnnnnnnnnnnnnnnnnnnnnnnnnnnnnnnnnnnnnnnnnnnnnnnnnnnnnnnnnnnnnnnnnnnnnnnnnnnnnnnnnnnnnnnnnnnnnnnnnnnnnccactttctaatgtgctgacctggccgtatccttcccctgcctaaagccttgccctggggcagagtgggtttggagctcggccttacttcctgccctggggatggaggacaggcagcctcctgtttctgagcctgtctgctgtactttgggctggtggcatggcctcggtgcctcagtcttcccacacgcaaagtggagcgacagctcccacctcatagggacgctataagaactagcgatgtggggaccgggctaagaggggagccggccacagtgagctcaataaatgtctgctgctgcc

SEQ ID NO: 79204 - DNA, 763 bp, Homo Sapiens
  misc_feature (77)..(77): n is a, c, g, or t
aagcccagaaacagagcctgccccgagcctggtcaccccaggcttgagaacaggtgaccatccccctccagccccantgcctgcccaagcacagtgcagggggcctaagctctgcggcagagcccttgaccctggtgctgggcccagagtcagagggcagcccctggctcaggctgagtatagtgagagcgtctggatgaagcccggaatgtcagagccaaaccctggtcctgcagaagtcacagtttccgcagtggctccagctttccccacccatccacccctcaaacaatcccgctccagaacacaaatctccgcagaccggccaatgattggagtctggttacatcctcctgtggacagaccttcctcacccgctcccacctcacacccctcagccacaagcaaagctttggaaaatggcacagctcagcctccttcaacgagcagactaaggagtaaaggtctggaccccacatgctgggcccgcctcagctcctggcagaagctgtcgtgcctgagaccccctctgctccctccagggtagaagactgagggagcacaggagaagccacaagggaccatggctcattcctccttgctgggtgctcaggcaactcacataaatctctgagtctcaatttgtttatctgtcctgggggggtgagatgtgccttgccccctgtatcacagtgtggttttgaggaccagaagctgtgcttaaatccagtagctgttgtcaatatgcatttatttacttttt

SEQ ID NO: 79205 - DNA, 1001 bp, Homo Sapiens
gctgtagcttgtttattacatgtccaaaatacagtggagccttactttaacacaatgtactgtaacttggaatttgttctgttatgagtctatcttgaattcccatccatgaaactgtagtcaccaaaagcaacaagtattttcacatgatgtaaaagaccatactatgatggccattgctagaaattgaatcacaaataatagctaataatttttcatttttcaaaaaagatcatttggatagcagctatgtataaaatggaaaataaaaaattattctattttgcatgaatagttcagactttcccataccacagccaagcagtaactaaaattaggatcttaattttcaatgataaaaggtctaaggttcatttaattatgctcctttaacactgtctttctagatttttcacccagtattttcaaaatttgggaatgtaaacaattgatatatttattgtatgttggctagcagttcatccttctgcaaaatatgcattcagagaaatgtgaagcttgttttaatgaagacttaaaccatttgtgtcatttgtgttttcatattcaaatacaccaaattaaaattctgaacctatatttttcatcattaacttcctaatataccagaacatatacctttttcatgtaaagttggcaatgggatatggcagttttatttttgaaaaatatgtaacatgactttaatatttttatagttttcagaattagaaacataggaagggaaaatgttttaattagataagtcaactttttatgtgtctgtagtggtgtactataatagcaaattataaagcattattaaatgtttataataatttttaatattacctacattatgaatttaactaaaataaagtgtgagttgtatattttttaattgggttgtttcaatagctggaagcatcctgaagcattatattgatttttgaactatttgaactcaaactgagtatgatttgaaaataaattaataattt

SEQ ID NO: 79206 - DNA, 834 bp, Homo Sapiens
  misc_feature (68)..(176): n is a, c, g, or t
cactgaaagagatgaaacaaaaaaaattttaatagtattaaaacagattaagacaattccaggtgcannnnnnnnnnnnnnnnnnnnnnnnnnnnnnnnnnnnnnnnnnnnnnnnnnnnnnnnnnnnnnnnnnnnnnnnnnnnnnnnnnnnnnnnnnnnnnnnnnnnnnnnnnnnntgttctttctactccctccttcccccagttctcctgaccttaaaagtttagaacaggttggcaaatttttttctgtaaaagaccaagtattttaggctttgttccagctacttaaccctgctgttgtaatgtgaaagcagccacagacaatatataaacaagtgggcataactgtattccaataaagttttttacaaaagcaggcagtggggttgtaacctgtagtttgctgacctctgacctataacaagtaacacttcctgaaaagcctttcctgatacccatcagaatcaggagctttatcgtccttggctcacatattactagtaaatccacttagcacatttatgatcccttattatatattcatctccattagggactaagttctttgcaggtaggtgccattttgctacataagcctcctcatgttcactctagtgagtatctcacagggcagacattcaatgaatatttgtttctaaaaatcgtatcttctgtaaaaggacaatatgacaccattcataacattcacaagaatgagcagcaagttctaaaagtaattttaaaggagtttaaggggggaaaagcactgctaatgtcactaggatacatacattgcctcttatgctctatactgtgacatgcttatcagtat

SEQ ID NO: 79207 - DNA, 673 bp, Homo Sapiens
taagactttatacttgggtcaatctctcactttattttgtagaaccatttgaaatcctaggatgtgcttgttctggaaggatgacatgggcccagactgaacaagtcagcttgatgatcttaaatgatggaagtataggacgttgcttattttaaaacaagggaaggacacaaaatggaatgactgcttagtcctttctcagatactcttaaaacaattttttattgttaaatttgtggtaatacatggtcacaaccgtggatcaaacaaggtcagtctaaagtggcaggtcctaggtgtgacctgataccaccaccctttgtggcagcaccgggctggactgccctgatccctgggacgtgagacttagcttccagccagtgtgaatcattgtatctgtctcataatcacagcacagctgcagacacaacaacgtgcagcattttttacataaaaatatggtagaattaatttatgacatggaaatgccttacgtggtatcacacttagtcttgaaaaaaacaccaaggtgacgtttaaaatttttagtacatatcctcaaattggagctaagttatacttcttttataaccttttgggcatctggtcgagagaagacaagattttctctatttacagtgaggcaataaatatgtttgccacctttaaaaaa

SEQ ID NO: 79208 - DNA, 1596 bp, Homo Sapiens
  misc_feature (829)..(972): n is a, c, g, or t
  misc_feature (1044)..(1052): n is a, c, g, or t
  misc_feature (1080)..(1091): n is a, c, g, or t
  misc_feature (1093)..(1101): n is a, c, g, or t
  misc_feature (1186)..(1194): n is a, c, g, or t
  misc_feature (1330)..(1343): n is a, c, g, or t
ccggaagttgctgtgccccatcagcagcttgacgcgtggtcacaggacgatttcactgacactgcgaactctcaggactaccgttaccaagaggttaggtgaagtggtttaaaccaaacggaactcttcatcttaaactacacgttgaaaatcaacccaataattctgtattaactgaattctgaacttttcaggaggtactgtgaggaagagcaggcaccagcagcagaatggggaatggagaggtgggcaggggttccagcttccctttgattttttgctgcagactcatcctttttaaatgagacttgttttcccctctctttgagtcaagtcaaatatgtagattgcctttggcaattcttcttctcaagcactgacactcattaccgtctgtgattgccatttcttcccaaggccagtctgaacctgaggttgctttatcctaaaagttttaacctcaggttccaaattcagtaaattttggaaacagtacagctatttctcatcaattctctatcatgttgaagtcaaatttggattttccaccaaattctgaatttgtagacatacttgtacgctcacttgccccagatgcctcctctgtcctcattcttctctcccacacaagcagtctttttctacagccagtaaggcagctctgtcgtggtagcagatggtcccattattctagggtcttactctttgtatgatgaaaagaatgtgttatgaatcggtgctgtcagccctgctgtcagaccttcttccacagcaaatgagatgtatgcccaaagacggtagaattaaagaagagtaaaatggctgttgnnnnnnnnnnnnnnnnnnnnnnnnnnnnnnnnnnnnnnnnnnnnnnnnnnnnnnnnnnnnnnnnnnnnnnnnnnnnnnnnnnnnnnnnnnnnnnnnnnnnnnnnnnnnnnnnnnnnnnnnnnnnnnnnnnnnnnnnnnnnnnnncttcgcggcgggcccgccgccccaggaaaagttttaaaaaatttctttttggggcggcggccccgcgccccnnnnnnnnnttttggccaattgttctgttccccacgnnnnnnnnnnnntnnnnnnnnngcgcgcggacttcccccctaataaaacaagcggcgcgggggaccaagcgggcggtggggaatcccccccaaagagaaaaaacccnnnnnnnnnatacccgggagtctttattcgaagagggcgccccgccaggggggcctccaaattaccaaaatataacggcgccccctcctccaacagggacgtctctcccaaaagagcgggggacaataaaaccacatacagccannnnnnnnnnnnnngggctgtttgcatgaaccctctcttaatctctagcggcgggtgtgtctgtacataaccaggaatccgcgccccgcgcgcgtcgcgtgaccacccacccacatggggaagcgcgcggtgggggtggaaaaaatacaattgccacgcccggggagggaataataacaccgcgcgccctacacaaaccacaccccgggtacacaaataaaatgcgccacccccccgctcagaagaaaaacaacaggggtggggaag

SEQ ID NO: 79209 - DNA, 916 bp, Homo Sapiens
  misc_feature (815)..(859): n is a, c, g, or t
cagtcgacggtaccggacatatgcccgggaattcggccattacggccgggatggtagcaaattaaaatgtccctactgtccaatggaacaaagtccaggagatgccaaacagatatttttctgaagagataactttagtttgcaatttgtaagtgaaactgaatcgtgggtgcatttcagaagagaacgttccatataatgcagctaaccaaggactcctgtgtttctataagctaatgctccagaaactttgccaacctgttagtgtacacacactgaggggagtgctcccggtgaatattatcatagggctttattatattcttggtcttcatttctgatcaagtaaatacaccagcagttgtcattcaatgcaggtttttgtacttaattatatggtgatttttttactttttaagagcagaaacggaaattgacctccccgccatgtgtttaatattcctcctgcttttacttttgtcattttcttgataatcgtaagccttgagagtgtttgtgaaaaagttttatttcctgttatgtatacataattaaatgaaaattcttcagaaaaagtttgataaattgaattgtggttatgaaactaatttgcatttttatttgcttaagaaagaaagctgtgatagattccagatatgctttttgatgttttcctctgctccagctccaagaagtcagcacacctgcattttagctctgcatgcagccccagcaggctgcgtgtttaagaatttcattgtttaactggctggtgtgagaagtcttccgttagcatagagtggaaggagtactannnnnnnnnnnnnnnnnnnnnnnnnnnnnnnnnnnnnnnnnnnnnattgcccaagaggtgcttgttttaaaagtatgtttaataaaatgaaattctaaagtt

SEQ ID NO: 79210 - DNA, 1003 bp, Homo Sapiens
aaggtagaaggccagaactttataccagtagcacatgatccagcataaaggcagtcttgaaatactgcattatccagggacagggcttcagcagctgatctgtcacacaccaggtgtcccacgtaggaatttcttaaaccacaggtaggatgtagctgcagagagtccataccaggtcacgatgtactgcagatgctcgttcctcagagtaactctggtttgccctccaatgggtcctccagggactgtgctctggaagttggcatcaatgaagatgggctctgcgcctgtgattctggccatagcttccaggtctcgataatgccagtggttcctttctggattgttctcagggacaaaaggctgcctggtttctgtcagcctcaccatcccaatgaggtccacttctccctcaatctggcctttctgccgggtttcaggattcactttcttcctgggaacgaaccctctatttaccaggatggtgactcccaggtcggtgcagtggaagggagtgaccacataggccccactctgagttgaggaggagatgaggccgccctcccgggcctcccggacagggtccaccatggtccggggcatcatatacagctccttggaatggtcaaagcaccccctgaccttcactggcctatactccagatttttcagttccattgggtcggctggcagagggacaggctcagccagaactctggactccaactctgcaatcaggttcagcttccacttccgacgctggacctgccatgtccccaagccaaaggcagtcacagggatgaggagcaggacccactgaagaaaggagtcatcttccgcttttgtggcagatgcttctgctgcagaactgccacatctgcttggcctccaggccacccctgggcgcggggagaccctgaggacgctcctccaggcggcgctggccggggcccgtcccagccccgccgcccgcagccccagctgcaacgcagccaccgccgcc

SEQ ID NO: 79211 - DNA, 869 bp, Homo Sapiens
  misc_feature (185)..(253): n is a, c, g, or t
  misc_feature (258)..(282): n is a, c, g, or t
tggacatatgcaccagtggttcaaaaagcaggctggtacggtcggaatcccgggatatcgtcgacccacgcgtccgcctccttagagttatctgttcaccagaacaaccaaaagcacatgtccttttttcctgtcatgtgtagctcattgggggaaaagaaggccaacttaaaacagtcccaggnnnnnnnnnnnnnnnnnnnnnnnnnnnnnnnnnnnnnnnnnnnnnnnnnnnnnnnnnnnnnnnnnnnnntctcnnnnnnnnnnnnnnnnnnnnnnnnngccgtcccagaggaagtcctgctgcagaaaagatgatagaattggtcacccaatcaatagctgtgaagacttccttattcctgctgaacttccttccttggatatcttcatggataagcctgtgtctgtggacagagtggggcccaagtgctgaggctcgaaagacaggttttacaatcagccaattaaacatcttaccagttgctgtaccccttgccaaggggatgagctgaggagcttcttttctttaggtccaacatcaaaatgagtccatctaagctagggctttttgcaaaggtgattaaaaatcaaggctggagttccagccaaatagggaggagaggtaccacaagttcatcttaaacttgcttccgggctgggtagttaaaacaggaagatcccaaggggatcttacgaggcaaatatcagcaggtaactgtggaagaaaggaaatctcaggacctaatgagttcgttgtaaaatattcctgcgagtagatgggggatctaactcccagatttttactttttttaaagaatattgttgctttcctacaacaatgtacatatatttgcagttgtatatgc

SEQ ID NO: 79212 - DNA, 1509 bp, Homo Sapiens
  misc_feature (115)..(115): n is a, c, g, or t
  misc_feature (135)..(135): n is a, c, g, or t
  misc_feature (154)..(154): n is a, c, g, or t
  misc_feature (1036)..(1108): n is a, c, g, or t
gcagcatattgatgccatctagccccagctacatatgtccgctgatgtgttgattgagcgatacattcaccaggaacactagactgatacgattaatacgctcctataggattgnccctcgagccagaaatcgcnacgaggagacagcaccgcntagagaacagctcctgcatcagcttctcatactgaaaggagacagtgtccatcctggtgaaccccgaccgccagtcaccctctgctctcgttagctacattgaggagccctacatggacatagacagggacttcactgaggagtgaccttgggccaggcctcggggaggctgctgggccagtgtgggtgagcgtgggtacgatgccacacgccctgccctgttcccgttcctccctgctgctctctgcctgccccaggtctttgggtacaggcttggtgggagggaagtcctagaagcccttggtccccctgggtctgagggccctaggtcatggagagcctcagtccccataatgaggacagggtaccatgcccacctttccttcagaaccctggggcccagggccacccagaggtaagaggacatttagcattagctctgtgtgagctcctgccggtttcttggctgtcagtcagtcccagagtggggaggaagatatgggtgacccccaccccccatctgtgagccaagcctcccttgtccctggcctttggacccaggcaaaggcttctgagccctgggcaggggtggtgggtaccagagaatgctgccttcccccaagcctgcccctctgcctcattttcctgtagctcctctggttctgtttgctcattggctgctgtgttcatccaagggggttctcccagaagtgaggggcctttccctccatcccttgaggcacggggcagctgtgcctgccctgcctctgcctgaggcagccgctcctgcctgagcctggacatggggcccttccttgtgttgccaatttattaacagcaaataaaccaattaaatggagactattaaataactttattttnnnnnnnnnnnnnnnnnnnnnnnnnnnnnnnnnnnnnnnnnnnnnnnnnnnnnnnnnnnnnnnnnnnnnnnnnccaaacaacactcgacagtcacaaatccaaagaagataagacaccagaagacacaaaggaaagaatataatcgcagaggggcggggctggccgatattacgatctccaccggcggggtggcggacctctgcactctccggcctgccgtctagtattctccagagcgggcaccacccacaaaacaagaagtgggtatgtcctctacttatcttatgcttcccaggtgtgctgcgacggcgtacgccctaccaacaccagacttgctgtctgttagtcgagtggcgagtccgactctgctcgtgcgttcgggtgcgttgatttggtgtgtgccggcagattatcatcaccgtgtgctagcggtctgatcactacacacgctcgccgcccacaaagcctctgat

SEQ ID NO: 79213 - DNA, 859 bp, Homo Sapiens
  misc_feature (474)..(475): n is a, c, g, or t
catatcccaggtgcccacgcagaggtccttccctcttccggcctcagtcgacagtcatccacgtggcagacgcctgacccaggagaacgtcagctgccgtcaacaccagcctggtgatcctgatgctggcccgacggaaagagcggctgcccctgtaccgtgcggctgctgcagcggatggagcacagcaagaagtaccccggcttccgtgctcaacaacttccacacacctgctgcgcttctggcagcagccactacctgcacaaggacacaggaccaccacctgcctagagaacagctcctgcatcagacttctcataactggaaggagaccagtgtcccaacccgtgtgaaccccggaccggccagtcaccctctgctctccattagctctgtgtgagctcctcccggtttcttggctgtccagtccagtccccagaatggggaggaagatatgggtgacccccacccccnncatctgtgagccaagcctccccttgtcccttggccctttggaccccaggccaaaggcttctgagccctgggcagagggtggtgggtaccagagaatgctgccttcccccaagcctgcccctctgcctcattttcctgtagctcctctggttctgtttgctccattggctgctgtgttcataccaagggggttctccccagaaagtgaggggcctttccctcccatcccctgaggcacggggcaactgtgcctgccctgcactctgcctgaggcaaccgctcctgcctgagcctggacatggggcccttccttgtgacgccaatttattaaccagccaattaacccattaaatggagactattaaataactttatttttaaaatg

SEQ ID NO: 79214 - DNA, 2804 bp, Homo Sapiens
gggcgaagagtatgaagtcgacggcgcgccgaattcggcacgaggacgaggagacatggcggcggcgccggtagcggctgggtctggagccggccgagggagacggtcggcagccacagtggcggcttggggcggatggggcggccggccgcggcctggtaacattctgctgcagctgcggcagggccagctgaccggccggggcctggtccgggcggtgcagttcactgagacttttttgacggagagggacaaacaatccaagtggagtggaattcctcagctgctcctcaagctgcacaccaccagccacctccacagtgactttgttgagtgtcaaaacatcctcaaggaaatttctcctcttctctccatggaggctatggcatttgttactgaagagaggaaacttacccaagaaaccacttatccaaatacttatatttttgacttgtttggaggtgttgatcttcttgtagaaattcttatgaggcctacgatctctatccggggacagaaactgaaaataagtgatgaaatgtccaaggactgcttgagtatcctgtataatacctgtgtctgtacagagggagttacaaagcgtttggcagaaaagaatgactttgtgatcttcctgtttacattgatgacaagtaagaagacattcttacaaacagcaaccctcattgaagatattttgggtgttaaaaaggaaatgatccgactagatgaagtccccaatctgagttccttagtatccaatttcgatcagcagcagctcgctaatttctgccggattctggctgtcaccatttcagagatggatacagggaatgatgacaagcacacgcttcttgccaaaaatgctcaacagaagaagagcttgagtttggggccttctgcagctgaaatcaatcaagcggcccttctcagcattcctggctttgttgagcggctttgcaaactggcgactcgaaaggtgtcagagtcaacgggcacagccagcttccttcaggagttggaagagtggtacacatggctagacaatgctttggtgctagatgccctgatgcgagtggccaatgaggagtcagagcacatcaagcctccattgtgttccctcctccaggggcttctgaggagaatggactgcctcacacgtcagccagaacccagctgccccagtcaatgaagattatgcatgacatcatgtacaaactggaagtgctctatgtcctctgcgtgctgctgatggggcgtcagcgaaaccaggttcacagaatgattgcagagtccaagctgatccctggacttaataatttgtttgacaaactgatttggaggaagcattcagcatctgcccttgtcctccatggtcacaaccagaactgtgactgtagcccggacatcaccttgaagatacagtttttgaggcttcttcagagcttcagtgaccaccacgagaacaagtacttgttactcaacaaccaggagctgaatgaactcagtgccatctctctcaaggccaacatccctgaggtggaagctgtcctcaacaccgacaggagtttggtgtgtgatgggaagaggggcttattaactcgtctgctgcaggtcatgaagaaggagccagcagagtcgtctttcaggttttggcaagctcgggctgtggagagtttcctccgagggaccacctcctatgcagaccagatgttcctgctgaagcgaggcctcttggagcacatcctttactgcattgtggacagcgagtgtaagtcaagggatgtgctccagagttactttgacctcctgggggaagctgatgaagttcaacgttgatgcattcaagagattcaataaatatatcaacaccgatgcaaagttccaggtattcctgaagcagatcaacagctccctggtggactccaacatgctggtgcgctgtgtcactctgtccctggaccgatttgaaaaccaggcggatatgaaagttgccgaggtactgtctgaatgccgcctgctcgcctacatatcccaggtgcccacgcagatgtccttcctcttccgcctcatcaacatcatccacgtgcagacgctgacccaggagaacgtcagctgcctcaacaccagcctggtgatcctgatgctggcccgacggaaagagcggctgcccctgtacctgcggctgctgcagcggatggagcacagcaagaagtaccccggcttcctgctcaacaacttccacaacctgctgcgcttctggcagcagcactacctgcacaaggacaaggacagcacctgcctagagaacagctcctgcatcagcttctcatactggaaggagacagtgtccatcctgttgaacccggaccggcagtcaccctctgctctcgttagctacattgaggagccctacatggacatagacagggacttcactgaggagtgaccttgggccaggctcgggaggctgctgggccagtgtgggtgagcgtgggtacgatgccacacgccctgcctgtttcccgttcctccctgctgctctctgctgccccaggtcttggggtacaggcttggtgggagggaagtctagaagcctggtccccctgggtctgagggcctaggtcatgcagagctcagtcccataatgggacggtccagccactttcttcgaacctgggccaggccccgagtagagcattacttgctggggcctgcggtttggcggacgcgcagggggaattgtcccccctgtcgcctttcgctggcgagcttctggggggccatggcccccctgttcgcgc

SEQ ID NO: 79215 - DNA, 762 bp, Homo Sapiens
tggtacgctccggattcccgagatatcgtcgaccacgcgatcgggacaaacaatccaagtggagtggaattcctcagctgctcctcaagctgcacaccaccagccacctccacagtgactttgttgagtgtcaaaacatcctcaaggaaatttctcctcttctctccatggaggctatggcatttgttactgaagagaggaaacttacccaagaaaccacttatccaaatacttatatttttgacttgtttggaggtgttgatcttcttgtagaaattcttatgaggcctacgatctctatccggggacagaaactgaaaataagtgatgaaatgtccaaggactgcttgagtatcctgtataatacctgtgtctgtacagagggagttacaaagcgtttggcagaaaagaatgactttgtgatcttcctgtttacattgatgacaagtaagaagacattcttacaaacagcaaccctcattgaagatattttgggtgttaaaaaggaaatgatccgactagatgaagtcccaatctgagttcctagtatcaaattcgatcacagcagctcgctaattctgccggatctgctgtaacatttcgagatgatacaggaatgagacagccacctcttgcaaatgccacaaaaaaagctgattgggcttcgcactaaaaatcaacgccttcacatctgttgtgacgtttcaagggaccaaggcaaacaagcacccctcttcgattaaagaccggtaaagttggcaa

SEQ ID NO: 79216 - DNA, 535 bp, Homo Sapiens
tgcttggtgaactatgaccagtgtgtaagaaagcaggctggtaccggtccggaattcccgggatatcgtcgacccacgcgtcgtttttttacccctgcttctcccacggcttcacctccctatgtgaactgtagactcagatcccaataaagtgctgttgcagctatgatgctaggtggtttctaagcacaggggacaccccacaccccctgcctgaatggatgggtccatcccaggcactggtacttgcccccttgttctgtatccccctttgcccttgccttgcccttccaacaaaccctaggcccttgagaagctgatacttctccttttgctcacagctgccttggccccacccctgggagatgtagcaaattgagtgtgggttttggagtctgagcctcaggctcaaatccaggccaagtgatcttgggcaagttaatctctgggaactttgggtttcttatcctcaaaaaaggcgatggaagggctggggaagtgattaaataaaagcaacgcaagaaaaatcctctcc

SEQ ID NO: 79217 - DNA, 996 bp, Homo Sapiens
gcaggaggctatacttcaaatcgtacttataaagaagtctgctcagaaaaaactggccatgcagaagtcgtccgagtagtgtaccagccataacacatgagttttgaggaactgctcaaggtcttctggcagaatcaagaccctacccaaggtatgcgccaagggaacggccatggcactcagtaccgttcggccatctacccgacctctgacaagcaaatgcaggcagccctgagctccaaagagaactaccgaaaggttctttcagagcacggcttcggccccatcactaccgacatccgggagggacagactttctactatgcggaagactaccaccagcagtacctgagcaagaaccccaatggctactgcggccttgggggcaccggcgtgtcctgcccagtgggtattaaaaaataattgctccccacatggtgggcctttgaggttccagtaaaaatgctttcaacaaattgggcaatgcttgtgtgattcacaatcgtggcatttaaagtgcacaaagtacaaaggaatttatacagattgggtttaccgaagtataatctataggaggcgcgatggcaagttgataaaatgtgacttatctcctaataagttatggtgggagtggagctgtgcggtttcctgtgtcttctggggtctgagtgaagatagcagggatgctgtgttcacccttcttggtagaagctaaggtgtgagctgggaggttgctggacaggatgggggaccccagaagtcctttatctgtgctctctgcccgccagtgccttacaatttgcaaacgtgtatagcctcagtgactcattcgctgaaatccttcgctttaccaaatctagacatacataagggactttctctcccttttcagccctctctgtgcagagaaaagatgtgagtccgcttgatgaattctaatgctttgcttagagctatcagaaatgtttgttttaataaaaacctaaagtaaaataa

SEQ ID NO: 79218 - DNA, 1491 bp, Homo Sapiens
  misc_feature (132)..(346): n is a, c, g, or t
  misc_feature (455)..(474): n is a, c, g, or t
  misc_feature (995)..(1003): n is a, c, g, or t
  misc_feature (1413)..(1434): n is a, c, g, or t
tacctagtgaaccccacttaaagaataaggagcatttgaatctcttggaaaaggccatgaagaataaagcagtcaaaaagaagtcctccatgttggtgccaaggacttgcgaggggaaataaaaatgttatnnnnnnnnnnnnnnnnnnnnnnnnnnnnnnnnnnnnnnnnnnnnnnnnnnnnnnnnnnnnnnnnnnnnnnnnnnnnnnnnnnnnnnnnnnnnnnnnnnnnnnnnnnnnnnnnnnnnnnnnnnnnnnnnnnnnnnnnnnnnnnnnnnnnnnnnnnnnnnnnnnnnnnnnnnnnnnnnnnnnnnnnnnnnnnnnnnnnnnnnnnnnnnnnnnnnnnntgttactcatcctctctgaaagcaaaaaggaaaccctaacagctctgaactctggttttatttttcttgctgtatttgggtgaacattgtatgattaggcataatgttnnnnnnnnnnnnnnnnnnnnggtagaaatgcaatcaccagtaaagaggtacgaaaaagctagcctctctcagagaccggggaggcagagtactactagaggaagtgaagttctgatggaatcatgcctgtcaaatgaggtcttgaagcggatgcccaaataaaagagtatattttatctaaatcttaagtgggtaacattttatgcagtttaaatgaatggaatattttcctcttgtttagttgtatctgtttgtatttttctttgatgaatgattggtcatgaggcctcttgccacactccagaaatacgtgtgcggctgcttttaagaactatgtgtctggtcacttatttctctaaaattatctcattgcctggcaatcagtcttctcttgtatacttgtcctagcacattatgtacatgggaaatgtaaacaaatgtgaaggaggaccagaaaaattagttaatatttaaaaaaatgtattgtgcattttggcttcacatgtttaactttttttaagaaaaaagttgcatgaatggnnnnnnnnntctgtatacagtatctgtaaaaactatcttatctgtttcaattccttgctcatatcccatataatctagaactaaatatggtgtgtggccatatttaaacacctgagagtcaagcagttgagactttgatttgaagcacctcatccttctttcaatgcgaacactatcatatggcattcttactgaggattttgtctaaccatatgttgccatgaattaactctgccgcctttcttaaggatcaaaaccagtttgatttgggaatcttcccctttccaaatgaaatagagatgcagtacttaactttccttggtgtttgtagatattgccttgtgtattccacttaaaaccgtaatctagtttgtaaaagagatggtgacgcatgtaaataaagcatcagtgacactctnnnnnnnnnnnnnnnnnnnnnncctgagcaggcggccgcaagcttattccctttagtgagggtaattttagcttggcac

SEQ ID NO: 79219 - DNA, 768 bp, Homo Sapiens
  misc_feature (37)..(37): n is a, c, g, or t
  misc_feature (99)..(99): n is a, c, g, or t
agatactgcagtggatgtgggatgtatatgaactttntcataatgtactcctgggaactgggtaggacatatccatattgtagttcccaagtgtcttgnttgagagttagagaacttttaaattctttagccagacaggtctctatttttttaagttatccaggactccaagaaccatagttactgaaaagggagtcctgatacatctaatattggtagcatgtaacagtgtttgacaaagagtaagtaagcagtattcttgggagtcagtgttatgtgtttcagcagagtattattttgtatatgtatgccattttctccctgcaaagcagctcaacaagagaaaaagctctagttatagggcttaaattgatttctatttcaaataatttcctaagagattctagagtagaactgaagagtattctattggaaaagtgaaaggaaagaaatgtaattttctttgaacatgaaaaagaaaacaactttgagagtagtcatttagcagtagatgtgcattattatgagaaaacagttctataagtccagggttaattatattaattggaatgtcagtctttaatgtcgagcttattgtagggtagaaaagagctttctactcagctaacgattactcattgatccaaaacttaaatacatctataatttcctggggctattgtgagtactgtgtatgtatttagcaaatatttaagacctagtaagtgctcaataaattgtagctgttattgctgttgttgtttgtaa

SEQ ID NO: 79220 - DNA, 867 bp, Homo Sapiens
aatccgccgaatccaaaactggcgctggcggcagctgggacgcggggctggggactccgggtcgctcccggccgggaacgccgggctccccctctcggtgagaaggaaactctagccgactccggcttgcgcacttctggcggtctccttggacatttccacacgggacgcctgtgttcaagctcgctgactttccttctttaatctctgatggtcgttatctgtgggcccactggactatctcgcgcgtgcacgcggaaccggaggtgggtggagggtggaatgagagagaaacccatccgcagaaggaggggccctaccttactcagtcttcagcccggacagaagcaaaaccacaggccccctctcccaccccactcgcgccgcgtttcctttccagcctcttccctgagacactagatcaggaccatttgccttttcttatctctgtgtgtttcctaacacaattttaaaacacctctgaggcttcatagaggggtaaagtgtcaaaagaaatacacgaataagagtaaaacgtgccgtcttcacagcctttatcaagaaagcagacacagttgctgctgctctggccgcacctcagcggactggtttgtcctcattggtttgtcctcatttgttttttaactcggccttaatctctggactttgttatgccttaaaacagacacacacatacacacacttgaaaattgccttaacccccagatcatactcatttgttccattcagatgtttacctcggaattaaggacttctgtataggatttgagagaaaacacaacagcccattcttactgacctttagtaaagttctgcgtgggaaagggagcaagaaggagtaaaaaa

SEQ ID NO: 79221 - DNA, 633 bp, Homo Sapiens
gcaggcagcagagggcaggtgggcacagtgggcgtgcctttacagggctcccttctccccgccaggcatgggctgcaacgagtgtacgcacccctcctgccagcactcgctgagcatgctgggcatcggccagtgcgtggaatgtgagagtggggtgctggtgctggaccccacctcgggccccaagtggaaggtggcctgcaacaagtgcaacgtggtagcgcactgcttcgagaacgcccaccgcgtgcgggtgtccgccgacacctgcagtgtctgtgaggccgccttgcttgatgtggacttcaacaaggccaagtccccactcccgggcgatgagacgcagcacatgggctgcgtcttttgtgaccccgtcttccaggagctggtggagctgaagcatgcggcctcctgccaccccatgcaccgcggtggaccagggagaaggcagggtcgagggcggggccgggccaggaggccccctgggaagcccaaccccagacggcccaaggacaagatgtcagccctggccgcctactttgtatgatgaccctgtcctccctcacccaggctgcagtgccatgcagacacctcatggcacttcaaactattaaaatgcattttatcttatcc

SEQ ID NO: 79222 - DNA, 645 bp, Homo Sapiens
gtggtggtgctctgaggcctaggcaacgagcgacagggctgccagttgcccctgggttcctttgtgctgctgtgtgcctcctctcctgccgccctttgtcctccgctaagagaccctgccctacctggccgctgggccccgtgactttcccttcctgcccaggaaagtgagggtcggctggccccaccttccctgtcctgatgccgacagcttagggaagggcagtgaacttgcatatggggcttagccttctagtcacagcctctatatttgatgctagaaaacacatatttttaaatggaagaaaaataaaaaggcattcccccttcatccccctaccttaaacatataatattttaaaggtcaaaaaagcaatccaacccactgcagaagctctttttgagcacttggtggcatcagagcaggaggagccccagagccacctctggtgtccccccaggctacctgctcaggaaccccttctgttctctgagaagtcaagagaggacattggctcacgcactgtgagattttgtttttatacttggaagtggtgaattattttatataaagtcatttaaatatctatttaacaagataggaagctgcttatatatttaataataaaagaagtgcacaagctgc

SEQ ID NO: 79223 - DNA, 870 bp, Homo Sapiens
ttacctgcctcctgaagaccccatgacccaggatggctctcagccgatggacacaaacatgatggcgcctcccctgccctcagaaatcaacagaggagatgttcaggcggttgcttatgaggaaccaaaacactggtgctctattgtctactatgagctcaacaatcgtgtgggtgaagcgttccatgcctcctccacaaagtgtgttggtggatggtttcactgatcctcccaacaataagaaccgtttctgccttgggctgctctccaatgttaaccggaattccactattgaaaacaccaggcggcatattggaaaaggagttcatctttattatgttggaggggaggtgtatgccgaatgccttagtgacagtagcatctttgtgcaaagtcggaactgcaactaccatcatggatttcatcctactactgtttgcaagatccctagtgggtgtagtctgaaaatttttaacaaccaagaatttgctcagttattggcacagtctgtgaaccatggatttgagacagtctatgagcttacaaaaatgtgtactatacgtatgagctttgtgaagggctggggagcagaataccaccgccaggatgttactagcaccccctgctggattgagatacatctgcacggccccctccagtggctggataaagttcttactcaaatgggttcacctcataatcctatttcatctgtatcttaaatggccccaggcatctgcctctggaaaactattgagccttgcatgtacttgaaggatggatgagtcagacacgattgagaactgacaaaggagccttgataatacttgacctctgtgaccaactgttggattcagaaatttaaacaaa

SEQ ID NO: 79224 - DNA, 1283 bp, Homo Sapiens
  misc_feature (503)..(513): n is a, c, g, or t
  misc_feature (1072)..(1089): n is a, c, g, or t
ctggggagctaacatccatcccttgaaattgcctgcgaaattatgtgtgcgtttgtgcatgtgtgtttttttctccccaggggcgggggggtcagggaggaaagatgcatagctttaatcagagtctttggttatgtgaactcttcttacttaataagtttaaccactgagttaaacaagttaaatgacctccagtatgtttttcctagggctggggagcagaataccaccgccaggatgttactagcaccccctgctggattgagatacatctgcacggccccctccagtggctggataaagttcttactcaaatgggttcacctcataatcctatttcatctgtatcttaaatggccccaggcatctgcctctggaaaactattgagccttgcatgtacttgaaggatggatgagtcagacacgattgagaactgacaaaggagccttgataatacttgacctctgtgaccaactgttggattcagaaatttaaacaaacnnnnnnnnnnncacacacaccttggtaacatactggtggatatcaagaacctgtttagtttacattggtaacattctattgtaaaatcaactaaaattcagacttttagcaggacttggtgtccagttaaaggagagatggccaagccaggacaaatggtctattagaaaacggtcctaagagattcttggtgttggcactttaaggtcatcgtggggcagaagtttagcattaatagctgttctgaaacgtgttttatcaggtttagagcccatgttgagtcttctttcatgggtttcatcataatttcacaacctatttgtttagccgaaggatcggggccgagtaaacgctcacggtgacaccttgaaagagtatcccctaataaatcctttcttaacaattgtgtgtgctgcgaccccaacttgcgtgtcgcggcaaaaaatgcgcaggggaggatagcgcggtcgggccacccaactttcttttgcaccagatatttcgggagggcgcgaggacacgcgcgctgagaccccaccccgcccgattaggcagcgacatcccaaaacnnnnnnnnnnnnnnnnnnagaacaagacgaagcagcatacaaccacggcccaggttggacacaacacagtcagcgaacaacacaacccgtcgaggggtcgtagaacaaaaacaacagcgcaccccaaacaataagcaggacgcgccagcctcgaacaagaaaaaaatccacaacaatacccaccgtaccaaggagagtatcaacaccccaca

SEQ ID NO: 79225 - DNA, 795 bp, Homo Sapiens
  misc_feature (31)..(31): n is a, c, g, or t
aacatgcattatagcagatgacaggagccanacatgcagagacacctcctgtgtgatccgcccacagtacaaaatgcttatatagtgtcgagacagatgagtaaatatccatctggtgagaaagtacgttatcaatgtaggagcccttatgaaatgtttggggatgaagaagtgatgtgtttaaatggaaactggacggaaccacctcaatgcaaagattctacaggaaaatgtgggccccctccacctattgacaatggggacattacttcattcccgttgtcagtatatgctccagcttcatcagttgagtaccaatgccagaacttgtatcaacttgagggtaacaagcgaataacatgtagaaatggacaatggtcagaaccaccaaaatgcttacatccgtgtgtaatatcccgagaaattatggaaaattataacatagcattaaggtggacagccaaacagaagctttattcgagaacaggtgaatcagttgaatttgtgtgtaaacggggatatcgtctttcatcacgttctcacacattgcgaacaacatgttgggatgggaaactggagtatccaacttgtgcaaaaagatagaatcaatcataaagtgcacacctttattcagaactttagtattaaatcagttctcaatttcattttttatgtattgttttactcctttttattcatacgtaaaattttggattaatttgtgaaaatgtaattataagctgagaccggtggctctcttcttaaaagcaccatattaaatcctggaaaactaaa

SEQ ID NO: 79226 - DNA, 1517 bp, Homo Sapiens
  misc_feature (610)..(666): n is a, c, g, or t
  misc_feature (1340)..(1386): n is a, c, g, or t
ctggaccggtccggaatcccgggatatcgtcgaccacgcgtccgggccagaaggacctgtgaggaggcctcgctgccgcttgagagaacactcaaaggtcccgagtgtgcagctgccgccactgccgggaagccccccaggcctgacggcccagctgacccggccaagcagggcccactgcgcaccagtgcccggggcctgtcccggaggctgcagagctgctactgctgtgatggccgggaggatgggggcgaggaggcagccccagccgacaagggtcgcaaacatgagtgcagcaaggaggctccggcagagcccggcggggaggcccaggagcactgggtgcatgaggcctgtgccgtgtggaccggcggcgtctacctggtggccgcgaagctctttgggctgcaggaggccatgaaggtggccgtggacatgatgtgttccagctgccaagaagccggggccaccattgggtgctgccacaaaggatgcctccacacctaccactacccgtgtgccagcgatgcaggttgcatattcatcgaagagaacttttctttgaaatgtcccaaacataagaggctgccgtagtaatccaccccaacgnnnnnnnnnnnnnnnnnnnnnnnnnnnnnnnnnnnnnnnnnnnnnnnnnnnnnnnnntgcgcagcccccgggcctttgagctgctcccagcgctggtccagagccgatccttgatccgggtcccggatccgggatccggccgcctagggctcagacttgctggccccggttgggaggaaaacccgctccggagccgcctgctcccggaaccggacggcacagggcgttcttgcccaccccaggtgccaggcttgcggagggggagcccgcggagcggccagactccccggggcgctcagcctccggcgagggtgggagacggctttgtcctggggacactttccctctggaatctcaagacgacgtggcacacattccacgtgggtgcttgccgcaacccagtcggtcgtggcgtgcagctaggagccctgggcttgggggtgggggtcgaaacagtactggaagaggcggagggcggctcctagctccgtggactaggcgggggagaaaggaagcctttgcccgcacgtggctaccgcgacgccacttgtccacgcagccactcaccgcccgggccagtccctgccagtccgtccgcctgtccgtccgtgtcctcagctctgtccacgcttcgataggcctgacgcagcccccagcccagggccgccctagcaacttcctgtacatatgactgtaaaatggtaaacgtgtgtattatatctggcctcgtnnnnnnnnnnnnnnnnnnnnnnnnnnnnnnnnnnnnnnnnnnnnnnngaagactgtaaatgttaagacgactagtgttcttattagtatattgcttcacactgaagattgtgtgtatcgagctgtttctaaaagatgtttattttccttaagagtaaaaaacagtcattgcattcaga

SEQ ID NO: 79227 - DNA, 1047 bp, Homo Sapiens
  misc_feature (244)..(244): n is a, c, g, or t
  misc_feature (281)..(281): n is a, c, g, or t
tcaatgcaatccaagtggaatgatctatttggctaacgaccgtcggaccggtttatataaatgaccctcttgtaacaaacaatgcgtttattctcaatgatgtcatcctgaatgtccagggaagaccttcaccttgactatatgccatatgtcatcacagctctgagcttctccttccatcctgcgtgacagctaagacctcagtttcaatagcatctagagcagtggactcagctgggtgatntcgccccccatctccgggggaatgtctgaagacaatntgattacctcaatgagggagtggaggaggatacagtgctactaccaactagtggataaaggccagggatgctgctcaacctcataccatgtacaggacgtctccccattacaactacccaatccgaagtgtcaactgtgtcaggactaagaaaccctggttttgagtagaaaagggcctggaaagaggggagccaacaaatctgtctgcttcctcacattagtcattggcaaataagcattctgtctctttggctgctgcctcagcacagagagccagaactctatcgggcaccaggataacatctctcagtgaacagagttgacaaggcctatgggaaatgcctgatgggattatcttcagcttgttgagcttctaagtttctttcccttcattctaccctgcaagccaagttctgtaagagaaatgcctgagttctagctcaggttttcttactctgaatttagatctccagacccttcctggccacaattcaaattaaggcaacaaacatataccttccatgaagcacacacagacttttgaaagcaaggacaatgactgcttgaattgaggccttgaggaatgaagctttgaaggaaaagaatactttgtttccagcccccttcccacactcttcatgtgttaaccactgccttcctggaccttggagccacggtgactgtattacatgttgttatagaaaactgattttagagttctgatcgttcaagagaatgattaaatatacatttcctacaccaaaa

SEQ ID NO: 79228 - DNA, 1620 bp, Homo Sapiens
cgtcacgggagcgccggcggctgagaatccgcgttgttccgtgttgggggcggcatggagcgggagccgggcgccgcgggagttcgccgggctctgggccgccggctggaggcggtgctggcgagccgcagtgaggccaacgccgtgttcgacatcctggccgtgctgcagtctgaggaccaggaggagatccaggaagcagtccgcacgtgcagccgtcttttcggggccttgctggagcggggagagctgtttgtgggccagctgccctctgaggagatggtcatgacagggtcccagggagccacacggaagtacaaggtgtggatgagacaccgctatcacagctgctgcaatcgcttgggagagctcctgggccacccctcctttcaggtcaaggagctggccctcagcgcactcctgaagttcgtgcagctggaaggagcgcaccccctggagaagtccaagtgggaaggcaactacctgttcccccgagagctcttcaagttggtggtgggaggcctgctgtctcctgaggaggaccagagcctgctcctgtcccagttccgggagtacctggactacgacgacacccgctaccacaccatgcaggcagccgtggatgccgtggcccgggtcactggccagcaccccgaggtgccccccgccttttggaacaatgccttcacgctgctgtctgccgtgagcctgccccgccgggagcccaccggtctccagcttctatgtgaagcgggcggagctgtgggacacctggaaggttgctcaccttgaaggagcacaagaggggttttcccaggccatgtggctcagcttcctcaagcacaagctgcccctcagcctctacaagaaggtgctgctgattgtgcatgacgccatcctgccgcagctggcgcagcccacgctcatgatcgacttcctcacccgcgcctgcgacctcgggagtaccctgacttctaccggaagctctacggcctcttggacccctctgtctttcacgtcaagtaccgcgcccgcttcttccacctggctgacctcttcctgtcctcctcccacctccccgcctaactggtggccgccttcgccaagcggctggcccgcctggccctgacggctccccctgaggccctgctcatggtcctgcctttcatctgtaacctgctgcgccggcaccctgcctgccgggtcctcgtgcaccgtccacacggccctgagttggacgccgacccctacgaccctggagaggaggacccagcccagagccgggccttggagagctccctgtgggagcttcaggccctccagcgccactaccaccctgaggtgtccaaagccgccagcgtcatcaaccaggccctgtccatgcctgaggtcagcatcgcgccactgctggagctcacggcctacgagatctttgagcgggacctgaagaagaaggggcccgagccggtgccactggagtttatcccagcccagggcctgctgggacggccgggtgaactctgtgcccagcacttcacgctcagctgaccctggcccacctgtgaataaatctcagctgaccccagcccacctgtgaataaatgtttttgcaggagaaag

SEQ ID NO: 79229 - DNA, 893 bp, Homo Sapiens
ctggcagtaactataacggtcttaaggtagcgaggcatgggtggcgaattcggcacgaggtggagcgggagccgggcgccgcgggagttcgccgggctctgggccgccggctggaggcggtgctggcgagccgcagtgaggccaacgccgtgttcgacatcctggccgtgctgcagtctgaggaccaggaggagatccaggaagcagtccgcacgtgcagccgtcttttcggggccttgctggagcggggagagctgtttgtgggccagctgccctctgaggagatggtcatgacagggtcccagggagccacacggaagtacaaggtgtggatgagacaccgctatcacagctgctgcaatcgcttgggagagctcctgggccacccctcctttcaggtcaaggagctggccctcagcgcactcctgaagttcgtgcagctggaaggagcgcaccccctggagaagtccaagtgggaaggcaactacctgttcccccgagagctcttcaagttggtggtgggaggcctgctgtctcctgaggaggaccagagcctgctcctggtccagttccgggagtaccttggactacgacgacaccggtacagacatgcaggcagcgtggattgccgtggcccgggtcactgggcagaacccgaggtgcccccggcttttcggaaccaatgctttcacggctgctgtctgccgtgagccttgcccggcggggagccaccggtttcagcttctattgttacacgcgggcggagcctgtggggacaacctggaagggttgctcaacctggaaggagccccaggaggcggtttcccaaggcccatgttgctccagtttcctcaaggcacaagtgtgcccttcaggcgtctacaagcaaacgg

SEQ ID NO: 79230 - DNA, 862 bp, Homo Sapiens
tttctctccgccccccctctcaacccggcccaataaggccctaggtagcgaggcctgggtggcgaactcagcacgaggtgggggcggcatggagcgcgagccgggcgccgcgggagttcgccgggctctgggccgccggctggaggcggtgctggcgagccgcagtgaggccaacgccgtgttcgacatcctggccgtgctgcagtctgaggaccaggaggagatccaggaagcagtccgcacgtgcagccgtcttttcggggccttgctggagcggggagagctgtttgtgggccagctgccctctgaggagatggtcatgacagggtcccagggagccacacggaagtacaaggtgcggatgagacaccgctatcacagctgctgcaatcgcttgggagagctcctgggccacccctcctttcaggtcaaggagctggccctcagcgcactcctgaagttcgtgcagctggaaggagcgcaccccctggagaagtccaagtgggaaggcaactacctgttcccccgagagctcttcaagttggtggtgggaggcctgctgtccccctgacgaggaccacagcctgctccctgcccccagttcccggagtacctggactaccacgacacccgctaccacaccatgcaggcagccgtggatgccgtggtccgggtcactggccaccaccccgaggggccccccgcctttttggaaaaatgccttcacgctgctgtctgccgtgagcctgccccgtccgggaagcccccccgtcttccagcttcttatgttgaagccggccggaagctgtgcggaccccttggaaacgttggctcaccctggaaactgccccttcagccttct

SEQ ID NO: 79231 - DNA, 1017 bp, Homo Sapiens
  misc_feature (91)..(128): n is a, c, g, or t
taccaaaaataaactcttgggggaagaaaagtggattaacttttgaaatccttgaccttaatgtgttcagtggggcttaaacagtcattcnnnnnnnnnnnnnnnnnnnnnnnnnnnnnnnnnnnnnnaactgctaaatcttattataaggaaaccataccgaaaacctttccaagcctcttttttccattcccatttttgtcctcataatcaaaacagcataacatgacatcatcaccagtaatagttgcattgatactgctggcaccagttaattctggggatacagtaagaattcatatggagaaagtcccttggtcttatgcccaaatttcaacaggaataattggcttgtataatctagcagtctgttgatttatccttccacctcataaaaaatgcataggtggcagtataattattttcagggatatgctagaattacttccacatatttatccctttttaaaaaagctaatctataaataccgtttttccaaaggtattttacaatatttcaacagcagaccttctgctcttcgagtagtttgatttggtttagtaaccagattgcattatgaaatgggccttttgtaaatgtaattgtttctgcaaaatacctagaaaagtgatgctgaggtaggatcagcagatatgggccatctgtttttaaagtatgttgtattcagtttataaattgattgttattctacacataattatgaattcagaattttaaaaattgggggaaaagccatttatttagcaagttttttagcttataagttacctgcagtctgagctgttcttaactgatcctggttttgtgattgacaatatttcatgctctgtagtgagaggagatttccgaaactctgttgctagttcattctgcatcaaataattattatgtctgatgttgactcattgcagtttaaacatttcttcttgtttgcatcttagtagaaatggaaaataaccactcctggtcgtcttttcataaattttcatattttt

SEQ ID NO: 79232 - DNA, 943 bp, Homo Sapiens
aaggtgtctttttcttgagtgctggagggcttccaagcaagtccagacagctctgtgtggccccacactagtctagctctcatctggccaaagctgttatctcatttgtgtaatgggagtccttaaggtaaatttggggtccaaacttggagggctttgggggcaagaaagttggtgtgtgagttctgaggttggaaatgagttcaggtgtcttcttccagggcagcatggtccagtgagcacatgtaagtttgggcagtagatcctctgagcctactttctcttctactcagtgaggatgctgcttccttggcaggtgattgtgatgtgaagcttagtaagtcatagacgtgcaggtgtctggagagtcctgacatgcagttgtggtttcgtttccttttggaatcttcaaaggcagcgattttcatattgcctcacaccctggcgggggcggggggctctgggaccactgggggacctgctaaatcctcttcagtctgagcagttcagccattgtcagttttagtattgtgtctctgtatttcacttgcagaaagagctttgcttctataaaggactttaaaaagtactccaaagagatctagttttggagtagaggggagatgttttctcaaacttagggcagtcctgagatgctcaggcagtagcccttttctcagttccctttgcgggtcttggtcagatgatgccctctagacccgtgctgtccaatatgtagccgctagccatgtgcagctgtcaggcccttgcaacgtggctggttcgagctgtgatacactgcaagtgtaaacacaaaccagacttcgaaggcttagtatgataacaaaagaaaaggagtgtaaaatatgtcaataacttttttatatatgtgttgaaatattttgggtattgggttaaataaaatatattattaaaattcaaa

SEQ ID NO: 79233 - DNA, 1068 bp, Homo Sapiens
  misc_feature (165)..(165): n is a, c, g, or t
  misc_feature (276)..(277): n is a, c, g, or t
  misc_feature (323)..(323): n is a, c, g, or t
cagatgcctgatctggctcccagcatggtatttgatgaagtgattcgaagactgagatgatcgaggatagcagtatgcgagtcctagcccactcaccatgctttcacaagattgaggcactgctgtctgtgagtcttgccacagtgagtctgactgatgctcagntagtgatcagcacgtgagagttacgtgtcctcagcacatacaccgtggaaaacgaccgctcttgctcctgactcccaggtacagcgcccagtactcatcctcatcagagtnntgctgccttccccgtttcccaaggagcaagacctctgtccgccctntggcccggcctctgctctgactcctttttttacataagaaccaatctgtgtttcacattgggctaagtggattccttatccctttgttatatatattttttgcaacttggatttccagtttgtttacagagtagtcttaggtagtagcaaaagagccaaagaagagatttgtattgctgagctcaaagccaagcagaggccggcagtggaggctgagcagggactctccaggcttctctgcccataaacacccgggtcccaggccctccttcctttccctttggtgctccctcctccccacgtaccattgcgcgtgcagctggagcagaataccctcatttttaggaatctagtgatgcctcttgcctcagggaaacgtttctttgatggggagtttgagatttcttttccttgtttatgctttatttgtggtaatgaaagagcgaatgactgaacagccatggcaaggcagacctacaggcgaggccgcagcagagggtggggcagagcagcctcggggtctgggggctgcaggggtttccctggcgcagcgaaagtctctgagcacttaccgggcgtgaccgtttcttaggtgtgagaggggctgtggcttttgtgcagcgactatgttggtgttaggggtggtgtggagattgttaatcttgtataaagcaattcaataaattgtttcaaggtttccaaaacattttttctcactcttttctttctaccatgtggaagtaag

SEQ ID NO: 79234 - DNA, 762 bp, Homo Sapiens
ggtgctgttttttggggagtggtttccaggagctgcctggtgtctgctgtaaatgtttgtctactgcacaagcctcggcctgcccctgagccaggctcggtaccgatgcgtgggctgggctaggtccctctgtccatctgggcctttgtatgagctgcattgcccttgctcaccctgaccaagcacacgcctcagaggggccctcagcctctcctgaagccctcttgtggcaagaactgtggaccatgccagtcccgtctggtttccatcccaccactccaaggactgagactgacctcctctggtgacactggcctagggcctgacactctcctaagaggttctctccaagcccccaaatagctccaggcgccctcggccgcccatcatggttaattctgtccaacaaacacacacgggtagattgctggcctgttgtaggtggtagggacacagatgaccgacctggtcactcctcctgccaacattcagtctggtatgtgaggcgtgcgtgaagcaagaactcctggagctacagggacagggagccatcattcctgcctgggaatcctggaagacttcctgcaggagtcagcgttcaatcttgaccttgaagatgggaaggatgttctttttacgtaccaattcttttgtcttttgatattaaaaagaagtacatgttcattgtagagaatttggaaactgtagaagagaatcaagaagaaaaataaaaatcagctgttgtaatcacctagcaaaaaa

SEQ ID NO: 79235 - DNA, 730 bp, Homo Sapiens
  misc_feature (72)..(72): n is a, c, g, or t
atggcctagttgccaattaatggcttaatgtatttaatgttctatataagcaatgtacaactctttagtttntaagtcaaatacacgtgaaaatcaccctagtggatatgagaatcttccatacaaatagtaagcctgtgattatacattatcagtaaagatcaagaactatataaatgccatgttacattaagcccaaatgataatttaatgatattgagtcaaaaaagagatactgcagctactaaaaagttagaaattatgccctaatacacgccgggaccagcaggctcctcagccaaccctgtccctcggcctggccctgccagagagggaccccagcccatcttgggcatcggcaggactcagccgctcccacctccccacagaaacccaggagtgtgtggacgtctgagcccagcttcctgcatccccacccggcccacctggcccctcacccccggcagcgggccagctgcgccccccactccccctcctaccccagcaggggcttctggggccttttcacctagagaaacattcccactgccctttggcgtccctgtactctgagctgtgaatatttttaaccctgtgaatacggcccgctcttgtgacacagagactattttatcaactgtcagccccattcctttatgataggattctccacagtggcttccgactcaggctccaatggaccaaataaaagcgttttgttttgtaaaaa

SEQ ID NO: 79236 - DNA, 1520 bp, Homo Sapiens
  misc_feature (553)..(584): n is a, c, g, or t
tgcaacatatgtgctaggtactgaggcctgggtggctgaatctggcacgaggagggcatgacctgctactacctgacacacggttgggcggggctcatcgtggtggtggagaaccgacaccccaaggcctacctgcacgtgcagtgtgactgcaccgacagcttcaacgtggtgtccacacgcggcagcctgcgtacccaggatagcgtgccacccctgcacaggcaggtcctggtgatcttgtcccagctagagggcaacgccggcttctctatcacccaccgcctggcacatcgcaaggcagcccaggccttcctcagtgactggacagcctccaaggggacccacagccccccactcacgccagaggtcgccggtctgcatgggccccgaccgctgtgaccaccatgcctggggcaggggctgtgcacagacggaccccccacccccacacgcactttatgagggagaccccgacagaggacgcttgagccagaatctcaggaccccgcccagggagctgccagcccaggactcagcttcccatgggccnnnnnnnnnnnnnnnnnnnnnnnnnnnnnnnnacagtccgcctggccaggcctcctggccgccacgcagaatacctcgaaccaggcgggctgtgaaccagccccgctcacctgccagccccaacacccgacgggggccgaggccaggctgcccctccctgtgggctcagggtctcctgcgggctaggcagccaggagctctgtccgcaaaaccaaatctgggtgtcagaggccaagaccctggggtgggatcagggaccacccctcacggggcataaggtcagttttcccccagagcccgggtccctgtcccccacagggcaggcggggtccctggagccctggtgtggagcggcgagtcccggggcggtgcctgtctcagaagaaggggcccttggccagccccccagcgacactatgcaaatcctggagtgcccgccaggatcgaagccatgactgggtgcaggcgggcgccaggcccgctgtgggtgggcaccagttctcagcaccgctcactgctgccgggcacactgggaccagcaggctcctcagccaaccctgtccctcggcccggccctgccagagagggaccccagcacatcgtgggcacgggcagggctcagccgctcccacctccccacagaagcccaggagtgtgtggacgtctgagcccagctttctgcgtgccctcctggcccctcactcccggcagcgggccggcctcgcccccactccccctcctaccccggcaggggcttccggggccttttcacctggagaaacattcccactcccctttggcctccctgtactctgagctgtgaatatttttaaccctgtaaatacggccagctcttgtgacacagagactattttatcaattgtcagtcccgttcctttaccataggattctccacagtggcttccgactcaggctccaatggaccaaataaaagcgttttgttttgt

SEQ ID NO: 79237 - DNA, 592 bp, Homo Sapiens
aacttagtgctaggtacgaggctgggtggcgaattcggcacgaggagggcatgacctgctactacctgacacacggttgggcggggctcatcgtggtggtggagaaccgacaccccaaggcctacctgcacgtgcagtgtgactgcaccgacagcttcaacgtggtgtccacacgcggcagcctgcgtacccaggatagcgtgccacccctgcacaggcaggtcctggtgatcttgtcccagctagagggcaacgccggcttctctatcacccaccgcctggcacatcgcaaggcagcccaggccttcctcagtgactggacagcctccaaggggacccacagccccccactcacgccagaggtcgccggtctgcatgggccccgaccgctgtgaccaccatgcctggggcaggggctgtgcacagacggaccccccacccccacacgcactttatgagggagaccccgacagaggacgcttgagccagaatctcaggaccccgcccagggagctgccagcccagggctcagctttcccatgggccccccgacgcaggcagcctcgagaaccggagcgatgacgggactcca

SEQ ID NO: 79238 - DNA, 853 bp, Homo Sapiens
gcggccgccacggccacccggaatgtgaagggcgctccgggctctgagcccgcagcttttacgacttctccctgcctcgttccttatattcacagaagccccatagtttcactgggttgcggttattttcctggtagtttgcgtgtaagaaagggagaatatagttttagaggaagctgaactatgacgatgctgggcgaagcggttggaaatggcagagctgaaacttattccaagctttcaaaataatcttttaagaagccaggattctccggtctggaatttctgagtgagtcctttttttatggtgtcctccctctgtgaatgtacaggcggaactgtacgaacagctcccttccatccatttttaactctttcggaaataacacctcacagcagcttcgtgcttttgtacagacctttgtaacaagtgtacagaaaactcattttgtttgagaaacaggagttgatgaacccatcatgctggtttttctctgagcacaaagttttaggctgtacacagccagccttgggaatctcgttgagcgttcggcgtggatccacggggccaggccaccctgcgggagcgccacacgcatccacttcggattcagtgggtgaagacagaactctgagagtctgcaggcggctcctgtgctttttatttctggctcttcggatgtcttctagacatttactatcactgcacctgaagaaaaaatcacttttaccttcctaatttaaaaagacaaaacagaaatgtacgttccttcgctagctttagtctttctgttcccatttttataaatctgagcattgataatgttctatctaaatttgtacagtgtgattt

SEQ ID NO: 79239 - DNA, 1652 bp, Homo Sapiens
  misc_feature (17)..(17): n is a, c, g, or t
  misc_feature (30)..(30): n is a, c, g, or t
gtgctagtgtactatanaacagtgtgtaanaaaagcaggctggtacggtcggaattccgggatatcgtcgaccacgctgtcgccctgcccgaggggtcccggcgcccgccccccacgcggtcgcactggaattcgcagcccctctcgggtccccggggcgcattttgcagtctgagtggcaatgcacttgctccaggacaggcggctaccccgccgcagcggaggcgcggacttttcttttggggggtctcgccggctcgccgcgctccccaccttgcctgcgcccgcccggagccagcggttctccaagcacccagcatcctgctagacgcgccgcgcaccgacggaggggacatgggcagagcaatggtggccaggctcgggctggggctgctgctgctggcactgctcctacccacgcagatttattccagtgaaacaacaactggaacttcaagtaactcctcccagagtacttccaactctgggttggccccaaatccaactaatgccaccaccaaggcggctggtggtgccctgcagtcaacagccagtctcttcgtggtctcactctctcttctgcatctctactcttaagagactcaggccaagaaacgtcttctaaatttccccatcttctaaacccaatccaaatggcgtctggaagtccaatgtggcaaggaaaaacaggtcttcatcgaatctactaattccacaccttttattgacacagaaaatgttgagaatcccaaatttgattgatttgaagaacatgtgagaggtttgactagatgatggatgccaatattaaatctgctggagtttcatgtacaagatgaaggagaggcaacatccaaaatagttaagacatgatttccttgaatgtggcttgagaaatatggacacttaatactaccttgaaaataagaatagaaataaaggatgggattgtggaatggagattcagttttcatttggttcattaattctataaggccataaaacaggtaatataaaaagcttccatgattctatttatatgtacatgagaaggaacttccaggtgttactgtaattcctcaacgtattgtttcgacagcactaatttaatgccgatatactctagatgaagttttacattgttgagctattgctgttctcttgggaactgaactcactttcctcctgaggctttggatttgacattgcatttgaccttttatgtagtaattgacatgtgccagggcaatgatgaatgagaatctacccccagatccaagcatcctgagcaactcttgattatccatattgagtcaaatggtaggcatttcctatcacctgtttccattcaacaagagcactacattcatttagctaaacggattccaaagagtagaattgcattgaccacgactaatttcaaaatgctttttattattattattttttagacagcctgggcaacagagtgagactgtctcaaaaacagaacaacaacaacaacaaaacccataaaatgtataggattataagggaaaccaatggaaacagtttaccaaaatgctaaaaaattatgaaactaatgtgcttctttttcatgtatttaataacaagatctaaaaacaggtgtaataaactgacattttccaaat

SEQ ID NO: 79240 - DNA, 1185 bp, Homo Sapiens
  misc_feature (64)..(64): n is a, c, g, or t
gtcagaaccagataaactgactgttggcaagaggaaacgaaatgaagatgatgaggttccagtnggggtggagatggcagagaatactgacaatccactaagatgcccagtccgactttatgagttttacctgtcaaaatgttctgaaagtgtgaagcaaaggaatgatgtgtttaaccttcaacctgagcgctcctgtgtcccgaatagccccatgtggtactccacattcccgatagaccctggaaccctggacaccatgttaacacgtattctcatggtgagggaggtacatgaagaacttgccaaagccaaatctgaagactctgatgttgaattatcagattaaaacggaagtgaggttcttattttcatacatattggtatgcaccaaactgtgaatgcatccagctgttggaaaatgatgtataagtctaagtcctcttgacttgaccataagatcatggaaaacagatgacttgtgaaccccacagtgtggatgtgcaaatgaaaattgaaggaaagaatatgaactgagaaatgttctttggcagtgatatagttcttagacatcttcagaatgactaatttctccgagtggtgcataatcttattttgtttgggagtaacaaatcgtggaatatttttaaggaaaactgttgtataaaactttaccatagtaaccttagaccttagagaggtagctttggagtgaaactttggctgcaataggctactttggcaagccctccgtaaaagtcagaggagagatcagtacagagctaagagtgacatcaaatgaggactgtgggacccagatttgaagacccaataaaaatactcaactttttaaaaaagatagtgaagtggtcttgattgattttgattttcactgccaagccaatcatgtgaaggacagaagcttttgccatgggcccctcacatcagggaaaatgaccttcactgctgttaacagtaatgtgtccctttcattttctggatcaagccttctcagcggtgggtctggatgtgggtaaactaaggtaaaggggatgatattccacaaactaattatgcacacagaaaatctgtggagcctatcagaccccaagtgtcttgaaatgtttgtagaaacccactaaaatgccccttctctgggtgtgggcccttattgcagctgtctta

SEQ ID NO: 79241 - DNA, 750 bp, Homo Sapiens
gctccacacgatgaagctaaatcaggttcctctggagctaaagcgtagtgtgggctcagtaaactgcaggagacagagtcttccagaaactaggctatgagaggaaactccagaaaccacagaatccttataagccaaagtgggtgaagatgaggtatggagcatggtatttgaaccccaagttgtggaaaaagcaaagagtagacgagcctctggttgaccctgaggtctcacataaggctcaagaggagaattttaaaaaggagctgcaggaacaggaggagttacttgcagaccttcacggaacagttgcctttaaggatttcattctaagcaggggctacaggacgccacgtttccttgagaatatgtatatcgggaaggaatgtaaacgtgcatgtaataagactcctataaaacgaactcaagcatagaagaatcgtaggagaatgattaggcagattttattactacgtacttggctatttctctgtctccttttaaagattaaacagagtttatgatgagtgtcccactgtggatgttcaactttgacttggcaacatctgtaaatgtaatacctgatggttataagcatttctcaatggatttctgcttcagttaatcaacattttgtatactttatcacccatgagatcaatattcacatgtaatcttctcatatttttgtggcacgtgaatattatataggtatatcaactattggtaaaaataaataaaggcataaat

SEQ ID NO: 79242 - DNA, 1384 bp, Homo Sapiens
  misc_feature (749)..(749): n is a, c, g, or t
tgaaaatgctttgtcctctctctttttcctagatggactgggctgtgttccaagcagtgaaggtggccgtggggacattacaggaggccaaatagagggatgctaggtgtctgggatcggggtggggacaggtagaccaggtgctcagcccaggcacaacttcagcaggggatggcgctaggggacttggggatttctggtcaaccccacaagcaccactctgggcacaagcagggcactctgttcccctcccccttaagccaacaaccacagtgccaccaagctcacacctgtccttctcaggctggcatctcccccaccctgtgccccttttaatggtaccaggcccgcactgggggcaattgacttcctccaatccccactcctccgagacccaggagacaaacagcccttccttggggaaacttgggaatcattctggcttaaacaacacctcctcctgctgctcactcccgctgagcccactctactgccccagctccgtttctaccaccgcatcctcactgggctcactgcaggcatgctgaacaaggggcctccaaccttctgccctcctgccaaaagatctggggagtgtgaggagagggtggcatcaggagctgctcaggcttggcggagggagcggcatgggcgatgtcactcagccccttcccggtccgcccgcttccctccttcatgatttccattaaagtctgttgttttgtgactgctgcccaatgtgggttggnccctgcccctgcaggccacatgggtccaggggagggagggggacatggaaatctgccttagagacaaatggagtagggcagcccggagctggggcccaagggacaggacaccactgcctgctcttcgtctggggcctggggccttgcctcccactgaggagactttgggtggggtggggggctgtcccccaaagatgctcctgagtgcaagagcaggcaaggcagagtcctggggcacagccacgaggtgacctccctgtgcagagactcccgagccctactcgacccagcaagctccagtccgccccatctctcccgtctaccctgacctggagatccagaagtatggcccagaagagcccttgccccgcctgtctgcccttggtggcagtggccatggccgacgccaggcccagccaccctgggactgagcctgactgcttcagacagccgacccctccttgtccccgctccacgcccgcagcctcctggtggcgctccgccctctcccgcttcctttgtgtatctcagccctacaaagaaaaacactcccactcttgtcatacctaattgttcctgctgtggtttggggaattttttttattaaataaagttttttattataagggtaatat

SEQ ID NO: 79243 - DNA, 665 bp, Homo Sapiens
gacctatatggcaggggtaaactgcctttgggggagctgtggttacaagggcttcaatcatattggaggcttcaatcatcctttgatttgtactgagtactggttgcaagctggcctgttaagtatatattgtgttgccataacaaaggcctaggaaaatttgaagaaaaaaaacactgaactgttattttttgtaatttatttaaaaatggacaaaatggttattagaatccaaagataatctaaaaacagttctactctttggaaatattatgtgtactcaaatttgcacttaagttggagaatgttttgagaccatttaaattgttttaaaaatagcttgatcttgatccttatgcaaaagaaactaagactttgtgtcattatttgaggtagctaaggactgatgttgaaagtgtattcagtctatagtaagctgatgtcaggtcagtaaattttgtttggggatgttggtattttcgatcaagttaaaatcttaaagcagacaaaaatagtaaacgctcctatttgtgttagattttgaacaattgtattaccctatattttctttaattagtcaaaggtaagccagattatttcattctaaatgaaaattaaagcactttggccatttattttttcaacaaatgctaatactaagtaaa

SEQ ID NO: 79244 - DNA, 685 bp, Homo Sapiens
ggaatggggagatgactcccccacgttcaaggaccccgtgctcgattccggaagaaaccacaaggctcttccctacaggagggagaacagtcctggggacttgcccccaccacccttgccaccgccagaggaagaggcgagctgggccctagagctgagggcagcaggcagcatgtcctccctggagcgggagcgcagtggggagaggaaagcggtccaggccgtgcccctggcagcccagcgggtgctccacccagatgaagaggcctggctcccatacagcagaccaagcttcctgtcccggggccagggcaccagcacatgttccacggccggcagcaactcttcacaggggctccagcagctctaggggctcccggggccctggccggagctcggagtcagagccggagccagagccaaaggccaggacagaaacgccgagaggaaccaagatgacccttgttggggcattgagaatatcatgagtgccacggggaaggggagtagggatgtcttttcccccccagcagtgatgagtggggctagctgaagcccattggtttccacgatttcaattggctgagaaggcagagagctagctcctccctttctttctttttccacctgagacttgtttataaaaaacaaaacaataaaaagagtctgatcagagcccagggaa

SEQ ID NO: 79245 - DNA, 967 bp, Homo Sapiens
  misc_feature (751)..(759): n is a, c, g, or t
ggcacgaggctttttttgatttccaactcacacacatctggcatattttacatctttgcaataaaacatggttacaatagcttaaggaatttatatatccaaaatatttcaccatgatctcaagatgaaatgaacttgtcttccaaatgttaagtatcctcccaattctaagctacaaactcaagatattgcttacagcctggtgatgaataacttaatcattacgctgattccccataatttcagaatttcataaatacaaacaacagtgaagaaggaattcagtgctaaaacttactagtacaaggtggataacaaataagtaatcacatcaataaataatgatatgtttctggtgcaaagtgccaatacaaagaacccattatcttgttttatctttttaaataaatgactgcgagtgagtgtaaattctgagaaaattacattcctgtaacatgcctcatagccctaccgacacaatatgtacatctatgacgatacagtcaccaaatatacaaagaagaaacatgaagaaagtgtatatacccctgggtgtataacttgatcagtacaatgtatggaaaatcatttgatagccatcattttatatcataaaagatgaaatgccttaggctaagaatgtggctttcagtgagaatttcacgagaacctaaaagaataacttcagttattgttgtaataaagtttgacttgttattaaagaaactaagctattcaagaaccaaagagnnnnnnnnngttagcatcagattatcctcccctaatgtatacacaccaagccagtgggataactctggaagagatgtccaggtgctgggaagttattactacagaactaacgcccatgactcctatttatacaagaaaaaccaggacctcatccctaagccccctttctgctgtgtcttcaaattatgcagggtagggctgaattttctttgtatcc

SEQ ID NO: 79246 - DNA, 856 bp, Homo Sapiens
  misc_feature (42)..(76): n is a, c, g, or t
aaacgacgagcgcagcgagtctgtgagcgaggaagcggccgnnnnnnnnnnnnnnnnnnnnnnnnnnnnnnnnnnncagtcgacggtaccggacatatgcccgggaattcggccattacggccgggggggtacatcatttctataattgtataatgtatttctttgtggttttaaatgataaagacattaagttaacaaacatataagaaatgtatgcactgtttgaaatgtaaattattcttagaacactttcaatgggggttgcattgtccttttagtgccttaatttgagataattattttactgccatgagtaagtatagaaattccaaaaaatgtattttcaaaaaattatgtgtgtcagtgagtttttcattgataattggtttaatttaaaatatttagaggtttgttggactttcataaattgagtacaatctttgcatcaaactacctgctacaataatgactttataaaactgcaaaaaatgtagaaggttgcaccaacataaaaaggaaatatggcaatacatccatgatgttttccagttaacataggaattaccagataaatactgttaaactcttgtccagtaacaagagttgattcatatggacagtatgatttattgtttatttttttaaccaaatacctcctcagtaatttataatggctttgcagtaatgtgtatcagataagaagcactggaaaaccgatcgtctctaggatgatatgcatgtttcaagtggtattgaaagccgcactgatggatatgtaataataaacatatctgttattaatatactaatgactctgtgctcatttaatgagaaataaaagtaatttatggatgg

SEQ ID NO: 79247 - DNA, 752 bp, Homo Sapiens
cgggtttgcctacaggtagattagattaattattactatgtaatgcaagtacagttgggggaaagcttaggtagatatattttttttaaaaggtgctgcctttttggatttataagaaaatgcctgtcagtcgtgatagaacagagttttcctcatatgagtaagaggaagggactttcactttcaagtggaacagccatcactatcaagatcagctcatggaaggagtaaagaaaatatctcaaaatgagacaaactgaagtttcgttttttctttaatgacttaagtttttgtgctcttgcaagactatacaaaactattttaagaaagcagtgatatcacttgaacttcagtgccctcactgtagaatttaaaagccttactgttgattgcccatgttggacttgatggagaaattaaatatctttcattatgctttacaaaatactgtatatgtttcagcaagtttggggaatgggagaggacaaaaaaaagttacatttaatctatgcatttttgccaagccatattgagttattttactactagagacattaggaaactaactgtacaaaagaaccaagtttaaaagcattttgtggggtacatcatttctataattgtataatgtatttctttgtggttttaaatgataaagacattaagttaacaaacatataagaaatgtatgcactgtttgaaatgtaaattattcttagaacactttcaatgggggttgcattgtcctttt

SEQ ID NO: 79248 - DNA, 1042 bp, Homo Sapiens
  misc_feature (21)..(21): n is a, c, g, or t
  misc_feature (469)..(469): n is a, c, g, or t
ccagcagagctcactcccgcntacagccactcacaccccggggacaggaagctgtagagttggcgggccaggagggcagttgagagctggccagcggagggtgcagggaagcccagctgtgctcaactctcctgcctccgccttccaccctgggcccagggacagacagacattgccctcagaagggcagggaggaggctgtcctggagaggcctgtaggtccattcttcacccgtccctaccaggccaactcggcctgcaggaagggagacctgcagggcgctacccctgcgcccccacacacagtagggccagaacaccatcccctccaccggggtgtgccgaggacagtggggaggagaggagaggggcagcttcctcctggccccaggaagggctggcatcgggttcctggcacagcccctcctgtccaggactttatcatcggcagacctcagaagacaacacnacaaaggtttcttttttcttagcttcatttctcttaaaaaacaaggaacaagaaaacattgcaccagcgttctaagcctcaaacaaaacacaaaacaaatccccctgcgaagcaacaataaactttacatctctttggcaacaataacttaaaatcacccaacttccattcgctccaaccacagcagttagttagttacaaaaatattccctgtgctgccctgcccccagctccaccccttccccaccatccctctccctgtaggcaggagccccccaacactgactgcggggcatggcccccactctcctttggcagctggggcacaggaccagatactgccccacagaggggagctgcctgcacggtcctgccaagggcacctctagaacggggcccacggggcaggagtacagcctggaagcccctccacccctgatcttttgggctgcccaccgtggtcacagcgggacccaggtgggagcagcctgttccctgtgggaagggtgggcttacgggtctagctgagtcagtgaaggggaaacagccacggactttgagataagggcagcg

SEQ ID NO: 79249 - DNA, 754 bp, Homo Sapiens
gcaatatccactttataaaatagctcctgcccagtgctcttggttcctgtcaaatgtggacctgtagtttaagaatgacaggtggtagagacccagatatttaaaaataggtgttcaataagggaatactgattgtgcattgtatctggatagcatgcctaattgtgcatttctgaaagttaccaattcaaaatgtaattggaacagttatctttgattagacaagcctgggaagagaatgttgaggtgcagagctcaccagccaagttcatgcccctctcgggcctttgtggctgagaagtgggacagaaagatgattaaggtaatgtgtcctccctgtagcattgtccagggccgttgtgtagatatttgacttcactgacagaaaagaaaccagggagtttgtagagactgtgcatttttagtataacattttcaccatctgatatggtttggctttgtgtccccacccaaattgcatctcaaattgtaatccccatgtgtcaagggagggacctgatgggaggtgatgggatcatgggggtggtttcccctatgttgttatcataatagagagggagttctcacaagatctgctggttttaaagacagcagtttcccctgctgtcactgtctctctcctgctgccttgtgaagaaggtgcttgtttctccctctgccatgattgtaagtttcccgaggcctccccggccatgtggaactgagtcaattaaacttcttgtttataaagtaa

SEQ ID NO: 79250 - DNA, 1553 bp, Homo Sapiens
ataggtgactatgaacaagttgttaacacaaaagcaggctggtaccggtccggaattcccgggatatcgtcgacccacgcgtcgatctatctttaaaaggaaaaacgaaagggagaggttgaaaatgcgcgagctgccctgcactgtgtgatgctccctccccgggagacgtggacgggggacgaggcacccgcagacgcccttctgctcactcgctcctctgtgcattcagcgagccacttgccacagatggagcccgtgacggtgtggagggtttcctggaaaggccatcttccaccaggtagaggcgagcgtgcctaggacaggccacagggctccacagaaatacctcaccccagcttcagggttctctctcctgagcctagatttgccagggtcttggtgccacgcaaatggtttcaaactgatctctatggataaatgctgatgttggttaaagaactgaaaaatgtgctcaactgtttcatcttttctattttatttttgtaatttatattgtacacaacccaggaagtaactattttggacatgtatttttataaaccaggtaatttactattatcctggaatttagactaggtttgtttcatttgttgacttagtttccagccaagaaggaaacgactgtctcccccatgtccaggtctcagtttcaagggcagagtccagagagcagacagagttctgtgagagcaggagagcagtctggaaaccctggctgtgcataccgtgtcagccgtgggcctggagatgggagcaggtgagacgcagagccccagtactgagaggaggaagccctcttacagggccccttgcccaccccaagtccgtgtctgaaacacggagcgggtgctgcttcaacccgcatttaatgctgtgtaagttgcgataaccacgtacgagtctgtctggttgatttctaatgtgactcctctggtatttcctcctggtaataaatacaagtgtgacctttcagattgcatatctcaaaagtaacattgctaatgttttataataaaatatattatgtgtgttttggttggtgaaaataatacagactacattttaaaagataaatgtatagcatgtccaatttttgtgtgtttttacatggcaattagatatttctccatcaccatctctgatgacagatttaacatgaacacagatagatgataaagtgtcatgcttttgatcaatattagcaagaggtttcacactgagaggcagaaacattgctgtttgttctcttattgaaaatattctgcaaattcctaaatctgtgttttcaaaactaatggcagtaagttttgacttcaccaatatgcaggtccaattcagagtattggtgtaattgttttctcatgaggcgtggccaggagaattcaccagtcagccttagtcatgttacttaacgtcattcatggtgcttgtggctttgtgcctgggatgagccaagttcatctgacgtctgtgtttgaagcacttcaggctgtttagtacttaataccacaggagtggaaggacaaaaa

SEQ ID NO: 79251 - DNA, 2332 bp, Homo Sapiens
  misc_feature (413)..(448): n is a, c, g, or t
  misc_feature (1614)..(1622): n is a, c, g, or t
gcaattgttagaccagagctgttgatccacaccattcatttttctgaaaattcatgaactattctctcatatccctgaaatataaaagtaagtggccactattcctaagattatttagtttataaagtttgcttttaatcatacaatagcttacctggctaaaactttgcgtataaagggaaaacttgctttaatctgtgggattgcggaccgatgcgacttgcagaaggtaaacaggcgtgggttttgtgtgcgttaggttaggtgttagtggacttttaatgtatcttgtgaagtatggttactagggtaggttcaagagctacatgcctctggcttttgaacccatctattaaatcttttttaatgctgtactaagataaatgtgaagtctgagtaaggttgctctcagnnnnnnnnnnnnnnnnnnnnnnnnnnnnnnnnnnnntttaggccatgggaactggcattttacttggtataggaatttaatgagaaccaaatcacaaaaataccagatctccttttgagatcgtggacaatcaggcctttggacaatcaccgcttccagtgcccgctgtgcgttgaggttagagacctaccgtttacacgctagagccgagaggacgttcaagtttcttaaagatgctgttggtcttttttcttatgttattgttttagttttgtgattttgatgaataattgaagttcagagtcacccgtggctcctaaggaaaaaacagcatcatgaaaggcaaaaagtatttgaaacgtaattgtttcaattttccacgcccgttctcacatgccccctttagctttatttctgggaacatgtcactagacctcagctagcctgacaccgcaataacccgttaggctttgaggcttttcagtgaattcttgacatttaaatcttcttatagaattctttatgaagccttaactaattcttgtttttgcttcctcagaaactttttattgcatctgccatccttcattggatttttgttttggtttgttgttgccattctagcaatgagcttagtccttgtacatctgcattaaggtgccgatgcagaaggcaaattggaaacacgcgccagcggcagtggggctcaaagccgacctccatgcatcattctctagagttgaaaggattgacatttctcagtaactaacccggcaaaatatatattttcataatgttgaatttgccttttaggaaaacaatgtttcatgaaacacttgtaagatacttattttgaaattaattataaggcattcatatttttaggactgaattcaaagggaaatgcttctttgactttttttcattgttcggttgactttcagcttttctgggagtgacaaagcagcagtgatgggtgctattcctggttctgtggtggtttactttgtctactaagtgatttactttcaaacctcattacagataatcttactaaaagacttaacatgcacactgctaaaaggtgttttactgttttccattaacgctgttgtatgaacaatatttggtgacatgttgtctttttgtcctgtagattgtcatatctggtatgtagttatccttttggcaagtcctttgannnnnnnnncctctagaaaatcctcagactgtcaatcttccatattttgaatattataatgctgtggccatttctatagaaagattacttgcaagtgtgtgtcttgaaaataacctcttgtatttgtgtgtttatgtgagttctgtctaagagatcagataagctctggaagcttcatcatctgtacctacatgtaactgtatctgggttacatgggcaggcggtaccaagtcctgctcttcgatggggtggctgagagataaaggttcctgaactctccctgctgtgtatgcaccacatctgtacttcagagaggtggaaaatcatctacaacactgcgtttcttgtggttgtgctgttactggtataaagtcaagtgccttcaatgctaaaggctcagaaatttttcttaaactgatttcatgtcctatgcaagtgttttctacaacctgcataaccagtactttgtaaaacttgtttacgcttcaattgtacatagtgatttttaaagaaatatatagtatttttatttaggtacctccaaacttgaattcgtctgtgtgaagcattgtaaaacgatacatttctcttttgagtaccattacagttgtacagaggttttcactgcttctatttttctactgttactgataagcatgtaacactgactttatcctacatatagttggcatttcaaataaatggcttgtatagaaaaa

SEQ ID NO: 79252 - DNA, 1136 bp, Homo Sapiens
  misc_feature (290)..(298): n is a, c, g, or t
  misc_feature (1031)..(1046): n is a, c, g, or t
tcccacgactttttactgccatctgagctactcagtgtttgaatcccaagaggaagtcagtttacctctcaggtctgttgtaggacttgattttgtaaagcaatgccatgttatgtggttgaaagggcactggacttagttagtatcaggagcactgagctcacagactgacttgggctcctactggtggggacctctgttagtcactttacctcatccaaagtataaaggaattggaccaaataatttaccacatagctctaaaacttaatttaaaatgtaattccagnnnnnnnnngggaataagcaaagggggaagaattgaaagagagagagaagaaagaatacagagagcttaccttttgcctttctgttgatgttacatctcttcttcctatgttcttaggtctatgagtctgtttccccatcatttggtatctagtccagttcctgcttactgctttgctaatagctggccttgctagaatccttggtttcactgctgttcttcatgtgcttctatgagatttactccaacacaaataggactgaatttattgtgaagtaacattggcaatcttaacttattcatttaacttatttttatagctagataaatattgttagtcttagacaatagctcacattttttgagaagcatgccctccctgtccatttgtcttataacatgacccagccctattttacgtcattctaaattcagcctcatataatgaaaatacattatgaaaacagatgtttaggagatttcctgtatagcagtcagccaattcatatgctttgtctctgctggcttctttttccatgcgttaacttttcccaatagcagaggaggcaaatatgagcatacaatccctttgttctaaagatattgttccagctagtggaatgatgttgaatctttaataaccataattagttgctttttcagtatcttctgctttgtctgtgtctatccagtggcctaggaattaaagtgtaagttgttttcgctgttaaattggatattnnnnnnnnnnnnnnnngcaagattttcatgtgttatttaattctgtattgtttcttatatttgtagtaaaatattgaacaattaaaagtgttgactccaaaaaaaa

SEQ ID NO: 79253 - DNA, 3108 bp, Homo Sapiens
  misc_feature (1924)..(1924): n is a, c, g, or t
  misc_feature (2646)..(2680): n is a, c, g, or t
cggtccggaattcccgggatcgtgtctgcagctagtgtgtcaactcagcgtttctcctctcgtccctggaagagctaaagatggctgaatttctagatgaccaggaaactcgactgtgtgacaactgcaaaaaagaaattcctgtgtttaactttaccatccatgagatccactgtcaaaggaacattggtatgtgtcctacctgtaaggaaccatttcccaaatctgacatggagactcacatggctgcagaacactgtcaggtgacctgcaaatgtaacaagaagttggagaagaggctgttaaagaagcatgaggagactgagtgccctttgcggcttgctgtctgccagcactgtgatttagaactttccattctcaaactgaaggaacatgaagattattgtggtgcccggacggaactatgtggcaactgtggtcgcaatgtccttgtgaaagatctgaagactcaccctgaagtttgtgggagagagggggaggaaaagagaaatgaggttgccatacctcctaatgcatatgatgaatcttggggtcaggatggaatctggattgcatcccaactcctcagacaaattgaggctctggacccacccatgaggctgccgcgaaggcccctgagagcctttgaatcagatgttttccacaatagaactaccaaccaaaggaacattacagcccaggtttcaattcagaataatctgtttgaagaacaagagaggcaggaaaggaatagaggccaacagccccccaaagagggtggtgaagagagtgcaaacttggacttcatgttggccctaagtctgcaaaatgaaggccaagcctccagtgtggcagagcaggacttctgggagggccgtatgtgaggccgaccagtctcatggcggtcccagggtctctcagtgacataaagggtgcagctgacgagatcatgttgccttgtgaattttgtgaggagctctacccagaggaactgctgattgaccatcagacaagctgtaacccttcacgtgccttaccttcactcaatactggcagctcttcccccagaggggtggaggaacctgatgtcatcttccagaacttcttgcaacaggctgcaagtaaccagttagactctttgatgggcctgagcaattcacaccctgtggaggagagcatcattatcccatgtgaattctgtggggtacagctggaagaggaggtgctgttccatcaccaggaccagtgtgaccaacgcccagccactgcaaccaaccatgtgacagaggggattcctagactggattcccagcctcaagagacctcaccagagctgcccaggaggcgtgtcagacaccagggagacctgtcttctggttacctggatgatactaagcaggaaacagctaatgggcccacctcctgtctgcctcccagccgacccattaacaatatgacagctacctataaccagctatcgagatcaacatcaggccccagacctgggtgccagcccagctctccttgtgtgccgaagctcagcaactcagacagccaggacatccaggggcggaatcgagacagccagaatggggccatagcccctgggcacgtttcagtgattcgccctcctcaaaatctctacccagaaaacattgtgccctctttctcccctgggccttcagggagatacggagctagtggtaggagtgaaggtggcaggaattcccgggtcacccctgcagctgccaactaccgcagcagaactgcaaaggcaaagccttccaagcaacagggagctggggatgcagaagaggaagaggaggagtaatggtgtctccagagactttacatcggttcctgtcttctgtgcacagcagcacttgccgctgtgcaggcccacctctttggctctttgggtggngagagtttttccagattttagatttttctaggttatggccattttgtgtcttttgaggttgtgctgtgggggtttgggtttgagggaagggagcagggtggcggttgaggaacgcttcagccttagctgctacctttcggcagcagtgaaatacaagctgcagcctcggctgccagggctcccttttgacttattgtcgccactgccccttggtgctgtgtggtcccagtggaaggaggggaagattttggaaacctggtagccaccagtaaggtgattctctgccctgttggggcctaaatttgggggcttttgggcaacctctccgtgtactgcgtctgtccacactcgattgggccccaggtgtgtatgaggcgctctggtaaggtgctcaggccagttgcaatgtctgtcagtaacgaggcttttgatgtgttgagctggaggtgagtggaccgggggctgtgttttaagctgcttccttggcatttggcatcactgccttctgttcccgggggagcatggatcttttgtcctcactgctttctaatggggagggctgagggctccctgtccccacagcaggtatgttgggctctgccccagccccacacttgctctgaaaaccaagtgtcagagccccttccccttgtttttattttactgttataataattattaacttccttgtaatagaaataaagtttgtacttgggagttcnnnnnnnnnnnnnnnnnnnnnnnnnnnnnnnnnnnggggggcgcgcggcccaaaatattatccccgcggggggcgcccaggtttaaacgcggtgtcacccaggttttttgggtcacaaagggggccccataagaggggagcgccggatttaaatatggctaaggacaagggggccggccggtttaaacaacggtcggtgagatggagggaacaacctggcaactctggggagaccttggggagaaggggacctttatctctcggggggtgggcgaccaatatgggggaccacaatttcctctcagagagatttttaaagggcctcaaggggaaattatacaaattttcaacggtggtatgaggtgttaaacactaaggggaatagatactgggagccctggaaaatttggggcaaagggaaatatactttgggaactttttttcgcgagttgtgtagataaaa

SEQ ID NO: 79254 - DNA, 908 bp, Homo Sapiens
  misc_feature (57)..(57): n is a, c, g, or t
  misc_feature (123)..(123): n is a, c, g, or t
gtaccagcagaggggccccacgtgggctgtgctacatacaggcccccacagcccgcntggatgttcggggacccccacatcaccaccttggatggtgtcagttacaccttcaatgggctgggngacttcctgctggtcggggcccaagacgggaactcctccttcctgcttcagggccgcaccgcccagactggctcagcccaggccaccaacttcatcgcctttgcggctcagtaccgctccagcagcctgggccccgtcacggtccaatggctccttgagcctcacgacgcaatccgtgtcctgctggataaccagactgtgacatttcagcctgaccatgaagacggcggaggccaggagacgttcaacgccaccggagtcctcctgagccgcaacggctctgaggtctccgccagcttcgacggctgggccaccgtctcggtgatcgcgctctccaacatcctccactcctccgccagcctcccgcccgagtaccagaaccgcacggaggggctcctgggggtctggaataacaatccagaggacgacttcaggatgcccaatggctccaccattcccccagggagccctgaggagatgcttttccactttggaatgacctggcagatcaacgggacaggcctccttggcaagaggaatgaccagctgccttccaacttcacccctgttttctactcacaactgccaaaaaacagctcctgggctgaacatttgatctcccactgtgacggagatagctcatgcatctatgacaccctggccctgcgcaacgcaagcatcggacttcacacgagggaagtcagtaaaaactacgagcaggcgaacgccaccctcaatcagtacccgccctccatcaatggtgctcgtgtgattgtaaccctccc

SEQ ID NO: 79255 - DNA, 982 bp, Homo Sapiens
  misc_feature (599)..(599): n is a, c, g, or t
  misc_feature (741)..(741): n is a, c, g, or t
  misc_feature (833)..(833): n is a, c, g, or t
  misc_feature (858)..(858): n is a, c, g, or t
  misc_feature (860)..(860): n is a, c, g, or t
  misc_feature (945)..(945): n is a, c, g, or t
gagcctttacctggacaagtttgttcaacgtttactttatgtttacattatcgaaaccaacgttttcgttctaaacctgttccatgtgcctgtgaaccagattttcatgatggctttttacttgaagtacacagagaaagcttgggtgatggaactagaatggctgattcaacaacaatgttatcaataagtgatccaattcatatggtgctaatcaaaacagacatatttggtgagacgactttagtagcatcatattttctggaatggcgatcggttttgggctcagaaaatggagtgaccagtctgactgtggaacttatgggtgtaggcacagaatcaaaagtttctgtgggaattttaaatataaaacttgaaatgtatccaccactcaatcaaacgttatctcaagaagtagtgaacacacagcttgctttggaacgtcagaaaactgcagagaaagagcgattatttcttgtatatgctaagcagtggtggagagaatatttgcaaattcgaccctcacacaactcacgactggttaagatttttgcacaggatgaaaatgggataaatagaccagtctgttcctatgttanaccacttcgagctggacggcttcttgatactccaaggcaagcagcaagatttgttaatggtccttggttatgaacgagcccctgttattggaggaggaggtaaacaggagcagtggtgcactctgctggcccttctctgtanaaacaagggtgactgtgaagatcacgctacccttctgtgcaggcttcttcttgggatatggattaaaagccttttgttgtggttgggaccanggcaaaaggagtacctcatgcatgngnttatgggctggtgaaactgatggggccattcctttttttgggaggagttaaacaggaacacaggtacatccattaaacctaccanatcctggatggaccttcccagttgcttgaaaagcccc

SEQ ID NO: 79256 - DNA, 1322 bp, Homo Sapiens
  misc_feature (129)..(130): n is a, c, g, or t
  misc_feature (146)..(146): n is a, c, g, or t
  misc_feature (217)..(217): n is a, c, g, or t
  misc_feature (225)..(225): n is a, c, g, or t
  misc_feature (1154)..(1179): n is a, c, g, or t
cacgctcccggctgcgtcatatcagtgcagcagttccgatgaagcggcatagccacgcatatgtgatagctcatcatagcacccagcttacattatgctccgctcgttgtgttgaatgtgacgatacannttcacacagaacagtntgcatgatacgatttatagactcctataggattgcccctcgagccagatcgggcacgaggataccagatcnagcccgcnccggcgcggacccaaccccgacccagagcttctccagcggcggcgcagcgagcagggctccccgccttaacgtcctccgcggggcccagccaccttcgggagtccgggttgcccacctgcaaactctccgccttctgcacctgccacccctgagccagcgcgggcgcccgagcgagtcatggccaacgcggggctgcagctgttgggcttcattctcgccttcctgggatggatcggcgccatcgtcagcactgccctgccccagtggaggatttactcctatgccggcgacaacatcgtgaccgcccaggccatgtacgaggggctgtggatgtcctgcgtgtcgcagagcaccgggcagatccagtgcaaagtctttgactccttgctgaatctgagcagcacattgcaagcaacccgtgccttgatggtggttggcatcctcctgggagtgatagcaatctttgtggccaccgttggcatgaagtgtatgaagtgcttggaagacgatgaggtgcagaagatgaggatggctgtcattgggggcgcgatatttcttcttgcaggtctggctattttagttgccacagcatggtatggcaatagaatcgttcaagaattctatgaccctatgaccccagtcaatgccaggtacgaatttggtcaggctctcttcactggctgggctgctgcttctctctgccttctgggaggtgccctactttgctgttcctgtccccgaaaaacaacctcttacccaacaccaaggccctatccaaaacctgcaccttccagcgggaaagactacgtgtgacacagaggcaaaaggagaaaatcatgttgaaacaaaccgaaaatggacattgagatactatcattaacattaggaccttagaattttgggtattgtaatctgaagtatggtattnnnnnnnnnnnnnnnnnnnnnnnnnnccatgtgttaaaatactcagtgctaaacatggcttaatcttattttatcttctttcctcaatataggagggaagatttttccatttgtattactgcttcccattgagtaatcatactcaactgggggaaggggtgctccttaa

SEQ ID NO: 79257 - DNA, 1005 bp, Homo Sapiens
  misc_feature (242)..(242): n is a, c, g, or t
ccctctgtggcattgggtctgcagaaccagtttcttttccgtggatatagttcgcttacaggctcgtgatattggccggcatcatatggtaccggtgtcatgggagcccaccctccttcccgagatcatgtcatctttgacagtatgttatggaatcataacatcctgaccggatcctgggttgggcctggtgtggaatcaccgcggctccgccaaacaaaccccgggctgatcccatggtntgtggcactggcctcctggactctgcacccttcctattcctgtcccttgcctgcgcccgtggtagcatcgtggccacttatattttcatcttcaatggagagaccctcctgtccatgaactgggccatcgtggccgacattctgctgtacgtggtgatccctacccgacgctccaccgccgaggccttccagatcgtgctgtcccacctgctgggtgatgctgggagcccctacctcattggcctgatctctgaccgcctgcgccggaactggcccccctccttcttgtccgagttccgggctctgcagttctcgctcatgctctgcgcgtttgttggggcactgggcggcgcagccttcctgggcaccgccatcttcattgaggccgaccgccggcgggcacagctgcacgtgcagggcctgctgcacgaagcagggtccacagacgaccggattgtggtgccccagcggggccgctccacccgcgtgcccgtggccagtgtgctcatctgagaggctgccgctcacctacctgcacatctgccacagctggccctgggcccaccccacgaagggcctgggcctaaccccttggcctggcccagcttccagagggaccctgggccgtgtgccagctcccagacactacctgggtagctcaggggaggaggtgggggtccaggagggggatccctctccacaggggcagccccaagggctcggtgctatttgtaacggaataaaatttgtagccagaaaaaaa

SEQ ID NO: 79258 - DNA, 1130 bp, Homo Sapiens
cgcccgccccgccgctcctcctccctgtaacatgccatagtgcgcctgcgaccacacggccggggcgctagcgttcgccttcagccaccatggggaatgggatgaacaagatcctgcccggcctgtacatcggcaacttcaaagatgccagagacgcggaacaattgagcaagaacaaggtgacacatattctgtctgtccacgatagtgccaggcctatgttggagggagttaaatacctgtgcatcccagcagcggattcaccatctcaaaacctgacaagacatttcaaagaaagtattaaattcattcacgagtgccggctccgcggtgagagctgccttgtacactgcctggccggggtctccaggagcgtgacactggtgatcgcatacatcatgaccgtcactgactttggctgggaggatgccctgcacaccgtgcgtgctgggagatcctgtgccaaccccaacgtgggcttccagagacagctccaggagtttgagaagcatgaggtccatcagtatcggcagtggctgaaggaagaatatggagagagccctttgcaggatgcagaagaagccaaaaacattctggccgctccaggaattctgaagttctgggcctttctcagaagactgtaatgtacctgaagtttctgaaatattgcaaacccacagagtttaggctggtgctgccaaaaagaaaagcaacatagagtttaagtatccagtagtgatttgtaaacttgtttttcatttgaagctgaatatatacgtagtcatgtttatgttgagaactaaggatattctttagcaagagaaaatattttccccttatccccactgctgtggaggtttctgtacctcgcttggatgcctgtaaggatcccgggagccttgccgcactgccttgtgggtggcttggcgctcgtgattgcttcctgtgaacgcctcccaaggacgagcccagtgtagttgtgtggcgtgaactctgcccgtgtgttctcaaattccccagcttgggaaatagcccttggtgtgggttttatctctggtttgtgttctccgtggtggaattgaccgaaagctctatgttttcgttaataaagggcaacttagccaagttta

SEQ ID NO: 79259 - DNA, 1395 bp, Homo Sapiens
tggcagtaacataacggttctaaggtagcgaggcctgggtggcgaattcggcacgaggccgagcctagtgcctcccacgcccggcggccgcgagccggggtccgcgagggcggagtggggcgcggcagccaggaacccgactacgaatcccagggtgcgggcgggcggagcgaggagggacgctgggcctgcccggtgcgcacgggggcggggaccggcaaggcgggaccatttcccggcataggctccggtgcccctgcccggctcccgccgggaagttctaggccgccgcacagaaagccctgccctccacgccgggtctctggagcgccctgggttgcccggccggtccctgccgctgacttgttgacactgcgagcactcagtccctcccggcgcgcctcctccccgcccgcgcccgacggtcctcctccctgtaacatgccatagtgcgcctgcgacacacacggccggggcgctagcgttcgccttcagccaccatggggaatgggatgaacaagatcctgcccggcctgtacatcggcaacttcaaagatgccagagacgcggaacaattgagcaagaacaaggtgacacatattctgtctgtccacgatagtgccaggcctatgttggagggagttaaatacctgtgcatcccagcagcggattcaccatctcaaaacctgacaagacatttcaaagaaagtattaaattcattcacgagtgccggctccgcggtgagagctgccttgtacactgcctggccggggtctccaggagcgtgacactggtgatcgcatacatcatgaccgtcactgactttggctgggaggatgccctgcacaccgtgcgtgctgggagatcctgtgccaaccccaacgtgggcttccagagacagctccaggagtttgagaagcatgaggtccatcagtatcggcagtggctgaaggaagaatatggagagagccctttgcaggatgcagaagaagccaaaaacattctgggtaaatattaaggagcaaggggcgcacagagaccccaagccaggcgccaaggcggtggagccagttttccggcactggctccgctgacctacgataattatacgacgggagacctaaagcaagcgacctgctgccttccttcacaatgcttgtctccagtgtgcccggctgggcaagggtgccgtgggtgggggcccatgaagacaggaaagggaattacccaaggcaagtgggggcaagggctcctttcccccaagcaaaaccggccaagccctggttccagggccctggaattcggcccacccctaaccggggttggacctgaacttggctgcccccgggggatagttgccccatgggctggggcactggctcctttgccccttc

SEQ ID NO: 79260 - DNA, 1378 bp, Homo Sapiens
  misc_feature (48)..(91): n is a, c, g, or t
  misc_feature (95)..(129): n is a, c, g, or t
  misc_feature (482)..(482): n is a, c, g, or t
  misc_feature (666)..(676): n is a, c, g, or t
  misc_feature (1305)..(1335): n is a, c, g, or t
  misc_feature (1358)..(1358): n is a, c, g, or t
aaagaaaacccttgttattccgaactcactatagggcgctactctttnnnnnnnnnnnnnnnnnnnnnnnnnnnnnnnnnnnnnnnnnnnnccgnnnnnnnnnnnnnnnnnnnnnnnnnnnnnnnnnnncagtcgacggtaccggacatatgcccgggaattcggccattacggccgggcagcacccaggtcttagttttcacctctagttctggatgtacattccatttccatccacagtgtactttaagattgtcttaagaaatgtatctgcatgaactccgtgggaactaaaggaagtgggaacttagaaccagacagttttccaaagatgttacaatttcttttgaaaaacctttgtttattagcaccaatttcttgccactaagctatttgttttattatacatcctttaattaaaaactatatatgtaacttcttagatattagcaaatgtctctgctaccatttccttaaggtgnttgagctttaactctatgctgactcagtgagacacagtaggtagtatggttgtggacctatttgttttaacattgtaaaattttgagtcagattttaatattgtaaaatcttgggtcaaataattcaaagccttaatgcagatgcactaaaacaaagaaatggtaaatgaattgtttgcatttnnnnnnnnnnnctcttaagaaaactgtactaaatctgaatcatgttttgagcttgtttgcagtacttttaaacattattcactactgtttttgaagtgagaaagtatcagccatttagcatttaagttggggtatttagagcctgtaatctaaatgctggctcaaatttattccccagctacttcttataccactattcttttaatgtttgcataatcataagcacctcaacacttgaatacataatctaaaaattatatagtaaagctggtagccttgaaaatgtcagtgtgatatctattatgtagataaatatatatagtggcctttcaggactgtcacagtaacactttatttacagagctaatgtttgtcctaaattttcaggaccctagaggagagctttatacaattaccgatgtgaatttctctaaagtgtatatttttgtgtccagttatattatttaaaaaagtgttactttgtaaaaattgtatataaagaactgtatagtttacactgttttcatcttgtgtgtggttattgcttaatgctttttaaacttggaacactcactatggttaaataaggtcttaaaagaaatgtaaatattctgttaataaagttaaatattttaatgannnnnnnnnnnnnnnnnnnnnnnnnnnnnnngaccgcgtatgcggccgcaagcnttattccctttagttgaggg

SEQ ID NO: 79261 - DNA, 1149 bp, Homo Sapiens
ggtccggaattctcgggatatcgtcgacccacgcgtccgctgacgcgtgggctggcactgctcttctctgcccagaagcaccaccagcatgccctggatgttgtcaacatggccatcaccgagcaccctgagaacttcaacctgatgttcaccaaggtgaagctggagcaggtgctgaaaggcccagaggaagccctcgtgacctgcagacaagtgctgaggctgtggcagaccctgtacagcttctcccagctgggaggcctagaaaaggatggcagcttcggtgaaggccctcaccatgaagaagcagagtgggcaggcacctgactctggcgacggatgctccacgatgcagactctggctcccgacgggcttcatcacatagccgcctcccggctggaggaggccatgtcagagctgactatgccctcttcggtcctgaagcagggccccatgcagctgtggaccacgctggaacagatctggctgcaggctgctgagctgttcatggagcagcagcacctcaaggaagcaggtttctgcatccaggaggcggcgggcctcttccccacttctcactcagtactctatatgcggggccggctggctgaggtgaagggcaacctggaggaggccaagcagctgtacaaggaggcgctcacggtgaacccagatggcgtgcgcatcatgcatagcctgggtctgatgctgagtcggctgggccacaagagcttggcccagaaggtgcttcgtgatgccgtggagaggcagagtacgtgccacgaggcgtggcagggcctgggcgaggtgctgcaggcccagggccagaacgaggctgccgttgactgcttcctcaccgcccttgagctggaggccagcagccctgtactgcccttctccatcatccccagagagctctgacgacgctgcagccgcagggagggaggggctggccagagggagaggcagcagggaacgtgggtcagggtggggcaacagtggcatcaggtgcggggcctcagggaaatacatctttagtgaacgcctctgcagctgcagccctcgttctcttggctgggccaagagggccttcctggatttctttgttggtgccttgggaaacagtctgacttgaaccctaaaaaaaa

SEQ ID NO: 79262 - DNA, 1152 bp, Homo Sapiens
  misc_feature (966)..(966): n is a, c, g, or t
  misc_feature (975)..(975): n is a, c, g, or t
  misc_feature (1040)..(1040): n is a, c, g, or t
aaacaaccggtccgcctgatgttcaccaaggtgaagctggagcaggtgctgaaaggcccagaggaagccctcgtgacctgcagacaagtgctgaggctgtggcagaccctgtacagcttctcccagctgggaggcctagaaaaggatggcagcttcggtgagggcctcaccatgaagaagcagagtggcatgcacctgactttgcctgatgcccatgatgcagactctggctcaagccagaggccacagtccacgtaatgtccttggcagatcaagtcaaatagaaaggaatggactgagctctttacaattctaagctgaaagcagactcttttctggaaaaactcatcctgaaacccatggcttgtgaaattcaaatgagttcaggaactgcagacttaacattttttaactgaggacctgcttaaagcagaacaccttcatcaaaaacacaagaattagtcatgggaaagaaggtgtgagtggagttgtatttagtggaattgctcagttttttcacttctgtagacatgagcctttctgtggacaaagccttgcacctttgttgtcaaatgacagagttgatttcagaagccaaacctagcacccaactttagaggcacatctcaggggtgtatggctgtatgcagagcttctgtctcccaggagggaatggttaagggaggggagaatggtagctcccttgcaattaaagaaggaagaatcatgaacaaagttattaggactccaggtacacttgtctcataaactgaagtcatccgtggtttgccgtgaggtctcctgagtttattggagcctttattgcgtctatgacagagagagagaaagtgctcacatttcacctgcatgggaattataaatgtcaacagcttatatgtcctgaaccggagcccatgtcacccagaactgccactgagagaggttttccagagggcaggtgttctngacttgagnctgctatccagttccttcacaggcacacgccttgaatggggtaccttttctacaaacaaatgagnaatatgcacttgtgaaaacagaaggtgaaaatagccaagggaagaaaagaaaaatcattcctaatttcaccacttagaccttaataaatggcctttcagacttttaaaaaaa

SEQ ID NO: 79263 - DNA, 1566 bp, Homo Sapiens
  misc_feature (1149)..(1281): n is a, c, g, or t
  misc_feature (1283)..(1283): n is a, c, g, or t
  misc_feature (1287)..(1288): n is a, c, g, or t
  misc_feature (1292)..(1292): n is a, c, g, or t
  misc_feature (1300)..(1307): n is a, c, g, or t
  misc_feature (1317)..(1317): n is a, c, g, or t
  misc_feature (1345)..(1345): n is a, c, g, or t
  misc_feature (1348)..(1348): n is a, c, g, or t
  misc_feature (1375)..(1395): n is a, c, g, or t
  misc_feature (1402)..(1453): n is a, c, g, or t
  misc_feature (1462)..(1479): n is a, c, g, or t
gctaggtcgaggctgggtgttaattcggcacgagggccctctcgagcggctgcggggtccccgcggcgccgggctgctgagctgagggcccgcggcggccgcggccggtgcatgtgcggctgctggatgcggaggcggcggcgacggcgcggatcggcaggatgttagggcagcagcagcagcaactgtactcgtcggctgcgctcctgaccggggagcggagccggctgctcacctgctacgtgcaggactaccttgagtgcgtggagtcgctgccccacgacatgcagaggaacgtgtctgtgctgcgagagctggacaacaaatatcaagaaacgttaaaggaaattgatgatgtctacgaaaaatataagaaagaagatgatttaaaccagaagaaacgtctacagcagcttctccagagagcactaattaatagtcaagaattgggagatgaaaaaatacagattgttacacaaatgctcgaattggtggaaaatcgggcaagacaaatggagttacactcacagtgtttccaagatcctgctgaaagtgaacgagcctcagataaagcaaagatggattccagccaaccagaaagatcttcaagaagaccccgcaggcagcggaccagtgaaagccgtgatttatgtcacatggcaaatgggattgaagactgtgatgatcagccacctaaagaaaagaaatccaagtcagcaaagaaaaagaaacgctccaaggccaagcaggaaagggaagcttcacctgttgagtttgcaatagatcctaatgaacctacatactgcttatgcaaccaagtgtcttatggggagatgataggatgtgacaatgaacagtgtccaattgaatggtttcacttttcatgtgtttcacttacctataaaccaaaggggaaatggtattgcccaaagtgcaggggagataatgagaaaacaatggacaaaagtactgaaaagacaaaaaaggatagaagatcgaggtagtaaaggccatccacattttaaagggttatttgtcttttatataattcgtttgctttcagaaaatgttttagggtaaatgcataagactatgcaataatttttaatcattagtattaatggtgtattaaaagttgttgtactttgnnnnnnnnnnnnnnnnnnnnnnnnnnnnnnnnnnnnnnnnnnnnnnnnnnnnnnnnnnnnnnnnnnnnnnnnnnnnnnnnnnnnnnnnnnnnnnnnnnnnnnnnnnnnnnnnnnnnnnnnnnnnnnnnnnnnnanaaannaaanaaaaaaannnnnnnnaaaaccccanaaccccaaaaaccaaaacacaaaccccnaancgcgcggtgcggggcggcgctccccannnnnnnnnnnnnnnnnnnnnccataannnnnnnnnnnnnnnnnnnnnnnnnnnnnnnnnnnnnnnnnnnnnnnnnnnntcccttttnnnnnnnnnnnnnnnnnnaatatgccatcttttttgtcttttgttccaccctccccccctacgaaaatatcgccgcgcggggcgccggacttcccgtctgggttt

SEQ ID NO: 79264 - DNA, 739 bp, Homo Sapiens
  misc_feature (137)..(137): n is a, c, g, or t
aggcataagggccggatgtcctcagcttcacagatgtgcataggggctggcacacagtaggagctcagtgcacaactgctggatgaactcaatgaaggcggcagcatggtgtgtgatggcacggcccacactgggtntgaagggttgttcttccattctggcaggcttggggacctggcacactactgccaactagccaagttggactcagacccaagggggttagccatgacctctgccttgtgtgatcaggtgcaaacagacaacaacccagcaggactcctcttgcagaatctggaattgctgagaagttgcatcagcaagaggggcaaggtcagacaggatttggccgccaggggcacctaagctgtgggtgcagagaatgggatgcagaggtagagacaagaagggtagaggtggcaggtatccctgataagggggagaccatgggttcatcctgggattccaccctcagagtcagatgcccttgggatcaccgactaatgcctctccacctcactctggactgcccaaggaatctgtcctgtgctacccacagtgcagattgcaacagggctcctcctccccacccagggccctgattaaggggatggattgcacactgtagtgagacatccatcctgaccccacctcatcagccagggagctccctgaagacaggccatcgagagaggcacacaacaggctgtggtctaaaataaacttttaattgccaaag

SEQ ID NO: 79265 - DNA, 1150 bp, Homo Sapiens
  misc_feature (191)..(191): n is a, c, g, or t
  misc_feature (1056)..(1078): n is a, c, g, or t
tccgtttttgcttagatgaggagaaccgtcatgcagcggacccctttgtgcggacccctctgcggtgtctgcgggccagccggaccgtcatttatattaaggagttgttgtagatcgtgctataaacagtatgtgttggtggggtttagttgtcctcttttgagtccctcattcatccctgatctctctcnccttccctgcccagctctgttgatgctgctgtgcgcgtgtgaggccgctctgcacacaggcccctggggtgtgtgaactgaaattctccctgtatttgtgagactcgcaggagtccccatctgtagcacaggcaatgccagtgccatgctgcagcctcagaaaccaggcctctcactccagcagcaggcagaaccgtgtctgtggtcgggtgctgtccacagctctgtctgccttgttcttgggcttgagctggatagaggtgggtctcttcaccttccctgaattcagaacagaccctgtgcctggccccagtgtgcccaggcaattccccaggccctcattgggagcccttggtgttctgagcagcagggcccaggcagcacatgagcagtgcccaggggctccctgcgtgaggacggcaaggtgcgatgtatgtctaacttattgatggcaggcagccccctgtgccccctaagcctggccctggttattgctgagctctgtgctcagtgctgcggcctggccgtggctcgtctgttcctttggggggcccgggcgggttgtgggaatcagtcttcacagacagacgtgagccaggcggaggactcgttccttgcagaggtcagtcctcacctgcaggtgtcggggtggaggggggcaaggaggggcaggcacacaccatgtctgacctgaacccgattctggggagcatcttcccgctccggccccacgacctccacagggttacattgtaatatatatgccccagctaacctgtctgatggtggcatcttcctgcagacatttcaaacatgtaacttttatatgaaaaaaaataaacacagatgaaagctgcccaatgcnnnnnnnnnnnnnnnnnnnnnnncctgagcagcggccgcaagcttattccctttagtgaggttaattgagcatggcactggccgtcgttaaaacc

SEQ ID NO: 79266 - DNA, 736 bp, Homo Sapiens
  misc_feature (69)..(69): n is a, c, g, or t
tgaaaacttaggaaaacaatctaatcgctgttgtctatatcattgatttaattcatcaaaagttactcnaaatgattgatatttttacttgctaattattttaggagtgattttgtgaaatttatttttaacacagtcctagaattgaattgaaatatggtttggaagtttgagggttttttactgtgtctatccttgtgtgtctgtttcctttaaagattcatgatacaatcactgtgtacaatgtgtcctttaatattggttcctgtaataatgtgccttcaaattatttcttgagttttgtgacttaaatatgcagttcactgactcacgccaatgttgtttgctttttaccttaattctttttactgtgctctctcagttttattttttggaagaatggtactcagtgctttgatttgattagtaagatttttgaaacacatgtaatttatttcagaaatgtgattgttttaactctgacttttttagtgcagtcattggagaaatcgatgaagaaacagattctgcgcttgatttggggaatattcgagcagaacctttaaattctgtagcacactgaggaaaaactacatacttggacatctgtaaatctttgtacagaaactgattattctgaggatgatatatggagtttttatgaatgtgtcactggattttgactccttattgattcattgtaatatgtaaattaaaatatttctacattttattg

SEQ ID NO: 79267 - DNA, 716 bp, Homo Sapiens
  misc_feature (73)..(143): n is a, c, g, or t
tgagcccaagcaatcctcctgcctctgcctctgcctcctgagtagctgggactataggtcaccaggccagggnnnnnnnnnnnnnnnnnnnnnnnnnnnnnnnnnnnnnnnnnnnnnnnnnnnnnnnnnnnnnnnnnnnnnnngaagaaacttttaacgtttttatgtagtgaacttagtggctgtgttgaatacttatacctagttgtcatatttattctaaaaattcaaatcattcccttgccagagtctgttttcaatttgcattccctaaggaacactttctttgattcagttatcaggaactgttgccgttattacatcagatgggagaatgattgtgggaacactgaaaggttttgaccagaccattaatttgattttggatgaaagccatgaacgagtattcagctcttcacagggggtagaacaagtggtactaggattatacattgtaagaagtgacaacgttgcagtcattggagaaatcgatgaagaaacagattctgcccttgattgggggaatatgcaagcagaacctttaaattttgtagcacactgaggaaaaactacatacttggacatctgtaaatctttgtacagaaactgattattttgaggatgatatatggagtttttatgaatgtgtcactggattttgactccttattgattcattgtaatatgtaaattaaaatatttttacattttattgg

SEQ ID NO: 79268 - DNA, 523 bp, Homo Sapiens
ggggctttcagttctgcttgctgtccgcaccgctgcgttacccggaaccgccgggccgaacagcatgacgtccgctttggagaactacatcaaccgaactgttgccgttattacatcagatgggagaatgattgtgggaacactgaaaggttttgaccagaccattaatttgattttggatgaaagccatgaacgagtattcagctcttcacagggggtagaacaagtggtactaggattatacattgtaagaggtgacaacgttgcagtcattggagaaatcgatgaagaaacagattctgcgcttgatttggggaatattcgagcagaacctttaaattctgtagcacactgaggaaaaactacatacttggacatctgtaaatctttgtacagaaactgattattctgaggatgatatatggagtttttatgagtgtgtcactggattttgactccttattgattcattgtaatatgtaaatgaaaatatgtctacattgtattgcattattaaacacta

SEQ ID NO: 79269 - DNA, 871 bp, Homo Sapiens
tccctggtgcaagaggaaaaccgctgggacatttcgctcacagcttctatttcgggtagtttcaagtctgagtctaaacccagcgacgatcctttatgaccaactgttactcgacccattgcgcattcagttggccacctcgttgcctgtttagaattctgcttgggcttttactggccgacctcactaaccagaagctgcaaagttgctttgagcagagaggcaaagattaatttacactgctggccacccgaaggcaggtgtctcctgggtagtaatctcacggctcttgatctgaaaacttcagagtacaaattggtggatggtggaaggcaggacacgtatctctgtctgacggaaaacagacctcggggctggcgtaaaccctgctgccaggccctctccccactgccccaaaccggcctagacacgaagaccaaagcagcctgcacagggcaaggcccccgcggaatcctgcagagcaaactcaggttaacttgggtccatgaccgtttgcattcgaaacacaatacactgcctcgttctctcagttagcagctgggcagcagcgcaccattcatcatttaggcttgtggtttgttgtttactctaccaatgttatgtcgaaactgcattgtaaaaagagaagaaaatggcaggttttccaggtccacggaaaggtttggcctgacgctggagtgcggtgatgaacttacgtgacaatgattgtattcctcagtagcactttaaacgccgaagacagccctgcagcaagcctgcacacgggcttgggtgggttcctttggagaagatgtggctggaacacaaacaatctttgaaagaaataaatgtgcacacagaacactaaaaa

SEQ ID NO: 79270 - DNA, 1056 bp, Homo Sapiens
  misc_feature (934)..(974): n is a, c, g, or t
gctgtttgccctagctctgagccaatggggtagagcacattttatattagtttataataaacattctgtgcataacatattttgaagttaaaacttttaaaacaatacacagctaacatggtaaagcgaccatgcaactgtggtcagatttaaattagactggagtatgtacggtgagagctcctaacgggtcactggctaccatttcacctcacttacctgaagtcctgtttagcagatatctttcgatatatgtttagatcaagtgtaaaatgcaatctgagcattacatatcaataaaaatttgcagatatcaaaatttcattaaatagctgtttcttttatagtagtaaatgttcatcactacccggggagagcaaagaaccatggaacggtagctaactttgggcaggttcattaaatttggtcaattcagaacattccaaattgaaatattaatagcaagcatgtattgtttcttctctagaaattttatcctcaatatagtcatcatccaattcataacgaatttataaaaatagcttttttatccaataattccagcaaggtaaaaataggagtttctttttctatatagcaaatgaaacaggctcactgaacatgaggggacttaggcttgctaagcttgccgtccatccactcacgacgaaaccacactcagtctaggcgtgtgccgttgtcaccgcacactggcagtttcgggtgcagcagcttctttcaaatccatgggccacacaaatcaaccagcccactgagatctgctggaaccacagaactaagtgacaaccgcatcacggtttagaaaatggcagcgctattccttaatctaattagggattcaaggtggggagggagtggtgtgtcattcctcacaatctagcgttaaacctttaaagaatttctttaaaaatcnnnnnnnnnnnnnnnnnnnnnnnnnnnnnnnnnnnnnnnnnttgaaagaagtcgctgcaccggcaaagacgcgctttaagcttactatgaaatacaaaagtgcactcttctatatctacatat

SEQ ID NO: 79271 - DNA, 970 bp, Homo Sapiens
  misc_feature (808)..(867): n is a, c, g, or t
aatgtcgaatttcttttctcactttgatctccaattggggaattccatcaatataatcacatatagtacaacttagttaagggggaattgaaacatctatctttagctctagccccatagataatttggccttaatacagttttaccactgataattcagatttgttcattaacagtattgggattgtgccctctgtgagagaaaaggaagatcctgagccatcaacagatggaacatatgtttggaagatcttttcccaagaaactcttactaaagcacaaattttaaagctctttctgtcctatgattatgctgtgaagaagccatggcttgcatatcctcactataagcccccggagaaatgcccctctatcattctccatgatcgactttattacctcaatggcatagagtgtgcagcaagtgccatggagatgagtgccattgcagcccacaacgctgcactccttgcctatcaccgctggaacgggcacacagacatgattgatcaggatggcttatatgagaaacttaaaactgaactatgaagtgacacactcctttttcccctcctagttccaaatgactatcagtggcaaaaaagaacaaaatctgagcagagatgattttgaaccagatattttgccattatcattgtttaataaaagtaatccctgctggtcataggaaaacacacggttctaattaagtgtgaaggtatagctattgcacttatgccatctccaaaatttcttaagtattctttcactatccattaggagtacacttaaagttgtctgataatannnnnnnnnnnnnnnnnnnnnnnnnnnnnnnnnnnnnnnnnnnnnnnnnnnnnnnnnnnngcctgagaaacaggagcaaaactccgtttcaaagtaatacaaataatcactgcagtggtaaacatatggatttcaggtctctttgagatctgatcagaggttg

SEQ ID NO: 79272 - DNA, 600 bp, Homo Sapiens
  misc_feature (239)..(239): n is a, c, g, or t
catccagcccggggccagagcccacagagccggagcctccgacggaagggaagcaggctgccccagcggagaacgaggccccccagacccagggcaaacgcatcaaagtggagcccggcccgagggaaaccaaaggctccgaggacagtggcgacgaggatccctccagccaccccgccacaccgaggcccgagttcacctctgtcatccgggcaggggtcctgaagcaggatccggtngcggccatggggcctggcgcatcccggggaccccccgcccaccctcctgcaacgcggcttcctgccgccggtggtgcggggcctgtgcacacccggcaccataccgctaaggccccgcggagctgggcctggtgtacccgcacctgcagaggctgggtccgggccccgcgctcccggaggccttttaaccccccctgggcctgacctacccggggcccgcgggcaccagcgtgccgcggaagggggaatgaggaattggcagagctgccggcgccggaccctgcgacaaaccggggtcccccaggacagttaggcccggctctgcccgtagccctgagaattaaacgccggctctccctgc

SEQ ID NO: 79273 - DNA, 1003 bp, Homo Sapiens
  misc_feature (188)..(210): n is a, c, g, or t
ggcatgtaacatgaacagcgcgttacaaaaagcaggctggtacggtcggattcccgggatatcgtcgaccacgcgtcgccacgcgtcgacttgccatcccttatctttcttgtaacaatttgcacagttcttgccagaataaatgccattatctgtatgtttcagggagttccccaattgatcatttnnnnnnnnnnnnnnnnnnnnnnnagagagagagatactgcagtaaaacatttctaaaggatgaaagctcttgtatggcatagatatgaattccttcctctggtaataataagggtattcccagaagcacagtgtcattctttaaataaaagctttcctgtttaaagcttttcaaaggagcagaccaccttgaagattccccctagggttgatatgtgtctaattcattttataaaaattattcttgtcttcattttaaagctttggctatatagtcagaaatgtcctaaataacaaactattttgtatttaatttagggaagactaaagggaagaaaaatgaaaactcagtctttatgtaagctccaaggatattagggcttaaagggcttttctagttttatgagaatttgtactactgatttttatatattcctgtttttgagatgaacagatctctggggaaattgttgagttacaatggcatttcactgtgatccctctcaagctcagatcagttctataacccaatgacaacctgtctctttggtttactgtcctgtgaaatgtcagctcaagtttcccagaagtcgtgtgtttatgatgagtcagagtgcttttcctcggtgggacagttgctggccctcttaattttggtgtatgtgcttccaagtatctaaacctccagtctgatctgtatatgctatcctaactgttaattgtattattgattatgttgattatcttgcttgaaggttcatacttttcaatttgatagaaataaagtttttttctgcttatagctagcgaaaaaaaa

SEQ ID NO: 79274 - DNA, 835 bp, Homo Sapiens
gcattaaaacaagacaagtttatgagcaagcagttctgaaggtcagatgtccaaaatcagtgtcactgggctaaagccatgtgcaggcagggctggttccttctgcagactccaggggagaatctgttcctttgtccttttggttttctaaaggctgcctgtacttttttgcctgtgacctcttcctccaacttcaaagcacttcaacctcttgttccattgacaaatctcttttttctgattttgagcttgttgcctccctgttacaaaatcctggttcttatccacccggacaatatgaaataatctaaccatttcaaggtccttaattacatccgcaaagtccattctaccatgtaaagtaacatgtttacaggttctggggattaagtcatgcatatgttgggagacaccattattcagcctcccacactttctgagctaagtatattgatatcactgagtgacttagtgaatgaatgattgaagactttttagcaattcgacaatatttattactaaatccattatgtacttggtcatgtttcatactgttttcagaggatggctaggaaaccagtgtttattctacaaacttgatcctgcttggtctcaaaatgaattttcagttatattaaagtggcagccagttcattgactaccatggaattaaaataagagaaagtggcaagcctattttcatcattctgatgtaaagcatttgactacaataaatacaagcagcaaaataaagacacagatgttcagtgggatctggggtctcgactgggccctaatttctcatacccactccccttagcctcttttgcctcag

SEQ ID NO: 79275 - DNA, 849 bp, Homo Sapiens
  misc_feature (34)..(34): n is a, c, g, or t
  misc_feature (44)..(44): n is a, c, g, or t
  misc_feature (88)..(88): n is a, c, g, or t
  misc_feature (140)..(140): n is a, c, g, or t
cacgatccctatgattgtaacaagaacaatcaanctttgaaganagtggacttttcctacagtgttgaccttagggtgcagctggatntttttaccctcagcggctttcggactgtacagatcctggaaggacaaaagancctggctaactgttcttctccctaccaggtagacctgtttggtatagcagatttagcacatttactattgttcaaggaacacctacaggtcttctgggatgggtccttctggaaacttagccaaaatatttctgagctaaaagatggtgaattgtggaataaattctttgtgcgaattctgaatgccaatgatgaggccacagtgtctgttcttggggagcttgcagcagaaatgaatggggtttttgacactacattccaaagtcacctgaacaaagccttatggaaggtagggaagttaactagtcctggggctttgctctttcagtgagctaggcaatcaagtctcacagattgctgcctcagagcaatggttgtattgtggaacactgaaactgtatgtgctgtaatttaatttaggacacatttagatgcactaccattgctgttctactttttggtacaggtatattttgacgtcactgatattttttatacagtgatatacttactcatggccttgtctaacttttgtgaagaactattttattctaaacagactcattacaaatggttaccttgttatttaacccatttgtctctacttttccctgtacttttcccatttgtaatttgtaaaatgttctcttatgatcaccatgtattttgtaaataataaaatagtatctgttaaatttgtgcttctaaa

SEQ ID NO: 79276 - DNA, 1358 bp, Homo Sapiens
  misc_feature (94)..(94): n is a, c, g, or t
  misc_feature (102)..(589): n is a, c, g, or t
ggaaagcgacagtttcggtagcgcaggtggaacagagagcccagagggagtcccagggaaacgcttgttctttatgtccttcggttcccacctntgactgannnnnnnnnnnnnnnnnnnnnnnnnnnnnnnnnnnnnnnnnnnnnnnnnnnnnnnnnnnnnnnnnnnnnnnnnnnnnnnnnnnnnnnnnnnnnnnnnnnnnnnnnnnnnnnnnnnnnnnnnnnnnnnnnnnnnnnnnnnnnnnnnnnnnnnnnnnnnnnnnnnnnnnnnnnnnnnnnnnnnnnnnnnnnnnnnnnnnnnnnnnnnnnnnnnnnnnnnnnnnnnnnnnnnnnnnnnnnnnnnnnnnnnnnnnnnnnnnnnnnnnnnnnnnnnnnnnnnnnnnnnnnnnnnnnnnnnnnnnnnnnnnnnnnnnnnnnnnnnnnnnnnnnnnnnnnnnnnnnnnnnnnnnnnnnnnnnnnnnnnnnnnnnnnnnnnnnnnnnnnnnnnnnnnnnnnnnnnnnnnnnnnnnnnnnnnnnnnnnnnnnnnnnnnnnnnnnnnnnnnnnnnnnnnnnnnnnnnnnnnnnnnnnnnnnnnnnnnnnnnnnnnnnnaagaattcggcacgaggtgaaatgctaaatctagtgggttctgaggagtaaccagatatttacagagcctcaaagtatctccatacaaaatacggttgaactacaaaaagaaaattgtaacattagcatggacaaacctggcaggtactccttaactctcctaagtaataaaaactgtaaaatgcaaataagccttcgatgacctttactaacctttactaaagtatcagtgatgacttggttgtttaaacagctgacatttgggcaatttgagtatgtcaaactcaataatactggttttcatttgcaagatccacttaaaacttaaggaggccaaaaaacatcatttaaaataccctataaattataatcatacatatgatacaaaaatatcctacttcagtaaatattggaatgttatatattttatgagaaacaattaaaatgtgtaaatagcccagtaataaagttttataatcttttaaatcatcatacaatttttccttaagactttatggttaaatattctcttcattagatgtggcttacccgtggattccagagaagaaagtagatgggagcaagtgtccaatacagcaacagctcagtcaagtagttctggcagttatttgaagtctgaggtttgaagtaggaattcttacgggcatttggggaatatattttctgttgagtcctatactagtaagattttcaacacaaggtgactctcgacctcaccttgtaggaagagtgctgagaaaatatttca

SEQ ID NO: 79277 - DNA, 1041 bp, Homo Sapiens
  misc_feature (60)..(122): n is a, c, g, or t
  misc_feature (203)..(203): n is a, c, g, or t
cagcttacacttatctcccgctctatgtgttggatgtgagcgatacaattcacacaggannnnnnnnnnnnnnnnnnnnnnnnnnnnnnnnnnnnnnnnnnnnnnnnnnnnnnnnnnnnnnncgcacgggaggatttttttccaaatgatgttttgcccttctaatatactgtaaggtaattgagcttcagaacaggcaaccntgaccctgcagaggtcgcgtgctgtgggatgacagcgggacgggagctcacaagtgctttcactgaagatttgttcatatactgtgtattgattgttgtgtaatatatcatcattgcttttgtaaatacgtaaaactgtaattttttaatggtgtgcttcccttatacttttttgatcagagaattttggaaagtaccaaagaagcaggggaatcattggccagtgttacgttttcacattgtctgtctcccaccctcactgatcacgcctgccccagagcagtgtgtggcggtgacaccgtcacccagcatgcgccacgccgtggctcccaccagcagtgccaccgccaccacaccccagatcccacccaccttgcagtggcctttccttgtcatcagagtagagaatgcacaggtgttggtgagggcgtgtggctgagcactacatgtcaagtccagagtcagtttctatcccaattctccctgcagcctgaagaacggatccttgtctccaatgtcagcacaaaggaggctttttctgtgctttgacattctagcacttcagggatgagagggagggagaatcctggatgctggatggagtatttctctgaggcccacacaaagctggacacccccaggctctactccatcccattggagtctcttctttttttgatagcgggagggaggaagtacgactaatgttggagcctgaaactatggaaatgctgctaaaatttttatattgacaaacattttcttggtacttcattgtcatttttcattaatcaaccatattaaatttataataaaaaatgcccctcagacaaaaaaa

SEQ ID NO: 79278 - DNA, 902 bp, Homo Sapiens
atgtctcctgaggaactcctcaggccctggatctcatagctttgcggaaggccccaggtgaagccgagaacctggtctgcatgacatggaaaccgtgaggggacaagttctgtttctgttttccgccacggacaagggatgagagaagtaggaagagcctgttgtctacaagtctagaagcaaccatcagagccagggtggtttgtctaacagaacactgactgaggcttaggggatgtgacctctagactgggggctgccacttgctggctgagcaaccctgggaaaagtgacttcatcccttcggtcctaagttttctcatctgtaatgggggaattacctacacacctgctaaacacacacacacagggtctctctctatatatacacacgtacacataaatacacccagcacttgcaaggctagagggaaactggtgacactctacagtctgactgattcagtgtttctggagagcaggacataaatgtatgatgagaatgatcaaggactctacacactgggtggcttggagagcccactttcccagaataatccttgagagaaaaggaatcatgggagcaatggtgttgagttcacttcaagcccaatgccggtgcagaggggaatggcttagcgagctctacagtaggtgacctggaggaaggtcacagccacactgaaaatgggatgtgcatgaacacggaggatccatgaactactgtaaagtgttgacagtgtgtgcacactgcagacagcaggtgaaatgtatgtgtgcaatgcgacgagaatgcagaagtcagtaacatgtgcatgtttgttgtgctccttttttctgttggtaaagtacagaatttagcaaataaaaagggccaccctggccaaaagcggtctttaaaa

SEQ ID NO: 79279 - DNA, 429 bp, Homo Sapiens
tttttatgtgtcttgctgaagattaaggggaaatgttacagtgttgggacttcctttcatggcagaatctacaatttgagcgacttcagtagtatctcttagtctacgcttttcatacacaaaacactgtggaaccacaagccattaccaagcaaaactctttcactggaaacaagggggcagtctagaagtaaaagtgaccttaagaagactctttacaggcaacaaatgaagcttttctaagggatttttgcatcagttcagtcataagaatacttttttccagggtaattaggcaatagcttcactgaaaatgacagcttttcattgcattatttaatccttatatttggaattgaagtcgttaacttcttttaaagaatgtactattagaaaaattaaaaatgaaatgttgagagacttcaaaaa

SEQ ID NO: 79280 - DNA, 1391 bp, Homo Sapiens
  misc_feature (180)..(190): n is a, c, g, or t
agactgaatgctgtgttcgtatcgattgatgaaacgtgacaggtccgccaattgctcgtttgcactgagagaggacaacagtttgaaacttacttttgtgtgtgtgtggctttggaagccagtagctacttccttagttcagttctttactgttcctcgaataatctcctgactaaggcnnnnnnnnnnngcttctcctacgagaatcagtctaacagagatgccgatgtcagcacagccctaagcagtaagtcatattggcatttccacgtgactgtgtttctatcccgtgtacagagagatccagagccctacactccacgacctgggggctcacagcacagaacctagaagcacctgctgacactcttcaactgatttttaaatgttgttgcttggagataaaaattacataagggactttttgcctgcattctagtgcaaaacatctgaagagctgtacacccacaagggtgactatttcccctgagtggccgtgttgtcccagtgccctggttcagtgtctcctgagtggatgacaggtcttcattctctatcttgaatgtattatggttactaatagttttataatggaggtctaagaattaaagttgtgtgggagtttcaggacaaaggaaggctaaaagtttgtcaagacgttgagcgtattttggttacctatgagaagggttgtgacagtgtacagtggcagctgttggccacgctgcagaaatgagctggagctcatgggttttcagctacatttttcataactttgtagtacatccatcttgagtaaattaagccacaatttggtacctagggtctcaaactaaaatttatttttataaatgaattttaaaagaaaaaatatctacttcttttaaagttagaagaaaattaacctgctgacaggcaacatttttggggtgctttctgcactagttttccttgtaaatgatttgagtgagtaggtttggtttctgacgaaagtagactggagggtagcattgtatgcctcaaatgtctcagtgtgtttggctcatacgtgggctatactttattattttggtatgcttacaaatgactaaccaatcaaattgtcattaatgtttggaaaatctgttaatgcacatgcacaataatttcctgaaagccataggacatgtctgtagtcagcaccacgatagcaccgtttcatgaaaggcatggcggctgcatttcataccacatcaaaatacagtaacatttctatactaaattaacagtaatacctcaaaactgctccggtagtagtttttaatggattgaaatttacagtttagtaaaaggcttaaaattacttatacttatgaaataaactttaccagttgaataaaagtgcacccctt

SEQ ID NO: 79281 - DNA, 734 bp, Homo Sapiens
  misc_feature (490)..(498): n is a, c, g, or t
tccagaggagattttttgctcttctcatcttttccaacagtgttctcctgtttgtggagctaaggtaaagaggggacacttctgtctgtttaacagacagtccatatctgtgaggccagcaaatattttcttaaactcatggggagacagcagattcttgccttggtgaggtcattgctgtgccatatgtcctacccccctgtcttcatgcagggaagttggaaatgggggctacatatgccctctcctccccgtctacaagagttgtggttttccatctgatccttccactcttgtcaggggaagaagggggcctggtatctcaggcagattgttgaattcctgttctatcccttctctatcccaccctgccttgataatatgttagcccataccccaaataactgtctatattagacacccccagccagtttctggctgcctgtctttgctgccatgttttttacaagaaggaaagaattcttgctannnnnnnnncataatttactatttatgatgtatttaagtgttttattaaggacagagttctgttaggggtgggagggaatatttgagggagggctgggtcttagggaaaggaatggggaagcaacatttttattaagtgttactatttgcctctactttgtattgttcagaaatggcaaatacaatataaaagtgatatatggttttaatgtaataaactttaatgagttatttaaacaaaaaaa

SEQ ID NO: 79282 - DNA, 1033 bp, Homo Sapiens
  misc_feature (408)..(430): n is a, c, g, or t
  misc_feature (846)..(846): n is a, c, g, or t
  misc_feature (898)..(898): n is a, c, g, or t
  misc_feature (961)..(969): n is a, c, g, or t
  misc_feature (971)..(985): n is a, c, g, or t
ggtccggaattcccgggatatcgtcgacccacgcgtccggccctggcagctgtcttcaagggtaggctgagctccccaccctggagcccctgagggcggcccctgagcactcctctctctccactctctctgtccctgccccagcggcttccagtgtggcatctcagcagtgtcctggcccctccagagcagtgggacatctggggactgtttttgtgtttaggggaaaaaattctgctgcactctgcttgggccttgaggtctgtggcagggctcctctggcccgcagtggcctggatctatctgggccatgagtgacgggcagtgaccagagggactggaggccagcggtgtccacccttgccctcagcaagagagaatgcattcttaaaagaaagctgtacatgnnnnnnnnnnnnnnnnnnnnnnngtggctctagcctcaggctccagccccagtggggtactgtacagttaactgaagaagaattttaaagacgatttgaacaagaaaatgaaggcagtgggaaagcaatgccaaatggttgtggagaaagtggccggagcctccctggagtggagcagccctgaagcctgtgccccccgacctgcgggccgctgttttggtttgacatgacaaggaaaggacttcctgctgaccctgagagcctctggggtgccgcggcaccacggggcatgcatgattgtgctagcgtttagtctgagttgatctttttaaaactgcaagtgttgaatactagaggttgttagacccttttttatgttttttaattaatcagtcacttgtaaaagcaaacaagcggtccatccccttttcagggcacnttttttgatgggtaccgaaagatcccatgggacattaaggggacaggctaanctgtgggccagaactcagcccccaatgtcccttgggcaagggcccaagggagaagactcgggnnnnnnnnntnnnnnnnnnnnnnnncccccgttctctttgcaggaccccgccccccaagccttgaagataagc

SEQ ID NO: 79283 - DNA, 659 bp, Homo Sapiens
ctagtaatccttaattacctcacagaggtttacatggagcaaaaagacaatgtatttttaaatgtactttgttgaaggtgtgtttgtcgagacaatacagcagtgaagagaaggcatgcaagctgtcttgttggagtctggctaaagagcaccaaagcagcctggtgtgggatgtcctctgggggccacctggacttgctatgttaacatggagggactaggcaggggtatgaagaaggaagcccagcagagcaggaggcagcagcaacaatgagagattggttatccatatgacttggatctgtgtccccacccaaatctcatgttgaattgtaatccccaatgttggaggtggggactggtgggaggtgactggatcatgggggtggatttcttatgaatggtttagtaccatccactttgtaatgtccccgtggtaataaggtgagttcttaagaaatctggtcattgaaaaatatgtggcacctcctccctctctcttttgctcctgccccggctatatgatgcaatttgtcttcagccatgattgtaagtttcccgaggcctccccagaagctgagcagatgccagcatcatgcttcctgtacagcctgccttccatgagccaattaaacttctttcctttacaaattaaaaaa

SEQ ID NO: 79284 - DNA, 842 bp, Homo Sapiens
ttgttttagcgctgggtttcccaaggtgggagagacagacccagcctggagctggcccctggcctgtgtgctgacttcttggggtcctcaaaccactgtatttttctgttgagcctgtacttggggagagatcagtagcatttgaggaagtaagagaaaagaatcatggtacctcagggtttctttccctttactcgctggcagccattgtctgtgggcacctcatgtttttccacactctactgggccgtggaggtaacgatcacccaggccagtctcctctgcctgggatgcgccctctgagaggaggcctagcagggcaggctccctctgggcatccctggatgcagcctctggacacatgcctcctttaaagtgtccgggtgcagctcaggttgagtggaggtagaaggagaaacagacatgtttaccacgcgttttccaaagctcctgatctttcccaagattgtaactgaaaactgctgtctcttgttttgttcgttttgggggtggtggtgctggctgggccatgcttgtgaagtgatgtgtgtctctgatttaacggattcactgttttctctgctaattgagagagcgttatttacattatttatttgttttgacacaagtgctttcagtgttttatcctagctaatggcttcttaaaggtaataaaacccttccaacgtaattggtcagataaaactttttttcttgtatgcttaaataaagcaattagtgaagcacttctatccaaaatgacttttttgtccttttttaaaaccaatttactgttactggaaactttttgtacaataaagcaatcacgcagattaaagaac

SEQ ID NO: 79285 - DNA, 2360 bp, Homo Sapiens
  misc_feature (46)..(119): n is a, c, g, or t
  misc_feature (2203)..(2211): n is a, c, g, or t
  misc_feature (2277)..(2300): n is a, c, g, or t
tttgcctgtttaaggagaaagcattccacactgcttgttttaatannnnnnnnnnnnnnnnnnnnnnnnnnnnnnnnnnnnnnnnnnnnnnnnnnnnnnnnnnnnnnnnnnnnnnnnnngtctggattgtaaatacgttcagacgttccacgcaaaagcaaagttccctgcagacgctccattaagttctgggtgcaaggaagcgcggatccttcagttctgggcgttttcaccaggtggcactcagaacaccctcacgtgacaagcgtcccacccggaagcgaaatctccccttctacagagttcctccggcgcttcctccaccccgggatacacagaacctcatctcctacggtgctgaagcctgcagcagggcaggatgggcaggagagcagagccgcggagtctgcggcgcgggtgaagagcggcgcgtaattcccgcagcaagattgttccgcgcccgcagcccctggactagcaggatccgaaccccggcggctgcgtgcttataggcgcagacgtcagagagcccgcggcttaaagcgcgtcgcctggctagcgccaccccctagccttcttcaaggcctccagggctgggcccaagcgcccgtcgacggcaccctgggcccagaggactcgcgggcctcatctccaatgattcagaactcacgtccgtcgctgctgcaaccccaagatgtcggagacacggtggaaacgcttatgttacatccggtgatcaaggctttcctgtgtggctccatcagtgggacctgctctaccctccttttccaacctctggatctccttaaaacacgcctgcaaaccctccagccctcagatcatgggtctagacgtgttgggatgttggctgtactcttgaaggtggttcgcacggagagtcttttgggcctttggaaagggatgtccccttccattgtgagatgtgtccctggcgttggaatctactttggcactctctactctttgaagcagtatttcttgcgaggccatcccccaaccgccctggagtcagtcatgctgggggtgggctctcgctctgttgcaggggtctgtatgtcacctatcactgtaatcaagacgcgctatgagagtgggaaatatggctatgagagtatctacgctgccctgaggagcatctatcacagtgaggggcaccggggcctcttcagtggcctgacagcaactctccttcgagatgcgcccttctcaggaatctacctgatgttttacaaccagaccaaaaatatagtgcctcatgaccaggtggatgcaacccttattcctattacaaatttcagctgtgggatatttgctggtattctggcctcactggtaactcaacctgcggatgttatcaaaactcatatgcagctttatccactgaagtttcaatggattggccaagcagtgacacttattttcaaagactatggactacgtggcttcttccaaggtggcatcccccgagccctccgcagaactctaatggcagcaatggcgtggacggtgtatgaagagatgatggccaagatgggcctgaagtcctgaccaagagaggactgggaacgggtgaaatctgttgccctgcttggtttctgccaagggctgctgcttcttactattctgcagtaagatgaagtcctacctggaaaaccaggcagaaattgtgttgcctttgccttcagtaatccccttaaggagaaaatatatggacctgatttcagccttcagaatctccaaaagaggagtcatcaattcatagagcacactagggtgttaggagagagctttgcatactctgagaggctacttggaaaggcattttcccaggagagctctgtcaggtggctgcgcttcagccccacccctacaccacagggtctccttgggtatgttcttgggcaagcaatcacaaagccagagaagctgtaagctgcctgccgggcctgaggagctccaaccagggaagactggatgtgaggagaggagtcactgtcaccaggtcacagactgactgaggtgatggtaggatgaggaggaacagatgcccttctttaattggttctcagttaacttctcagaggctctggagaacgggacagtggctttctagcctctgaatgttccaaataaaattttttggtcttggcccctgtactgttttacctctaaattctggcannnnnnnnnccctgcaattaaagtgctgtactttatttattgaactttatcattgaaagctgtttggaaaacctnnnnnnnnnnnnnnnnnnnnnnnngaccgcgtatgcggccgcaagcttattccctttagttgagggttaattttagcttggcac

SEQ ID NO: 79286 - DNA, 1031 bp, Homo Sapiens
  misc_feature (31)..(32): n is a, c, g, or t
  misc_feature (34)..(34): n is a, c, g, or t
  misc_feature (59)..(613): n is a, c, g, or t
  misc_feature (646)..(663): n is a, c, g, or t
ccgaaggagaaagcggacagtatccgtagcnngncaggtcgaaccagagagcgcacgannnnnnnnnnnnnnnnnnnnnnnnnnnnnnnnnnnnnnnnnnnnnnnnnnnnnnnnnnnnnnnnnnnnnnnnnnnnnnnnnnnnnnnnnnnnnnnnnnnnnnnnnnnnnnnnnnnnnnnnnnnnnnnnnnnnnnnnnnnnnnnnnnnnnnnnnnnnnnnnnnnnnnnnnnnnnnnnnnnnnnnnnnnnnnnnnnnnnnnnnnnnnnnnnnnnnnnnnnnnnnnnnnnnnnnnnnnnnnnnnnnnnnnnnnnnnnnnnnnnnnnnnnnnnnnnnnnnnnnnnnnnnnnnnnnnnnnnnnnnnnnnnnnnnnnnnnnnnnnnnnnnnnnnnnnnnnnnnnnnnnnnnnnnnnnnnnnnnnnnnnnnnnnnnnnnnnnnnnnnnnnnnnnnnnnnnnnnnnnnnnnnnnnnnnnnnnnnnnnnnnnnnnnnnnnnnnnnnnnnnnnnnnnnnnnnnnnnnnnnnnnnnnnnnnnnnnnnnnnnnnnnnnnnnnnnnnnnnnnnnnnnnnnnnnnnnnnnnnnnnnnnnnnnnnnnnnnnnnnnnnnnnnnnnnnnnnnaagaattcggcaagagggccgcggctgtaggcnnnnnnnnnnnnnnnnnnatgtcagatgttttatttatagataattaaaatttaggcatatacatgacacaaacattatatatagtacactttccatgatagaagttatgatgctgttcacagaaaggcctcaattcagatgacataatgcatatgctacaaggggacacctgggagaggggacaccaaatggccttctggtttttcattttggtttaaatatcctctggatgcattcaagtaatactaatcatttcatgttcaaaagtcttttaataaacaaattcagagtaaaattaattgaaatatttataatacgatttgttacacagttatttccaatatacaatcaagacgactcacgacacttgaaagaaaggagaaag

SEQ ID NO: 79287 - DNA, 995 bp, Homo Sapiens
  misc_feature (195)..(195): n is a, c, g, or t
  misc_feature (242)..(242): n is a, c, g, or t
gtcatttgctcgtgtatttttgattgacgatacattccacagacagttactgtccgattatcgatcaatacgattgcctcgagacagattcgcagagttctgtgctacatgtgacaccacgtgctagtaccattatctgcaccactgatggacgtctgctgcatcatgttacaatctgagaagtggtacagcatntgatgtcaaaatccagaatgtcgatggtaatcctacccagctctaanccacttgcagctatgtgatgacttcctgcaagactaaaatcttgcagcaatgtatgagatggtcctcctccagtcttctgctttctgcttcttcttcacacaagccttcctgaccggtgcccagcagaactacgccaggaaatacacaattcctattgatcttcttgggtttgactatgaagtgatggaagacaaagaatacaagcatcctcctgaggatggtattttcattcacggattatttctggatggagcttcctggaatagaaagatcaagaaacttgcagaatcgcatcccaaaattctttatgatacagtgcctgtgatgtggctaaagccctgtaagagggcagatataccaaaacgaccaagttatgttgctccattgtataagacaagtgagcggagaggagtattatccaccactggccattccacgaattttgtgattgccatgactcttccctctgaccaacccaaggaacactggattggacgaggtgtagcactgttatgtcaacttaattcataaccagaagacatcatttccttgttcctatttatttcttcgttgcctggctgagtagagaaagcatattattgtactacttaaaccttcttttttgtttgtttaaatacatttgactaaagttataattatgaatttacttatgagcaaatgcagctaaacttaatatgactcatacttaaatgtaaggaaatgttctgaaataaataaagactaaagaaaac

SEQ ID NO: 79288 - DNA, 647 bp, Homo Sapiens
tcaatcttgtgtctgcctcagtcttttctgactggccctgaattgtcagtgctctttctgtccttcagcccctggaaggtgctccaggataacaaagaagggcaggttgaagcccctcatggaaggagctggctttgtggggctgcaaaggacttttaagtcctgcctgtactgaagttcacagcccacctgactgagcagactcttcctgttcctttctctaccacccttgccttcccaggactgcacggtttaacacagcagagtacagaagggtgaagaagtgagcagaggcttatgaagatattcagatactcttctatgccaggaagcacaaagactttgttgagatttgcctcagttcagtagatcttccttggcagccagccataggttgtttctttgtcttccgggtcctaaagagcacagagaaaatggaggtcccccagtctaggtaggaagctgattggatgaggacttctttttttccgacagcaggatggggctcttgggctccacacaccagatgctttggttttctacaactgttgctatgtgtagagggtgctcagagcgtggcatgagagcaaggagaccatggctactctttgaaatggatggggaaaattagcttaaaaatttaatca

SEQ ID NO: 79289 - DNA, 1233 bp, Homo Sapiens
  misc_feature (76)..(110): n is a, c, g, or t
atcgatagatcactatagggcgctagctctagagccgaacgacgagcgcagcgagtagtgagcgaggaagcggcgnnnnnnnnnnnnnnnnnnnnnnnnnnnnnnnnnnncagtcgacggtaccggacatatgcccgggaattcggccattacggccgggcaggcgccatctgatagccttttctgcaggcttcatgtccttagctgaccctcctttatcttgcaaacccctgcccctgctgtcccagggaggacgggcttctgtagaggcttctgggaaatgagctgtctgcaggaggtgaagcagtgttttccttggaatgtttgaggacctgcaatagaagatgttgcctttatggccctagagaaagtcaaggaacatggggaccaacaaagcatttccagttgtaagaatatgtcagaagagtgctcggttagcccacggtgccaaaactccaaacaagttccccggtggaatgacgtggccattggagggctgcaggtcgtcctctctgtatgtgccccgcgcatttccttggcctcatctgagatctggtgtcagagttctctgctcctgttggcaaatcgcaccttatctgaacatttgttccagccaccttttgcacatggattccgtaccttgcactagcaatgtctaccttcagtaacgtcgttctttttcaccctgtattctcaatgatcccttcctccccatatgccaccttcccccaaagctgatagggcagaggtgcactttatgaaactgggcacttgactgaacagaaggaaacagctgtacctctaatgcaaatagttcttatttgccaaagaacagtgaattgggcccaaagatcaaacacagcatttcatgtaatcagaattctaaacgcacaactcgggagctgtgcacggcttctcaagtgattcagttgcagaaccaagagcaaaactcgcctgtttttgtcctcaatggcacccatgagctttccaatagtatagttttctttctttccttgtcctggttgaaggtaacgtgttcctagaaaagaaaatgctgcataggaaaactgagatgccttttattccaacgtgtttgatccctgtcactcattattctgtactttttattgtacattctattcctgtaattattgtgccctttaagtgttgtaaaatcgttttggaatttgtgcctgctagttatgcaataaacaggctctacaagtgaaaaaa

SEQ ID NO: 79290 - DNA, 1240 bp, Homo Sapiens
gggcacatacagagaggatgacctgcagccctcccatgccaacgtcattccaccggggaacttgtttggagttttggcagccgtggcctaaccggagcactcttctgacatagtccttacaactggaaatgctttgttggtcccccatgttccttgactttctctagggccataaaggcaacatcttctattgcaggtcctcaaacattccaaggaaaacactgcttcacctcctgcagacagctcatttcccagaagcctctacagaagcccgtcctccctgggacagcaggggtcaggggtttgcaagataaaggagggtcagctaaggacatgaagcctgcagaaaaggctatcagatggcgcctgaacttaaggtgggaggcccccttctagaaggcatcccgggagcatccaacagcaatgtggcacttagggctgtgggacaaacaagtggaagagtcttttggagacgtggacccttttcccatgctactcacagtgaagcaaaatgcgacaaaagcatccacacacggtgacttagtaaagcaagcaccgtcggggtgctactttcatgacagcatatggtcaagctataaaggtgtgcatcgatcagtcctgtgaaaatagaagcttagttattagcatgtattgaggcaacttgtactttgattcttgtgtcttcttcacatgtgtgaatgactgctatgggacagaacatatggttaaaaacaggagcgacagcaacataacacacagggttggccggctccattacgggtaagactcagaggctgctccaggtgtgtccggggaagccaggccctcacactgcacagcttacagggcctggggtgggggctgtgagctggcagcctagaggacacagctcacctgcacatggtctctgaaagtgttcaaattggttgccaacatttataaatggagagatggcaccaaaaaacatctaggtttcttgtctcttgaaaaatcaaagctgtggccaccctaggcccacttttccacatggcaacaggcgtggagctgggggctactgcccctactgtgtaggcggtgggctccccatagtctcctctgccctgctgccgtgtacctggctcccttcactcatccacatcaccggccctaggccagggtctgaaccacacacacagaatggctgcagtaagcaggaacgggaagagctttcacattcagaacaagaaggggcttttgggtt

SEQ ID NO: 79291 - DNA, 1481 bp, Homo Sapiens
  misc_feature (979)..(999): n is a, c, g, or t
cagaataaggctttcaaaactgtgggtgtgctgttttcgtgagccttctacttgaccaccaaagacagtatttttgcagctgtatcaaatgaaccgagttggaggaaattgtataggagtatatcttaatggcactacagcaaactgtgttaaatttgggtttttggcaaagattgaagaaaactggtattcaagatgtactgcagctgtcaccaccaagcatgaactttcactgattacccataacctactggaaatcttcagccttgctgtcagcatagaccactgtgagaaacagtacattccattccagtttgccctgctttttgaagatctaaatgccattccatgttttctgttacatattgaagtttcttggttgccaaagaaaaacggattctgctgaacttgtggacagaacaaccccaaggttggaagaacaatgaaaaataatctatacttgaacatttcaaaagttaaaattttcaacagagttttaacacactgaagcttaaaatacattgacactgaaatgtcaatgggcaaacaccaatttcgccgttcattatgaaatacatcaaacaaaacttgccaaaaatacaaccataaaaatatagcaaatgtatgtatgagcaaactaatgctaaaaatgtctaattttcttggctagtctttcaaggaccagattcatgagtgttatttgaagggaaaaagtgaaatacttggaattattttgagtgatgtgctcctgagcttgttcttaaaatctaccagtggtagcttttggaaagaatgtgtttcataccgatgtgcaggcctcactggaagagcttcaagaggagtttgtgaaactcaaagtctaatggttttgattagaaacttccaggcaaatactccagagaaacttgggtgtaaaatgactaaacagatgaaaaggctttatccactattccatttgctccttacaccttaaaaagcnnnnnnnnnnnnnnnnnnnnngatatatctagctttggggagaaagcagtgcaagagtgttattaaaagcagcttgtgttttcttgcacctttcacaccacccaggaaagaaaagttcaggcttaacagtgacatggctatcacatcatctgaataaattttttccttctaaaattactactgctttcattaatttcaatcatgatacttaattttgaaattgtaaatggaggggcaaatgtgagattttcaggtatatgaaaagtagaagtgtgggttacaaaaacattgaggaaaaacatacagctcacctgtttattgaatgtcttccctattaggttcagctgttcactgctgtatcacaagtcagactgtttaaacttgttcctctacttctgtggctgtaccctggatctcatcttcagattggctacacatctgaaatcaactcccattgcactatgaccttagctcttagccttccaatacacttaagcacactc

SEQ ID NO: 79292 - DNA, 1228 bp, Homo Sapiens
  misc_feature (82)..(116): n is a, c, g, or t
  misc_feature (1170)..(1186): n is a, c, g, or t
aaaaaatgtatagactcactatagggcgctggcggtatatctaacgacgagcgcagcgagtagtgagcgaggaagcggccgnnnnnnnnnnnnnnnnnnnnnnnnnnnnnnnnnnncagtcgacggtaccggacatatgcccgggaattcggccattacggccggggtacaggagggcgcagatggctaactgagtaacattcatgaaatgaggctttctgtggcggcgtagtgtttggaattagaaggtaattcagtagagtgtaacttagagaatattgcaagtgacacattgaatcctgcccgtcagggcaccttttcctcagagcaatccggccacacgaatagaaggctgtcgtgaatcacatcagatgtaaaatcattccttctgtttactcttttaattttcatcctttgcaggtagtgcaaattcaacttcaaatatggtgtaggttttgctagattccatatatttttcttggatttttgctaattatttttagcaaaaaatttttgctcagtggcaccctccctagtgtccatgggttagggccatgctggggaaaacgggccggtatttacacacgtgcaaaacacccagagacggcacaaggaggttgaactcatgtttcagttcgcgaacattgactccttacgaaagtcacttcattctaactagatgcgcccacttccggtcattatttcgtttgcatgatgtattgcttcttcacgttttgtttttattgagcacggagtagaattccagggctgccttgacttcttccctgcatgctccctcccagtgactttccttccctttcacatgaggatctgccgttcatgttgctttctcctttgtcctcttggacttgagggcattgtgaaaagctttgctgtgatttaaaaatgccagcaattttaatctagcagtgttgaagctgggaattttttggcgcaatccatgtagcagtgacccaggcttgggagccagaaacaagtgtgacctgggattttatttaacacaactgttgccaaagagttggctttgtttatttggttttggcggggagaggagtggtatttgatgctttctgtggacaatgtaaccctaaacacatcatgtattttaaatgccacctacataaataaaacataagcatattgaatacnnnnnnnnnnnnnnnnngcgtacagccgcggccgcaagcttattccctattagtgaggg

SEQ ID NO: 79293 - DNA, 1200 bp, Homo Sapiens
  misc_feature (1087)..(1087): n is a, c, g, or t
tttgtggcagaaatcgccgctcgtatttattggaaaagcagaacagtatgcacctgtaggggtgtagcttccatggttctccaagcacgggctgtacattacccttaggctgaccattcccttgcgggggcgcaaaactgctttgaggaaatgtccccaggaggaataaactagaagacgcacctgctatttcaccatactatggagaatacagctaatgaagtggtggcagaagcttggccgtgtgagtgccccagggtaaaagtctctcttctgtccagtccagagcagagacttctcccccgtggacagcagcctgccaccaagactcaagcaacgtaagagtcatctccccagactggctgtcagagcaagaagcacccagccttcctaaaggcagaagagtggaaatctgacagtgcctgccatttccggtacagaggacagcatcaccaggccctgcagtgtctgggggggtctctggggggcagatcctgatgagaggccaggagcctttactggtggaagagcagggaagggcccttgttgggttgaaaggccatgatcagaagataacccagaaaaggccacccagttgactttttaatcacacagctgggacccactcaaatgtgcctgagcaataagtctagtgaatactctcatttttacttatagtagtgtcttaaaagttttatttccagaaaggtgaagtgctttggtggtgtaaggaactgacgtaaggacaagtgcactgacgtacacgtattcctatcggaacaaacaaggcttgttgtgggggaaaagtgtttgcataaagaagaagagattggaatggctggaatgagccctttgggagcctggctgggagtgaggtcaggtcacgtgatcccagtaggtaaggaggtgtctttgcagaagttcacagcgtcttggagcacctcactttgagttcagagacattagaaacaattactcagcaaacaagaagttagactatagcagtggctgagagattgctcagtttctctcaatttaggaagcagtctgatgacccatggcagaccgatcaaggcagttgcccccntgtgttaacgcgacccataggtatcatcttcaactctttgtagctggtgttggaaatcaggtatatttatcttgtttaattacctgctgctacctcctagttccctccccttt

SEQ ID NO: 79294 - DNA, 1902 bp, Homo Sapiens
cgctaggtacgaggcctgggtgtgaatcggcacgaggtcctggtcggttcccgcagtgccttgcggctgtaatggctgcccccagctggcgcggggctaggcttgttcaatcggtgttaagagtctggcaggtgggccctcatgtcgcgagggagcgggtgatccctttttcctcactcttaggcttccaacggaggtgcgtgtcctgcgtcgcggggtccgctttctctggtccccgcttggcctcggcttctcgcagtaatggccagggctctgccctggaccacttcctcggattctctcagcccgacagttcggtgactccttgcgtccccgcggtgtccatgaacagagatgagcaggatgtcctcttggtccatcaccctgatatgcctgagaattcccgggtcctacgagtggtcctcctgggagccccgaatgcagggaagtcaacactctccaaccagctactgggccgaaaggtgttccctgtttccaggaaggtgcatactactcgctgccaagctctgggggtcatcacagagaaggagacccaggtgattctacttgacacacctggcattatcagtcctggtaaacagaagaggcatcacctggagctctctttgttggaagatccatggaagagcatggaatctgctgatcttgttgtggttcttgtggatgtctcagacaagtggacacggaaccagctcagcccccagttgctcaggtgctttgaccaagtactcccagatccctagtgtcctggtcatgaacaaggtagattgtttgaaagcagaagtcagttcttcctggaagctcacggcagccctcaattgaaggtgtggtcaatggcaaaaagctcaagatgaggcaggccttccactcacaccctggcacccattgccccagcccagcagttaaggacccaaacacacaatctgtgggaaatcctcagaggattggctggccccacttcaaggagatcttcatgttgtcagccctaagccaggaggacgtgaaaacactaaagcaataccttctgacacaggcccagccagggccctgggagtaccacagtgcagtcctcactagccagacaccagaagagatctgtgccaacattatccgagagaagctcctagaacacctgccccaggaggtgccttacaatgtacagcagaagacagcagtgtgggaggaaggaccaggtggggagctggttatccaacagaagcttctggtgcccaaagaatcttatgtgaaactcctgattggtccgaagggccacgtgatctcccagatagcacaggaggcaggccatgacctcatggacatcttcctctgcgatgttgacatccgcctctctgtgaagctcctcaagtgaccaccctctactgaccctcccagggcattccagctcaagctgctggcaggaactgaccagttctttccttggctggggaccctccaggcactggtgagagacatgaacactgactggccactagctggcctggccctgttgagtctgcacagtccctgcccagctgtgtcttctgttggaagaaggaacctgccttagctcagtttccaggtggttcttctgcctggcaccacagctacaaaggtgtagctaagaagatggcccattggtgggagcaatgtcaccctgcctccagctagctatgggcccagagtttctccctgagtcgctgttgctagcagggagatttctcttcctgccctcacttctttcaccttgaacttggataagaactcgtgtctcctgagtgaggtagcgcctcccatctgctccccaattcttgatctctcccaccccatccctctccccagtcttggatactaataaaatataagcattctggttaaaaaaaa

SEQ ID NO: 79295 - DNA, 785 bp, Homo Sapiens
ggctaggtacgaggctgggtgtgtaatcggcacgaggcccagctggcgcggggctaggcttgttcaatcggtgttaagagtctggcaggtgggccctcatgtcgcgagggagcgggtgatccctttttcctcactcttagtgcttccaacggaggtgcgtgtcctgcgtcgcggggtccgctttctctggtccccgcttggcctcggcttctcgcagtaatggccagggctctgccctggaccacttcctcggattctctcagcccgacagttcggtgactccttgcgtccccgcggtgtccatgaacagagatgagcaggatgtcctcttggtccatcaccctgatatgcctgagaattcccgtggtcctacgagtggtcctcctgggagccccgaatgcagggaagtcaacactctccaaccagctactgggccgaaaggtgtaccctgtttccaggaaggtgcatactactcgctgccaagctctgggggtcatcacagagaaggagacccaggtgattctactttgacacacctggcattatcagtcctggtaaacagaagaggcatcacctggagctctcttagtaggaagatccatggaagagcatggaatctgctgatcttgaagaggtacttgtggatgtctcagacaagtggacacggaaccagctcaggccacagtagctcaagtgcttgaccaaagtactcccagatccctagtgtcctggtcatgaacaaggtagataggatgaagcagaagtcagtactcctggaagctcac

SEQ ID NO: 79296 - DNA, 761 bp, Homo Sapiens
  misc_feature (38)..(38): n is a, c, g, or t
acattgtattagctatatagggtaatctagagatgatntaaagtgtatggtaggatgtgcacaggttatatgcaaatactacaccattttctataagggacttgaacatcatggactttagtatcctagggggttcttggaacccatcacccataggggcaccataggacaactatagtaccgtgtttatttcctattaattcaggttccgtttagagtctaaaactaaaacctaatcatttagtcacagtgtaaaaacaaatggaaataacagctcaaatcttcaaaatattactatagcattatgtttaaaataatctacaacaaaaatgtaccattttcaagcagtactacattaggagcccttttatagaaaataatttcttctttacccccgttccagtgtgaatctagtattctgttaacatttgtgtggcatttggagtttgtcatccccattgaagggagagccttctcagacatgaagcaagggaaacatactgaatagttttacacaaatttgatctggcttccatttgtccccctcatttcccaaatgtttaaatgtattggatttggattctcaatgtataagttgccttatctgttaatgtctatcttctgtctctttaattttgtatatctgctgttttgcttttggatacattttctaattagaagtcacatgataaatataatcagtatagtaataataccataatgtgcacatactcaataaataaatgactgcattgttgtaa

SEQ ID NO: 79297 - DNA, 821 bp, Homo Sapiens
  misc_feature (222)..(238): n is a, c, g, or t
  misc_feature (405)..(477): n is a, c, g, or t
  misc_feature (663)..(725): n is a, c, g, or t
tttttttcataaagaaagaaacggcaatgcaatttaaaaactggtaggccgtttaaaagagccggtttgacctctgacaaacccagccaagacaaggccccttggcccggctcgcgagtctttgtagagagcagagcttaccctgacgacgatggcgttttgtggttaaagtgacttgggcgcacccccaggacagggtctggtcccacacgttcacaccannnnnnnnnnnnnnnnnacatcaaaaacagaccacatcctctgccagacgggctccaggagtagcggtttggacgagggacatttacaagcacagagtgcacaatagttttgttatttacaaatacacagcagtccttcaagttttcaagtttcataaaaaggaggaggggaggagaaaggggnnnnnnnnnnnnnnnnnnnnnnnnnnnnnnnnnnnnnnnnnnnnnnnnnnnnnnnnnnnnnnnnnnnnnnnnntaataaaccagattaacaacacaactgtatcgctccaaagacgacagagagttgacaggttcacacacggtttgcggtatgtacatcaattacagaggtggcgacgcaggggagagaggttcacactcgtgttttcacttgttagaggcgctcggccacacccagcacccatgtgtgccagcgcannnnnnnnnnnnnnnnnnnnnnnnnnnnnnnnnnnnnnnnnnnnnnnnnnnnnnnnnnnnnnncacgcacagacacgcctgcgggcagcaggcgcaggggagcgcgtatcaccagtccgcgtcctcatctatgtaataatcaggggcggtaccatcaaa

SEQ ID NO: 79298 - DNA, 535 bp, Homo Sapiens
accctgcactcacccacagcagctccatccactgggaaaactggggttgcatcactccactgcacagtgttagtgggacctgggggcaagtcccttgacttctctgagcctcagtttccttatgtgaaagttgctggaaccaaaatggagtcacttatgccaaactctaataaaatggagtcggggggccacatagaagccctcacacacacatgcccgtaacaggatttatcacaagacacgcctgcatgtagaccagacacagggcgtatggaaagcacgtcctcaagactgtagtattccagatgagctgcagatgcttacctaccacggccgtctccaccagaaaaccatcgccaactcctgcgatcagcttgtgacttacaaaccttgtttaaaagctgcttacatggacttctgtcctttaaaagcttccccttggctgtggccctctgtgtatgcctgggatccttccaagcactcatagcccagataggaatcctctgctcctcccaaataaattcatctgttctgg

SEQ ID NO: 79299 - DNA, 1007 bp, Homo Sapiens
ctcatagctgaaaattacttaaggaagagaagtgtcaatatcctttttaacctgactcatcgagtttatttaatgaatccttttagtgtcaactttgaaaatgtaaatgccacaaatgccatcatgacctggaaggtgcactccataaggaataatttcacatatttgtgtcagattgaactccatggtgaaggaaaaatgatgcaatacaatgtttccatcaaggtgaacggtgagtacttcttaagtgaactggaacctgccacagagtacatggcgcgagtacggtgtgctgatgccagccacttctggaaatggagtgaatggagtggtcagaacttcaccacacttgaagctgctccctcagaggcccctgatgtctggagaattgtgagcttggagccaggaaatcatactgtgaccttattctggaagccattatcaaaactgcatgccaatggaaagatcctgttctataatgtagttgtagaaaacctagacaaaccatccagttcagagctccattccattccagcaccagccaacagcacagaactaatccttgacaggtgttcctaccaaatctgcgtcatagccaacaacagtgtgggtgcttctcctgcttctgaaatagtcatctctgcagaccccgaaaacagtgtgtcaacgtgtttcagtgggacagtcccctcagtgtggggagaaggagacttcagccatggctcaggacatttctgtccaggggattcttcaacatacatgggaaattatctcaaatttattcaagtaactgcaaccctaacaaacagtcaccactgagagttggagttactatttatgatctttgtggcttgtgaaataggaattgcatttactattttgtaaaaagtgttgtcagtctttgcacctggaaagagtccatgaacatttccagagatcatcagaactggcatcaactttcaccacagactctgccaactttgtagaataaaagataataactggct

SEQ ID NO: 79300 - DNA, 1269 bp, Homo Sapiens
tcggtacctgagtctctctctgatggaagatgttggctgaacaggcggtcagatcgatgggtctttgaatagaactcccaccgggttctatgaccgagtgtggcagattctggagcgcacgcccaatgggatcattgttgctgggaagcatttgcctcagcaaccaaccctgtcagatatgaccatgtatgagatgaatttctctctccttgttgaagacacgttgggaaatattgaccagccacagtacagacagatcgttgtagagttacttatggttgtatccattgtactggaaagaaaccccgagctagaatttcaagacaaagtagatctagacagactggtcaaagaagcatttaatgaatttcaaaaagatcagagtcggctaaaggaaattgaaaaacaagatgacatgacttccttttacaacactcctcccctgggaaaaagaggaacatgcagctatttgacaaaggcggtgatgaatctgctgctggaaggagaagtcaagccaaacaatgatgacccgtgtctgattagctagtggggaaggtgtaggaagctctgttgagacacatgttctgaagtgtgttgtgtttcatgttcaagcttaatcaaggcagccattaatatacgaactgagcatgctggggaggtgaatgccacatccttggcggggttatggacctcttgcatgtcatagccaatctaacggtaatggtaaatgcttttaatcaagcaggaaaaagttctcatgattatgccaactataatagtaatcctcactgagtgataaaaatagtttatgaattgaaaatttgccgctgcatgttgtatgatcaaatagttcatcaaaatgaatctttgctctttggactgaattcttaccatactgccattaaaataaatttgccaactagtaatgcatactggaaatcaaaagatactgaaagaatggtgaacttctcttagtggtattgtcatgctaaaagatgttaatatacatcataaaagcaaagtcagccagctgatattttggttctcaaaaactgcattattaataatattttagtatacagagctattctacagtttttacattgtaaacatgactgtggttttgtatttgctaaatataggggttggactaaaatataataaatctgtaccttatcaaacattttctttgagctcctgctaaaaataggacatgtctatgattgttcaaaaatatgttaaatttaggctcagcacagtagctcacac

SEQ ID NO: 79301 - DNA, 2527 bp, Homo Sapiens
  misc_feature (187)..(219): n is a, c, g, or t
  misc_feature (1296)..(1305): n is a, c, g, or t
gggggaatcagtgcactgagctgtaaactcggcagaaagtgggattctgcatacgccatctctgagagccatggagggagccacacccctggtgacttcatggtgctggatgggagacgctagcggcatccttcagggccaagtttgataaataccaccgccatcattctgctcatcctcctcctgnnnnnnnnnnnnnnnnnnnnnnnnnnnnnnnnncctgtttatacattagaacaagataagatttgaaatacttccttgcaaataatgtgcaactcccaaggtgaaactcaaatagaaaaagtcatctctctggtagaaaggatggctttcctgtaatgactatagagtaagagtggcagcaatctttccatgcccttttcagcagaaggcacagaacagtagcgggactgccatctctggcaagatttcaggtaaagaatctcttcttaatttctaccttcctgtttctctgaatcagcccataggtgttgatgagtggccactcttaaagagtcactcagtatcagggatctactgtctttgttcaaaggtcaaataaaaacctagtctccttttattctactttctattcttagctagaatgaaactcagcatatatacacttctggacataataatattgaatagtaattacctttactagatgaaagaaattttcattacaaacttaaatcatgtaaaactcaacaactcagattcctggacctggtgtcctggttgggtccaaggtgattttacagaagaaaaaaacaactcaagcattctggtggcaacatagagattgtaggctgcttctaagaaagttattaacaatttggaaattcctaagtaggatgagagttagtaactggatacgagtgaagtttatatccaagttcagactcaaaggcattattatgatttgcttcttcccatgtcttccatgtcctgcttctcaaagtttttctcatccatcacactcctgccttaactgctctgagtatgcatttgttttcaattcatctttatttcaatctgtttaacttttgaatcgcatgggaatacgcacattaagttcctttctaaaataaggttttatgaagctgagtttcacgataagtgtcttgctattttttgagatgttttatggacaaagaaaactttacagatttatatgtattttgctgcaccagtaaatggaccattaactagggcccacctttaacagagcacccctttgaaagttttataggtatgaaatatatgtagatatttgtaaagggttttaannnnnnnnnngatggggtgctgtgtaaatcttgtatttataaatgtaatgaaggtattgacagaaaaaaatatatacaacttttataaaggattgtgtactgactgaatacatttaaaagaaaatatattttgaaacctgttctgctatgaacagagataacatatctttttactatgctattggtttttaggttaagcttcctaatgcataataaatttacagtggttacttttatcacccacacacacaaacaacacaaaccctacctccctcccacccaacatagaacacaaaaacatggctaccacaacccacgagaaagacctaaccttgcatgcccataaaccccaaccacacgacatggggggggccccctggccccaacaaaaatccatccaaaaccctcttttggcgccgcccgccccccacaggcgccccggaacctggcggtatattgtttttccccaggaaaaaccctgggcgatatcgcaagggggctgggggtattcccccccacaaaaacaacgcccccccgggggggcaaaccaagggtgtttctccacaaaccaacccccaaagcaggcaccctctccgaggggtcattatgggcgggcgcccattacctcagcgcgggcgctgcctcaaccgccgagactcctcccatcatctatacagtctgaaccgccgcgccggcggtccgcggagcaatcgatgatatggagtacaacggaggccgctgctgagcgacccacctcttcttttctgcataagaaggttctggcttacgcagcccgccacggagccgtggtagcaccctcccccctctgaatactggggcggccgtggcgttaattcacgaggacaaaccgtgtcgcgggatatatcgcgtcccgatgacgcgcagtatacctacacaaaccctcgcccgcgggatggagtcccatgattggtgggagcgaacgaagagatcaaacagtcgtgcgcggcccccgacggtggtgtgagacacatacagtgcccggggtggcaggatctaaatcacaaagaaatgcctcgcgggcgcccacgataccttcgggggcgcgcacactatcgcctcttttctataaccccccgcactccgctgccgggtccgcgtgaggccccaccccccgcccacgatctagggtacgtgtgctgggctggtggcgcccagcacacgccccgagggcttcttaccccctgcggtct

SEQ ID NO: 79302 - DNA, 1096 bp, Homo Sapiens
  misc_feature (81)..(81): n is a, c, g, or t
  misc_feature (125)..(126): n is a, c, g, or t
  misc_feature (169)..(169): n is a, c, g, or t
  misc_feature (205)..(205): n is a, c, g, or t
  misc_feature (209)..(209): n is a, c, g, or t
  misc_feature (215)..(215): n is a, c, g, or t
  misc_feature (855)..(864): n is a, c, g, or t
tgatgtggatatgctcttagatgctcggcagatcgcgggagtattccagttcacactgccagatttttaatgtctgtcttntctagacgggtacgcaagtgaggatgtgtctgctgtctgttgcnntattcccagcctccttttagccaaggtacaggcactgtttccntgtgctctccctttggagagagtagtgcagagcacntagntagtcntccttggctttgaatgcaggagcacccagtgacccaggccttgcactgtgctgcccaaaggagtattttctgggtgaatctccccatactcctcaggatcctgaggtccttgtatttagggtatggtgtaaaaacttacatatgcacattttgttacatcatttaagatgattgaagctttactggttaagtacagggtcaccagagaaagttcctttccccagttgatgtcttgaggctgttgagaaacttaggacagaagcctacctcatcccaggcctgcccctccgtgcatagctctgcctttgggtcttgttcatagtgctgttcaggcaaaatggaatagtctcaggtgggaacaccttctcttgctagctccaggaaggctttgtgggaaatgagttgagaccatggacttgggagttgggggccagagttgagcctggacttgaccaattaattcccttacctttcagcccaagatagctacatgtctttacttgctgtataagttttccttttgtcctgggggtgcctgattgatcctatctcttcacccttcattctttcaacaaacatgccatctatctcccaggacatttattcccttctattcaaggccagttaggaatgcaattannnnnnnnnncagttaaatacagacttgtttggacgcaaggtaccctttctctttttaaaaactttttatcatgaaaactttcaaatacaaaaataaaatggtagagtgaacctccatgtacccagcatccagctccagtaaccatcaacatgtaccattatttcatctctcttcctgcacatgctcttctgatgtgtgagctagagtatctgaaaggaaatttcagaaaaccctaaaaacc

SEQ ID NO: 79303 - DNA, 1089 bp, Homo Sapiens
  misc_feature (875)..(883): n is a, c, g, or t
ggctaggtacgaggcctgcgtgtttaatcggccgaggctcagtcaaaaattagagctgctttggtgatggatctcatagacctaactcctcgccagaaggagcgggcagcttcacctcatcaggtcacaccacaggctgatgagaagatgccagtgttggagtcaagttcatggcctgccagcaaaggtctggggcatatgccgagagctgttgagaaaggctgtgtgtcagatcctcttcagacatctgggaaagcagcagccccttcagaggacccctggcaagctgttaaatcactcacccaggccagacttctttctcagcctcctgccaaggcctttttatatgagccaacaactcaggcctcaggaagagcttctgcaggggctgagcagaccccagggcctcttagccaatccccgggcctggtgaagcaggcgaagcagatggtcggaggccagcaactacctgcacttgccgccaagagtgggcaatcttttaggtctctcgggaaggccccagcctccctccccactgaagaaaagaagttggtaaccacagagcaaagtccctgggccctgggaaaagcctcatcacgggcagggctctggcccatagtggctggacagacactggcacagtcttgctggtctgctgggagcacacagacattggcacagacttgctggtctcttggaagagggcaagaccccaaaccagagcaaaatacacttccagctcttaaccaggctccttccagtcacaagtgtgcagaatcagaacagaagtagtaccaatcaatgtcacatgaacaaacaagctgcccccagggtaccatttggggaggggaaatcttttctttctttcccccttnnnnnnnnncacatctgccccgaacactttcccactgttattctttcctcatatcccaacactcagaactcttgtgacattagccagtgggggcttatggttgtgtgaaccatgtatgaaaatccagtgggccccaaccaaggagacagacagacttgggtctctttcccccaacttttccacatggtcatcgtgaaataaaaagtccactctgg

SEQ ID NO: 79304 - DNA, 1159 bp, Homo Sapiens
  misc_feature (293)..(303): n is a, c, g, or t
  misc_feature (894)..(903): n is a, c, g, or t
taaagaaagtacagaacaaaacataccaacataatgtgtggtgtattagcataatttaaaaacaaatgcagagaggtgatctttaaatttaatatcaaaatatgctgaccattagaactgcattataattttgaagaaatgattgacaacctttgtcaccaattgtgtttgcttcatagaaaaaacaagacttgctaatgttttcatatacacaatctgaagaagttatgttgttcataagaaagtgatatttaattctaagcacagagtattcacaaaaacaagtttcagtnnnnnnnnnnnctaaaacaaacactgaagtagagttttgtaaatacaactgattttgtccttgtagataattagtgaacgtacaaatagaaattttgctagactgcttccaagaaagctaggtagactcggcgactgtgaattcaagtcagcaatgcaggtaggaggcgaacttgggctcttttgtgagcagcactgtagaaaggatttttcaagggggtacagcctgcataaaagcagttatcttggcatgtgcaaacaagaagggggaaagttgtattgaaggaggggtgaattaaagtccctaaaattcaagtcccttctttagggaggtgagaacctccttggcatatgccctaccttaatctgagctgtgttatagaaaagtacagactctggtgtttgggactgacatctccaaaccaagaaaattaaataaataaaaaaggcaagggaagtttaaaaaatggttctttcactagtggaatagagtctgaataccagaattcactgagaatctatttacaccacagtttgattgcgcgcacacacacacacccatacatatgcatactctcacatacattcccaatctttaatttnnnnnnnnnngtcaaacaatcaagaatgactgcttgaaaaataatttgtaaaatgcctagagctgggctaaatttcaaccttatagcagatcctgaaaataaatttcataataatatttccatgcctaaatatgccactgttaaaactgaaaaaaatttaagcatgtaacattaaacactaaaattagtttaagcactcagtagcaaatggtttttcttgtaaaactaagtttctttcaccggaaatggcctgaaatattagtccc

SEQ ID NO: 79305 - DNA, 895 bp, Homo Sapiens
caaggaccagggctgggaagtctttagtgctaacatcccctttagagttcacacatcttgcccttccatgaatgacccctcagtctggcctccccagcctcaaggtccactcaggcacaagagccacagtaccctagatagtgtcacatgacaccgttgtcatccaaggataatacagaccaactaggctacatctgtgatgagcaagctagcaaagccgctggtcttctcctaggactaagtccaggtgccttccacaatctcatggtctttcaggtccctggttacttttctcaaaggccatttccaaaagaatacatgccttcacatcacaacctgtactgtgagtccattctagaggtcactgaaaggccctgtaaagagaggacatggatacgggacctggccctgaggttattactggccgtaaggcagagttaatccatacagaaaccagtgtgtccatgtgctctgcacaaaaacagacctgttgtccatccagtccactgacaagagggtttccccgagagccgaagtggactgaagctacagtttttagctggtgcgggccacaggcagggtcagattgagaagaagcaaagctggggaagcagaagttgggagtcttgtgttgctccctcttcctgtgtggtgctctgggtttctgtggatcgtgaaggcgatctcaagagtgtttccctccaaacctgatagctgcctattcctgtctggttggggctgtggaggatgtagttgtatttattgcattgtaatatttttaacatcctgtgacttcatgctagaaattttctattgtttatagaaactttttgtagaaacattaactctaaagcacatctgcatgtcagtaaaaatctcagtttcgtacaaaaaa

SEQ ID NO: 79306 - DNA, 1066 bp, Homo Sapiens
  misc_feature (118)..(118): n is a, c, g, or t
caagagatctgctttccaaggaaagtgcaaaccagtcaaatccaggcagatgtgcagaggagacactggacagggaagccttcctgatccttctggtgacacttgaggagcagagggnagataactctctaatcctgcagatggaactgcttctgtccacactgagttagggggcatggaaacagtgggttcaggcctatgactcattctaacagtataaatagcaggattcagaaggtgattaatcgtctccagtgagcccaccctaccagcttccctgccaggctggtggcagcgattttacctgaggcctttattgttcccagggtcctgcaggctgccctggggtcggccctgagcagtatattcattgctcacctttctcctgtctttgcagagtttgccttctgccaggtggatgcctccatcgctctggccctggccctggccgtcctgtgtgatctgctccagcagtgggaccagttggcccctggactgcccatcctgctgggatggctgttgggagagagtgatgacctcgtggcctgtgtggagagcatgcatcaggtggaagaagactacctgtttgaaaaagcagaagtcaacttttgggccgagaccctgatctttgtgaaatacctctgcaagcacctcttctgtctcctctcaaagtccggctggcgtcccccaagccctgagatgctctgtcaccttcaaaggatggtgtcagagcagtgccacctcctgtctcagttcttcagagagcttccaccagctgctgagtttgtgaagacagtggagttcacaagactacgcattcaagaggaaaggactttggcttgcttgaggctgctggcctttttggaaggaaaggaaggggaagacaccctagttctcagtgtttgggactcttatgcagaatcgaggcagttaactcttccaagaacagaagcggcatgttgaagaaaatctgggggattgggatgggggtatgtgtggatttttcctccactaaatctgcaggaaacatgttgaacataaattcaaaaattttatcccaaaaaaa

SEQ ID NO: 79307 - DNA, 1398 bp, Homo Sapiens
  misc_feature (1307)..(1340): n is a, c, g, or t
ctcggggatgcccgcaagccaacaggagtgtcgtgcggtgggagtacttccgcctgcgtcctctgcggttcagggccccagacgagcctcagcaggcccaagtcccccatgtctggggctgggaggtggctggggcccctgcactgaggctgcagaagtcccagtcatctgatctgctggaaagggagagggagagtgtcctgcgccgggagcaagaggtggcagaggagcggagaaatgctctcttcccagaggtcttctccccaacgccagatgagaactctgaccagaactccaggagctcctcccaggcatccggcatcacgggcagttactcggtgtctgagtctcccttcttcagccccatccacctacactcaaacgtggcgtggacagtggaagatccagtggacagtgctcctcccgggcagagaaagaaggagcaatggtacgctggcatcaacccctcggacggtatcaactcagaggtcctggaagccatacgggtgacccgtcacaagaacgccatggcagagcgctgggaatcccgcatctacgccagtgaggaggatgactgagcctcgggatggggcgcccaccccctgccctgccctgaccctcgtgggaactgccaagaccatcgccaagcccccaccctaggaaatgggtcctaggtccaggatccaagaaccacagctcatctgccaacaatcccaccatgggcacatttgggactgttgggtttttcgtttccgtttctatcttcctttagaaatgtttctgcctttggggtctaaagcttttggggatgaaatgggacccctgctgattctttctgcttctaagactttgccaaatgccctgggtctaagaaagaaagagacccgctcctccactttcaggtgtaatttgcttccgctagtctgagggcagagggaccggtcaaagagggtggcacagatcgcagcaccttgaggggctgcgggtctgagggaggagacactcagctcctccctctgagaagtcccaagctgagaggggagacctgcccctttccaaccctgggaaaccatccagtctgagggaggaggccaaactcccagtgctgggggtccctgtgcagccctcaaacccttcaccttggtgcacccagccacacctggtggacacaaagctctcacatcgataggatcccatgaggatggtccccttcacctgggagaaaagtgacccagtttaggagctggaggggggtctttgtcccccacccccaaactgccctgaaataaacctggagtgagctgccnnnnnnnnnnnnnnnnnnnnnnnnnnnnnnnnnncctagcaggcggccgcaagcttattcccttgtagtgagggttaattttgagcatcgca

SEQ ID NO: 79308 - DNA, 477 bp, Homo Sapiens
gaatcactcaggaattcaagcaaactggatgttttaaccactgttcagctttcttatggaatgacagagaacttgtaaagataaaacaccagtttgcaggaagaaaggaagagaatggaaattgcttctggaaaatactagttttacaatatgttttgtttgtctgctctcttaaataaacttaatcctataaacattttttaagaactagccattaagactgttaagttctcaattataaaggaataaaatgttttaaggaggatttatttgcccttgcttatatgaactgcatatttttagtaggaaatcatgtaatttaaattagtattgattaacagatttaatgtagaaaatggacatataaagaatacaaggataaatgtctacatgtaataatggatggtagtgatataatgcatttttgtcatcccatgctgaattcagtaaaaataaagctaatgacttggagctttt

SEQ ID NO: 79309 - DNA, 1801 bp, Homo Sapiens
  misc_feature (1164)..(1254): n is a, c, g, or t
  misc_feature (1258)..(1258): n is a, c, g, or t
  misc_feature (1264)..(1267): n is a, c, g, or t
  misc_feature (1275)..(1275): n is a, c, g, or t
  misc_feature (1412)..(1422): n is a, c, g, or t
  misc_feature (1457)..(1469): n is a, c, g, or t
  misc_feature (1739)..(1739): n is a, c, g, or t
ggcatgtgaatataaaccagttgttacaaaaagcaggctggtacggtcggattcccgggatatcgtcgatccacgcgtcgccacgcgtcgccacgcgtcgatcctgcaggccctggctgtgcacctggccttgcagggcgagtcttccagcgagcactttctcaagcaactcctgggccacatggaggatctggagggtgatgcccagtccgtcttggatgccaggagttgggcatggaggagcgtccatactccagccgcctgaagaagattggagagcttctagaccaggcatcggtgaccagggaggaagtggtgtctgagctagggaatggcattgctgcctttgagtcggtacccaccgccatctactgcttcctacgctgcatggagccagaccctgagatcccttctgccttcaatagcctccaaaggactctcatttattccatctcacttggtggggacacagacaccattgccaccatggctggggccattgctggtgcctactatgggatggatcaggtgccagagagctggcagcaaagctgtgaaggctacgaggagacagacatcctggcccaaagcctgcaccgtgtcttccagaagagttgatgagggctacagctgttggggctctgccaggtcccctgggaccaactacagctccaatcagaaaccctgcgcttccttgagtgtggcttcccacttttcctgcattgtggagctgactgagtacaccggtgaggctggggtctctgcaggggaggtcactggaacagcgagcaagggactggtgcctcgctggtgctgggtctctggtttgctgcagagccgtaggacactcctggctcctcagtaggacagacagacgcaggcgggtttattttggaggggtacttgtggcattttcctgtattgtcttggacatgggatgtggggaggtggaaatgatgagcagtagcatcatttctccctgttgggttttagccagtttgccagcaagcgcatcctagcagggtccccgagcagcaggttgtgtggatgaagggacaggcacttgcatccagctgatctaggtcacacctggctcttggctgccatgtggcttattaacagcttccagtggaagtcgcaataaacagtttttggtaaatctcnnnnnnnnnnnnnnnnnnnnnnnnnnnnnnnnnnnnnnnnnnnnnnnnnnnnnnnnnnnnnnnnnnnnnnnnnnnnnnnnnnnnnnnnnnnaaanttgggnnnnaaccaccnccccaacgaaaaacttttcaaaaccatttcttttggggcccccggccccaaatagggtaaaacgaaatttggttcgtagccgggtgccccaagagagaaaccgggaaagaaactaaaggcctgggtatcctcccccnnnnnnnnnnncccccccggggagggcagcgggatatcgttttctnnnnnnnnnnnnncaaactggagggttttctcgaggggccgtttttccgggactctttatcccaagaggggaggcccgcgggggggagccctcatataagagaaaatttaacgcgccgcgagccctgtgggaaaatattttcggaagaaaaattgttttaagagctcgcttctcgggcgctctttcctctggaaaatgagaaaaccccaaataataaaactgggaccaggtgctccgccccctacatgtggaacacgcccgtgctataaccgcgactttgttntgcccctgtgaggaatatacagaatattcgcgccccggagacggatacacggcggtgggggg

SEQ ID NO: 79310 - DNA, 1082 bp, Homo Sapiens
  misc_feature (846)..(846): n is a, c, g, or t
  misc_feature (865)..(865): n is a, c, g, or t
  misc_feature (1007)..(1016): n is a, c, g, or t
ggtccggaattcccgggatggcgagcagtctgcgcgcggatggccgcagcggcgatggcggcagcggcaggtggaggggctggcgcggcccgctccctctcgcgcttccgaggctgcctggctggcgcgctgctcggggactgcgtgggctccttctacgaggcccacgacaccgtcgacctgacgtcagtcctgcgtcatgtccagagtctggagccggaccccggcacgcccgggagtgagcggacagaagccttgtactacacagatgacacagccatggccagggccctggtgcagtccctgctagccaaggaggcctttgacgaggtggacatggctcacagatttgctcaggagtacaagaaagaccctgacaggggctatggtgctggagtagtcactgtcttcaagaagctcctgaaccccaaatgtcgcgatgtctttgagcctgcccgggcccagtttaacgggaaaggctcctatggcaatggaggtgccatgcgggtggctggcatctccctggcctatagcagtgtccaggatgtgcagaagtttgcccggctctcggcccagctgacacacgcctcctccctgggttacaatggcgccatcctgcaggccctggctgtgcacctggccttgcagggcgagtcttccagcgagcactttctcaagcaactcctgggccacatggaggggatctggagggtgatgccccagtccgtcttggatgccagggagttggggcatggaggagcgtccatactccagcccgcctgaagaagattggagagcttctagaacagggcatcggtggaccaagggaggaaagtggtgtcctgnacctagggaaatggcattngctgcccttttgagtcgggaacccaccccccatctactggcttccctaaccctgcatgggagcccaaacccctgaaaatccccttctgcccttcaatagccctccacagggaactccccactttatttcccatcttcccttnnnnnnnnnnaccccagaaccccattggccccccatgggtttggggcccatttggtgggggcccctactatttggg

SEQ ID NO: 79311 - DNA, 1094 bp, Homo Sapiens
gtggaccggtccggaattcctgcgatggccgcagcggcgatggcggcagcggcaggtggaggggctggcgcggcccgctccctctcgcgcttccgaggctgcctggctggcgcgctgctcggggactgcgtgggctccttctacgaggcccacgacaccgtcgacctgacgtcagtcctgcgtcatgtccagagtctggagccggaccccggcacgcccgggagtgagcggacagaagccttgtactacacagatgacacagccatggccagggccctggtgcagtccctgctagccaaggaggcctttgacgaggtggacatggctcacagatttgctcaggagtacaagaaagaccctgacaggggctatggtgctggagtagtcactgtcttcaagaagctcctgaaccccaaatgtcgcgatgtctttgagcctgcccgggcccagtttaacgggaaaggctcctatggcaatggaggtgccatgcgggtggctggcatctccctggcctatagcagtgtccaggatgtgcagaagtttgcccggctctcggcccagctgacacacgcctcctccctgggttacaatggcgccatcctgcaggccctggctgtgcacctggccttgcagggcgagtcttccagcgagcactttctcaagcaactcctgggccacatggaggatctggagggtgatgcccagtccgtcttggatgccagggagttgggcatggaggagcgtccatactccagccgcctgaagaagattggagagcttctagaccaggcatcggtgaccaggggaggaagtggtgtctgagctagggaatggcattgctgccctttgagtcggtacccaccgccatctactgcttcctacgctgcatggagccagaccctgagatcccttctgcctttcaatagccctccaaggactctcatttattccatcctcacttggtgggggacacagaacaccattggccaaccatggctgggggcccattgctggggccctaccattgggaatggaatcagggggccaaaaaactggggcaccaaaatttgttaaagggcttaccagggagaaca

SEQ ID NO: 79312 - DNA, 894 bp, Homo Sapiens
  misc_feature (758)..(771): n is a, c, g, or t
acgtctcccttattccacctcggagtgagcaactggtgaattttaccgggaaggccgagatgggaggaccgttttcctatgtgtacttcttctgcacggtacctgagatcctggtgcacaacatagtgatcttcatgcgaacttcagtgaagatttcatacattggcctcatgacccagagctccttggagacacatcactatgtggattgtggaggaaattccacagctatttaacaactgctattggttcttccacacagcgcctgtagaagagagcacagcatatgttcccaaggcctgagttctggacctacccccacgtggtgtaagcagaggaggaattggttcacttaactcccagcaaacatcctcctgccacttaggaggaaacacctccctatggtaccatttatgtttctcagaaccagcagaatcagtgcctagcctgtgcccagcaaatagttggcactcaataaagatttgcagaatttaatacagatcttttcagctgttcttagggcattataaatggaaatcataacgtggttctaggttatcaaaccatggagtgatgtggagctaggattgtgagtgacctgcaggccattatcagtgcctcatctgtgcagaagtcgcagcagagagggaccatccaaatacctaagagaaaacagacctagtcaggatatgaatttgtttcagctgttcccaaacgcctgggagctttttgaaaagaaagaaaaaagtgtgttggcnnnnnnnnnnnnnnagaaagttagaattgtttttaccaagagtctatgtggggcttgattcacccttcatccattggctggaacatggattggggatttgatagaaaaataaaccctgcttttgattcgaaacacac

SEQ ID NO: 79313 - DNA, 1096 bp, Homo Sapiens
cagtcgacggtaccggacatatgcccgggaattcggccattacggccgggggcgctgagtgcgtgccgctccgccgaccgaagaggctggacatgacaccagtggcatatcacggccatggggtctcagcattccgctgctgctcgcccctcctcctgcaggcgaaagcaagaagatgacagggacggtttgctggctgaacgagagcaggaagaagccattgctcagttcccatatgtggaattcaccgggagagatagcatcacctgtctcacgtgccaggggacaggctacattccaacagagcaagtaaatgagttggtggctttgatcccacacagtgatcagagattgcgccctcagcgaactaagcaatatgtcctcctgtccatcctgctttgtctcctggcatctggtttggtggttttcttcctgtttccgcattcagtccttgtggatgatgacggcatcaaagtggtgaaagtcacatttaataagcaagactcccttgtaattctcaccatcatggccaccctgaaaatcaggaactccaacttctacacggtggcagtgaccagcctgtccagccagattcagtacatgaacacagtggtcagtacatatgtgactactaacgtctcccttattccacctcggagtgagcaactggtgaattttaccgggaaggccgagatggggagaccgttttcctatgtgtacttcttctgcacgggtacctgagaatcctggtgcacaacatagtgatcttcatgccgaacttcagtgaagatttcaataccatggggccttcatgacccagaagctccttggagacacattcactatgtggaattggcggcagggcacatccaccagtttatttacaacctggctatggtttctcccacacagggctgttgaaagagcacacggattgttccccagggctgagtctgggactacccaagtgtgtaagcgacgaggaatgcgactaactccaaaaaattcccgccttgggaaaccccttgtacttgtttagacacagacgggtgcggcccagtggataaagtggataaatttcagtaggaagagaagg

SEQ ID NO: 79314 - DNA, 1212 bp, Homo Sapiens
  misc_feature (1011)..(1011): n is a, c, g, or t
ccagtaactctaacggtttaaggtagcgaggcctgggtggcgaattcggcacgaggggtaagtcctcaagctggcaggtggtcgggggagcggccggagaggagctgccgggagttcgtgccctgcaggacatgacaccagtggcatatcacggccatggggtctcagcattccgctgctgctcgcccctcctcctgcaggcgaaagcaagaagatgacagggacggtttgctggctgaacgagagcaggaagaagccattgctcagttcccatatgtggaattcaccgggagagatagcatcacctgtctcacgtgccaggggacaggctacattccaacagagcaagtaaatgagttggtggctttgatcccacacagtgatcagagattgcgccctcagcgaactaagcaatatgtcctcctgtccatcctgctttgtctcctggcatctggtttggtggttttcttcctgtttccgcattcagtccttgtggatgatgacggcatcaaagtggtgaaagtcacatttaataagcaagactcccttgtaattctcaccatcatggccaccctgaaaatcaggaactccaacttctacacggtggcagtgaccagcctgtccagccagattcagtacatgaacacagtggtcagtacatatgtgactactaacgtctcccttattccacctcggagtgagcaactggtgaattttaccgggaaggccgagatgggaggaccgttttcctatgtgtacttcttctgcacggtacctgagatcctggtgcacaacatagtgatcttcatgcgaacttcagtgaagatttcatacattggcctcatgacccagagctccttggagacacatcactatgtggattgtggaggaaatccacagctatttaacaactgctattggttcttccacacagcgcctgtagaagagagcacagcatatgttccccagggcctggagttctggaactaacccccacgtgggggtagccanagggaggaattgggttcacttaaactcccagcaaaaatccttccctgccactttaggaaggaaacaaccctcccctaagtggaacccattttatgggtttcctcaaaaaccacgccaaaaatccgtgggcctaaaccgtgggggcccccgccacaaatagatgggggcaccctccaataaaaaaatttttggcacaaaaac

SEQ ID NO: 79315 - DNA, 1473 bp, Homo Sapiens
  misc_feature (31)..(31): n is a, c, g, or t
  misc_feature (78)..(78): n is a, c, g, or t
  misc_feature (97)..(176): n is a, c, g, or t
  misc_feature (225)..(253): n is a, c, g, or t
cccgcccatttctcggcagtactgtgaattntgaagttaaactaaattttggtaccataccaactggaatttaggctntaaaaataatgtttcaagnnnnnnnnnnnnnnnnnnnnnnnnnnnnnnnnnnnnnnnnnnnnnnnnnnnnnnnnnnnnnnnnnnnnnnnnnnnnnnnntgactcccactgcactccagctcggggaacagagcgagaccttgtctcnnnnnnnnnnnnnnnnnnnnnnnnnnnnncgttttatgactatttattgcaaggtcagagttacagattgttacaaattgttgagaaatttttgtgattagaatatgaaggaaaaagctttgttggtaaaagtgacatgttaaggggctatgaagtaaatatgctgcagttaattgtgctaagttaaaatacagtttagttatttgctttaaaataaactcttctttttttctttaaagtatactacctcaaaactcattatgttgtcagagccctagagctggctagtgtaacactgactatgagtaggtgggcccaccacttgagttgaggtgatttcatggtgtctttccaggctcttgatagggtgtcactgcatgcaagccatgaatctgttttgagaatcctctccattttcccaaataaaaacctatcccaacagtgactatatcactcagcattggatctaaatataaaagtggtgctttcagtgtttttggcagatagtgttccataacctttccatcagaagggattttagacaccttagaggtccgtgctacatcttcacagttcctccgaataaccttaggtggtagtgttacttgcctttgacacctctgcatatgttttaatgactagatccaaactgtgttgttcttaaatcaaaaattggataatttgtaatatttatgtgttaatcacacagtatgctctctgaagttctcttaagccttcagtttatactcttaatttaattttctgagctggagaactggctttgcactttggttacacagaacattggtttccaattcagtttaactgaaatttgctgctgatatgttgagtttgttctttaaaaaatagctcatatatctcatctttcctcctgtcttagaagaacagacctaactagtgaatgtattaatgaaaatgcatctatttcagagctgacatgaagagtttagtttttttactttataaactgtgaatatgagtatgccagctgcatacgatgtaactaatcatatttaaatatatttcactttctctttgactttagaccttttgaagtctgtataaacttgttttgaaatatagtctctgcttacgaatgtcataacaaaataattttttgcatgataaaaaattactttgattacaaaaggcatattctttcatggtttctgcaatgagaggaagtgtaatgattattttaatatttctattaaatatgtttaactgt

SEQ ID NO: 79316 - DNA, 1299 bp, Homo Sapiens
  misc_feature (42)..(79): n is a, c, g, or t
  misc_feature (83)..(117): n is a, c, g, or t
aagaactttggcattatctatagggcgctactctccgagcannnnnnnnnnnnnnnnnnnnnnnnnnnnnnnnnnnnnnccgnnnnnnnnnnnnnnnnnnnnnnnnnnnnnnnnnnncagtcgacggtaccggacatatgcccgggaattcggccattacggccggggagtgccccaggagctatgacaagcaaaggaacatacttgcctggagatagcctttgcgatatttaaatgtccgtggatacagaaatctctgcaggcaagttgctccagagcatattgcaggacaagcctgtaacgaatagttaaattcacggcatctggattcctaatccttttccgaaatggcaggtgtgagtgcctgtataaaatattctatgtttaccttcaacttcttgttctggctatgtggtatcttgatcctagcattagcaatatgggtacgagtaagcaatgactctcaagcaatttttggttctgaagatgtaggctctagctcctacgttgctgtggacatattgattgctgtaggtgccatcatcatgattctgggcttcctgggatgctgcggtgctataaaagaaagtcgctgcatgcttctgttgtttttcataggcttgcttctgatcctgctcctgcaggtggcgacaggtatcctaggagctgttttcaaatctaagtctgatcgcattgtgaatgaaactctctatgaaaacacaaagcttttgagcgccacaggggaaagtgaaaaacaattccaggaagccataattgtgtttcaagaagagtttaaatgctgcggtttggtcaatggagctgctgattggggaaataattttcaacactatcctgaattatgtgcctgtctagataagcagagaccatgccaaagctataatggaaaacaagtttacaaagagacctgtatttctttcataaaagacttcttggcaaaaaatttgattatagttattggaatatcatttggactggcagttattgagatactgggtttggtgttttctatggtcctgtattgccagatcgggaacaaatgaatctgtggatgcatcaacctatcgtcagtcaaacccctttaaaatgttgctttggctttgtaaatttaaatatgtaagtgctatataagtcaggagcagctgtctttttaaaatgtctcggctagctagaccacagatatcttctagacatattgaacacatttaagatttgagggatataagggaaaatgatatgaatgtgtatttttactcaaaataaaagtaactgtttacgttg

SEQ ID NO: 79317 - DNA, 976 bp, Homo Sapiens
  misc_feature (64)..(64): n is a, c, g, or t
  misc_feature (95)..(95): n is a, c, g, or t
  misc_feature (103)..(103): n is a, c, g, or t
  misc_feature (168)..(168): n is a, c, g, or t
  misc_feature (199)..(199): n is a, c, g, or t
  misc_feature (211)..(211): n is a, c, g, or t
  misc_feature (240)..(240): n is a, c, g, or t
  misc_feature (294)..(294): n is a, c, g, or t
tactgtcgattatagtcattagattgcttgagccagatcgcagagcatagtgacagtctcctgntagcctgcctcctagccagagtctgcatgcntcacatcntcccattataaatgtcgcaatctagagtctgctgtgcacctgtgggtgacgttctcagatccctntgacagcagggtgcgccagcagctggtcagncctcagggtccntgagcctgtaggggaggactgggtcgtgngagtcttgtagctcccggcacccaacctcgcttcccgtgtggccccgtgttctnttctgctgagagggcttgggcctcgttcttccctgtggcagcggcattggtgcctgggttcttaaccctctggacccagcagctaggagcttctggaacccacgaggacatctgccactggcatggtctactcactgatggggtcctcctgactccagggcagagacgtccgtgcgggaactgaccgaggcgtggccccaggccccggcatcctcccctcgctgcacgtggtcacttccgaagcagcgctccctgtggccgcagagacagagcccgcaccctggctgtctgtggtgcctgggccccagctcccgcccgccacccgccctgttgagtgcggcctccagactcgagtccagaatctgtttctgtcaagtcagtcgtccccagctgcacacggggactgctgagcgctgcgctctcacgggtctgttccggacagagggtggcaggggtgagccctgatcccttacaaaaaataccagcttcccagggagtaatggcgccttcactgaagccattttgtacatggggacggggtggggacgtctcttttttggtgttggacgtttgaccagtggggaggggttcagaggcggcggtcctgtccttggctccgtctgtccgtgtggccttgctgccattccgtctgatcattaaacagagcttttgataaaaaaaa

SEQ ID NO: 79318 - DNA, 828 bp, Homo Sapiens
  misc_feature (598)..(606): n is a, c, g, or t
ggggaataaatagctgtacaggactagatcttcccatccctcatcttttccccttccccgagtaacgactcaaaaaggcttctgaaattctactcagaatcggagccgtttgcattccaacaaggatcccttaagccaaatgctggtgtgtttgtgtagaatgtccctggggtaggggcggtagctgtggggagggaatgtggtgcaggggacacctgccctctgcccttgaaattgcaccataagatgctgcctatgtcactcacagtggtgctgatactatccgccaaagacaaattgtgaacacggaaaaatggtcgttccctactgtacatcctcaggacagacttaactaaacttggagacaggagattgttcagaccatattgtagtgggtggtgatcattgttttattttggggggagtctggtctattgagcagattgaaggttcccttattgtgcagggcttaattgactatgtctgaaagtttttactgagagctctaagaaaactattgaggaaaatgaaatggtattttgtagtaacaaggattattttttggctatttaggatatacatagcctgtagctttgtnnnnnnnnngatctttataaacaatatatgaatgtgccgtcttatttattgattactgtaaattaagatataaatggctatttgaataatttatacctgtgggaattaactggagtatttgttatttgactgttttctattaaggaatattaggcttggtgctatgatgaatgatcttgtaaaatcatgtgtattcttaagaaaatttttgaatataaatttcttgaactg

SEQ ID NO: 79319 - DNA, 1049 bp, Homo Sapiens
  misc_feature (33)..(33): n is a, c, g, or t
  misc_feature (36)..(36): n is a, c, g, or t
  misc_feature (42)..(44): n is a, c, g, or t
  misc_feature (46)..(46): n is a, c, g, or t
  misc_feature (87)..(87): n is a, c, g, or t
  misc_feature (95)..(95): n is a, c, g, or t
  misc_feature (114)..(114): n is a, c, g, or t
  misc_feature (120)..(120): n is a, c, g, or t
  misc_feature (124)..(124): n is a, c, g, or t
  misc_feature (130)..(130): n is a, c, g, or t
  misc_feature (156)..(157): n is a, c, g, or t
  misc_feature (169)..(169): n is a, c, g, or t
  misc_feature (179)..(179): n is a, c, g, or t
  misc_feature (184)..(184): n is a, c, g, or t
  misc_feature (201)..(201): n is a, c, g, or t
  misc_feature (211)..(212): n is a, c, g, or t
  misc_feature (224)..(225): n is a, c, g, or t
  misc_feature (233)..(233): n is a, c, g, or t
  misc_feature (241)..(241): n is a, c, g, or t
  misc_feature (269)..(270): n is a, c, g, or t
  misc_feature (288)..(288): n is a, c, g, or t
  misc_feature (381)..(416): n is a, c, g, or t
  misc_feature (425)..(425): n is a, c, g, or t
ttgtggggagagcaccctctttttcacacggtnganacacannngnctccttttctaaaaatcttccggtttgggggaagagggtgngcgctttnggagccgtataagaagganccctcnttgnttacanaacactttcccctctctcacacacanngtgacagtgaancagaacaccncccancccagagtcattaatanacctcttttnncaagcaagcacnntgcacgangagaggancccttggcgcccttccgcgcccccctannagaccgtccccaggcaangaggtcctgagagggaacacttctccagggagctcagacccctattcttggaagaaaggagaggaacacttgcaggcttgggaaatccctttnnnnnnnnnnnnnnnnnnnnnnnnnnnnnnnnnnnnctgaccttnccaacaaggacacctggcttccccacccaacccccatgcacttccagtccaccctccagccagcccctcacatgaccctaggaccagcagtctgagagggtaggtaccagaagacccagaaactcttatcgtggcactgttgcagcttcctctgccctggctggaaagactccagaatccagtgtggtgctgtggaaggagcactggactaaaggcttcagtggctgcgtgtcccaggacaggtcatggcccctctctgggcccagcccatttatctataccatgaggtaactgaagtaaggagagcagtgaatgtcaaactgtgtttcttagagccataagccccacatattatccctgaacaagggcagctcctgctttatatatttgatacgtaggggttccatgagagattttgggttttaaaggaatggttttactgcattaaagaaaaaaaatgctttggaaaccagaggcctgggtgatgttaaagtctatcctgtcccacttcctacattctgggactaccgtgaagcctggagtagggagagcgagtttgggagctgggactcggggagtcaaaaatagatgagtaattgtcaataaacctgggaaccaaaagac

SEQ ID NO: 79320 - DNA, 1063 bp, Homo Sapiens
ggcttttaagttgtacggatgattactatttagtttactattcccctactgatagaaatatgtcttgtttaatgcctttgatagccgggagcagtggctcatgcttgtaatcccaacactttgggaggctgaggtgggcagatcccctgaggcctttgatattacaaaggatggtgtaccaagaaatatcctcatggaaatccccgtgaacatgtgcaaaggaatctgtaggttacattcctaaatgctgagtcagagcatctcagcatttaaaattgtgattgccttcagaagaggatgcaccaatttatcctcccactagtggtggctttgtgtaattggactttgtaaaaatctttgacacattaagctggaagtctgcaaacttgttctgtaaagggccagatagtgaatattttaggcttctcaggccatctgtgtcccagctgttcacctctgcctttgtagaatgaaagcagccacagccaatcaataaacgagtgtgactgttccaataaaactatgtatgggccctgaaatctggatttcatatgatttctacatatcacaaaatagtcttattttgatttttttcaaccatttcaaaatgcaaatctattcttagcttgctctctgcacaaaaacaggcaatggactagaattggctcactgaccatagtcatgcctgtaagagttaaagaaagaagaaagaaacatggaacgtggctttgtagtcaaagacaggttttctttacttaaaacctgagaggcttcccggctaatttcggttaggagcactttctcttacagaccctgcacttgatggatcacctggcaccgcccaaattgataaactggctcatctgatcttgtggcccccatccaggaactgactcagtgcaagacaacagcttgcactccctatgacttaatctcccaccggaccagtcagcactcctgagtcacctggctgcccctggcacaccaagtaacccttaaacacttcaatccttgaatgctctgggagactgatttgagtaccaataaaactccagtctcctgc

SEQ ID NO: 79321 - DNA, 738 bp, Homo Sapiens
  misc_feature (65)..(65): n is a, c, g, or t
caagagcaaaagtatgaaaatagaagaagtcagtgatacttcatccctgcaacctcaagccagtntgaagcaggattatgtcagtcttacagcgagaaaatcccatagagatagaacaaaaacctgctcagtttgccacaactgttcttcctccaattcctgcaaactcgttccagctcgaatctgatttcagacaattgaaaagttctccagatatgttgtatcagtatttaaagcaaattgaaccatctttgtatcctaagttgtttcagaaaaatctggatccagatgtattcaaccagatcgttaaaattctgcatgacttttacattgagaaagaaaagccattactcatctttgaaatcttacaaagactttctgaactaaaaaggtttgatatggcagtgatgtttatgtcagaaacagagaaaaagattgcacgtgcattatttaatcacatagacaagtcaggattgaaggatagttctgtcgaagaactcaagaaaagatacggtggttgatttccatttttgctgaaataattgtttttgactttcatatgtaaattttttctactgaaagtgttttgctttttaagaaaatgaaattatatagcaggaaaggactatctttgaacataagttaattaactataaggtgaattgtgatttaactagtgagaattgtattcaagtgaactctgtttttctgaaaataaaaatataaacaatgagatac

SEQ ID NO: 79322 - DNA, 674 bp, Homo Sapiens
  misc_feature (22)..(22): n is a, c, g, or t
  misc_feature (42)..(42): n is a, c, g, or t
agtttcgatattcgctactttntgaggaaaggtgctcattgngaccatggaaccatatatatgaatttgtaaatcatgcaattaaagcacaagcaaaatataaggagtgttgccacatcttctggttgctggatttgacccactgattatactgtacaattcttggattgactcagtcagcattgacacccttatcttcactttggagtttactaattggaagacacttgcaccagctgttgaaaggatgctctctgctcgtgcctcaaacgcttggattctacagcaacatattgccactgttccatccctgacccatctttgtcgtttggaaattcggtccagtctaaaatcagaacgtctacggtctgacagttatattagtcagctgccacttcccagaagcctacataattatttgctctatgaagacgttctgaggatgtatgaagttccagaactggcagctattcaagatggataaatcagtgaaactacttaacacagctaatttttttctctgaaaaatcatcgagacaaaagagccacagagtacaagtttttatgattttatagtcaaaagatgattattgattgtgagataggttaggttttggggggccagtagttcagtgagaatgtttatgtttacaactagccttcccagtaaaaaa

SEQ ID NO: 79323 - DNA, 765 bp, Homo Sapiens
  misc_feature (25)..(25): n is a, c, g, or t
  misc_feature (82)..(82): n is a, c, g, or t
  misc_feature (155)..(155): n is a, c, g, or t
cagacacagccactgcagtccttcntcgtggtaacagtagtgatagcagctgggctaacagctagcttgtgttctgcgcatntgtcagcttctcactcgatcctccctaaagcaatggggggcccccactagcccagttttcagggaagtcaacntgggaggttagatgggggccagggtcccacagctactgatggcccgagccaggttgagcttcctggtgtccagtccggatcccacttgcagatctcatgctctcagataggtgggacaagttcttttgtcacagtgctggctctgtcctgaggcctcattgctggctgggtgtgctctgctgggaaaagctttgcggggcttgcttggttaaccacagaagagaaggggactgtttggggtgcctctctgcagcctccccgtgctgggtggaagcacggttactgtgttctctaatgttcatgtatttaaaatgatttctttctaaagatgtaacctccacacctttctccagattgggtgactcttttctaaaggtggtgggagtatctgtcggggtggtgtggcccttggatgggtcaggtgggtgtgagaggtcctggggaggtgggcgttgagctcaaagttgtcctactgccatgtttttgtacctgaaataaagcatattttgcacttgttactgtaccatagtgcggacgagaagtctgtatgtgggatctgtgcttgggttagaatgcaaataaaactcacatttgtacccacatccgaacc

SEQ ID NO: 79324 - DNA, 636 bp, Homo Sapiens
ccagagctcagctttggcaactctgaccgttgagcagctctcatcccgggtttcctttacgtctctttctgatgacaccagcacagcgggctccatggaggcctctgtccagcagccatcccagcagcagcagctcctgcaggaactgcagggtgaggaccacatctctgctcagaactatgtgatcatctaaaaaagggggagctggcctccaccctatgttccatggattcggaacaagatttcagacatctgcatgagtgacaaactttctgaacaccaccaccaccaataatacttatcagcatcataaagtatctcttaaacactgatcttggcagggacggaactcctattcagcagtttttgtggaaagcagtaatgcttgcaaaacgtgtgtgtcattcagcattttaagtggagactatgcatttcatagtatatttgacagattagtactgtgtcctgtgttttgttccagattcttcagtataaataagctctatatcaaaaagttgcctgtctaaatagaaaatgtcttgctgtgttttgtcctatggaaaatactgtaattcaggattatgtttacaattgatcccaggtgtttgtttctaacttctgtaatacaaacaatgc

SEQ ID NO: 79325 - DNA, 1056 bp, Homo Sapiens
  misc_feature (976)..(999): n is a, c, g, or t
caagacacactaccaacacacaacccgaccagtgcaaaacccctagcgcagaatgcagcgggacaacgtgcggaagaaaaaggcacaagtacacacacgcggaccaacctcaatgaacaaacccccacactacgcagtttaccgaatcgaccagtgctttaaaacataacaatgatgcgaatgtacatagtggtcacaccaccctgacaaacaaaaccatccctgaactttcggaaaaaaggaagcaatcccctgagagaccatacggtcgcaaaggatacgtggactgatcaatgaccgaaccaatgatgctcagggaggtaggaaaggtaacagaaaaccagcatatttaatcaaagcaagaagtaatcgctgacagttaaatgtgaccaaaaaaattaaaagttcacaatttttttaatgtagccatttggggttatctctagtaaggcagatacccacgttggtaaatttttaggatattgtgttgcactagaaaactaagtggttcatatttctaatgaggaagattaatgaaagaacattgttatattctgcgtggtatattttaaagtttaagaaggcatgttaaacattatttcctctatggtagttaaaatacagaattagatttttaacaggtgtcatttgactaaacgtttcggtagaatgcttcatacttgagtgatgctggataaggtattgtatttcaacaatggactatgccttggtttttcactaatcaaaatcaaaattactctttaacatgataaatgaatttaccagtttagtatgctgtggtattttaataagttttcaaagataattgggaaaacatgagactggtcatattgatgaatattgtaacatgtgaattgtgatccatttctgatatgtcttgaactactgtgtctagtgggcaaatgtcattgttacctctgtgtgttaagaaaataaaaatattttctaaaggtcnnnnnnnnnnnnnnnnnnnnnnnngcatacagccgcggccgcaagtttttccctttagtgagggtaattcgagcatggcac

SEQ ID NO: 79326 - DNA, 2256 bp, Homo Sapiens
taggctaggtagcgaggccgggtgttgaatcggcacgaggagagacttcagcgcctgggactcgggtgggcgaggcggaaggtgtcctcgcagcacggcttttctccgcgccgcggtggttagcgagtgccctcgggtgctaggcgtgggcggatggtaggatcgcggtagcatacggatccgagtcctgcgccgagtgagaggagaggctggcaggggctaagtgatggatcttgtactccgtgttgcagattactatttttttacaccatacgtgtatccagccacatggccagaagatgacatcttccgacaagctattagtcttctgagtgtaacaaatgtggtgcttacatcctttatttcttctgtgcaacactgagctattattttgtcttcgatcatgcattaatgaaacatccacaatttttaaagaatcaagtccgtcgagagattaagtttactgtccaggcattgccatggataagtattcttactgttgcactgttcttgctggagataagaggttacagcaaattacatgatgacctaggagagtttccatatggattgttggaacttgtcgttagtataatatctttcctctttttcactgacatgttcatctactggattcacagaggccttcatcatagactggtatataagcgcctacataaacctcaccatatttggaagattcctactccatttgcaagtcatgcttttcaccctattgatggctttcttcagagtctaccttaccatatatacccttttatctttccattacacaaggtggtttatttaagtctgtacatcttggttaatatctggacaatttccattcatgacggtgattttcgtgtcccccaaatcttacagccatttattaatggctcagctcatcatacagaccaccatatgttctttgactataattatggacaatatttcactttgtgggataggattggcggctcattcaaaaatccttcatcctttgaggggaagggaccgctcagttatgtgaaggagatgacagagggaaagcgcagcagccattcaggaaatggctgtaagaatgaaaaattattcaatggagagtttacaaagactgaatagattattgcccagttattcttaagtaaggacaaagaaggaaatatcatcgtatttcttttttttaataaggaaaaaataatatccatacagtcaagatacatagtaaatggtatcatttggaaatcagcatcgtgggcactgctgaggaatgatcctagtggtaggtcagaagaagatgctgtgaacaccaggactttaatcttatgcttaaaatgccagatgttgttcgggggacaacttgtatctttctagcagcagatctgtagtttgtatagcctcaacaacaattttaaataagatggagaataaattattgaggggactaggctatatgcatttgccttcatccacccatgtttattaagaatcattgtgcttaataataccaagactaagcaccataaccaagaaatactaatgtaaagattgtttcttgtttcaggaatggttaattcttcaacgttggtatgataatgataacttgttttgacttgaataaagtactacatcagtgtggaaaaaaattctgatacattagcagctatgtaaatgacctaaattgatagcagggtgtaataagactatcgtcttcctacacataggaggctcattctctggacacactatcacctattacattttactgattaacaaataaattggaatttaaaaatatcgatatcaccatgatttaatccagatctgggattatgtagctaaacattgtgatgattattatttaaaaccattatttaataagagtaaaaatatgtgaatctggatatatttaaaaaaagaaatttgatgcccagataatatattaggcactactgattttttagttaaattgatgcactacacttttgatgtttgaagttacaaacctgtaatttttttgtaaaggaaataattgccaaatacctaggcccattgctgacgattagttctaaaatcttattcctcctcttctcccctcacttttccctacttcctctgcaaaaagatttaacaaatacattcataaggaaatgtgtgttgtaacaaatatattgcaaaaacatagtttgtaaaggcattctataagctatttatgtaaaatcaataaaagttgatcataattaaactgtaaaa

SEQ ID NO: 79327 - DNA, 2060 bp, Homo Sapiens
  misc_feature (1997)..(1997): n is a, c, g, or t
agagatcagtttccccacatcagggagaagaaggtataggtggggaagggggtggccaggagcagaaggaagaagactcaagatggaaagggagccgctgtgcctgtggaataccacttggagaggtcgacttcataccttcaagccttttcccctgggcttttgattgtgtctgtgccccctttcttgtcctctctgcagatgcccagtagggctacctcatcctcgtgctgttcttgtgtggctttctgggcagtagggatcttgaatttcctttctaacactgtgcccggcaaggcggggagcattcctctgccctttgtcttgtgccaacctggaaaggtgcagtctagatttcagtgagaaccctgccagctgagccctgtgcatctactaccttgacacagagtgttttcccactagaagctctgctctgctctcctggcccaagtaggggattccatgccttccctttcatggtcttagcaccagcagcctagtttctcccttccagagtctccagggatgacaaattggattggagacaaacctcgtcagatgctcatcccctaaaaggttaattgtgtatttgtggctgcgtgtgcctttgtgttttcattctcttcccatttttgtacattttggtcttctctgtggttttatacttggtcaaaagtactcgtcttggtattgcactgttgtgtgcatgagaaaactgggggaaggctcactggtacaagaaaggacccctgacccctttccttctctgtggtccccggcattagattgggggttctgggagaggcaggtgaatgtcctaagtgaattgttctgtttgtaactggaatgtttttgaagtctttggtgttgctccgtgaaaggacatcgccacctggtgctcatgaggtgtctttgcagaacaataaatggcaaatgaacaaccacagatagtacagatcgtattacaagcacacaaggcgaacggatcctcaaaacacagaccacgtgacaagacccacgagtccccaggctcctcaagtactacgtccaaccctcgccctaccggaataaggacgctaggcggcagcggagcgatttgccagagttcaccgttcgcacatcctgcaaccttggagacactctgtaccctgatcgtgccttgtgtgaccgacgcactgttgaagctaaagtacttcagaaaaagtctttgcgctgtgcagggatacgtgtcgcaacgccatatcatggcctttagcgctcttcggcaacgattccccctttgtatacacctgcgcatgtatctgattggggttgccgctctccccacaatctcccacctccccatttcatatcccgatcagccattccacgcgcgagctctcactattcgcctacccgcccccccttcatactcgactcatacccactccttggcatatattatcgcccgcgcctcctcccgccttctccaccaaaaccgctctctacccaaatctcgatgatcaccccacaccaacgccaggttcccgtctgctgaatggagtcgtcacctccttccttacgtgacaccatagctttttcctatataccgccgcgcccacacattcaggtgtaattgcgttgttgaaatcaagcaataaatattcatctaccgctgttctagacacactgtttctccctcctcttgatgcctctacgatagcacaatgactctccgcggcatactctctcttgtgtccctgctaatcacactggctcacatcactaggtgtaaccccccctaatatctctccccacctccggaatctgttgtagtatcagtgacgcgaatttgtctctctctcaccccctccaacacctcctccatactaattttgccgcacatttattcactcattcgctcctcgcacgccccctaaatgcggtgtcttccgtcaaatctgtcgaatatgtacttgctaaatttcatgttctgcctgacagtatatcgatacccnagtcatctcaatgcgctgggcatgtattccccgggtacccgaccacgcggcatgtcgacatat

SEQ ID NO: 79328 - DNA, 1161 bp, Homo Sapiens
  misc_feature (19)..(19): n is a, c, g, or t
ggctggtacggtcggaggngttaggatcctggatcctttactgcctggctctgaaccctgagcatcaagagagatgccgggaggaggtcaggggcatcctgggggatgggtcttctatcacttgggaccagctgggtgagatgtcgtacaccacaatgtgcatcaaggagacgtgccgattgattcctgcagtcccgtccatttccagagatctcagcaagccacttaccttcccagatggatgcacattgcctgcagggatcaccgtggttcttagtatttggggtcttcaccacaaccctgctgtctggaaaaacccaaaggtctttgaccccttgaggttctctcaggagaattctgatcagagacacccctatgcctacttaccattctcagctggatcaaggaactgcattgggcaggagtttgccatgattgagttaaaggtaaccattgccttgattctgctccacttcagagtgactccagaccccaccaggcctcttactttccccaaccatttaatcctcaagcccaagaatgggatgtatttgcacctgaagaaactctctgaatgttagatctcagggtacaatgattaaacgtactttgtttttcgaagttaaatttacagctaatgatccaagcagatagaaagggatcaatgtatggtgggaggattggaggttggtgggataggggtctctgtgaagagatccaaaatcatttctaggtacacagtgtgtcagctagatctgtttctatataactttgggagattttcagatcttttctgttaaactttcactactattaatgctgtatacaccaatagactttcatatattttctgttgtttttaaaatagttttcagaattatgcaagtaataagtgcatgtatgctcactgtcaaaaattcccaacactagaaaatcatgtagaataaaaattttaaatctcacttcacttagccgacattccatgccctgaccaatcctactgcttttcctaaaaacagaataatttggtgtgcattctttcagactttttcctatacattttatatgtagaaatgtagcaatgtatttgtatagatgtgatcattcctatattgttattgatttttttcacttaataaaaattcaccttattccttaaaa

SEQ ID NO: 79329 - DNA, 1038 bp, Homo Sapiens
  misc_feature (53)..(53): n is a, c, g, or t
  misc_feature (95)..(95): n is a, c, g, or t
  misc_feature (103)..(103): n is a, c, g, or t
  misc_feature (143)..(143): n is a, c, g, or t
  misc_feature (176)..(176): n is a, c, g, or t
  misc_feature (231)..(231): n is a, c, g, or t
  misc_feature (271)..(271): n is a, c, g, or t
  misc_feature (275)..(275): n is a, c, g, or t
  misc_feature (289)..(289): n is a, c, g, or t
  misc_feature (314)..(314): n is a, c, g, or t
  misc_feature (336)..(336): n is a, c, g, or t
  misc_feature (343)..(343): n is a, c, g, or t
  misc_feature (347)..(347): n is a, c, g, or t
ggaatctgcttcccgatccttgtgatcagatcaagatcagatcagtacagctntacaacagcagcaccgggtgacccatgtactgagatccatcntcacctcntcaccatgaaactggcaagcctcataaacgaacagcagtnggtctgaaagcagcaccaaatggagattggatnccagccccccagtgacagcccagtggaagaagcaaactccagatggcagaagcanggtgcacaggtgctccagtctcaggaggatgcgcctcctntccnccatcccagccctnagcattgtgccaggagtgatacccnttaagtgtttgggtttatgttntcagttntgtntgggaaacagcagttgcacagagagttgggggtactgctgctgccttttcaccgaggcactgccaccaccagctctagcagggatgctcctgagcttggcggacatacttagatcctaacgtgccagtgagacctgcctgtggagagtagcactggcagccctgcctggactccacttggcatgataccagctccagaagggaagggagtggagcaggcagtgaggagagagcctgggggtcggctggggacagccgtatgtgctaggtaggagtggagggagatatgtttaccaaatgcctgtcctgccatcctcccaggtagtcagagtgagctacatcctgccccgccttcatttccatggaaacatggcagctaggacacggggtacaacagcagccaaattcttccccacctcccttacttcgaaaaaaagtttggaaccctggtccctatactctgcagtcagaagtgggactgagccatacatgcccttgaattcctccctgtctggccctccctctccagcaagcagggttttctttaacttggcagtgtgcagaggagaagtggtaacacccccaccccattcccctgcatcggagctcagtattcctacagggtaagaggtaggaatcttgctgggacgaggggagccagaagtggcaataaaagcgtgttgacctgggct

SEQ ID NO: 79330 - DNA, 1036 bp, Homo Sapiens
  misc_feature (164)..(223): n is a, c, g, or t
aaggaagcgaggcctgggtggcgaattcggcacgagggagagactggggggccctcctgggcccacgaggcctctgacatcatcttcagctaagttgccgaagtccctctccagccctggaggcccctccaagccaaagaagtccaagtcgggccaggatcccnnnnnnnnnnnnnnnnnnnnnnnnnnnnnnnnnnnnnnnnnnnnnnnnnnnnnnnnnnnncccgtggaccgggagcccgtggaccgggagccggtggtgtgccaccccgacctggaggagcggctgcaggcctggccagcggagctgcctgatgagttctttgagctgacggtggacgacgtgagaagacgcttggcccagctcaagagtgagcggaagcgcctggaagaagcccccttggtgaccaaggccttcagggaggcgcagataaaggagaagctggagcgctacccaaaggtggctctgagggtcctgttccccgaccgctacgtcctacagggcttcttccgccccagcgagacagtgggggacttgcgagacttcgtgaggagccacctggggaaccccgagctgtcattttacctgttcatcacccctccaaaaacagtcctggacgaccacacgcagaccctctttcaggcgaacctcttcccggccgctctggtgcacttgggagccgaggagccggcaggtgtctacctggagcctggcctgctggagcatgccatctccccatctgcggccgatgtgctggtggccaggtacatgtccagggccgccgggtccccttccccattgccagcccctgaccctgcacctaagtctgagccagctgctgaggagggggcgctggtcccccctgagcccatcccagggacggcccagcccgtgaagaggagcctgggcaaggtgcccaagtggctgaagctgccggccagcaagaggtgagagctgccagcctgaggtgcccactccgccagccacaggaccacctcctctgccagcaggaataaagacttgtgcatccctaaa

SEQ ID NO: 79331 - DNA, 905 bp, Homo Sapiens
  misc_feature (659)..(659): n is a, c, g, or t
  misc_feature (699)..(699): n is a, c, g, or t
  misc_feature (708)..(708): n is a, c, g, or t
  misc_feature (781)..(781): n is a, c, g, or t
  misc_feature (783)..(783): n is a, c, g, or t
  misc_feature (815)..(815): n is a, c, g, or t
  misc_feature (849)..(849): n is a, c, g, or t
  misc_feature (867)..(867): n is a, c, g, or t
agccactgtgcccagccagaggctccagttccactggtgttgggtgaggcctagtgagagggtgggcagagggccttgttgaatctgaactgcagcaagggctcgcagatctcaaaggaggcagggaagtgtgctggggtcccgtcagcatcgcatgaactcagggatggctgcatttgaggccagggtcaggctgtcctcacttatcaggggacaagagctggctgatgccgattggaaaggatagaatcctagtgagctgccccagtcccggtaagcatgagtgcctgcatatcctcgctcttcctcagttccacccccttcctgggggtgtcacaggctcccggcagaaccagagcccatgccctgcatttgggctggcacatttagtggaaccagccagagaaatgctgtccctccttcctggggaagtggtggcaaacagaggcgccaaggctctctctgcccactgcccacatcatctctgggactctgcgggtgccctctgccccaaggctactgccagggactcaggtgtggctgggctttccagagcctccctcaaccctcccctcacaggctgaagtcagtacttcgtttggggggagcacacccagagccaggagcctgacttgctcagggcctagggaatgggacangagtgattcagcttcttctccagagctgcaccctgcacanatccacccntctcctacgctttgccctggacactttcagacacatcacactggctgtcatcatgcatctcctgctagggcananggagacgtgcacgtcacccggcacatgtgacnggagataactgtgtgggggagagaactgaggccnacagggataagtgcccangaccagctctggctcctctggtccacactagacactgg

SEQ ID NO: 79332 - DNA, 748 bp, Homo Sapiens
agatgggcagactctgctttctggaaatttcttcacaaagtagagctcatgaactctgtgctgtcttctggtaacatatcatcagtgtttgtattcatggtgtggcacatggatccatggcattgggtaaatctggtggtttttacacatggtcagaatgtgttcaaatacatctcatgatggagacagtaaccaaggtaatgttttgtttcagcattttaaaaagactccacttaacatttatctcagaatcatgagcctctctctagttgacaattgtcattgttcccccagccccaaattgaaccatacatttattttccaaaacagaaattgtttctgtaaacatatccgaccttcaaaagaagtgtgaggttggatttttcccccttttatttgtcctaagattccaggaggctggcctcccagcccagatagctcagccacctcacctgcctatcattcctgcattcctactttgagggtctcatcatgcccactgggtgttgttcctaagaaactgattgattaaaaaatttcccaaagtgtcctgaagtgtctcttcaaatacatgttgatctgtggagttgattcctttccttctcttggttttagacaaatgtaaacaaagctctgatccttaaaattgctatgctgatagagtggtgagggctggaagcttgatcaagtcctgtttcttcttgacacagactgattaaaaattaaaagaaaatgacagtttgaaaaa

SEQ ID NO: 79333 - DNA, 1461 bp, Homo Sapiens
  misc_feature (307)..(307): n is a, c, g, or t
ttaggaagggaggtatcaacttagagaaagacaagggtttagaaagagaagggaaagtcaagtgtcacctgaggcattttgtgaataagttatgtcattaatttaataacaaggtattattgatttgcttctaggtatactgtggtctcactagtcaaggacagctaatagctgtaaaacaggtggctttggatacctctaataaattagctgctgaaaaggaataccggaaactacaggaagaagtagatttgctcaaagcactgaaacatgtcaacattgtggcctatttggggacatgcttgcnaagagaacactgtgagcattttcatggagtttgttcctggtggctcaatctctagtattataaaccgttttgggccattgcctgagatggtgttctgtaaatatacgaaacaaatacttcaaggtgttgcttatctccatgagaactgtgtggtacatcgcgatatcaaaggaaataatgttatgctcatgccaactggaataataaagctgattgactttggctgtgccaggcgtttggcctgggcaggtttaaatggcacccacagtgacatgcttaagtccatgcatgggactccatattggatggccccagaagtcatcaatgagtctggctatggacggaaatcagatatctggagcattggttgtactgtgtttgagatggctacagggaagcctccactggcttccatggacaggatggccgccatgttttacatcggagcacaccgagggctgatgcctcctttaccagaccacttctcagaaaatgcagcagactttgtgcgcatgtgcctgaccaggtaagaaactgaaagcaagaggaggaagataaatgcccggagattccaagtggcagacatttccctttcaatttatggcccattaaaagctctgttttggttatgaagtcaagtagacagtgattttgtgccgaaagtaatcataatcagtcatattgggtaattgtgttcattgttgtatcagggtataggaggcaatgcttcaagtagaaagtgcctcaattaaatgtcttatcaagttctgtcaatacttgcccaaatcaatgggtttgcaaaatttgttaaagatctacttatttaccaatgagacatcttcctaggaactggctagggtgaaatgacatcatcttgcatttaaagtgaggggaaacattttgagccaaagaaacaaattggagatttcaagcgtcaagtgggggagtatttggtgaatcggaaaagccttagaaaattgcctgttttccccttccttatcttctctcctatctatggaattaaattgtgggtaaaatgttagaactgtaactgtaatgtaatggaaattaactagtgctgtgattttcaaatttttagccaggtactctgctcatagaaatcttaaatcaaagaataaaataaaagcagacag

SEQ ID NO: 79334 - DNA, 858 bp, Homo Sapiens
  misc_feature (189)..(189): n is a, c, g, or t
  misc_feature (634)..(673): n is a, c, g, or t
cagtcgacggtaccggacatatgcccgggaattcggccattacggccggggttgtactgtgtttgagatggctacagggaagcctccactggcttccatggacaggatggccgccatgttttacatcggagcacaccgagggctgatgcctcctttaccagaccacttctcagaaaatgcagcagactntgtgcgcatgtgcctgaccagggaccagcatgagcgaccttctgctctccagctcctgaagcactccttcttggagagaagtcactgaatatacatcaagactttcttcccagttccactgcagatgctcccttgcttaattgtggggaatgatggctaagggatctttgtttccccactgaaaattcagtctaacccagtttaagcagatcctatggagtcattaactgaaagtggcagttacatattagcctcctcaagtgtcagacattattactcatagtatcagaaaacatgttcttaataacaacaaaaaactatttcagtgtttacaagtcttgatgtgtccaggaactacattctctagggttttatatgacattttcttttgatttttgggccgtgtcctgtcaattttaatgtagttagtttaaaatacatggtnnnnnnnnnnnnnnnnnnnnnnnnnnnnnnnnnnnnnnnntgttgtaggcgacacgcaactggggcccccagaaaaagagtttaagagacacacagtagagggagcgcgggcggcccccagaagacgataacagggcaaacagtcgtgggcacacaaaggatgtaccgaaagagagaaccccggggcagcgaaacaagacgactgaggagatattccactattac

SEQ ID NO: 79335 - DNA, 2433 bp, Homo Sapiens
  misc_feature (1653)..(1653): n is a, c, g, or t
ttccgtgtggaccatcccctcccttggaggcccctccgccgtcccctctttagccgcgcttgacggcgacgccagaggcccctgggcccggtcgctccacgtgcacgtaatggccttggccccggggcccttcacggcgattggtctctgcctctgcccacttgtccatttggcgggcccgcacatggtcatgggtctgtgctatcaacttcactccccttgcaggccctctgggcctcagggtgccaatagatcaagttagctccactgggcagggatctgtctaaggtcgctctcgctggtaacgcgactgtcgaggcctgcatccagggggcctggagacgatagggccctcaggtcaatgagtcgttgtcaggtgggatcaggtacttcctgtacctcacctcgtttcctattcacagatgggagctatgttggtggcttgatggtggaacctaggatcaagaacccagccattcagacctcagcacagctgtagaccaaagaggaaagtcaccagatacccttatctccccttgccacaactgctctaaccaagggcagagccatcactggaagacatgtgccaggaaacaccacactagcctcatgcaagaaatacgacatgtcatccagtgggggcgtgggctctgtacagaggatgggcactgggggagatagcaccgcaggtggccggggtgactggcaactgcagcaggaccaagagacacaatcaggttgcagggagtgggcagagaggcctggcctgatgctcatgtgtgacgatgggaggactgtagtactcacagggcagcatgggtcagaaggggctgggcatttaataaataattgttcatttggggctgggatggcgtcaaagagaacctctaaccagccagcagcagaggagagttttggggctggggtgagttgggaggccaccccctctgtccctggaaggtggagaatggtcaaggctggcctcctggggaatgcctgggagcttggagcttgtgcacctggaggatcccacctcccccctccaatcatcccagctcaggccaggcccttgggtgggggtgggtatgaggatgagggatcccaggcagctgtctgaatcaaacaactagacacaggccagaggagttcacacgggcaccaggacatatgaattactaccacagctccgggggatgtagcgaaggccctccgccatctctcctgccatctttcgagggcagccctggaggctctggtaggtgaacatggccacccccaggcagaagaggaggccaaggaaggccagcagccccaccgcctgcctccgggtggcagcctgggcgtcagggacaggagtgataaggacgcccagcctctgggggtccatggtggcatggatgggttcctcagccttaggggtccagctgcctgaagccactggctccctgctgggggtcccttctgaggagacagggaccacagagacgtgggccatgctgccaggcccccagtcctggaaggcatccgtgtgcgctggcacgggacccatctcctcccgctccagagagttctctggcctggggctctgtccctgaccccacacacgctggccttcagacggagcattctcctctggggctggggaggacgcantggaggcctgggtggaggggtcctgggtggacgggccctccagaggtctttgccctcagcccagaggctgggcccaggttggtggggagcagaactctgccacgtggcggcagtggagacgggaggcactcggaaaagctccgtgcccacaggccctccatcctgagcctttggcgtcggggggagcctggtccctgaggaaccagtcacgcccgtcggcagctctggggaggtccccagggccctctgtgcttcctgggaagaaggagtcggctccaggctactgctttcgcctgtggcttcgggctccaggaccacagactcgtccattcccccggcggcaggggtggtcctgggcttcacctcgccgatctgcttctcgaaggtgccgccatttcgagttagggcagcagcctggcggtccagatgctgcatcgcgtccttgacccattgctccttcgggtcggcacagaacagcctgtgctgtctcgtctccaagatgattgcgcgtttgccgcatgatgcctggttctgttgatagtggatgagcaaagctacaggtatctttgatgtcatcttgctgcacgtgatgttgcatttcgtcacaccgtggtgctgtccagccagcaggacagtcagatggcagaaggtggccaagcggagcagccacgacagagatatcggagccatggctgagggtgggcaagagtcccggcgggggccaggcaggcggctagagccaggcggcagagctcagtgctgtccccttgccgccgccag

SEQ ID NO: 79336 - DNA, 573 bp, Homo Sapiens
  misc_feature (87)..(204): n is a, c, g, or t
gcacaagagatcctccctcctcagcctccctagtagctggggctacaagtgtgtgccaccgtgcctggctaatttttttaaatcttnnnnnnnnnnnnnnnnnnnnnnnnnnnnnnnnnnnnnnnnnnnnnnnnnnnnnnnnnnnnnnnnnnnnnnnnnnnnnnnnnnnnnnnnnnnnnnnnnnnnnnnnnnnnnnnnnnnnnngcacctggcctcaagtttctgtgaaaatctttggggtaggagcctctggtggctcataaatgagctttgggaagatgacagggttatcacgccaagcaagaggccaggcttcgtgcaaagaagggcagcatctcgccccgagcgcaaacaccgcctggcacgtctctgtgctggaggtaatcgccactaaagtctctgcccatcttcctgggaaactgtcctgtctctcagaatataggcatcttccacattcattcccaaagcttgccccaggagccaaaatgattttagtgtgtggaggttgaacctttcccagcgtctccccagctctagggcagcagtgggggacgttgtccccactcaagacag

SEQ ID NO: 79337 - DNA, 1353 bp, Homo Sapiens
tgcggccgcttctgctgctcgtgctgctggcgggcgcggcgcagggcggcctctacttccgccggggacagacctgctaccggcctctgcggggggacgggctggctccgctggggcgcagcacatacccccggcctcatgagtacctgtccccagcggatctgcccaagagctgggactggcgcaatgtggatggtgtcaactatgccagcatcacccggaaccagcacatcccccaatactgcggctcctgctgggcccacgccagcaccagcgctatggcggatcggatcaacatcaagaggaagggagcgtggccctccaccctcctgtccgtgcagaacgtcatcgactgcggtaacgctggctcctgtgaagggggtaatgacctgtccgtgtgggactacgcccaccagcacggcatccctgacgagacctgcaacaactaccaggccaaggaccaggagtgtgacaagtttaaccaatgtgggacatgcaatgaattcaaagagtgccacgccatccggaactacaccctctggagggtgggagactacggctccctctctgggagggagaagatgatggcagaaatctacgcaaatggtcccatcagctgtggaataatggcaacagaaagactggctaactacaccggaggcatctatgccgaataccaggacaccacatatataaaccatgtcgtttccgtggctgggtggggcatcagtgatgggactgagtactggattgtccggaattcatggggtgaaccatggggcgagagaggctggctgaggatcgtgaccagcacctataaggatgggaagggcgccagatacaaccttgccatcgaggagcactgtacatttggggaccccatcgtttaaggccatgtcactagaagcgcagtttaagaaaaggcatggtgacccatgaccagaggggatcctatggttatgtgtgccaggctggctggcaggaactggggtggctatcaatattggatggcgaggacagcgtggcactggctgcgagtgttcctgagagttgaaagtgggatgacttatgacacttgcacagcatggctctgcctcacaatgatgcagtcagccacctggtgaagaagtgacctgcgacacaggaaacgatgggacctcagtcttcttcagcagaggacttgatattttgtatttggcaactgtgggcaataatatggcatttaaaaggtgaaagagttcagacttatccccattcttatgtcactttaaaatcaagggtgggaaagggagggagggagttggcagtttcaaatcgcccaagtgatgaataaagtatctggctctgcacgag

SEQ ID NO: 79338 - DNA, 1875 bp, Homo Sapiens
  misc_feature (15)..(15): n is a, c, g, or t
agcggactgacgagntcttgcacactaccaggccaaggaccaggagtgtgacatggtttaaccaattgtgggacatgcaaggaattcaaagagtgccacgccatcctggaactacaccctcgggagggtgggagactacgtgctcccttctcgcggacgggagaatgatgagtggcagaattctaggcaattggtcccatcaggtgtggaatactggcaacagagagactggctaattagcaccggaggcttctatgccgaagtagcaggacaccagatatataaaccatgtcgttgccgtggctgggtggggcatcagtgatgggactgtaggacggactgctcggggtgtacttgggtgaggttgggctgtagctgggcagagctggggctgtagctgggtgagcttggggtataggttggagactgtggtgtgtatcgtgggctggaaggggagtaacttggtgaggtcggggaatagctgggtgatgttggagagtagcttggagaggttgggctgtagttagggctggtaggtgtgtagttgggactagtaggtgaatagctgggtgatgtcgggctgtagctgggtgatgttggggtgtaattgggactggttggagaatagttcgggctggtgggtgagtaacttggggaagtgggtgagtagctgggggaggtgggtgaatagcttggagaggtaggtgagtagctgggagaagtgggagaatagctgggtgaagttggcgagtagctgggagatgtcggcgagtagctgggagacgttggcgagtagctaggggaagtgggcgagtagctaggggaagtgggtgagtagctgggagaggtgggcgagtagctgggagagtgggcgagtagctgggagaggtgggtgagtacctgggagaggtcggtgagtagctgggtgacgttggcgaatagctgggtgatgtgggactatagttgggactggttggagaataggatggagaggtacgggagtaggagggtgaagtgggggaataagagggactcgggggtgtgtagcccccaggagagcggggctcgtaggcaggtgacgttggcgagtagctgggagacatggcaccacctggtgaagggatgtaggggcttgagggacctggggaccccggggagcccggtgtgggagaccaggcaggggagtaacctgggctgaagccgctggcatctgacgcagcactgggagagaagccggctgcccctggggtcattccactcccaacactgggggaccaggcgccataggcaggggttgcaccctggttccaaggtgtcatggcaggagagattccacccatgggactgggtgctgaaccaaagaacatgccggtgggtccagcagcccccaggccggggatattggtggggatctccatgccatacttgcacttctctgcatcaagcaggaggtcaaagcagccagtgccggccggagccagctggcccagcatgatattctcagagacccccttcatggggtcactctcaccgtgtgcggctgcttccataagcacgtccaccgtttcctcaaaggaacacttcatgagtggtcctgtgtcctggcggttgactccgtgtcaggtgatggccatcaagtggccacgacaggtcatggtatcacacaagagagccaagtgtcggtaattgacataggagccatcaaaggagatgacgtggtacagctcccgctccagggccttccgcccggcttcaatcgcccatgcaccgtgaacgatctcccacaatgtcatttggacgtggtgcgtacggggtccacgtccttctcactcagcaaccgcatcacccgttcggtaccgagctcgatcgtatcat

SEQ ID NO: 79339 - DNA, 623 bp, Homo Sapiens
taacatgatcgaatcgagtcggtaccgaacgggtgatgcggttgctgagtgagaaggacgtggaccccgtacgcaccacgtccaatgacattgtggagatcttcacggtgctgggcattgaagccgtgcggaaggccctggagcgggagctgtaccacgtcatctcctttgatggctcctatgtcaattaccgacacttggctctcttgtgtgataccatgacctgtcgtggccacttgatggccatcacccgacacggagtcaaccgccaggacacaggaccactcatgaagtgttcctttgaggaaacggtggacgtgcttatggaagcagccgcacacggtgagagtgaccccatgaagggggtctctgagaatatcatgctgggccagctggctccggccggcactggctgctttgacctcctgcttgatgcagagaagtgcaagtatggcatggagatccccaccaatatccccggcctgggggctgctggacgtgagtatgaggccccagctgcggtactgcttgcgtcgggaggcgggggggcaggcatgggtgcaagggtgtcacagtccatgattgtgtctagtcctcacgattctgtgtcctctttgagcacc

SEQ ID NO: 79340 - DNA, 1316 bp, Homo Sapiens
  misc_feature (19)..(19): n is a, c, g, or t
taagggctaggtagcgagngctggggtgtgtgaatcggcacgagaggaagaggcagggtcaccctctctccacgtcagagacctgactgtggagatggcggctcagaagataaacgaggggctggaacacctcgccaaagcagagaaatacctgaaaactggttttttaaaatggaagccagattatgacagtgccgcttctgaatatggaaaagcagctgttgcttttaaaaatgccaaacagtttgagcaagcaaaagatgcctgcctgagggaagctgttgcccatgaaaataatagggctctttttcatgctgccaaagcttatgagcaagctggaatgatgttgaaggagatgcagaaactaccagaggccgttcagctaattgagaaggccagcatgatgtatctagaaaacggcaccccagacacagcagccatggctttggagcgagctggaaagcttatagaaaatgttgatccagagaaggctgtacagttatatcaacagacagctaatgtgtttgaaaatgaagaacgcttacgacaggcagttgaattactaggaaaagcctccagactactagtacgaggacgtaggtttgatgaggcggcactctctattcagaaagaaaaaaatatttataaggaaattgagaattatccaacttgttataagaaaacaattgctcaagtcttagttcatctacacagaaatgactatgtagctgcagaaagatgtgtccgggagagctatagcatccctgggttcaatggcagtgaagactgtgctgccctggaacagcttcttgaaggttatgaccagcaagaccaagatcaggtgtcagatgtctgcaactcaccgcttttcaagtacatggacaatgattatgctaagctgggcctgagtttggtggttccaggagggggaatcaagaagaaatcacctgcaacaccacaggccaagcctgatggtgtcactgccacggctgctgatgaagaggaagatgaatactcaggaggactatgctagtattttgcttgctgaaaagaaaagggaaacaaaggtaaaatcctgacatgccatttcaaggacttgggaatagattagggatatccgtacttcattacagtcatgattttggatcctaataaagactagtttttagttaccatcttcccaaatcactcattgtatccattacctgtgaagcatatctttttctttccataagagcttttctaagacaccagcaggaattaacagaaaatgtactgtcatgttttaatacattgattaaaaaatttgcaagcca

SEQ ID NO: 79341 - DNA, 690 bp, Homo Sapiens
  misc_feature (83)..(83): n is a, c, g, or t
gaagatagcaacagtatgggcgcataaagaccaccgagtgctccacatcacggcaagccatagcgtgggcagatacgcctttntagagcacgacatcgtccttgccctgtccttcctgctgaatgaccccagcccagtctgccgggggaacctgtacaaggcatacatgcagctggtccaggtgcctagaggaacctgaggaataagcgagggtctagtcccctcattcttggagtgtggagacaggggacttgctgctctcaaccagtcctcttacaatgattgtgacctatttaaagcattcagagaagtacagagatggtgataaggaacattggataccaccagccagctttgccaaatctttacattctatatccatattttatacttgcttgaaatttttatttgaagaaatcataggtacagtccaagcaccctgtgaacctccccccacccagagcactcttcctcctgcctttccttgagctactaataatctggtgactatgtccccaaaatgcatatctttatattttaccacagatataattacatatggacgatatataatcttgttttgcatgttttaaaactatgtaagtggatcttgctgtatgtatccctctgttacttccaaaaccttaaaaaacctaaataacattagagatttatagaaattttgagatg

SEQ ID NO: 79342 - DNA, 1177 bp, Homo Sapiens
tggaagcagaaagggctgcggaggcagtgagtggtttctgcagagcttcatttggaaaggcctctgtagttggggaaagatggcccattcccagaactccttggagcttcccattaacatcaatgccacccagattaccactgcctatggccatcgggccctgcccaagctgaaggaggagctgcagtcagaggacctccagacgaggcagaaagccctcatggccttgtgtgacctcatgcatgaccccgagtgtatctacaaggccatgaacataggctgtatggagaacctgaaagctttgctgaaggatagcaacagtatggtgcgcataaagaccaccgaggtgctccacatcacggcaagccatagcgtgggcagatacgcctttctagagcacgacatcgtccttgccctgtccttcctgctgaatgaccccagcccagtctgccgggggaacctgtacaaggcatacatgcagctggtccaggtgcctagaggggcccaagagatcatcagcaaaggtctgatttcctcactggtatggaagctgcaggtggaggtggaggaggaggagttccaggagttcatcctggacacactggtcctctgcctgcaggaggatgccaccgaggccctgggcagcaatgtggtgcttgtcctgaagcagaagctcctcagcgccaaccagaacatccgcagcaaggccgcccgtgcgctccttaatgtcagcatatctcgagagggcaagaaacaggtgtgtcattttgacgtcatccccatcctggtccatctgctgaaagacccagtggagcatgtgaagtctaacgctgccggtgccctgatgttcgccacagtgatcactgaagggaagtatgcggccctggaggcacaagccatcggcctgctcctggagctgctgcactcccccatgaccatagcgcgcctgaatgccaccaaggcccttaccatgctggcagaggcccccgagggccgcaaggccctgcagacgcacgtgcccactttccgtgccatggaggtggagacttacgaaaagcctcaagtggccgaagccttacagcgggcagcccggatcgccatcagtgtcatcgagttcaaaccctgagcccttcattcacctctgtgagtgaataaatgtgctaagtctctttaaaaa

SEQ ID NO: 79343 - DNA, 1367 bp, Homo Sapiens
  misc_feature (772)..(782): n is a, c, g, or t
  misc_feature (1347)..(1347): n is a, c, g, or t
ggaatttatttcaaagttatacaagtgcaaagaaatagatctagaagcagcaggggtttcaaatgagcaaaaatggaagaaatagaaagttaatgtttactgacatagggaaatcctcataagaggaatgaaaaaaatcgatttccaaagctaggaaaacatgtgggtcctacaagacttgcacgaaaaataattagatgtaaatgttcttaagaagaaaccgaaggaagcggttaggatatttcaaatgtaagaaatacaaatgtaataagatacctagagaccatgtccctttttaataaacactcaggattttaaggaaagatgatgccttggagctctgtgcctttggcctgttggtcaaggtaattcgtcaagtgcaggcacacaaactggcctgcaagcacgttcaggggcttattttgtttttaaagagcaacaaccagaaggaaatgtctttaggtgccaggggtgagcacctcctaagaacacggggcatcttcagagccatggcatggcccagcaggaccaggggtcaccaccagcttttcttctcctttctcaggtggagacagacataagttcgaggtttctggaagacggctgcccacagagggcttgccttctaactcctcatttgaatcttttccatcatcaataccctggccattccttttcccacaggtacagctcagtacaatctggggcttaaaatttcaattctttggtgacctgaagattcttccatgaaaaggattactctgaacttaannnnnnnnnnnaaccaaaagtccttcaatgctcagagataaagaggaacaaacgtgccattcacttgtggcatcataaaccaggcctgatggcagcccagccgctggctgctctcagcatgctctctgtggatttcctgtgtgactggatggagggccaggcttgtcttcacaggcactgccataaaaaatcctgagccaggccctggcaaaatgaaacgaaagggatgaccccacagaaacagacacaggagtcacacacatgctgtcatgtctcccaggcagaaccctccaggcagaattaactcttccaccagaaagatgggaagttagttgttacttttctattcaaacacttctgaggaccaagagaacacatagttggaaacttatgtttgattagaatttctgattagaaaagaatttctgaaatatccccagcttcactttctgtggtttcggttactcatggtcaactgaagtctgaaaattaaattaaatgggaaatccgttttaacttgctcgccattgtgaatagtgtgatgaaaccttgtgcctcccgctctgtcatgcccangacatgaatcagcccctcat

SEQ ID NO: 79344 - DNA, 1162 bp, Homo Sapiens
  misc_feature (649)..(649): n is a, c, g, or t
ccccggtgattaatcggcacgaggcatggaatgtgcccccagatctgagccccagggtagtagatggcattgaagacggctgtggctcggaccagcccaagttctctttccgcgtgggccagtctggcccggaatgtagcagcagcccctcccctggaccagagagcggcctgctcactgttccccatgggcccagcgaggcaaggaacacagacacactggacaagcttcggcaggcggtgacagagctgtcagagcaggtgctgcagatgcgggaaggactgcagtcacttcgccaggctgtgcagcttgtcctggcgccccacagggagggtccgtgccctcgggcatcgggagaggggccgtgcccagccagcacctccgggcttctgcagcctctgtgtgtggacactggggcatcctcctactgcctgcagcccccagctggctctgtcttgagtgggacttggccccaccctcgtccggggcctcctcccctcatggcaccctggccctggggtcccccagcgtctcagagctccccctggcctcgagccacagctttctggacctccacctcagactcagagccccctgcctcaggagacctctgctctgagcccagcacccctgcctcccctcctccttntgaggaaggggataggactgggcccgcagagcctgtgagccaggctgaggctaccagcactggagagcccccaccagggtcagggggcctggccttgccctgggacccccacagcctggagatggtgcttattggctgccatggctctggcacagtccagtggacccaggaagaaggcacaggggtctgagtaccagccctagaactcagcgttgccaggtgtgctgccatctgctgttcggcccaacctcagagtgaaggcagggtggcagcctccccacggactccatgcggcccgctggctcagggcagggagcctggaagcaaaggaggacctggctcctgactctcagagaggataggctggatccctggggcaggcctctcctcggcctgctcctctgacctcccggtctccctctgcaggctgggggcagaggcctgaggacaaggaagagctttgccatcccctgcatgtgcccctgcctctacctgtccccaaatttttatatt

SEQ ID NO: 79345 - DNA, 900 bp, Homo Sapiens
ggacagcatggaaagaaggaggcagaagtggaactgaactttcactctccatgggacagatcaatctcattatcaagtctgaatagcaaccagccctctcctccaccccgtttctcctcagttaattggagctcagtcaggtgattattgagtcttgtacagcactgaaatgaaatcaaagatgaagaagcattgattgtattcaaagattgaagcacgctcatactttgtatgtgctttagggaaggggtgggtgggcacttgggccttgcgggtgcattcatgtaatctgagactcttgaactttatgacggagtcttcaatattttgatgtatatgaaacttttgttaaatatgttgtatacttcgctggctgtgtgaagtaaactaaaactctgatgaacactttggagtctgctttagtgaaggagaccaaagtgggaagggctttagggcactgatagaggccctgggtgtacttttcaatcctgtgtaatgtttaattcttgcaactgaatcaaaacagtgttaaattatggcaatatttgcactttgggaatgagtacataactgtatgatcacactctgcaaatgccacttttaaagctgttaatagactttgcaccttttctttgacaaggatgtgtcatatttaaatttttacattcatcatggctacaggtagaactggggaggggggaatgtaattttttatgggaattttgatatgaaaagaaactagtcatttatttatacaataggcttggctcaaaaagtgtttttcagacctcggtattcctaatgtgggatgtgactttattttatttttagtagcaaatttggatgtagactgacagacatagctgaatgtcttaataaatttaaatttgaagataaaaa

SEQ ID NO: 79346 - DNA, 987 bp, Homo Sapiens
  misc_feature (119)..(119): n is a, c, g, or t
  misc_feature (132)..(132): n is a, c, g, or t
  misc_feature (749)..(749): n is a, c, g, or t
  misc_feature (794)..(794): n is a, c, g, or t
  misc_feature (805)..(805): n is a, c, g, or t
  misc_feature (809)..(810): n is a, c, g, or t
  misc_feature (872)..(872): n is a, c, g, or t
gggtgagagaagctgagctgtttaatcacctccttggccagactcaaggcggtggctgtccccgaacaacacaccttggaagccattggagagcagcttggagatggagtggcagctgngagttacagggtngggggtggggagggagggctcctgcgcctctgactgtcatctggcacttctgcccccagggcctgcttcagctctgagaggttcctggctggtctgaggggtgaggaaccaaaaggcagaaggcgagtgccctcgcatggcaggagaatgaccctgaggcaggggcagccactccccacatggcctatgttgagggtgcggcactgtccacaccgtggtgagggacagaggcacgaggctggggaaaggggaaaagtcggcgggggtgggagagggggttacctgggtcccaccaccagtctggaattaaacagcaaaagagaagggctgcccttgggaacatggactcgtccccagtgacagttcctggtgatgggttgaccttggcaacagaccctagcaacaggcagttgtcctgacaagagggcggtccctgtcgactgtccctggcagtttcctgaacggagggagggagttggcctgggaccttgcccccaactacttgttcttcttaaagaagctgaagcgtttttctcgctctcgttctctgccgtctttgctgcggagacaacaggcccctcagccccgacgggtgacactgggggcatggtcatggnccgggtcatgccccggttggtggctgggcaccaccggctcttcangctctccagangcannagacgctgtggcatgggtgcatcaccaccgtagcacgactcactctgctcatcctgggctgnataatatcctttcatccctgtagccagctgagacagttgcgcttcggtatcaaagcacctcgtgcgattcctggctcgaggcaaatcctaaatgagtcgataaatcgatcagtca

SEQ ID NO: 79347 - DNA, 1562 bp, Homo Sapiens
  misc_feature (82)..(82): n is a, c, g, or t
  misc_feature (143)..(143): n is a, c, g, or t
  misc_feature (836)..(890): n is a, c, g, or t
  misc_feature (1169)..(1177): n is a, c, g, or t
ctggagaccatcgggaagatcacgagcagggggctgattgcaatactggacgtgaggcctcaggcactgagggtcctgaganctcagaggtttgctccttttgttgttttcattgctgcaccaattattactccaggtttaanatgaggatgaatctcttcagcgtctgcagaaggagtctgacatcttacagagaacatatgcacactacttcgatctcacaattatcaacaatgaaattgatgagacaatcagacatctggaggaagctgttgagctcgtgtgcacagccccacagtgggtccctgtctcctgggtctattaggcctctccccagatatctgagcataactgggagcacctcatttgtggaaaagcctctttgttatcggccttgtgtcagcaggtcatggtccctagagactacctagttgtagtgtgacctacatttataattattgtcatgtccgaatagataggaggagaaaaacaattacacactaatttaaagagacagtatcttttttaatcagttctcctaaactttaataaaatgtatctttaaatgtatgtattattcaatcctttggaatgttatatttctggaaatcatagctttttatttccaaggcccctaaaaactgcacaaaatagatgctgctttctataatctattttaataataataaacaatgattctgttaccttgactgggggtggacacactacattctttgtttagagtcctgcatttcatggatcgcaatattgggatatctttctttcctttatttatttgaaataattagtgtagtgattacaaaacagtcataaannnnnnnnnnnnnnnnnnnnnnnnnnnnnnnnnnnnnnnnnnnnnnnnnnnnnnnagtcctttatgtaacatccagataatgtgatactgtctctttgaagcaccctgtaaaccttttagagatttgaagttgggtcttgactcttaatgcatgtggacagtcgcgagcgtttatgctgtcggtgtgtctgtgttggacaaaacaatctgtaatctacagcaaagtacattctacattccgttcatggggcacacccaggggaataagaataaaatgctattatgactaagttgtaaacctatgcacatcccttgcattttgggcaactttatnnnnnnnnngaaactgatttttattaataataatcatgtagtgaaatgtgtttgtaattttgtctcaatttaatttgttgtaaggtggggtggggggaattgctggtttcaccatttcagatctgtgttgtctaagagtattaacgttttaattaagcaaagaaatgatttttaatctgtatgtaattgttttaaagcacccattttaagagaaaatactgtgcaatgaagaaaccagtttaggcatttgctataaactgaaatattccaaaagaatcatctataacagccctgtaaattcctttaaaatgataactaacaggacagtttgaccaattttttttaaatatacttccttttatgtgttcaataattaaatgcctttgggtccttc

SEQ ID NO: 79348 - DNA, 1172 bp, Homo Sapiens
  misc_feature (872)..(888): n is a, c, g, or t
aacgggtgatgctccaatcacagtggcagatgcctggagagccctcaagaatcccagcattggggaaagcagcattgaaggcctgactagtgtattgagcactagtggaagccctacagatggacttagtgttatgcaaggtccttacagcgaaacggccagctttgcagccctctcagggggcacgctgagtggcggcattctctccagtggcaagggaaaatatagcaggttagaagttcaagccgatgtccaaaaggaaattttccccaaagacacagccagtcttggtgcaattagtgacaacgcaagcactcgtgctatggccggttccataatcagttcctacaacccacaggacagagaatgcaacaatatggaaatccaagtggacattgaagccaaaccaagccactatcagctggtgagtggaagcagcacggaggactcgctccatgttcatgctcagatggcagagaatgaagaagaaggtagtggtgccggaggcagtgaagagaatcccccctgcagacaccaaagctgtgaacagaaagactgcctggccagcaaaccttgggacatcagcctggcccagcctgaaagcatccgcagtgacctagagagttctgatgcacagtcagacgatgtgccagacatcacctcagatgagtgtggctccccctctcccataatgcagcctgcccctcgacccccagagcccaaggtgcaccgagcccaagtgcccatatgaacctctctgccctagccgagggacaaactgtcttgaagccagaaggtggagaagccagagtatgaagtggaatgaatgctcctgttctgagaagcacacttgtaactgcatcttttggaannnnnnnnnnnnnnnnnccaaggggtagagatttatgtattttatttcacagattctctggtcacaggtttttgcccagggaaattctgagaaattcacaatttcttaccagataaaacatgaaaagtttgccgttagttcccctcccctcacatccctctttttagttttaatttattagttaaactgatggcagcaatccatgaggcgtgtcaaagagtgtacatatgtatgtgtgtatattgaatgctaaacatattactgaaagacacattttaataaagatttctgtcataattca

SEQ ID NO: 79349 - DNA, 717 bp, Homo Sapiens
  misc_feature (119)..(119): n is a, c, g, or t
agccacccaagtagtcgagccagcagtcgagagaccagtgaaagtggtagtgtggggttccaatgctgtttcctactccatctcctcccagtgtctttccaggtcatcctgtcagttcnacagcatgaataggcctgcctctcgccatactcccccaacaatagggggctcgttgccctatagacgccctccttccattacttcacaaacaagccttcagaatcagatgaatggaggacctttttatagcagaaatccagtatctcttgctcctcctcctccctcccatcttacaggtacctcctcagttacctttaatgggatttgtggccagagtccaagaaaatatttcagatacaccacctccaccgccacctgtggaagaaccagtctttgatgagtctcccccacctcctcctcctccagaagattacgaagaggaggaagctgctgtggttgagtatagtgatccttatgctgaagaggacccaccgtgggctccacgttcttacttggaaaaggttgtggcaatttatgactatacaaaagacaaggaagatgagctgtcctttcaggaaggagccattatttatgtcatcaagaagaatgacgatgtattaaaaacaaagcaagctgagtctgaacaaatggatctttctgccatcatttgtacaatgctgagctgtctggattgaaataaaatgaccatttttatgt

SEQ ID NO: 79350 - DNA, 1442 bp, Homo Sapiens
  misc_feature (978)..(987): n is a, c, g, or t
gtggtaccggtccggaattcccgggatatcgtcgacccacgcgtccgccccctatgtcagggaaagggacactttgggcggcactccccctatcgcacactggagccagtgcgtcctccagtggtaccaaatgattacgtacctagcccaacccgtaatatggctccctcgcagcagagccctgtgaggacagcttctgtgaatcaaagaaatcgaacttacagcagcaatgggagtagtggagggagccacccaagtagtcggagcagcagtccagaaaacagtggaagtgggaatggggggggtcctaatgctggtcctactccatctcctcccaggggctttccagggcatcctgtacagttctacagcatgaataggcctgcctctcgccatactcccccaacaataggaggctcgttgccctatagacgccctcattccattacttcacaaacaagccttcagaatcagatgaatggagcacctgtttatagccagaatccagtttcagatacaccacctccaccgccacctgtggaagaaacagtctttgatgagtatcgcccacgtcctcctcctccagaagagtacgaagaggaggaagctgctgtggttgagtatagtgatccttatgctgaagaggacccaccgtgggctccacgttcttacttggaaaaggttgtggcaatttatgactatacaaaagacaaggaagatgagctgtcctttcaggaaggagccattatttatgtcatcaagaagaatgacgatggttggtatgagggagttatgaatggagtgactgggctttttcctgggaattacgttgagtctatcatgcattattctgagtaaagctcagcagggctgtgcttgcctcacaggaatagtcaggtcttcccagattatctgaaggccctggggattccactccagtaaagtagaatgaaggatacaaatgataaaaattacacnnnnnnnnnnggtttattccccagtattaaaaacaaagcaagctgagtctgaacaaatggatctttctgccatcatttgtacaatgctgagctgtctggattgaaataaaatgaccatttttatgtatgtcaaaggtataacagcataactgtgtagccaaaacaaaatcagattaagactgattcagaaaaatctgggatctttctcaagaatactgtatacccttgggatttctcctcctgcagaatctgtggcattggatgttcttcattgcctgtgctaaagggttaacctcatggcccagtgggtaccctagccccctccttttcttccacttgttatgaagaggaaggaaccaacattttaaataccaccactttaaccatttttacaatttatttcaggatgggcttttttttcctctggggacactggaaaaattctgcatttctcctccagcactt

SEQ ID NO: 79351 - DNA, 1342 bp, Homo Sapiens
  misc_feature (683)..(697): n is a, c, g, or t
  misc_feature (1136)..(1145): n is a, c, g, or t
gcaatgctagaacaattcagaaacccttcaccatgttttaaagaggtaatacacaaacatttttacttgaaaagagttgagataatggcccaatgtgaggagtggattgcggatatccagcagtacagccagggataagcgggtaggcaggactatgtctcaccatgcagcagctctcaagagtcacaatgcttcagctccgcgaaaaggtgctgaaacttccctgccctgaaggcttggatcctgacactgaacgatgccccagaggtgtgcagagccacaacaggtgctgaggagactctaatgcatgatcaggttaaacccagcagcagcaaagaactccccagtgacttccagttatgagctgcattgatgtggacttcatagacacaaaggcttcgaagcacaagccaaatatgtcaatatttgtatgtaagaaactaattatgtaataggtaatgaaactgaaactatactatgcccttaaggagatccagtttaattcaaggtgatcttttatttacctgtacaggagtgtaaacttttttgtgcttttatttttcaattgtgagaaccactgattggtatgttcaacaaatttgtgtatacaaagaaatggataaatcactgctatataagggaaactaccttaggaaagaatgtttactgaatgtttattttannnnnnnnnnnnnnnactatagagtgaggggttgttaacaaagaatatatattggtcattcttacaactactatttaaagtcagcaacttttcactgaatttgatagattttatgtttggccatatcttcatgctcacatttgatttctgaagacctcctacatacacttcaataaaagttaaatggacatactccctcttttttgatttactggtacatttttaaaataataaatctgccataaaatgcattatatctggagacttgcacttgtatggatgaatttattacattcaacatatttaattttatgccttctaattctaagatgcagaaaaaaataaatgaacatgattttattctatgccaacatttgggcctctgaatgtatctgttatttgaatttaagtatttgaaaaggaatggtcaatttgaaagtcattctaaactgannnnnnnnnnctaaagggctccttttttcctggactatgtggttttatgactaaagtcacatgtatgtattaaacattgaggctctgtagaggagagaggatgtacctctctggtgctgttacagtacattctgtacctgccatacaggctcattttcatgcaaattcttcctagagccaaataaataaagacttaggtgaattagt

SEQ ID NO: 79352 - DNA, 1723 bp, Homo Sapiens
cctgaatttggtcgttccgtctgcctctttggtcagttcaaggtccttgtagttcacactgtgtccccagggatgaagtgggtcccggcacggtgggcattctgtcatgaatgaatggtccccttgtgtatgcagggttcgcgctgcagctaggcagcatctccgcaggtccaggtagtgtaagccctcacctccacgtcccctgggacctcggcatggctgcctttctggccagatccaatcaccctcccgcgaaggtggctttcgcatgcgcttctgctccccagcgatctgaggagtgaacaggaccccacggacgaggatccctgccggggtgtgggccctgctctgatcaccacccgctggcgctcccccaggggccggagccggggccgccccagcactgggggcggggtggttaggggcggccgttgcgatgtatgtggcaaggtgttcagccaacgcagcaacctgctgaggcaccagaagatccacacgggtgagcgaccattcgtgtgcagcgagtgcggccgcagcttcagccgcagctcgcacctgctgcgccaccagcttacgcacaccgaggagcggccgttcgtgtgcggcgactgtggccagggcttcgtgcgcagcgcgcgcctggaagagcatcggagagtgcacacgggcgaacagcctttccgttgcgctgagtgcggccagagcttccggcagcgctccaatctgctgcagcaccagcgcatccacggcgatcccccgggccctggcgctaagcccccggcccctcctggtgcgcccgagcctcccggcccctttccgtgcagcgagtgccgcgagagcttcgcgcggcgcgccgtgctgctggagcaccaggcggtacacacgggcgacaagtcctttggctgcgtcgagtgcggcgagcgcttcggccgccgctcagtgctgctgcagcaccggcgcgtgcacagtggcgagcggcccttcgcctgtgccgagtgcggccagagcttccggcagcgctccaacctgacgcagcaccggcgcatccacaccggggagcggcccttcgcctgcgccgagtgtggcaaggccttccgccagcggcctacgctcacgcagcatctccgcgtacacacgggcgagaaaccctttgcctgccccgagtgtggccagcgcttcagccagcgcctcaagctcacgcgtcatcagaggacacacaccggcgaaaagccctaccactgcggtgagtgcggcctgggcttcacgcaggtctcgcggctcaccgagcaccagcgcatccacacgggcgaacggcccttcgcctgccccgagtgcggccagagctttcggcagcacgccaacctcacccagcaccggcgcatccacacgggtgaacggccctacgcatgccctgagtgtggcaaggccttccgccagcggcccacgctcacgcagcatctgcgcacccaccgacgagagaagcccttcgcctgccaggactgtggccgccgcttccaccagagcaccaagctcattcagcaccagcgcgtccacagcgccgagtagctccagccgggacgcactgtgtccgccatggtcagaacacctacctcccctggttattgtgaggctggcgattacataagtataagcaggtccgcccagggcttggctactgtaggtgtccaataaacagtagatggaaacagggtcaccacccaaa

SEQ ID NO: 79353 - DNA, 2516 bp, Homo Sapiens
ctgctacaagcctggtctcattttcctctacctaaggatcttcctccatgcaatttcggcctaggaggcccttcccgccccttttcgcctagctaactctttcggtactcaaccaccaactcctaatcctccctggtcccccaagtgggctaggggcttctgggagtccctcgcactgctctaagcatccaggcagagtcattattccgggctgccaggttgctctttttccagcagccttcaggggactcctggctgggcggagtctgtagaggcgcgcggagtcctgggagagcgtcagatgtatttcctttcccttttttcgctcgtgtcccgccgggtggcgctcaccacctccccggaacacgcgagtctcctgtcgcggttccggtcggaattaccccgtggagcacgccgatatggctgcgctgacactgaggggtgtccgggagctgctgaagcgtgtggacctcgcgacggtcccgcggagacatcgatataagaagaaatgggctgccacagagcccaaattccctgctgttcgactggctttgcagaattttgacatggcttacagtgtgcagtttggagatctttggccatcaatccgtgtcagtctcctctcagagcagaagtatggtgcactggtcaataactttgctgcctgggatcatgtaagtgctaagctggagcagctgagtgccaaggattttgtgaatgaagccatctcccactgggaactgcagtctgagggtggccaatctgcagccccatcccctgcctcctgggcctgcagtccgaaccttcgatgcttcacttttgacagaggggatatcagtcgcttccctcctgccagacctggcagcctgggtgtcatggagtactacctgatggatgctgcctccttgctgcctgttctggccctcggcctgcagcctggggacatcgtgcttgacctatgtgcagctcctgggggaaagacactagcgttgcttcagactggctgttgccgcaatcttgctgccaatgatctctccccgtcccgaatagccagactacagaagatccttcacagctatgtgcctgaagagatcagggatggaaatcaagttcgagttacctcatgggatggcaggaaatggggagaactggagggggacacctatgaccgggtgctggtggatgtgccctgtaccacagaccgccactcccttcatgaggaggagaacaacatcctttaagcggtcaaggaagaaggagcgacagatattgcctgtgctgcaagtgcagcttcttgcggctggactccttgccaccaaaccaggaggccatgttgtctattctacctgctcactctcacacttacagaacgagtatgtggtgcaaggtgccattgagctcctggccaatcaatacagcatccaggtacaggtggaagatctgactcacttccgaagggttttcatggacacattttgtttcttctcatcctgtcaggttggggagctggtaataccaaacctcatggccaattttggccccatgtacttctgcaaaatgcgtaggctgacatagtatcacccaatccctgaagcaagaatacaaagggtatactctgttggatgcaccagaaactggaaactgggaccagtggcagagatgcactctcggtcctgtctccatcctgttcgtgtctttctgcagttttcggcaataagaagtagaagatttgctgtcctgctgtccaattgtggagcatcagcaggtttccaactcactcattaacccctaccccatctccaggcctgtactaaagtttgctgcccgcttaggggcttagaaggagaagccagtgagcaggctcacactaagttgtaaacataggagaagcatttggccaataaagttgttgaaactctatagacctggggctgcagttggggacttcatgtcagtgcaaatgccattagttccatttgtaccagccagttactgagcccctgtcacccttgaagtgagttccacctgaccagtcttgagcagccaacaggctcaattaagcccgcctggtttttccatatggctcatgatctaatttaaggaacaagtaactaaaaatgttaagccagtgcaaaataatctgcttacctactcacattggaaaaaccctctgagctgaataattctggccattcctgctgtcaacaatactgctgcccaaatgtggcttaggaggctgcttctgccacaaaaccgtcatactcttgtgcgtgccttgttctttgttcattcatctagcaggtattcccagacctcgtgtatgacaggtagctagggagctcttggagatgtagcagttgggattgtgggagattactgggcttcctcatcctttagaatggtaactctccttttgctttctgaacacctaggaatttcctgatgttttgttttgttggattccagactttttgttgtttctagtctgcagctgagctctggtgcctgttttttgg

SEQ ID NO: 79354 - DNA, 874 bp, Homo Sapiens
cgccgatatggctgcgctgacactgaggggtgtccgggagctgctgaagcgtgtggacttcgcgacggtcccgcggagacatcgatataagaagaaatggcccggtcgccctcacccctcggaaaataccatagcgaccttgcctgcactcctgggtctccgccgccttgcaggaaaggattcagccccttcctcaacctcgagctgcctctggcgaccgggaaaggttacagcgaccaccctgtccatactgccggcccaaaccctggcaaaaggctgccacagagcccaaattccctgctgttcgactggctttgcagaattttgacatgacttacagtgtgcagtttggagatctttggccatcaatccgtgtcagtctcctctcagagcagaagtatggtgcactggtcaataactttgctgcctgggatcatgtaagtgctaagctggagcagctgagtgccaaggactttgtgaatgaagccatctcccactgggaactgcagtctgagggtggccaatctgcagccccatcccctgcctcctgggcctgcagtccgaaccttcgatgcttcacttttgacagaggggatatcagtcgcttccctcctgccagacctggcagcctgggtgtcatggagtactacctgatggatgctgcctccttgctgcctgttctggccctcggccctgcagcctggggacatcgtgcttgcacctaatgtgcagctcctgggggaacagacactagcgttgcttcagactggctgttgccgcaatcttgcctgcaatgatctctccccgtcccgaatagccagactacagaagatccttcacagctatgtgccctgaaaagatccagggcatggcc

SEQ ID NO: 79355 - DNA, 646 bp, Homo Sapiens
  misc_feature (325)..(366): n is a, c, g, or t
gcacgaggttaagaccagcattgatcctttatatacaaatatatgttttccttgttttttattgctatttcagaagaaaatgaaccttttattgtgctctacccagtaactgcgctggtacatagacgcactgagcaaacaaacttttgtaaccacctctgactacttttgtatatcaaagttgattacttttgaaatatttggatctagtttctaagttattttagtgttttatatgttccccaaaattactttgaatctgtcaccagcataatgagttcttggtgatacaatggtgagacttgtaatgagcaaaaagctaccnnnnnnnnnnnnnnnnnnnnnnnnnnnnnnnnnnnnnnnnnnttgattaccgtaagacatcacagattacctgaaaccccttccagtataactaggccctccttccttccacatttaattgcttaatagtttgaagaaactattggaaatgggcattttatatgacatgtatggctttacaatattaaatatgagcaaaaagaaaaaatatgagaaggtttatgtgggtctgtaaggtatggctgtggaaagatattgtagtagttttgacactattgttattacctttaaaatcatttaccccaataaaatgttaaaaccg

SEQ ID NO: 79356 - DNA, 1407 bp, Homo Sapiens
ggggggggctcacgcgaggcgctggaacggtccgggagattctcgctctgctgctttagcttcggagtgtttggcgatggggcagcgcgagatgtggaggctcatgtcgaggtttaatgcattcaaaaggactaataccatactgcaccatttgagaatgtccaagcacacagatgcagcagaagaggtgctattggaaaaaaaaggttgcacgggagtcataacactaaacagaccaaagttcctcaatgcactgactcttaatatgattcggcagatttatccacagctaaagaagtgggaacaagatcctgaaactttcctgatcattataaagggagcaggaggaaaggctttctgtgccgggggtgatatcagagtgatctcggaagctgaaaaggcaaaacagaagatagctccagttttcttcagagaagaatatatgctgaataatgctgttggttcttgccagaaaccttatgttgcacttattcatggaattacaatgggtgggggagttggtctctcagtccatgggcaatttcgagtggctacagaaaagtgtctttttgctatgccagaaactgcaataggactgttccctgatgtgggtggaggttatttcttgccacgactccaaggaaaacttggttacttccttgcattaacaggattcagactaaaaggaagagatgtgtacagagcaggaattgctacacactttgtagattctgaaaagttggccatgttagaggaagatttgttagccttgaaatctccttcaaaagaaaatattgcatctgtcttagaaaattaccatacagagtctaagattgatcgagacaagtcttttatacttgaggaacacatggacaaaataaacagttgtttttcagccaatactgtggaagaaattattgaaaacttacagcaagatggttcatcttttgccctagagcaattgaaggtaattaataaaatgtctccaacatctctaaagatcacactaaggcaactcatggaggggtcttcaaagaccttgcaagaagtactaactatggagtatcggctaagtcaagcttgtatgttttaattgataaagaccagagtccaaaatggaaaccagctgatctaaaagaagttactgaggaagatttgaataatcactttaagtctttgggaagcagtgatttgaaattttgaggtgacaggcttttaaggtatattttgtagcatgggttggcaatctacagcatgtgggccaaatccagcctgctgcctgtttttatataccctgtaagctaagaatggtttccgcatttttaaatggttgggaaaagaaatcaaagactaatatttcatgacgtgaaaattatcagaattcacaaataaagctttattggaact

SEQ ID NO: 79357 - DNA, 756 bp, Homo Sapiens
gtgaactctgggtcagcaagtggaagagccagacctatctgcctgtttcatctattagatgggaagagatgataaacataacataaattagtaagcagatgtgataagtaactgaagaacagttgttttctatccttaatagatacggctaaaccagctgaaggttaacaacataaatattttaatatctaggtatttttgatgtcctatactctagaaatatgtgcaaattaaagtgtggcggggatgaagtattactaatctatttccttggataaggttatatatccctctctctactctaccctccttagctacaagttcaggaacaacacaataaaggacaaaagactctcacatccaatttcaaattggtttctcatttattgccatcattctaaatcaaagcactctacctgttcccaaaggaagtgacagataaagcccttgaactggcaactggaagaactagaagtaggcttttgctcttcggtaggcccagaagattatgaccactgagttgggctggtttcaggccaatgtagaaaggaagcagcaggcctcacactggagtcctccagcacagggagctggtccgctctggatgctgcccataggcggtcttaaaagcctgtcacctcaaaatttcaaatcactgattcccaaagacttaaagtgattattcaaatcttcctcagtaacttcttttagatcagctggtttcaattttggactctggtctttatcaattaaaac

SEQ ID NO: 79358 - DNA, 690 bp, Homo Sapiens
aaagccttgcaagaagtactaactatggagtatcggctaagtcaagcttgtatgagaggtcatgactttcatgaaggcgttagagctgttttaattgataaagaccagagtccaaaatggaaaccagctgatctaaaagaagttactgaggaagatttgaataatcactttaagtctttgggaagcagtgatttgaaattttgaggtgacaggcttttaaggtatattttgtagcatgggttggcaatctacagcatgtgggccaaatccagcctgctgcctgtttttatataccctgtaagctaagaatggtttccgcatttttaaatggttgggaaaagaaatcaaagactaataattcatgacgtgaaaattatcagaattcacaaataaagctttattggaactagctatactcatctgtttatatattatctgtggctgctttgaaatgagtagttgcaatagagatggtaaagcctacaaagcctaattatttactgtctggtttttgtcagaaaaaagtttgtcaatccttgttttagaagatggaaaaatgtgaagatctttggagattctcttgagtggtatatctaattgaaatgggatcttcgtttggcttgtatgttgatgaaatcaacttaggtatacaatataaaaaataaagaccctgaaaattgttttggaaaa

SEQ ID NO: 79359 - DNA, 723 bp, Homo Sapiens
  misc_feature (123)..(123): n is a, c, g, or t
tcgttgtgatcacctgcagccaagacgctgatttctgctcctatagcctggcaaccttgtggtacatgggactacgtcctttaaactacccaggagcaaagttggacttccatgaaaaaggtntgtgcagatctaaaacctctcatctatttcactaaaaggacttccccttctaactgtcacccttaccaatgtaaccctgtcctctctatcaccacctccacctgtctttaactaactctagacctgtccttacatgcttttatggtattggaataggaattaaaagaaattaaagaatgtgtaaggagaaactcagttgtatgtaagaaaacccaattccccctgagaaagagaaagagttggagtcctttaaaaattaactgcctgtttttctgtggctagtgagccttatctctcctcctttcccagacattgtgaagaccctgtttctctagctgtgcagctgcaaggtcactagacagataaactcaagttgtaaaacatgtttttccttgaaaagtaagaaatgctgtaatgcatttctcaattaattaaataactgtctttgtttctcgcttctgtaatatgcttccccctgcacagatctccacccaccctacaaaatgcttaaaaggtaacttaactctttgttctgggctcagtcctttgggctgagtactgggccggtgcacctaaataataaatatcttcctgaacccc

SEQ ID NO: 79360 - DNA, 326 bp, Homo Sapiens
tggctagtgagccttatctctccctttcccaggcattgtgaactctgtttctctagctgtgcagctgcaaggtcactaaacagataatctcaagtcataaaacatgctgttccttgaaaagttagaaataatgtaatgcatgtcttaaataactgtctttgtttctcgtttctgtaatatgcttccccctgcacaaatctccccccatcccactaaatgcttaaaaggtaaccggactccttgttcggggctcagtcctttggatgttacaatcaactggggcggtgcacctaaataattaaataaatcctcttcaaccccaaaaa

SEQ ID NO: 79361 - DNA, 1674 bp, Homo Sapiens
  misc_feature (287)..(300): n is a, c, g, or t
  misc_feature (408)..(420): n is a, c, g, or t
tcttcttttttccttttccctctttggttgtctgcgctttgttcctgttgttttcttgtatgtctttcttcctcggttggctcctgtcttggtgtgtgtttttcctctcttacgtgtgttcttgttgtttcatgttttcaccttcctgtttgtgttcgtgtgtgtcgttcgttttggctgtcgctttctccttcgtttgtcttcattgttgtgtcgtgttgggtcgatttgtctcctccttcgttctgtgggttcgtggggctgtcgggtgtcctgtcttcgttcgnnnnnnnnnnnnnntgacctccttcatactggctgtctttgtggttttctgaggtgtttggtgcttttcgttcccccggggcactccgcctggtggacagagccaaacttcatctccagagnnnnnnnnnnnnngagtgagcatattgaactaccctcagctcatagtaaggcaataggtcaacagaataataattcatgctattgcattggaaaagcaattaaaagaaatttaaaaatgtgtaagcagaaattcagttgcatgtaagaaaatccattccccgtgagaaagagaaagagctggagtcctttaaaaattaactgcctgtttttctgtggctagtgagccttatctctcctcctttcccaggcattgtaaataccctgtttctctagctgtgcagctgcaaggtaactagacagataaactcaagtcgtaaaacatgattttccttgaaaagtaagaaatgatgtaatgcatgtctcagttaattgaataactgtctttcttgcttctgtaatatgcttccccctgcacagattccccccacccccgcggccccacaaatgcttaaaaggtaacttaactctgttcagggttcagtccctttggatgttaatctgactgggctggtgcacctaaatgatgatatctcccctgaactccatcagtctctctgattccttaaaaatcccgctacattttgtgtaatgaactggcactaagagaaagttggtcgaagaaaggcagaggaactcgtgtcttggaagaattaaaatcgaggggctccataatcatctggcatccgttcaatgttgtatctatcggttagaaatgtacatgataggaactccaggaatcttacggattcttcttttcaggtcccggtcaactgtggccacaatgtaacacttatgctgagttactctctgtactaagcagtcatctgcataggttcctttgtgtgtacatggtaatcgttcaaatcttggatccttggcaatccttagagccactcgatacttctgccccaatttctcaatttcagccattacacaatcggttatacatgggatacacttggcatacagacagtccatcattgactgcactaagtccagtttggctgttatggaaaagttgataaagttggtatcaacgaggatgtggtaaggtgggcccagctgtgtattatacttggaaaaataagcaggaagggtgttcggggaacttctctttcctttaatgcgctgggatccttcttttctttctttttaggttttaatctatccttttctttaagcctctgatctctgagactaagcattcgcttcatggtcgcatacttccttgttttcttttgcttccccatggtcacgccaaactcc

SEQ ID NO: 79362 - DNA, 810 bp, Homo Sapiens
  misc_feature (158)..(165): n is a, c, g, or t
  misc_feature (548)..(548): n is a, c, g, or t
  misc_feature (554)..(557): n is a, c, g, or t
  misc_feature (559)..(579): n is a, c, g, or t
  misc_feature (582)..(582): n is a, c, g, or t
  misc_feature (589)..(589): n is a, c, g, or t
  misc_feature (731)..(739): n is a, c, g, or t
ggagtagaagaaagagctcagctctgtgaagaggtggcaaatagtggtgctttctattaacacctttgttatgaaaagcaccaaaggggggaaatggaacagaaattaaaagaaattaaagaatgtgtgagcaaaaactcagttatatgtttggaaannnnnnnncaccaattccccctgaagaagagaaagagctggagtcctttaaaatcaactgcctgtttttctgtggctagtgagccttctctctccctttcccaggcattgtgaagactgtttctctagctgtgcagctgtaaggtcactagacagataatctcaagtcataaaacatgttgttccttaaaaagtaaaaagtaatataatgcatgtctcagttaaataactgtctttgcttctctgtttctataataggcttccccctgcacagatctccccctcgccccacaaaatgcttaaaaggtagcttaactctggttcagggctgtgtcctttaaatgttaatctgactggtttggtgcatctaaataattaaataattccctccntaaaannnnannnnnnnnnnnnnnnnnnnnnccntgtcggnccggctccgcccctcgaagaagctttccaaaaccatttcgttttggcgcccgggggccccataagggaaaggggaacctggggccaaaacctggttccctaagggagaacccgggggcctgaaccaagggggcttgggaatnnnnnnnnnaattaaaaaaacggcccggggggggcaaacccaaaagggtttctggaaaacaattccgcaaatgtgggagc

SEQ ID NO: 79363 - DNA, 534 bp, Homo Sapiens
gggtcaaactattccccgcctcagcctcccaagtggctgggactacagcacgtgccaccatgcctggctaattttttgcatttttagtagagacactgcagcgggataattaaggaatcagagagaccggaggggttgaggtggaattatttaattgtttaggtgcatcaacccagtcagattaacatccaaaggactgagccttgaacaaaaagtcaagctaccttttaagcatttcgtggggtgggggtagatctgtgcagggggaagcgtattacagaagcaagaaacaaagacagttattcagttaagacatgcattacatcatttcttactttttaaggaacaacatgctttacgacttgagattatctgtctagtgaccttgcagctgcacagctagagaaacagggtcttcacaatgcctgggaagtggagagataaggctcactagccacagtgggaaaaacaggcagttaattttaaaggactctcagtcgtgagactcgtcgtccctagggatcctctagatcc

SEQ ID NO: 79364 - DNA, 1090 bp, Homo Sapiens
  misc_feature (147)..(160): n is a, c, g, or t
  misc_feature (164)..(398): n is a, c, g, or t
acagatcttgtgtctccaaggtaggcagaggcaggaaaagcaaggagccagaattaagaggttgggtcagtctgcagtgagttcatgcatttagaggtgttcttcaagatgactaatgtcaaaaattgagacatctgttgcggttcnnnnnnnnnnnnnncccnnnnnnnnnnnnnnnnnnnnnnnnnnnnnnnnnnnnnnnnnnnnnnnnnnnnnnnnnnnnnnnnnnnnnnnnnnnnnnnnnnnnnnnnnnnnnnnnnnnnnnnnnnnnnnnnnnnnnnnnnnnnnnnnnnnnnnnnnnnnnnnnnnnnnnnnnnnnnnnnnnnnnnnnnnnnnnnnnnnnnnnnnnnnnnnnnnnnnnnnnnnnnnnnnnnnnnnnnnnnnnnnnnnnnnnnnnntgagccaccgcaccctacctcattttctgtaacaaagctaagcttgaacactgttgatgttcttgagggaagcatattgggctttaggctgtaggtcaagtttatacatcttaattatggtggaattcctatgtagagtctaaaaagccaggtacttggtgctacagtcagtctccctgcagagggttaaggcgcagactacctgcagtgaggaggtactgcttgtagcatatagagcctctccctagctttggttatggaggctttgaggttttgcaaacctgaccaatttaagccataagatctggtcaaagggatacccttcccactaaggacttggtttctcaggaaattatatgtacagtgcttgctggcagttagatgtcaggacagtctaagctgagaaccccttctctgcccaccttaacagacctctagggttcttaacccagcaatcaagtttgcctatcctagaggtggcggatttgatcatttggtgtgttgggcaatttttgttttactgtctggttccttctgcgtgaattaccaccaccaccacttgtgcatctcagtcttgtgtgttgtctggttacgtattccctgggtgataccattcaatgtcttaatgtacttgtggctcagacctgagtgcaaggtggaaataaacatcaaacatcttttcattaaaaaaa

SEQ ID NO: 79365 - DNA, 991 bp, Homo Sapiens
taggtagcgaggcctgggtggcgatttcggcacgaggctcattcgagtgctccggcgcacagacccgcgccccgccgtctgcgagcctcccgagagccgtcccttcgtccggccctggagcattgcgtttgtcgccggtgtcgcagtgcgaggatggcgccgcgggtgtagcggctctctgcgcaggccgagtgggcccagagaagcgaggaactccgcagctcgtcgacacgtctcgtctcctgtcccaattcagggcttggtgaggtgactcgcggtcgcgggtgactcgccggcaggacactgcctggaacgcctggagcgcctcccactgcagacgtctgtccgcctccagccgctctcctctgacgggtcctgcctcagttggcggaatggcggccacgggagccaatgcagagaaagctgaaagtcacaagtctggagcccggcactgtggtcataacagagcaggcagtggatacctgcttcaaggcagagtttgagcagattgtcctggggaagcgggtcatccggaaaacggaccttaacaagaagctggtgcaggagctgttgctgtgttctgcagagctgagcgagttcaccacagtggtggggaacaccatgtgcaccttggacttctatgaagggcaaggccgtctggatggggctctctgctcctacacggagaaggacaagcaggcgtatctggaggcagcctatgcagccggcgtccgcaatatcgagatggagtcctcggtgtttgccgccatgtgcagcgcctgcggcctccaagcggccgtggtgtgtgtcaccctcctgaaccgcctggaaggggaccagatcagcagccctcgcaatgtgctcagcgagtaccagcagaggccgcagcggctggtgagctacttcatcaagaagaaactgagcaaggcctgagcgctgccctgcacctccgcagacctgctgtgatgacttgccattaaaagcattgtcc

SEQ ID NO: 79366 - DNA, 1408 bp, Homo Sapiens
gcatagtaatatagaacagtgtgtacaaaaaagcaggctggtacggtccggaatcccgggatatgtcgacccacgcgtcgctcgcaagtggttccctcattcgagtgctccggcgcacagacccgcgccccgccgtccgcgagcctcccgagagccgtcccttcgtccggccctggagcattgcgtttgtcgccggtgtcgcagtgcgaggatggcgccgcgggtgtagcggctctctgcgcaggccgagtgggcccagagaagcgaggaactccgcagctcgtcgacacgtctcgtctcctgtcccaattcagggcttggtgaggtgactcgcggtcgcgggtgactcgccggcaggacactgcctggaacgcctggagcgcctcccactgcagacgtctgtccgcctccagccgctctcctctgacgggtcctgcctcagttggcggaatggcggccacgggagccaatgcagagaaagctgaaagtcacaatgattgccccgtcagacttttaaatccaaacatagcaaaaatgaaagaagatattctctatcatttcaatctcaccactagcagacacaatttcccagccttgtttggagatgtgaagtttgtgtgtgttggtggaagcccctcccggatgaaagccttcatcaggtgcgttggtgcagagctgggccttgactgcccaggtagagactatcccaacatctgtgcgggaactgaccgctatgccatgtataaagtaggaccggttgctgtctgtcagtcatggtatggggcattccttctatctcaatcatgttgcatgagctcataaagctgctgtactatgcccggtgctccaacgtcactatcatccgcattggcacttctggtgggataggtctggagcccggcactgtggtcataacagagcaggcagtggatacctgcttcaaggcagagtttgagcagattgtcctgggcaagcgggtcatccggaaaacggaccttaacaagaagctggtgcagcagctgttgctgtgttctgcagagctgagcgagttcaccacagtggtggggaacaccatgtgcaccttggacttctatgaagggcaaggccgtctggatggggctctctgctcctacacggagaaggacaagcaggcgtatctggaggcagcctatgcagccggcgtccgcaatatcgagatggagtcctcggtgtttgccgccatgtgcagcgcctgcggcctccaagcggccgtggtgtgtgtcaccctcctgaaccgcctggaaggggaccagatcagcagccctcgcaatgtgctcagcgagtaccagcagaggccgcagcggctggtgagctacttcatcaagaagaaactgagcaaggcgtgagggccgccctgcacttccacaga

SEQ ID NO: 79367 - DNA, 629 bp, Homo Sapiens
  misc_feature (418)..(442): n is a, c, g, or t
ctccggaagcgcctggctcggatcgcgatggcctgtgtcttgtcaaaggtgcccgccagactgttggcaccagcatcgcttgggccctgggggtgcgagccttaaacttgctctgtggagctctggccatcttccacctggcctacctgggctccctgtttgatgtcgatgtggatgacaccacagaggagcagggctacggcatggcatacactgtccacaagtggtcagagctcagctgggccagtcactgggtcacttttggatgctggatcttctaccgtctcataggctgaggcacatctgtggaccctcataaccctcttaagacccctctcagggtgccactgatgggggatgagggaaggccctctctctactccttgaccccctccatccttgacccccaacacctcannnnnnnnnnnnnnnnnnnnnnnnnaaatcacaccattttcatgcctgtcaatccccaccccaccacaaggcaggaagggggtggtgcctgctggggcctagagggggatgcttggggaaacagagaaggggagatccagggcctccccgccttccttcttcctttttatatacaatttgttattgtcaaataaaagtaggaaatattcaaa

SEQ ID NO: 79368 - DNA, 961 bp, Homo Sapiens
aaagctgccgtttgccttggcttggtttcatacactgatttatttttctatgccaggcagtagagtctctctgcctctgaggagcaggctacccgcatcccactcagcccctccctacccctcaagatttgatgaaaattccaaccatgaggatgggtgcatcggggaagggtgagaaggagagcctgcctgctcagggatccaggctcgtagagtcactccctgcccgtctcccagagatgcttcaccagcacctgcctctgagacctcgctctctgttccagcaaccctggttggggggtcagacttgatacactttcaggttgggagtggacccaccccagggcctgctgaggacagagcagccaggccgtcctggctcactttgcagttggcactgggttggggaggaagagagctgatgagtgtggcttccctgagctggggtttccctgcttgtccagttgtgagctgtcctcggtgttaccgaggctgtgcctagagagtggagatttttgatgaaaggtgtgctcgctctctgcgttctatcttctctctcctccttgttcctgcaaaccacaagataaaggtagtggtgtgtctcgaccccatcagcctctcacccactcccagacacacacaagtcctcaaaagtttcagctccgtgtgtgagatgtgcaggttttttctagggggtagggggagactaaaatcgaatataacttaaaatgaaagtatactttttataatttttctttttaaaacttggtgaaattatttcagatacatattttagtgtcaaggcagattagttatttagccaccaaaaaaaagtattgtgtacaatttggggcctcaaatttgactctgcctcaaaaaaaagaaatatatcctatgcagagttacagtcacaaagttgtgtattttatgttacaataaagccttcctctgaagggaaaaa

SEQ ID NO: 79369 - DNA, 880 bp, Homo Sapiens
  misc_feature (610)..(660): n is a, c, g, or t
ggggccacgacttgcccacatatgtggtcacagagcacagaatacctgggcgggtgtgttggggggtggaaggagtgcctggccctggggaggaccctcttggtggaggggagtgggggactgggaccagccagggaggcagcagaggctggaacccagtttaggcccccaactgggtttggcctggggagggagggtccggctccccagcccttccttagggccaggctttcccgcgggcacgggggtggggggtggtcacccgagcaggcctgtgagaggcctctcctgctagaattgggcatggccgaggggcaggggctggagctgcgagtccaccactcccttgccggccccagggtaagagccacctcctaggccgcagtggcccaaggtcccagctgctcgcctgaggccgccgggggtgcggtccaggcctcccgtctccgggggatctgtagggttcccgcactgcgatagggcggcccgtcccctcctcttggcgcaggacgccccggaacccaaaccaacatttccagctctcaggtgtacagaaatgcggtttactttgtaggccacgttggttcaataaatgatgcagcggacacannnnnnnnnnnnnnnnnnnnnnnnnnnnnnnnnnnnnnnnnnnnnnnnnnnactcctccgcccctaggcgccgcggcaggtgtccgcggtgaccggcaggcagctgaggaagcggaagccgaatctgctctccgccgtgttctgcaccgacagggccaccagggggcagctacggtccacgctcttccggcacacccgaactcggtgttctttctggtgaagaggttgggataccggcgggcaacgctgttccaatccacgtcctccagcc

SEQ ID NO: 79370 - DNA, 1076 bp, Homo Sapiens
  misc_feature (394)..(402): n is a, c, g, or t
  misc_feature (574)..(588): n is a, c, g, or t
tgacaggctgtttcctcgtcgtatagattttttccaatcaaacctactttttccatactctgtgcatattttttgtgaagttatacacattgaagaccctaaaaatcccagtccatcattcagcttacctctgcgaacttctatctggtattgaatcagtttcagaaacacagacagatccaaggaaatgtctctttataatgttcttaggatggactagacccataaatgtgccatgaatcaaaatattacataaatttggaaagccttttcatggctggttaagcccccctgaatgaaaatttcctccagccaatttaaacctggggcccaagccttccccttcccgggaatttttcctggggccggggccctttggtggggccaaacaaannnnnnnnnttgtcccacaaaaaaataaatattcggggccggccaggttatactaaattgagaagagaggccggacctctcccccccggagtgtggggagcccgatcttaataattttattctcgccttccgatatcgccccacccacccttcggaatgcatctgtttctaaccagtactnnnnnnnnnnnnnnntatgcccgcgcaattttataaacgcaacgagaagcatctttgctacgtgtatcagtggcgcgtgcttttcgcacgcccgggcccaccgcatgctcgattcaagagaggaggtgttggcgacgcttagttttctccccggtcgataccggtgtgatggatggccgggcgccacacagccgttcgggccgtaggcagagtgaacctctttcaagaacgtggaacaccgcctgcgcagcctctcatgaatgccggtgcccccgccccttcctaggttaatccggcccacacccgcccacctatatcacacactcagggctccctaacgagccttcgtagcatccactattatgtcctgcgggtcacacgctatccccgctatcgagcagcccggggcgcacatacacggtgaggcgccgctttcccattcattgcgcataccgcagaagatcgtagatgtcaccgcccacctaccccctcgcgcagccgca

SEQ ID NO: 79371 - DNA, 775 bp, Homo Sapiens
  misc_feature (644)..(644): n is a, c, g, or t
  misc_feature (745)..(745): n is a, c, g, or t
ctggagtactgcatagtttacaaagtgctttcacatacatgatctaatttggtttactgaacttagaaaggtagactttcaaggaaaaaacatcgatttccaccaatagtaaaagctactgcatcagacctgtcactcaacagcgctccttgaggcctagctcctgagatccctctggcgagcccttgcggctccacatcctcgggacggcacgctcccacgggactggagcaaaggtttcagagactcgggatacagccagatctcttcggtgaggagactcagtcttactcgagtgtatgtgatttttaaaaaagacattgaaacaactatggaaacagaggcaaaggcagcaaggctttgggtttgcgactgggaatccgtgcggcctccctttggtgaagacctgaccccgtggtgggggtgaacagggtttccttgaccccgtcccagggttcccttcaggacagatggatttcactaggggaagcgtgatgctggtagcctccactctcaggctgggcagggtaggctcccagggaggcagctcccagcgcagcctcttccatcactccggctggagctagaaggagagaagtgagctgaggctctagaaagtgctgcactcctgcctttctttttcncaagggtgctcttgacatctggagtgcagtcagcaagcctttccgagtgggctggctgcctcagatgcctcagtccctgttgctggggatgcttcggtggnggctcctcactgtgggccttctcttgggtc

SEQ ID NO: 79372 - DNA, 650 bp, Homo Sapiens
  misc_feature (47)..(47): n is a, c, g, or t
tattccatgaggcagccaggagcaaggggccatgatattcatgactntgtctgctgggcatttttcaaagtgtccttgaattcactcagcaaacaaagctttctggagaatctctcaaaacttaggccctgctccatttggccaaaaatgatggctgctccaaaactctgaacttcttaaaactccatctgctacattatttctggagtttaaacatgactttttctgtctttgagtatagatgtgtttgtttaattaacgaagcacaagtctgttaagcagaaggctccaagctgtattctatacttgggaatccttggtgccatctttattctaccaagtgccaatcaccatggctaaagtgggcgtatattacagcctgtgtcctaagcttagaagctttaatgtacttttttaaatgaaaagtattagagggggttgaacattgtaactaaagcataaagttagaccaattacatgcagagatgtttatttaatattgtgtgagctgagtccttctgtataaattatttgcacacttttcttgcatgatgaactgattttttatagttgtttgtaccagacggtggcatatttttgtaaaaaacttttgacactgaattgcaataaatgtttttccaccaccaaaa

SEQ ID NO: 79373 - DNA, 752 bp, Homo Sapiens
  misc_feature (53)..(116): n is a, c, g, or t
accaaatgaatttcaagcaacaacttacttactatttatcaaaaagggatttnnnnnnnnnnnnnnnnnnnnnnnnnnnnnnnnnnnnnnnnnnnnnnnnnnnnnnnnnnnnnnnncttatgacattttaaactttatattttaaaatatttgaatacgaaaagatcagtctacctctactccattctagacaaagtattaatccttagtgaaagtaattaattaaattgccaacttggcattattattaaacttgataggaacgcaacattaaatttaaaaatgttttcccgtgggtaattttctattatatattttcatatgggcaaagggaaaaaatgataaatcctctgtaatcacaaaccccaatttcgttttgtttattcagcttctaaaatattgaacacccagacttttaattcaacctttaagaaccttatcatttatgtttcagtagatatcaaagtaatccatgtttgtgtcaaatgatcatagaaaataaatagaagagacagtgaagcaagtaaaaagaaaagcattgttttaatttgtttgcattaatttttttcatttgtcaaaatgcttcttttgttgccacagtaaagaacagtttttattgttttgtaagtaaaattacgtagctgattttgtatgtaaagattaatttccataataaaaattattgtatgtttactgtgatcttaatgggcagggttaagaaagttatttaaaataaagttacctattctact

SEQ ID NO: 79374 - DNA, 319 bp, Homo Sapiens
gagcatctgtaagtgcatttaaatcattagaagcttttttccaaaactagaaacccttattaaaaatagacatttttttctaaagattattagttaaaaataactaaaagagttccttagagtaatcatttcaaccaaatgaatttcaagcaacaacttacttactatttatcaaaaagggatttaattattttgaatataattataaattaaatttcaaatatttaaaaatactattttatataattccttatgacattttaaactttatattttaaaatatttgaatacgaaaagatcagtctacctctactctgga

SEQ ID NO: 79375 - DNA, 1913 bp, Homo Sapiens
  misc_feature (1721)..(1721): n is a, c, g, or t
accccatttaagtagaatcacaaatataaagacaactgaattttaatgaaactagcatttacgtttcaaaatgaagcactaggaacaagcaaagaaagaatttggctaataaaaatctcctcggtcatcaggtgtcctgcagctaaggagtacttcaaggagaattcccaccactggagctgggctgtgcagtggctaccagaagaagatgtcagaacattactggacaccacagagtaatgtctctaatgaaacatcaactggaaaaacctttcagcgaaccatttcagctcaggacaccgttagcgtatgccacagctttgttgaatgaaaaagagcaatcaggaaagcagtaatggggtccggagagtagtcctggccaatgagaaccggagacaggcatctacagcagggttcagaatctcccatgatgattggtgagttgagaagtgaccttgatgatgttgatccctagaggaacatgcccagcctgagaggagtcaagacacaatactggatgctcagcaccttcttggaatcagaatctcgaaccctttggaagagcctggagattggactgggaaagctgctgtgacttgggcggatcgtgtatttctcaaggaaagcatttttaagccactagaaggtttgggagctgtttggcagtgggagaactccggcatgtggatcagctgtcccgggagcgtggtctatatgtggattcacatttctgtggagattttcggaaatagagccagtggcagacttttttgttacacgaacatacaagagtgagcataaagctgttgctttctctacgatgctacaaaagaaattcctttggtttttatattttaagaaaaagcaagctgcttttagatatgtgggggcaaatttttaatcttgcagtaatattaaacaggaatatccaatttaaaatgatgtaaagatgtaataaaattccttttcattgtaaaatagtaattaagtcaatttacacagacctttgtatttaatatgtctccctatttgtatagaatttcagatgggtctagatgagaaccctatgcataagcttggatcttgatgaaaggttaccaggatcaggatcaaaaattgggaaatactaagctcttgaagatatttttctgatataattagattgaaaagagcaattttgaaaatgctgtgttctccagaagtacagggtgcattatttgacatcaattacttaaagaagttatgagttgttccccaaacagattttaaaaacagcaaaataaaagcactttaagatataattttactgagtttaacttcacagaattatctttttaatgcttggagacatattgaataaactgtagtcttaaatcatgtgatctgcaatcgtttgcttttgcttaaaacataattactgaaacccttggtattggttgtatatgaagttaactatttgagttggtacacactgcttgtgagtttcatagttattgtaatgcagagaaggaatttgagaatttgtttctcctcaacatgactaattaacactgaaaagtcagtcaaggtttaagatttattttcccagaaataaatataaagcaattgaataaccatccatttagtcgtatttccaaagtatagcaccattcactcatttataccagctcccttttatggtgtgggggaaaaaggtttacacccacatatttcataaaaanttttgaacattttggattttgaaatggctcacattttcgggccctggttttccctttagttaacaggccctgccctaattttcatctcaccaggcaaagaactaggggaccctaaggaagtggccaggtttttccctgccaaaatttgccaagttcccaaagggcgcacccaaccccctgaaatgcgctggc

SEQ ID NO: 79376 - DNA, 701 bp, Homo Sapiens
  misc_feature (19)..(19): n is a, c, g, or t
atgttcaaattagtggcanaagaaccattctatgttggagctgcaaagacataagcgaccataaatatagacgctatcagtggtttggcttatgaatatactctggaaattaatgggaaaagtctcaagaagtatatggaggacagatcaaaaaccaccaatacttgggtattacacatggatggtgagaactttagaattgttttggaaaaagatgctatggacgtatggtgcaatggtaaaaaattggagacagcgggtgagtttgtagatgatgggactgaaactcacttcagtatcgggaaccatgactgttacataaaggctgtcagtagtgggaagcggaaagaagggattattcatactctcattgtggataatagagaaatcccagagattgcaagttaatgaattttcatcttaagaagtaaagatcaggactttttaattactgtggtaattaaatgtgttcagtatgtacttatcagtacatttagtctgcaatgttttaattttttaaaaagttacatgaaactaacattccaagggtcaggaaaaaaaccaattatgtatagtcataaaaattacaatttatgatgcaaataatgtaaaatgttttaaagacaaatggcaaataagatatggaccaaagtcactaatgttttacaacagtaacctttactataataaaaaaatttaaa

SEQ ID NO: 79377 - DNA, 1590 bp, Homo Sapiens
cttcctagatctaagtggtcacaatagctgcaaccatgggtttgagaatgttgcagtatctcaggcaaatatttaaggtgcaataattagtctctggtgactggtccattgagaaacaatgcagtaaataatagtaaatacactaatagggaaagaatatccctacatccactgctacccagccagctaggtaacacaaccctcatttttacttctttcccatttttcaagggtacataaaactgcattagtagcaaccatctctccaatttccatccctcagagtgctgagtgaagacagaggctttggaggctgaagaaaacttctaacaggttgtgcaattttgcttcgaggcaggttactcccatttattgccaacgaaggtcttgggagtgcactgcgacccattatcccagaagctgcagctttgttcggtgtggggattcctgtgttggaatacagctgtaaggccgtttgataaaggcatgttactgctgccttgaacggttggactcacataggctgtggctgtaagaggctgtcggatagacactgggaaatgccccacgctgtagaccctgtgttgaagctgtcccggtgatggaatacaagattgtattcttgaaatggccatgtccagctccatgcaagcttgagtcaaaactctgactatttcgcacggtgaccggagaactaatgttgctagctaatggcagttgtacttggcatccgggctaggttaggcatacttcttcggagcttatctccattggtcctatttggttccctgatcgggagtttgggcttgaggtgaataatactgttgctgctggtaatttatgtgaaggaaaatactgggaactggggctcctccttacactcccgaatgctggagaaagtctgtgaatggggaattcctctttggaaaggggaacatcttggaagacgaggctgaggtggtggcaaatgatcaaattcctcttcatcctccagactgtattggtcatattcttgatcactacatgtcccttgttgtcctgaactcaatgacacactggaactatgtcttgatacagatgctgaagtagaagcataatcttgcctgagactttcttcttgcagacgagccatgatctgaacatcagtgaggtcctgtaatttatatcccatggagatagaatcatcctccaattctgaagtactcagctcactgtcgatagatgactggggactgagtggggagcccctggaagtgtaaccttgctccagtctaaagcacagggaacgtctcgctgcttccatctcaggagttgggttatctaggacatgtctacaccactgcaaaggagtcagggatttctctgatgaggtgaacgtctttgaagagccaatgtataaccaggtgtagtcgtcctcgtcccgccaggcggctacgctctccagatccagcaattccacctcgtccagcagcgtggggggcggcgagggcggcgctgcagctgccctggcggcgtccccgcagccccccggctccggcccgccaccgcccgcgccgaagaagcctgctgccggcttgaagtagacgaagg

SEQ ID NO: 79378 - DNA, 1369 bp, Homo Sapiens
  misc_feature (50)..(50): n is a, c, g, or t
  misc_feature (869)..(891): n is a, c, g, or t
  misc_feature (968)..(968): n is a, c, g, or t
  misc_feature (979)..(979): n is a, c, g, or t
gaacgagacagtcagtaatcttacccagagagtcaacctgatagaaagcnatgtggttgctatgagcaaggtagaaaagaaagcaaacctgtccttcagcatgatgggtgatagatctgccactctgaaaagacagtctttggatcaagtcaccaacagaacagatacagtaaaaatccaaagcataaagaaagaagatagttcaaattctcaggtatccaagctaagagagaaactccagctgatcagtgctcttacaaacaaacatgagagcaacaggcctccagagaccgccgatgaagagcaagtagagagtttcacatcaaagccatcagcattgccaaaattttcacagtttcttggagacccagttgagaaagctgcccaactaagacctatctccctaccaggagtttctagcactgaagatcttcaggatttattccgcaagactggccaggacgtggatgggaagctgacctaccaggaaatctggacctccctaggttctgctatgccagaaccagagagcttgagagcatttgattccgatggagatggaagatactcattcctggagctaagggtagctttaggtatctagcttcatcaggcatattttagaaatggactgcctaatatctatttacctaacaacaaaacaacccttacttacccatcagtcctctagtcctccaaactactgtagcagatactttgccaccttttaacttgtttgaagaagctatataaaagttatttttttaaagaagaagaccattttacttatgatgttcagaaatctatgatttcctacaaccagtaagatcttacattttaaaattgccagaaaaaaaattaaagccctnnnnnnnnnnnnnnnnnnnnnnngaggggaggagaccttatcttttaaagctgggaaatgtatatagagagagaataagccacttttatatttcacttanatttgccttanattagctgcactttatagagactcagaaaatgtcttttctttaaaagataggccttttctgtttgtaaatatttaaatgaaagaaagcattgtgcatattgtgtggaaagtaggaagaatggttttgaacaggatatgaacaaatgacttattaaaaattgctgatctggtgtaggtggcagctgaaactacatccatgtctccataaggtatccctcaaaggcccaggcgctgccagggggtttgtcctggtagctggaggaaccgatttcagggaggagaccctggagacaatactgactccagccatggctcatggaagtaggattcctggttctttggttccaattcctccgctaatccccaactggggaatcaagaaatcttggg

SEQ ID NO: 79379 - DNA, 1556 bp, Homo Sapiens
  misc_feature (1176)..(1192): n is a, c, g, or t
  misc_feature (1215)..(1261): n is a, c, g, or t
  misc_feature (1373)..(1373): n is a, c, g, or t
  misc_feature (1411)..(1411): n is a, c, g, or t
gtattgaccggtggtcaaaaagcaggcggtacggtccggaattccgggatatcgtcgacccacgcgtcgcttgtcctgtctggattctgcatctggaagcgctgcatgctctcagaggagcgtgccgtttcccctgtagatggatactttgtttgttgcctatttaaaaacaattaagtggttatttgcagttatttcagaactccaagtaagtggatggctttgggttctttctgccttggtcccaatggtgttgatgcttctgtggagcgcggacattcccaggagcaggtgcgtgccagccatggctgccagacactgctgcaactgaccagctgccggaagattctggagccactaacattagttttgcacatattttcttgggagtgttacttgaatctatctcaaactgcagaaaaaatcaaaagatcaataattgggagaaaaagagacaaatttaactgttacataattttagatagacaaaaaacatgagtgagtcgtgtacataaggagggaacatggtacagaaggctagaaggaattataggtcttattcccctttcctcagtcctttgaagagaagtacagtctcttgcgattttgtatatatcgtgttcgacacagccgctctctgtcctgtaaatagggaactaaaggctgtatgatttctcaagtgctgagttacacagtcctgagtgagctttctgttaccatactttcacacgtgggctttatttctcactgtatgtttgatatgatattactgtatttattttaagaaagcactaagatgtaataaagtgatgaactaatttgctttacattgaatcgtatgtgtgaggttgctgtggctcatttcgctgaccaggcgacaccaactccttgctttataggagtttcacgttgttctttaccatggccctatcgaagtcagtggaatttggattcttttttatgaagagcctagaaaatatttgggcatagaagctggaaaaattgcattttccatgggaacgtcttgaatccatttctgggattttcccccatgggaatggactccattgttgtgggaacaatccccgggaaactttggtcccctctaagacggttggaagattttttccaccctggtgtttgggtttgcccgaagtttaaaacccaccttaaatnnnnnnnnnnnnnnnnnacccattttcccctggaatgggnnnnnnnnnnnnnnnnnnnnnnnnnnnnnnnnnnnnnnnnnnnnnnntataatgaattttggccacagaaaaagccgggtccccctcggcgcggttctcattctcttgtggctgtgtggaacaaacagggcaaaaccccccttgttttaacagtccaantccctctgcaaaaaagcttttttccgcgaaaaccccangggagattttaaaatttttttccccccagggaccgggggtggcctctcttttggggggagcccattttatttctggagcctttttgtgaaaggggggggcgttgtcaaaaaagagaccaatagtgaaattttctttgcccacgat

SEQ ID NO: 79380 - DNA, 580 bp, Homo Sapiens
cactggcaccccgggccccttgaagggccaggctgcactccccttcagccccctggtcatcccggccttcccggcccacttcttggccaccgcaggcccctcgcccatggccgctggcctgatgcacttccccccaacgtccttcgacagtgccctccgccacagactttgcccggcctcatctgcctggcacgcaccaccagtcacaacctatgcagcgccccacttcttccacctcaacaccaagctgtaggccagcccatggtgttgtgtacactgtggagtcgacaggggcctacaacaggcaggtactgctgccagggggctctgaactagtgcctgctacccaggacacccgggccatgcccctggctgggcagcctggcacaagtgaagaagaaggcagtgggaaaactgggtttatctcaaggcagcagcctgagcccaggagcagaggacccagttgttataaggcgctgggagaggatgggcagctcccactgccccagagcggagctcgaagcacccaggttgcccacggaaaatccaataaaaagacaccagtgtgaatccaaaaaaa

SEQ ID NO: 79381 - DNA, 409 bp, Homo Sapiens
cccaaagagatcagatttgtcctgtgtgcacaatgaagaaaactccagtaacactgaaatgacaaatgtaaaatatacatcactaccagatagaaatacacatgttcttcataatcattttccacaattaaataggtaagtgatttaaatcttgggatttgagaccattacaacaatccatcaagattcttatggacggtttgattttccttcccgttgtcagaatctccttgaggtgtgtactggacttggtattcttggagaattttaaatacatcatggtgtccaaagtgcagtgcttcatccatgggagtgttattccacctaaacacgtagcacagcatggacaggatcattaggtaatttatgtacaaagatgatcaccccacattcctagattttaaatgca

SEQ ID NO: 79382 - DNA, 1166 bp, Homo Sapiens
agcatttgaaaacattatttaatacagattttggtaacattaactaatacttattccaagattatatggtaaatatttatatttatactgccagactacatagagaaacagggatttaattctaagttatattaccccaaaaagaaatactttctaatattgaattcaacaagatgtaccaccaacagagacagtgaatgtatttcaccttcctaaacagctatttttatatgaaaatcctaaattatctacatcagtcaatgactggcatttcaagagtaaatgattcattttacttacaatgcatcaagataaaaaggttacactgaacaactagaatgtttactgaaattaatcttattaaagtaaaacttaaaaaacttatttgggacattttcattgcttacactcaacgaacgtgaaacagagaaaaacagtcacagaatcgtgctaagtttataataaataattcacatacaacataggttaaattatcaaagaaattaaactgacatctttataccttttgcagatttaacacatttctaatccaccacatacggatagcagtaggtatatttcttgacatcattcagtctatttcaaaaatagatttgattgtttagaggcataatttataaagcaagataaccaaattaaacaacagaattttaactaatattggctttttgggatttcttaagaaaagattcacaagcattgctcagctactggagaataattaaatctcttctttactcaggcacttttaatgcagtaacctcaggcttcattttaaagtactggttaaaacgaacaattgcatacccaaggaaatcaaactcaatagtggagtatttggcttgaatcaaagcccacaatccccaaaagaaatgagaagccaatgcaaactgattgacttgaatgaagagtatttctacctccttttcagtaacttcagtcccaaagcccttaaattctttgtaggcttcaaggtaagcacgcagccactgactctgtagttctctatctggatacagactatagtctacatcactcacacctgcaaattcattgaaatgatttccaatatcatatgccaggtagttgtatccagaatattcataatcaatgaactgtacatcacctatgtgagacacaaaaac

SEQ ID NO: 79383 - DNA, 1077 bp, Homo Sapiens
  misc_feature (15)..(15): n is a, c, g, or t
  misc_feature (39)..(39): n is a, c, g, or t
  misc_feature (102)..(102): n is a, c, g, or t
  misc_feature (190)..(190): n is a, c, g, or t
  misc_feature (201)..(202): n is a, c, g, or t
  misc_feature (998)..(1019): n is a, c, g, or t
tacacggactatgtntcgatgagattgttcttagcatcntgaggcatttaaatatccagtccagaaatagagattcttttgttgcagctgaacagctcacanccaatgttaaatactgaatatgcttgactgataacccagtctcaggaaagtgagctgatgtcttcataaaaccagacgatgatatatntggagagccannttggagaaattagcattaaaagataaaagactggatgttgaattggtctctcagcacctatttctgaatggaatggcaaacagggacatatttcaccagctcttctttctgaatttttgaaaagaaatttggacaaatccaaagttctcgtctgcatttgtggaccagtgccatttacagaacaaggagtaaggttgctgcatgatctcaacttttccaaaaatgagatccatagttttacagcataatgaagagctgtcattgtcctttattcaactagtttatctaaatttgtgattgcttagggttttttaagagaacatttttgtacataacaaaaggttaactagaatccagccttcagtttcttaaatgaaatcaaatgttccttcagtacaggtaacttcttggctttcttttgtaccacaacttattttactactgatatttgacctggaaagttaatcatggcaacaaatacatacaggattctttgttatgaatcacaaatttccttgccatttaaattatatcactgttctacaataagcacttgtgttttatgacatgataaagtaaatgatcacttcgatcatgtttctatgctgtaaaatgtcttattagcaatacagattaaattttaccttgcactgttaactcaggaaatgatcatttatgtccttgttattaatgttaaaacatagaatgttataacttattaagtgatccaaacatttttttgtgtgtgtatggcattgatgcagaatagaataaaattatacttaagttctttttnnnnnnnnnnnnnnnnnnnnnncctgagcggcggccgcaagcttattccctttagttgagggttaattttagcttggcac

SEQ ID NO: 79384 - DNA, 719 bp, Homo Sapiens
gatctgttatgctgtttgttgccatctactgttgtcaaattctacctacccttcagggtccaactgaaatgccacataaccaggaaaggtttctctcattgtccctgccatacttcatttctcttctgcccttctgtagctcaggaccctctttaggtgtcactcccattagattgtaagtttcctaacaagacgcacgtcatcgtctccaaatcctttgggtcagcacagacctcttttatattaccagtcctaagcccctttgtgtgacatttaacagtccgcctggactgactgttcagcctcatcctctgcccttcccttgttgtcctgggctcttggccaaatcaaaccaccgttccccaaatgtactatgtagttaacttttaatattgcttctttttattgccttggttctctcaaaaatcagaattaatggaatgttggctattacaattacgtggacatggttatataatggccttggcgatgcccttaataaatgaaatctaaaatgttacattttttttggaacccagaaactcattctaattttattctgcctgaggctttatagcattttctgaagatcatgttgtactcttctttcgtctagatgatttggtcaacagtgataaagttccaacttagacttgataaatatgcaagagtcatgaaatatgaatgaaaacagtgacttttgaaaatcacgcttacct

SEQ ID NO: 79385 - DNA, 743 bp, Homo Sapiens
  misc_feature (20)..(20): n is a, c, g, or t
  misc_feature (27)..(27): n is a, c, g, or t
agaagtaggcctggagttantacagtntgggggaaaagggtcgagttagaacatagctaaggcaattcctattgcttccttgcgcaacttctcaaaacgatgaaagtcagaaggctgtcaaactcaaatatctttgcaaacactgtttgaatactgtgaattcattacgaagaatgttcgagagaaagcaggggtctaatccaaaagaaatgtcattaaccaatactccaagtccttgagttttgttatatctgaactagttgaactgtgactgacaggtaatcctaatatatccaaatccaactgaataccaaattgagatggcaaatttttgtttgatataagttagcttgttagcatatgccctagagggcctccatccctgtattctaatgtttttactcaaagctctagcctttaggataggtgaatatgtaaatcttttatcactttctcaaattcaaactaaaggggaaagatcaaaccccttcccttcctacctgttttctgagctggctgacttgccagccacaagctgctcttgcagagttcttaccattcctgtaaatgttttgacttgttgcagaaattcctatctactttattaagcagtattgatctgactgtggaaacatcctctcacttgcattcttttaacttaaaactatttaagaactgatgttccgattattgtatatatttttctaaaaaccaaataaagctacctatgagatgttaggaaa

SEQ ID NO: 79386 - DNA, 351 bp, Homo Sapiens
  misc_feature (43)..(43): n is a, c, g, or t
gatttcggaacgagggagcagaggctgcttttattatcacagnatgtcttcgaccccacataagcaaggacactgtatgttacagaagaagaccttgataatgaaataagccaactaatagactctcagccattcagcagcatatcagatgacttatttggcccatccgagtctgtgtagcagacaggtctatttaaactttcaaatgaacagggtaaagttgcatctaaagtaccacagatacaaccatgtttaaatcctcgtatgcactctggcctgcttctccagttacttgcttgtgtaagaacaaaaatgagaaaggttgttttccagtaaaaacatgaccagctt

SEQ ID NO: 79387 - DNA, 986 bp, Homo Sapiens
  misc_feature (78)..(112): n is a, c, g, or t
tgacgaccactatagggcgctagctcgtcgtagccgaacgaccgagcgcagcgagtagctgagcgaggaagcggccgnnnnnnnnnnnnnnnnnnnnnnnnnnnnnnnnnnncagtcgacggtaccggacatatgcccgggaattcggccattacggccggggtgacacggaggtctgtggtccaaacagtccttctaaacggggaaacagcacaggaataaagttagtgagaaaagagggtggtctggatgacagtgttttcattgcagttaaagaaattggtcgtgatctgtacaggggcttgcctacagaggaaaggatccagaaactagagttcatgttggataagctacagaatgaaattgatcaggagttggaacacaataattcccttgttagagaagaaaaagagacaactgatacaaggaaaaaatcacttctttctgctgccttagctaaatcaggtgaaaggctacaagctctaacacttcttatgattcactacagagcaggcattgaagatatagaaactttagaaagtctgtctttagaccagcactccaaaaaaataagcaagtacacagatgatacagaagaagaccttgataatgaaataagccaactaatagactctcagccattcagcagcatatcagatgacttatttggcccatccgagtctgtgtagcagacaggtctatttaaactttcaaatgaacagggtaaagttgcatctaaagtaccacagatacaaccatgtttaaatcctcgtatgcactctggcctgcttctccagttacttgcttgtgtaagaacaaaaatgagaaaggttgttttccagtaaaaacatgaccagcttactaatgagatgattgggatggcattaatagctatgcttaaaagagattatactgggaaattatttgaataaattatgacgtttctattatgtataggtaagcagctttacaggtcaggtaggatg

SEQ ID NO: 79388 - DNA, 824 bp, Homo Sapiens
  misc_feature (22)..(22): n is a, c, g, or t
aaggatgacaattggaactatntgaggaaagcaaagacctgtctgccccagacagctcctcaaggggttcctatgcctgaaactttagcaatatttcactccttgaaaggttaaagcccaaccatggtgatatgtaagctagaagaaacagcactggtttgtttatgttactaactttcaccacccgttttcagtaggtaaagtaagactgatcattgaacagaaaaggttatttctgtgatgaggttgagggggtagtggaaagcatgtattgctagtaagccccaggtacagctatgtgagagagagtcacctggacagggaagtcccccaaatggtggccagaagagcagaaaacggggtgggaaaaattctacctcacagttttgcataggggatagctatgcttttacgggacattttagcgtttaaaaatattttcaatattgtctctttattcaataccacccagctgtagttttttcacactctgatgactctcttatccactcttttacctctcccagctgttctattacatacagcattcacctgtattagtctatagaattataatcatctgtgtgtttctaatgctcattttcaaaaatatgtatggtttattcgatttttcctattaaaattttaagggctgggaaatttggcttctactgtaaatccttataatgttccacacattgtaaatatgcaataaaaatgttaacaactataatggcagcaggttttggtatgtatttctttgatatattgtcactttggacaataagtttgatttctgttaataaaagttgttcataaaatct

SEQ ID NO: 79389 - DNA, 690 bp, Homo Sapiens
  misc_feature (602)..(602): n is a, c, g, or t
aatcgcacatatccccatctttaatgtctgtgttatatgatgagtttcataggagaaaattttactggtttcataatgagcttgattcatttaatacattcctttaaaacagggagagtgtcataatgcatccagtggcaaaattagatggacttcattagttgcgcaacatggcaaaaccccatctcctttttataaagaaaaaagtaggtttccaaaagaaaattaaacgtttatgactggagttagcggtagtaaggaattagatgtgagtggttgactgctctttgtgccttcgacattttgcagaaaattctgtcttctttttagtccatccaaaatgactgaattattagatcccagactctgtgtccgtggagaatctattccactatctcctgccatgctgtgattttctgtcccttccaagtgactgtgttcatattggacatcctgagccaacactggcatatgtgaagtgttgaaaagttggaacttttgtgggaaatgttttctcagttcctgattctgaggactctgactccagctagctggcttctttcctgtgtcaccaatagtgtcttgtatgacttcagcttcanaactggcttttcttgcgctatagtaatcaaagattctttcatcagcaggtgctgaggcctgtacacatttagcaacactgggttcttc

SEQ ID NO: 79390 - DNA, 585 bp, Homo Sapiens
gcggcctcagcacctgctgatgaaagaatctttgattactatagcgcaagaaaagccagttttgaagctgaagtcatacaagacactattggtgacacaggaaagaagccagctagctggagtcagagtcctcagaatcaggaaatgagaaaacatttcccacaaaagttccaacttttcaacacttcacatatgccagtgttggctcaggatgtccaatatgaacacagtcacttggaagggacagaaaatcacagcatggcaggagatagtggaatagattctccacggacacagagtctgggatctaataattcagtcattttggatggactaaaaagaagacagaattttctgcaaaatgtcgaaggcacaaagagcagtcaaccactcacatctaattccttactaccgctaactccagtcataaacgtttaattttcttttggaaacctacttttttctttataaaaaggtagagcattattacagaatctttcaatcatgtaagaattgagtatataagaattgtctaaaggcaagcatatctatactattaaccacattacacattttcctcgtgcc

SEQ ID NO: 79391 - DNA, 510 bp, Homo Sapiens
  misc_feature (24)..(24): n is a, c, g, or t
agtaggtttccaaaagaaaattanacgtttatgactggagttagcggtagtaaggaattagatgtgagtggttgactgctctttgtgccttcgacattttgcagaaaattctgtcttctttttagtccatccaaaatgactgaattattagatcccagactctgtgtccagatatgtcatggaagctggcatcaggcgactttcatctgatggcagcattctcttattttcctgggtggttgtatttgtaatgaagtaagtctgaggagtaactatgaagtatccttctccagtgtgataaatcttcctttctttaatcagcgttcccagagtggtataaagaatatcttccgatggaattgcaatgcctgggtaatgtttcatcaaacgctccaaaagtgattcctgcgttactacaatctgagctgtattcatatcagatatagcacagcaaagaacttcacccaaaggtacgaactgagattgagttattggattcatttgcactgg

SEQ ID NO: 79392 - DNA, 1051 bp, Homo Sapiens
  misc_feature (358)..(358): n is a, c, g, or t
  misc_feature (1051)..(1051): n is a, c, g, or t
tccacccaagctcattcagagaataaatgctccggagcatcccagaagttgccacggaagatggtggcaattgactgtgagatggtgggcacaggaccaaaggggcatgttagttccttgcctcgatgtagcattgtcaactacaacggagatgtgctttatgacgagtacattcttcccccctgccacattgtggactaccgaaccaggtggagtggtatccggaagcagcacatggtgaatgccacacccttcaagattgctcgaggccagatcttgaagatactcacagggaagatagtggtggggcatgccatccacaacgacttcaaagcccttcagtactttcaccccaagntccctcacccgtgacacctcccatatcccccccctcaaccggaaggctgactgcccggagaatgccaccatgtctctgaagcatctcaccaagaagctgctaaaccgggatatccaggttgggaagagcggacattcctctgtggaagatgcccaggccaccatggagctatataagttggttgaagtcgagtgggaagagcacctagcccggaatccccctacagactagtggcagtggggacgctggtgatatgaggaggcagaggcagcacccaggagaaacagggcagtggaccaatggacagctccaccagctccacatctttggaagctagatttggggagagagaagctctaccccagacttaatacccattgaaatttcacctcaggtgttgtgtcctgtgtctggttaagtgtcccatggaaggggaaagccttcacgtcagaacccaaccctataccttttacttcttaaatggtgctaaccacaggtgtcccagggtgctctgtgccagttaagatttttaactttcaaggggcagggcatactgggaaatgtagtttcccaaactgccttatcacttgggtggacatatgtctccttttatgccttttggtcttgagtaattaacagcatcctcttccacgctcagaagtgttctggttggggccaggcatggtggctcan

SEQ ID NO: 79393 - DNA, 1892 bp, Homo Sapiens
cggtccggaattcccgggatatcgtcgacccacgcgtccgggctgctgctcggccggccggcggcggcgagcagcaggggcatgagggctaacccgggaagcggcagctgagcgggccgggaggagcgccggtccccgtggatcccgagagtgcagagctcggggcaggggccgggaggcgtgggggagccgggccctcccctcaggaacgtgtcccggggccgacccggcccgtagtgtggaagcagcttcagcccaggagttaaagtcactgtttgaaaaaaaatctctcaaagagaagcctccaatttctgggaagcagtcgatattatctgtacgcctagaacagtgccctctgcagctgaataacccttttaacgagtattccaaatttgatggcaagggtcatgtaggtacaacagcaaccaagaagatcgatgtctacctccctctgcactcgagccaggacagactgctgccaatgaccgtggtgacaatggccagcgccagggtgcaggacctgatcgggctcatctgctggcagtatacaagcgaaggacgggagccgaagctcaatgacaatgtcagtgcctactgcctgcatattgctgaggatgatggggaggtggacaccgatttccccccgctggattccaatgagcccattcataagtttggcttcagtactttggccctggttgaaaagtactcatctcctggtctgacatccaaagagtcactctttgttcgaataaatgctgctcatggattctcccttattcaggtggacaacacaaaggttaccatgaaggaaatcttactgaaggcagtgaagcgaagaaaaggatcccagaaagtttcaggccctcagtaccgcctggagaagcagagcgagcccaatgtcgccgttgacctggacagcactttggagagccagagcgcatgggagttctgcctggtccgcgagaacagttcaagggcagacggggtttttgaggaggattcgcaaattgacatagccacagtacaggatatgcttagcagccaccattacaagtcattcaaagtcagcatgatccacagactgcgattcacaaccgacgtacagctaggtatctctggagacaaagtagagatagaccctgttacgaatcagaaagccagcactaagttttggattaagcagaaacccatctcaatcgattccgacctgctctgtgcctgtgaccttgctgaagagaaaagccccagtcacgcaatatttaaactcacgtatctaagcaatcacgactataaacacctctactttgaatcggacgctgctaccgtcaatgaaattgtgctcaaggttaactacatcctggaatcgcgagctagcactgcccgggctgactactttgctcaaaaacaaagaaaactgaacagacgtacgagcttcagcttccagaaggagaagaaatccgggcagcagtgacactggcctccagcctcaatctgttccgtagctcagagcctgcctgccagggccaagtgccctagagcccacccggtgtcctgaagtcctcggggggaggccagcccctggctcactggcacagggcaggtgggctctcggggaaggtgtcgggggccccctaggagggagcgctggggacattgccatgggacggaagtctgcttggcagtggctttgataagcgatgcttgggggtcagaccaccccctagaggagccacgtgccgcccagccaccttcaatgcctgccaccctgcccgaggatgtacagagccgtgcccacacatttccttgcaacttgatcaaatttcttaaagcaaacaacaaaaatgtacatttctgtttttccttttaataaacaggtgtactctttaaaa

SEQ ID NO: 79394 - DNA, 1122 bp, Homo Sapiens
  misc_feature (623)..(623): n is a, c, g, or t
ggcacgagggtcgtgtgcggctcggggtaatagggctgctgctcggccggccggcggcggcgagcagcaggggcatgagggctaacccgggaagcggcagctgagcgggccgggaggagcgccggtccccgtggatcccgagagtgcagagctcggggcaggggccgggaggcgtgggggagccgggccctcccctcaggaacgtgtcccggggccgacccggcccgtagtgtggaagcagcttcaggtaggtgagctcgtgaaacaatatgaagaggagaaaatagccttttaaggaaattggcccacagaaaggatggccttcttggacaatccaactatcattctagctcatattcgacagtcacatgtgaccagtgatgacacgggaatgtgtgagatggttctcattgatcatgatgttgacctagagaagattcatcctccttcaatgcctggagacagtgggtcagaaattcagggaagcaatggtgagactcagggctatgtatatgcccagtcagtcgatattacctcaagttgggactttggtattagaagacgctcaaacacagctcaaagattagaacgactccgaaaagagagacaaaaccagatcaaantgcaaaaatattcagtggaaaagaaagaaattctaagcaatcagcccaggagttaaagtcactgtttgaaaaaaaatctctcaaagagaagcctccaatttctgggaagcagtcgatatatctgtacgcctagaacagtgccctctgcagctgaataacccttttaacgagttattccaaattttgatggcacagggtcatgtaggtacaacagacaaccaagaagatcgatgtctacctcccctctgcactcgagccaggacagactgctgcaatgaccgtgggtgacaatggcacgcggcagggttgcaggacctgatcggggctcatctggctggcagtatacaagcgaagggacggaacccgaagtccatggaaatggtccgtggccaatggctggctattgtgaaggtgaattggggacggggtgcaccgtttccccgggggttctcggcgcccaaattgggtcccatgggccgtggaagagcactccggggag

SEQ ID NO: 79395 - DNA, 1221 bp, Homo Sapiens
  misc_feature (555)..(658): n is a, c, g, or t
aagaattcggcacgaggttttttttgctgcctcaaagtccccaaagccttcgagcagaagtggcagtagatggttgccaatcagccaatgcagactttcactgggacaacaagaaagcagatcttctgggttttgatggaacttggcagtggggacattcagctgatgcattatataccccgtcagagcacacttgtatcttttaccttccctttgccccatgcccccaaactgcttaggtcttctctgtccctttactgctgctgcacagagatgatataaaagaggctctttggctatttgcattttgcttcctcttcttttccagattacagtatgaagctttattttctttgtacaagcttaaaatttcaacatcatcatccgccaaagttgttcctcccttttcggaggatctagggggaaagaggagcattcatcacaagtttcctagagagaggagacaaatcggtgtgccattgacaacatgagccagggtaaaggcaccctttggaattactgatttcaaagattaataaagtaattctatttttnnnnnnnnnnnnnnnnnnnnnnnnnnnnnnnnnnnnnnnnnnnnnnnnnnnnnnnnnnnnnnnnnnnnnnnnnnnnnnnnnnnnnnnnnnnnnnnnnnnnnnnngagagaggaggcgagcgcgccgccgacaacactcccccagcagggggcgcaccagcacacgccacccctctttgagaaaagggggcccctcctaggagtgcgtattatatatataaaaagcagcgaacagaggcgagcggcgcgtgcgtgatatataaataaacacacaactggatggctgcaggggaaaacaaatggggctgctttcgcgggaggaatatctgacgaggatactagcgaaaactcactctactatcttactggtggagggggagaagcagaacaaccgagagaggacggagcgagaaacacacccaccacgccgaaccgggaggaagagagaaaagaccaagccgccgccgcgggggagagacaaacacaaaaaagtagctcagtcgcgagcgaggtcagacagatgagagcgagcggaccgagccacaccaccacccagcgacagagacaagtcaaagcggcgcccggcagcgaaagaaagaaaaacaaacaggcgcgcacgcaaacgaaaagaagagagcaaatcgtctctagcccaaaaccaaccaatt

SEQ ID NO: 79396 - DNA, 1006 bp, Homo Sapiens
ggtccccaggcatcatcccaacagctcattttccctagtccgccttcgttcaagggtcaggaatggaccagaacagatgggttctggaggcccctgaacagagggctatggctgtggagaaggttcttggcccgttggactcacacagaccctgtaccctctcggcaagcatcttcagtcagattatcctcagtttcagatacttcataataccttgtgttgtgtggggtcatacatcatcgtgtttgtaagagaagatggtcattttattctctgtataaaacttagctctaaagcagaaactaaagcagcaaatgcaggaaggctgtctcgccatcctcaagactcagcagctctcattctccagtggtgagcacaccatttgtgctgctgctgttgtcgtgaaatataataacagtggaagtcacaaaaatgtcccctgcccagccccctcgccgcccttgacctcctgcaggccatgtgtgtattacttgtctagtgatgtcctctcaaagtgctgtacgcgagctcggcgccacctccgcctccctttcagagcctgctccccgccctctctgctcgctgcattgtggtgttctcttctcaaggctttgaaatctccccttgcactgagattagtcgtcagatctctccccgtctccctcccaacttatacgacctgatttccttaggacggaaccgcaggcacctgcgccgggcgtcttactcccgctgcttgttctgtcccctccctcggaccaaacagtgctcatgcttcaggaccttgtttgtcgaagatgttggtttccctttctctgttatttatataaaaataatttatcaaaaggatattttaaaaaagctagtctgtcttgaaacttgtttaccttaaaattatcagaatctcagtgtttgaaagtactgaagcacaaacatatatcatctctgtaccattctgtactaaagcacttgagtctaataaataaagaaatcagccacccccaaa

SEQ ID NO: 79397 - DNA, 831 bp, Homo Sapiens
tgttctcagaaaagtcatcctgccaaggaccactcactgagcaaatctcagccccgagggcaggatgggatgaaatgctgtgacctgcaggaaacatgattcctggtaccaggactctctggaagctgaggaaggaaagactttgtcttttgtgtgaggggccattcccgggtcttaatctaactctccagccctgtcccgcagcgcactctactctccagccactagattgtccctctctgggaagccctaaaccaaccccctgcctaaatggtggtgcttcttgcaaaccaaccccctgcctgaacggtgcttcttgccccctctgcctggagactcctgctcatccatcaaggcacagctcaaatgacatcagctccctgggacctatctagagcgaggggcctccagtctttctcttgcagcatcctgaccacgcagacctctcgcactcagcactctatgtcacgccaccttgctcgctgatctaactcttctccttgatggtgagctccttcgggatgagactggtgtcccaggatctgcaggtccccagaagctgccacataggagacacatggtgaacagtgagcaggcggctgagctgtgagagcctagctctggaaagcagctgatggggtggtctccaccctggttcataagaggctaatgcagagtcacagtcagcccatcctgggggaagaagaaacaagtgagcctcagcaccaccctccatccctgcccaaccaaactgaagtgaaggctgctcatctgggttcattttctaaaattaaaaacaattaattttattctactaataggatcaacatg

SEQ ID NO: 79398 - DNA, 645 bp, Homo Sapiens
cgtgcctcagcttccaatctggacatggagcacaataacagtgggcccactgctctccgaattcctgcgcgcacttgaagggagtgtctggtgcaggcatgcagggaggaagaatgactctgagcttgaccattcaacttcgaaactttaacatcaatggatcagcacacactggtgtacggtctgctatgcatgcagccctgtgctaggcaaaagaagtatcagaccaggaactgacagcctcactgcaacaggaagagaggcttcacacaataagcgtttcattcaaccaggctggacctgtgcttattgagttgaacatcactgagcacaaaatgcaagccagacaccataagagctgtaaggatgataaagatgtctttctaccctcgagagctctaagtgtggtcaggagagaaacacatgcaaagattatgctggctggaaggaaatgctggaatgaaggtggaaggtacatccagaatgttctgggggtgaggaatagcgaatgatgggttctgacttagaacatgaagggaaggtattaagaaagaggtgatattaagcatttattgagcatctctactttttttgtgtatgtgaccttgtttggaaatacaatatctcttcttgatgctggcaaaa

SEQ ID NO: 79399 - DNA, 527 bp, Homo Sapiens
gagacgcctggcccatacgtcaatgtcttaaccacttcttattggagtctaattaaaggtcagatgagatttttgagacccccttcaactaacgtacagatatgtctgtgtatatttaaagtgaacatcacatataaatagaagtagttgtcataacaccacacaagatcccttgatctctaggctataccagtagcttatagcctcttgcaatctgcaaaattttaggggtagagtaattaaactttctattctgagcagtgttacaaagaggatctgtagctgtagttcatgggacaggatatgaatggggcagtgtaaacagagaattcactttcagacaggactccaccaagcagaaatagcttcttcctaggagccaaaaggttttcaaagcccaatacatctttgaagactataagaaaaacaatagtaaaaacagctgctagggaatacagattatgctctctgaggccagatgcagtggctacacctgcaatcccagcacctctgaaagctatctactg

SEQ ID NO: 79400 - DNA, 832 bp, Homo Sapiens
aacgcgctaggtacgaggcctgggtgttgaactccggcacgaggagcgtgctgttcccgcaagcagccgttcctgtggcgcgctgcactgctctactacaccatccaccgcgccgcgcgcatgtccttccgtcagctcttccaggacctggagcgctacgtgcaggacgccgatgtgcgctgggagtactgcgtgcgcgccaagcgcggccagaccgacacctcgctgccaggttgtttcagcaaggaccaggtgtacctggacggcatcgtgcgcattctgcgacatcgccagaccatcgatttcccgttgctgacctcactgggcaaggtgtcctatgaggatgtggaccacctgcggccccatggggtgctggataatacccgggtgccccacttcatgcaggacttggcacgctaccggcagcagctggagcacatcatggccaccaaccggctggatgaggcggagctgggtcgcctgctacccgactgatgtccgttgagggctgcagtcagaggccctggacagaagctccagataggcccctagaacatgaagcagtttgctctgtgcgtccacggcctaggtgtttcttgggggtgttgggagggcaggagcattccttgaggaggagtggcaacatcaaagtgtttgtgtccctttgccagcctccctggggtctggggacctgcagcagcatgtctggcaaactgagtcgccctcctgcctccagctctctgttgagcagagggaaggcatgggggcaggaagagagctgagcattgatggggatgggggtggtttgggaatagaaacttgttcttgcatg

SEQ ID NO: 79401 - DNA, 1334 bp, Homo Sapiens
  misc_feature (699)..(712): n is a, c, g, or t
  misc_feature (977)..(998): n is a, c, g, or t
  misc_feature (1029)..(1086): n is a, c, g, or t
tgcggccgcggcgatgactcggacccagggctccttcagtggtagatgtcccctgtatggtgtggccaccctgaatggctcctccctggccttatcccgtccctcagcaccatccctgtgctactttgtagctggggcctctggcctcttggccctctactgcctcctgcttttgctcttctggatctacagcagctgcatcgaggactcccacagaggtgctatagggctgcgcattgcactggccatctcagctatagccgtcttcctggtcttggtgtctgcctgtatccttcgatttggcaccaggtctctctgcaactccatcatctccttgaacactacaattagctgttctgaagcccagaaaattccatggacaccccctggaactgctctgcagttttactccaacctacacaatgctgaaacctcttcttgggtgaatttggtattgtggtgtgtggtcttggtgctccaggtcgtgcagtggaagtctgaagccaccccataccggcctctggagaggggtgaccctgagtggagctctgagacagatgctctcgttgggtcacgcctttcccattcctgaagaataagcggagtgcttcctgcagccgaagactccatgcccaagtgcctgtaatcccccccctcaaggccctgtttatgttgggagtcttagttttcctttcgttnnnnnnnnnnnnnnaaacataatgacaggcccccctccacctcttcctgcagctgtttttgtaccaaaatattatattactgtcttcatcttagtagtgagtttttgatgttaaagtacaactagataggaggaaggagtgaaggctaagcagacatggactgaaacttagaggtactgttaagcagctgccctagggatgactgctcctttatttgttgttaatgaatcttgacctccttgtgtgaccctggttgttactccattctaagattggcgnnnnnnnnnnnnnnnnnnnnnngtaaataagaccaaggtctcgctatgttgcnnnnnnnnnnnnnnnnnnnnnnnnnnnnnnnnnnnnnnnnnnnnnnnnnnnnnnnnnnaggtgtgaaccaacacacctggctccccaaggttcagtttttatcctcctcttggagaggtgagtgacttgaggtcatttcttcacaagctccggtaggcacccacagtattgtcaaagagttttgtgttagggaagtgtccagttttgtccaagaggaaatagaagcgtcggcctttgactttcagaggtagcatggcagggacttcaccccggtgggcaacatagcgagaccttgtctctatttac

SEQ ID NO: 79402 - DNA, 598 bp, Homo Sapiens
  misc_feature (386)..(443): n is a, c, g, or t
  misc_feature (474)..(495): n is a, c, g, or t
ggcgccatcggagccctcgtactcggtgctggtcttctcttctctctccggtctgtgcgctcagtggtgcttcgagctggagggcagcaggtgaccctcaccactcatgccccctttggcttgggggcccatttcacagttcctttgaagcaggtatcttgcatggcccaccggggtgaagtccctgccatgctacctctgaaagtcaaaggccgacgcttctatttcctcttggacaaaactggacacttccctaacacaaaactctttgacaatactgtgggtgcctaccggagcttgtgaagaaatgacctcaagtcactcacctctccaagaggaggataaaaactgaaccttggggagccaggtgtgttggttcacacctnnnnnnnnnnnnnnnnnnnnnnnnnnnnnnnnnnnnnnnnnnnnnnnnnnnnnnnnnngcaacatagcgagaccttgtctctatttacnnnnnnnnnnnnnnnnnnnnnncgccaatcttagaatggagtaacaaccagggtcacacaaggaggtcaagattcattaacaacaaataaaggagcagtcatccctagggcagctgcctaacagt

SEQ ID NO: 79403 - DNA, 2623 bp, Homo Sapiens
cggaggtgtcgctcttcggacctcaaggttccccttaacacagagcgccccgcagtcttcgcggaaagcgttcggggtaggcgatggctgcgacgcgtgcagggccccgcgcccgcgagatcttcacctcgctggagtacggaccggtgccggagagccacgcatgcgcactggcctggctggacacccaggaccggtgcttgggccactatgtgaatgggaagtggttaaagcctgaacacagaaattcagtgccttgccaggatcccatcacaggagagaacttggccagttgcctgcaggcacaggccgaggatgtggctgcagccgtggaggcagccaggatggcatttaagggctggagtgcgcaccccggcgtcgtccgggcccagcacctgaccaggctggccgaggtgatccagaagcaccagcggctgctgtggaccctggaatccctggtgactgggcgggctgttcgagaggttcgagacggggacgtccagctggcccagcagctgctccactaccatgcaatccaggcatccacccaggaggaggcactggcaggctgggagcccatgggagtaattggcctcatcctgccacccacattctccttccttgagatgatgtggaggatttgccctgccctggctgtgggctgcaccgtggtggccctcgtgcccccggcctccccggcgcccctcctcctggcccagctggcgggggagctgggccccttcccgggaatcctgaatgtcgtcagtggccctgcgtccctggtgcccatcctggcctcccagcctggaatccggaaggtggccttctgcggagccccggaggaagggcgtgcccttcgacggagcctggcgggtgagtgtgcggagctgggcctggcgctggggacggagtcgctgctgctgctgacggacacggcggacgtagactcggccgtggagggtgtcgtggacgccgcctggtccgaccgcggcccgggtggcctcaggctcctcatccaggagtctgtgtgggatgaagccatgagacggctgcaggagcggatggggcggcttcggagtggccgagggctggatggggccgtggacatgggggcccggggggctgcctgcatgtgacctggtccagcgcttttgtgcgtgaggcccagagccagggtgcacaggtgttccaggctggtgatgtgccttcggaacgcccattctatcccccaaccttggtctccaaccttgccccagcctccccatgtgcccaggtggaggtgccgtggcctgtggtcgtggcctcccccttccgcacagccaaggaggcactgttggtggccaacgggacgccccgcggtgggcagcgccagtgtgtggacgcgagaggctggggccaggcgctgggagctgggctatgggctccaagtgggcactgtctggatcaacgcccacggcctcagagacccttcggtgcccacaggcggctgcaaggagagtgggtgttcctggcacgggggcccagacgggctgtatgagtatctgcggccctcagggacccctgcccggctgtcctgcctctccaagaacctgaactatgacacctttggcctcgctgttccctcaaccctgccggctgggcctgaaatagggcccagcccagcacccccctatgggctcttcgttgggggccgtttccaggctcctggggcccgaagctccaggcccatccgggattcgtctggcaacctccatggctacgtggctgagggtggagccaaggacatccgaggtgctgtggaggccgctcacccaggctttccctggctgggcgggccagtccccaggagcccgggcagccctgctgtgggcccctggcggctgcactggaccgccggaaatctaccctggcctcgaggctggagaggcagggagcggagctcaaggctgcggaggcggaggtggagctgagcgcaagacgacttcggggcgtggggggccccgggtgcaggcccaaggccaccaccctgcaggtagccgggctgagaggccctgtgctgcgcctgcgggagccgctgggtgtgctggctgtggtgggcccgaacaagtggcccctgcttgccttcgggtccctgctggctcccgccctggcctacggcaacactgtggtcatggtgcccagtgcggcctgtcctctgctggccctggaggtctgccaggacatggccaccgtgttcccagcaggcctggccaacgtggtgacaggagaccgggaccatctgacccgctgcctggccttgcaccaagacgtccaggccatgtggtatttcggatcagcccagggttcccagtttgtcgagtgggcctcggcaggaaacctcaaaccggtgtgggcgagcaggggctgcccgcgggcctgggaccaggaggccgagggggcaggcccagagctggggctgcgagtggcgcggaccaaggccctgtggctgcctatgggggactgatgcctgagcgccacctactgcattttggacacctcacaccaaggggagatgcaccccacggacacctgggactttccccttctggttcctgtgtctcccaataaactctatgaccaaccc

SEQ ID NO: 79404 - DNA, 559 bp, Homo Sapiens
  misc_feature (539)..(539): n is a, c, g, or t
ccccacctcaccggggccccgccgggaactggggcccccctggggactacccagatcgtgggggtcctccctgcaagcccccagcacctgaagatgaggatgaggcatggcggcagcgacgaaagcagtcgtcatctgagatttccctggcagtggagcgggcccggcgacggcgagaagaagaggagcggcgcatgcaagaagagcgccgggcagcctgtgctgagaagctcaagcgactcgatgaagagtttggggcacctgacaagcggctcaaagcagagcctgctgccccacctgctgccccttctaccccagctccaccacctgcagtccctaaagaactccctgcacctccagctccacctccagcatcagccccaacaccagagaaagaacctgaagagccagcacaggcccctcctgcccaatctacttctactccaggtgtggctgcggctcccactctgtggaaccacaactgccctcaaaagagggtcctgaaccaccagaagaggttcctcctcctaccacacccncagttccaaaggtggaaccc

SEQ ID NO: 79405 - DNA, 1054 bp, Homo Sapiens
  misc_feature (45)..(45): n is a, c, g, or t
  misc_feature (93)..(93): n is a, c, g, or t
  misc_feature (202)..(202): n is a, c, g, or t
  misc_feature (977)..(994): n is a, c, g, or t
tctcccctgctgcagcctgatcagaggactgtggacagcatcacngcagaaagtgatgaccagcagtcacagatccggagtgttgctgaaccnagcaggtgcccacaggacattgctgagtgcacactccacaccccaccatgacgctgacaccacaaaaggggctccagctgcaccctgctctgcggtactcctcagtgtntccatgagctaaggttagtaccaggagggaggatatgattgggcaaacctcaggcatgtgttcattctgtagctcccagaacatgcgaggagagagcatctggctcctttgtctcgaggaggagggggcaggactctgccagaactcactcgataaaagattttcccaaaaggaagggtgttcagatgacaaaagtccactacaccactttccttggctatctgatgcacccccatcttcccatgcgcgcacctcagaaatcaggctcccacctgacataacacaaccatgcctcacaaaaagacagtggtttatcccttccctaggagaaaagagaggcaatgccaagctgcttcatcaactgttaatacttcttccagcccgcaacccaggatatctgcaggtgtctctccctctggtttggtcatggctctctctgttctagaatgtatgggttaaagtcggctgccacaccatgccctcggcagtgtggtccaaggacccctgagggtcctcaaggtccttcctttcccaaccccacgtggttttcttcagtcaggataccatactgcaacagaccgaaggcggaagcagctatgaggatgcagcagccttctgttaagccaggctttaaggatctgcaaaaatgtaaaacgatgccactcctactgatgaaatatattgttttggaaaatataggtttaaaaatttttttaaggtaacatgtaatggatgtatagtcttcaaatggatgaataaatgtttttcagagttnnnnnnnnnnnnnnnnnngaccgcgtatgcggccgcaagcttattccctttagttgagggttaattttagcttggcac

SEQ ID NO: 79406 - DNA, 1262 bp, Homo Sapiens
atttagctgccagcccgtagcctcttaggcaccagcccgttgagagtttgcagttattgcacccatctaaggcctgctgtgcgctgttaacacttcgggtaggttcaaaagtggctcagtccaatgcacttactgcaaaaatacttcctggtttgccgggaggtggcgtggcagggtccttgcagcctttcctcctagctcacccttccaccagtaccgctccgccctcctgccctcccttcttggtgcagcagccgcagctgttccaaggccactgtcgagcagattctccacagctggttctgaaaacaatggcctactcgtccttgatgtacttatgaatagcttgtttcactattttgatcccagggagcaggtgatccccaggcccagggatctgctaaggaccatctcccacccttctccctcaagtctcaatctgcagttgttttccctgctgtttgcaaacgtttgcctgagcataggacaatgagataagtacaaggtctaggaatactcattctggaagtatttagactaagacactatttacttgccatgagctcttgggcacgtcacttcacttctgtagacctctgtgaatttgatgagctggttagagaaaatgatccctccctaagtcctttgaaaaaaacgaccacaaagcaacagcattttctactagcttggagataaggaaagttgcaacagtgggcctcaaaaagagaaaataatttcattaaattaacttcacagttgcttttgatttgcttcaaagtaggctaggagatttctatcactccgacaggaatgatggaaattatttctatcattctatcgtttagttattatagagttctatcatttagtgattgttattttttaggttggacaaaaatttaaggacaacccttaggtacataatggagaagctggaaagtggaagtcatcttgatgagtttgcaaaatagatgaaaagataaaatggaaaagatgacaaaccaacaggtcaggggatgcctgataccgtatcacaaagatcagacatacgtgtggagactaacaggtaaaactattttccacaagaaaatttattgcacaaggaattaagaatgttgctaactctgcaaattaaggacttaatatgagggacgaagacatcaaggagatgaggaaattttattcctaaccatgtcttctgtaattttacccatggaatgttaatatattcacttaatctaataaataaatcttgttgaaac

SEQ ID NO: 79407 - DNA, 724 bp, Homo Sapiens
  misc_feature (204)..(328): n is a, c, g, or t
  misc_feature (470)..(470): n is a, c, g, or t
  misc_feature (481)..(481): n is a, c, g, or t
tattaaaataaacagggttgttatattgcaatagaataatgagaattgaattttaagttctatgaaacagccagcattgacatttattttgttatctctcttctcacaattatgctccactggataataggaaaaacacttctttccttcattttttaaataaaattaatgttgtatttaaaaagtagccatgtagagacacannnnnnnnnnnnnnnnnnnnnnnnnnnnnnnnnnnnnnnnnnnnnnnnnnnnnnnnnnnnnnnnnnnnnnnnnnnnnnnnnnnnnnnnnnnnnnnnnnnnnnnnnnnnnnnnnnnnnnnnnnnnnacttaataaatgaatgaacgactaagtcttgctcaaatgttattatgaggtactatgagtgacttacatgtgttttaaaatgtcagtgtgtttcccagaggcagaaataaaaatactgaatatctttgctcttaaaaaaaanagtaacactantagatttgtttttgttagatgatttgctctatagtagaatatttaagtagactgtgaaatatttattaatatagatgtgaatatcaaaaaatgtttctaaggtattatgatgcatcaactagttcttccatgtaaaataattttagtgcaatatgaagacgtagaaatgtaaaatatgatttgaattgttatcctttatattaagaaaatgttttaaaatgtaagaattccatttattctgtt

SEQ ID NO: 79408 - DNA, 873 bp, Homo Sapiens
ggctgtgcagctagctcaggtaccagttacccctgtgcttccaactgtattccagtccagggaagaaaattcaagaaggagttttaaaatgtttttttcttcctctaaaatcaacatctggctaagcctgtgcagttggtggcactgaggcaccctcctggcctctggccctgcagaccaggtgcagaggcccccgggccatttctggctgaccacccacaagttatcggcaaacaggcagccgtttcaaggcccttgtccaacccagccccaccagaggccacatgctggaaaagtcccattttgaccatattttcttgtggaatctgatgtccctggagggggcctaaaatttccacggtcattcccagggatgggtgatgctgttgatgtgaaggccgctgatggcgttcaggaagaggaggaaggaggcagtgaattcgcaccaaaacattagggtgaagccgatgagtgtgacttggttcctgaggaggatcacaaaacccaggagcccgccggaggagaggacgaaagacaccaggaggaggatggaacccatgacccacttgcactgtgagtgtttgtcctcgcacaactgggacaccatgaggaactccaggccaaaaatggcggccaccacggccaaggcgcccacgctgcgtaccaggcccatgcccacggccagcccgggcacatgggcctggcccaggtctctgaagcagatcggcacactctggttggtggtggtgcagaagtgccagagcccgaagaggcggtcctcagccaggagccagtgcccatcacaaatggagaccgaggacaggaccacagccagggccacacacgtgatgatgagggtccggatgaaggatt

SEQ ID NO: 79409 - DNA, 1333 bp, Homo Sapiens
  misc_feature (784)..(861): n is a, c, g, or t
tgattaagagacagaaaattctgatacgattcagtgattacgtgaaagtagcaaaagcgcaggactatgacaggagggcagacaaaccctggacgagactgtcagcagcagataaggcagcaattcgtaaagaattaaatgagtacaaaagtaatgaaatggaggtacatgcatcaagcaagcacttgacaagattccacaggccatagagattttcttctgagaagaatttgtgtttaattttttgataccaacactgaacattcatcagggaactttcctgaagttcagctcaagactaccctacctgctgtgtttgtgagaagagtaggatcacacacacaggtgcaatcttgaccacacttacctgcaagaggagtaaccagaggacacacttccttccttctttggtgtctgaggagtgtgaactgttggggtcagttaagacccaacataactctatcagaagaaaactgttgtttgcctttcaaccttgttttacagttctgcagtgtaatggaggacgggcaacgtgcatgtgcaggctcaccactcccaggcctctgacatgagggacatgtgacagtgtcattcagtattatgttcaaaagacatttttatcctgatcataattaatttgaaaactctttaagttcatgttatacaagatgatttactgtattatacttttccttttttatataatgtctaacaaaaaatacagctgcaacattttgattcctgttaattttgttctttaattaaatgactacttattgcaggnnnnnnnnnnnnnnnnnnnnnnnnnnnnnnnnnnnnnnnnnnnnnnnnnnnnnnnnnnnnnnnnnnnnnnnnnnnnnngggggggcggcgccacaaaaaatacacacgcagagggggcagaacgagcaaaataccgcacctagatactatattacagaagaggggacccagcaaacagagagggtaataataaaaaacagcagaagcagggacgcgcgtttaacaaaacccagcatggggcaggacaacacaacacagcaagagaaacacatctgcgagaagaacaaccccccctcaggtatggggggggacagacaacaatcgaggaggagaacgacacccacaatacagcaagcagaggaatgaagccgaccgccggccgaagggaacacacaaaatcaataggcagcgaacgagctaggaagggagacaaaaaccaacgcgccaccatcagcgcggccgagcagaagaaagactgcaggcaaccgagaggagagaaacgaacgagcgcaaacatatctacagcaggcggaaagaacaaacaaggggg

SEQ ID NO: 79410 - DNA, 1354 bp, Homo Sapiens
cttgctggtgcgtcgctatggtgtttgtctccgccctctctgtctcctctcctgcttgctactgctggtgtggctctcgtgctagcgtcggttgtcgcctctctagttatcgtgttgttgcgtcctctgcgtctgctcttcgtgtgttctccactctttgctgttcttctctgtgcctttccgtgggctccttgatgccatgctccctgtgtctgatgttttggggcccctttgggtgtggcctcccttgacggtcttggaacttctttgtggtggggtgcccctatcagttccgttgctcctgggttgctctaaacccccttctgtagcgggttggtgtgtctttatagcgcttggccaccgtatttagtggtctgtcctgtctgggcaccatcctcatcccttcatatggctgtggcccttgtgctgggtgggacgtccagtccctggcttcctacggggccccagggacggatgtcccttcctcaccctttaggccgtgggccccaggttctgggtaggaacggctttagtagtaaatggcctgaagggcttcccagagcgattgcagcctggtgtgttggggccgctgaggcagcacgtgaagcctgggacctgggttcctggctcagggagagctgtggcttctcatgggcctcgcaggccgtgtactgtttaccgttgtcaaccggcgcctgttcccggtgcctgtggatcccggtaccccctgcgcgcctgtgcaggacaccgcgagaccagcagggccctgggaccctggcgcagccagctgcacgtcagggtgtagcatcccgctgtcgatcctggagcccccgcaccggtaccacatccaccggcgaaagagctttgacgcctctgacacactggccctgccccggcactgcctgctgggctgggacatttttcctccgaagtctgagaaaagctcagcccccaggaacctggacctctggtcctctgtctccgctgaggcccagcaccagaagctgtccggcaccagcagcccttttcacccggcctcaccaatgcagatgctgcccccgaccccgacctggtcagtgccccaggtccctcggcccctacgtcccacggcagaagccctgaggactgactcctgggggagaacagcattcccgccgcctccagcctctcccctctggcaggcgcaccacaggacgatggaatcccctgcccgcccagctcaggcccagctgtcctaggttgggcaggtgggtggacccaagcttgtctgctgcctgagttccagagagggaggaccctggggtggagggtgagggattctgtggaagtttgtaaataaagctcagtgctctgc

SEQ ID NO: 79411 - DNA, 1003 bp, Homo Sapiens
tccaaggtagcgaggcctgggtggcgttctcggacgaggaagacggccggccgaggcccctggaacggctcaggcggctgcggctgctacggcggcgcatgctaggggattctgccgggtagaagagctgggcctggaacccagccctgaggacatcctgcggcccaggggcaagtgacacctgctgagagaggcccaggatggtggaggctgaggaactggcacagctgcggctgctcaatctggagctcctgaggcagctgtgggtggggcaggatgctgtgcggcggtcagtggccagggcagcctcggagtcaagcctggaatccagcagcagctacaactcagagactccatcgaccccagagacgtcctcaacttccttgagcacctcctgcccacggggccggtcctccgtgtggggcccaccagatgcctgtcgaggggacctccgtgatgtggccagatcgggggtggcctctctcccacctgccaaatgccagcaccaggagtccctgggccgaccgagaccccactcagcaccctcgctgggcacctcaagcctgagggacccagagccctcagggaggctgggtgatccaggaccccaggaggcacagaccccgaggtccatcctggctcaacagagcaagctgtccaagcccagggtgaccttctctgaggagtctgcagttcctgagaggagctggcgcctcaggccatacctgggctatgactggattgcagggtctctggacaccagctcttccatcaccagccagcctgaggccttcttctccaagctgcaggagtttcgggaaaccaacaaggaggagtgtatctgcagccatcctgaaccccagttgccaggcctgcgtgagagcagtggcagcggcgtggaggaaagaccatgaatgcgtgtactgttaccgtgtcaacggcgcctggttccggtgcctgtggatcccggtaccccctgcctgctgcaggacaccgcgagacc

SEQ ID NO: 79412 - DNA, 828 bp, Homo Sapiens
  misc_feature (44)..(44): n is a, c, g, or t
  misc_feature (128)..(128): n is a, c, g, or t
  misc_feature (396)..(437): n is a, c, g, or t
tagtactactcccctgcttatatgccacccctcttccttctctntgacccctgtgactctttctgtaactttcccagtgacttcccctagccctgacccaggcactaggccttggtgacttcctgggnccaagaaactaaggaaactcggctttgcaacaggcatagctcgccattgattggtgcccacccagggcacactgtcggagttctatcacttgcttgacccctggacccataaaccagtccactgttatacccggggcactctaaccatcacaatcaatcaatcaaattcccttaaatttgtatggcactggaactttggcaaagcacttttgacaagttgtgtctgattggagcttcatgatagccttgtgacatctttagggcaggnnnnnnnnnnnnnnnnnnnnnnnnnnnnnnnnnnnnnnnnnntttctgtgggactgtggatctcactggaagctatccaagagcccactgtcaccttctagaccacatgatagggctagacagctcagttcaccatgattctcttctgtcacctctgctggcacaccagtggcaaggcccagaatggcgacctctctttagctcaatttctgggcctgaggtgctcagactgcccccaagatcaaatctctcctggctgtagtaacccagtggaatgaatttggacatgccccaatgcttctatatgctaagtgaaatctgtgtctgtaatttgttggggggtggatagggtggggtctccatctactttttgtcaccatcatctgaaatggggaaatatgtaaataaatatatcagcaaagcaaacaaaaaa

SEQ ID NO: 79413 - DNA, 1329 bp, Homo Sapiens
aacagttgcaaagctttttaatgcataaaagtataattgaaatctgtggtatttatttacaaacatgtctacaaaaatagattacagcttattttatttttagttaaatctcttaatacacagagaactcccaatcttgctcatctaaataaggaaagacttggtgtatagtgtgatggtttagtcttaaggattaagacatttttggtacttgcatttgacttacgatgtatctgtgaaaatgggatgatattgacaaatggagactcctacctcaatagttaatggaataataagaggctactgttgtgtctaatgttcttcaaaaaagtaatatcctcacttggagagtgtcaaatacatactttgaggattgacttaatataaggtgccctgtagaaatctgttacacatatttttgacccatattatttacaatgtcttgataattctacctttttagagcaagaatagtatctgctaatgtaagggacatctgtatttaactcctttgtagacatgaatttctatcaaaatgttctttgcactgtaacagagattccttttttcaataatcttaattcaaaagcattattagacttgaaagggtttgataatctcccagtccttagtaaagattgagagaggctggagcagttttcagttttaaatgagtctgcagttaatatcaaatgtgagtttgggactgcctggcaacatttatatttcttattcagaacccttgatgagactatttttaaacatactagtctgctgatagaaagcactatacatcctattgtttctttctttccaaaatcagccttctgtctgtaacaaaaatgtactttatagagatggaggaaaaggtctaatactacatagccttaagtgtttctgtcattgttcaagtgtattttctgtaacagaaacatatttggaatgtttttcttttccccttataaattgtaattcctgaaatactgctgctttaaaaagtcccactgtcagattatattatctaacaattgaatattgtaaatatacttgtcttacctctcaataaaagggtacttttctattaattggtggtcaagtatatctgtgttatgaagttctaaaagctaatttagcattgcaaaataacctcatttttaaaaaattagccttatatgcagtgttttatttatcaaatgatcttcacatctttcatttccaaattgttgaaatgtactaatgaatacaaatagacttcaagtaagcaaaaatgttcttaattttgaaaactgtaaaataaagtcacttaccttgggcaatatgctatttttt

SEQ ID NO: 79414 - DNA, 1035 bp, Homo Sapiens
  misc_feature (50)..(50): n is a, c, g, or t
  misc_feature (66)..(66): n is a, c, g, or t
  misc_feature (77)..(77): n is a, c, g, or t
  misc_feature (83)..(83): n is a, c, g, or t
  misc_feature (132)..(132): n is a, c, g, or t
  misc_feature (221)..(222): n is a, c, g, or t
  misc_feature (238)..(238): n is a, c, g, or t
  misc_feature (254)..(254): n is a, c, g, or t
  misc_feature (901)..(909): n is a, c, g, or t
cctcgagcccaagattcggcacgagcttttcacagatggggtagtgcctnccaagtttacctattntgagtaagacntgaaangaaatgctagcacagttgttgtgtggatttgctacttccatagtttacntgacatggttcagactgaccaatgcatttttttcagtgacagtctgtagcagtgaaagctgtgatgtgctaggggcaagcattgtcttnngtatgtgtgaaatttntcagtgtaacaacatnatctgaccaatagtacacacacagacacaaagtttaactggtacttgaaacatacagtatatgttaacgaaataaccaagactcgaaatgagattattttggtacacctttctttttagtgtcttatcagtgggctgattcattttctacattaatcagtgttttctgaccaagaatattgcttggatttttttgaaagtacaaaaagccacatagtttttccagaaaggtttcaaaactcccaaagattaacttccaacttataagtttgtttttattttcaatctatgacttgactggtattaaagctgctatttgatagtaattaaatatgttgtcattgatataaacctgtttggttcagcaaacaaactaaaatgattgtcatagacagtgttttatttttcctgttggtgttgctgatttgtgagcatgctttaagatgaaaaaagcatgaatgataacttccttaaaaaggtgcggcatccaattcaaatattttcgtcctgattttaaagctggttggtgtagtgctattaaaatttcgttcagttaattttccttttgaaaacttgttcgcacgttgtttagggtgcccttacttcagcaaaggagaaggagtaggagagccttagaatttttgaggnnnnnnnnncctataacatacaatgtactgtatcaaactattttacatgaatgacacaagtattctgaataaaaaataattgaacattgttaaaaacaaggtgttatgtaataaatttatttttcataaatcaaa

SEQ ID NO: 79415 - DNA, 721 bp, Homo Sapiens
tgacccagcgtaccggccaagcacaaacgtcctttttgctgcacacgtctctgcccttcacttcttctcttctgtccccacctcctcttgggaattctaggttacacgttggaccttctctactacttcactgggcactagacttttctattggcctgtgccatcgcccagtattagcacaagttagggaggaagaggcaggcgatgagtctagtagcacccaggacggcttgtagctatgcatcattttcctacggcgttagcactttaagcacatcccctaggggagggggtgagtgaggggcccagagccctctttgtggcttccccacgtttggccttctgggattcactgtgagtgtcctgagctctcggggttgatggtttttctctcagcatgtctcctccaccacgggaccccagccctgaccaacccatggttgcctcatcagcaggaaggtgcccttcctggaggatggtcgccacaggcacataattcaacagtgtggaagctttaggggaacatggagaaagaaggagaccacataccccaaagtgacctaagaacactttaaaaagcaacatgtaaatgattggaaattaatatagtacagaatatatttttcccttgttgagatcttcttttgtaatgtttttcatgttactgcctagggcggtgctgagcacacagcaagtttaataaacttgactgaattcaaaa

SEQ ID NO: 79416 - DNA, 1007 bp, Homo Sapiens
  misc_feature (116)..(116): n is a, c, g, or t
  misc_feature (190)..(191): n is a, c, g, or t
  misc_feature (217)..(217): n is a, c, g, or t
  misc_feature (241)..(242): n is a, c, g, or t
  misc_feature (259)..(260): n is a, c, g, or t
gaccacctaccctgtgtgcccagccgtccctccgtgcccacagtggcagagcgttcatcatgcgttatggcctccccgcccggatttgcggaatcatatggtatttctttctcgcngagtccgtgtttcacatgatgcatttgtggtcgcaggtgtactacgttatacttgtcactgatgcagagtaccnnttatcacactgcccatgcccccactntgctgtatgatagattagtgtgtnntaggacatgcaaatctnntagagtctcccccaaatcagtcaatgtgtccctcctgagctcccacccaggcatctccagtgctcatgatcatgtgtcccccaactccacccctcacagtttgggcctgtttctggcaaagagtcaggaaggttactgaattagggaacattttctgcaccttctgattttacttaagcagctaccattccatggacttgcctcccagagcagcacaatgcccgtctgagccccacgtggcaggagcctctgggacggggcacacacaggcccagcctctgtgctgtctcctcctctgtgcgcctcagactcggggtgagggaggcgggcagcctctcgccagccttcccgtccttcagttcaacgacatctttggagtgtttttgttttctcttccaagggccgtcccgttgtgttaggaagggtgagtggctggttccagggtgggccggtgccagctccggggtggactgaacagcggcggctgtccctgtgcatcctttgattactctcatgctgcatttactgtttacatttgttttattgtacataggtttgtaaacattattgcctgagatatttgtatataacttgggctttgtagcttttatttattcagaacgcatacggcatgttaatgactctgatggtgtcctcctctgggcagctgtataggatcatcatgtggttacaaaaaatacttccctcaaaaaaattcttttaatgtggaaacaataaatttcacag

SEQ ID NO: 79417 - DNA, 618 bp, Homo Sapiens
  misc_feature (43)..(77): n is a, c, g, or t
acgaccgagcgcagcgagctcgtttgagcgaggaagcggccgnnnnnnnnnnnnnnnnnnnnnnnnnnnnnnnnnnncagtcgacggtaccggacatatgcccgggaattcggccattacggccgggatttgttaattatctaaaagtcagaaacatgtctgaaagtatggcagctgctcatagaacaaggtatttcttcttattgtagagactgcatcaacccgacattcctttcttataccaatgtgaaatttccagatcatctgtaaacctacaactttaatagaagactactaataacagaagacaaattagtgaagaaaagacagagtttcgaaattgaatggcagggtggtttttgcttacaagccatttctgttcattctttaagtatctatatttcatttgttttgcacatatgcatatgtgcccatttaagatatttgcatatacttgatagaaaccataaagttgtagcagttaagtccagtcacatttggttaatcagtgtttgatataattgaaagagttgagtggataaacagtcttccagcttgtaaatgccattgacttctgacctgacatttagtataataaaaatgaaattcttaaccatg

SEQ ID NO: 79418 - DNA, 512 bp, Homo Sapiens
  misc_feature (15)..(15): n is a, c, g, or t
  misc_feature (49)..(49): n is a, c, g, or t
  misc_feature (65)..(122): n is a, c, g, or t
gccaagccacacatncagtgggcagccagagctcagacctgagccattntgtcagtatccaggannnnnnnnnnnnnnnnnnnnnnnnnnnnnnnnnnnnnnnnnnnnnnnnnnnnnnnnnnaccggcccaccagggactagccgctgtcgcacagcctctggggtgcttggtctctgcaaagtcaaaggcctgacagctctgtggcctgggaatccattttcctgcggcagagcagggcctggtgtggaaccagggagctgtgggaagccacagcagaaatggaagaaaaacaggtctcagcccagggtcctcgctcactccctcactccccactttgaagccatctctgttctgcaggtgagaggatttaaagtcagtcacaaaggcttgggaacaaaaggaattctcttccaagaatgcctctgtggtgctgtttggtctctagaaacagggtcacttttttaatgtagtaaagaagtaataaatggtggcattacacattgtgatatt

SEQ ID NO: 79419 - DNA, 1021 bp, Homo Sapiens
  misc_feature (318)..(327): n is a, c, g, or t
  misc_feature (876)..(876): n is a, c, g, or t
gcatccgacagcagtggggaagactgagacaggatcacatcagatggctgaccgcctcttccatgcgccaagaaccgcgggacgaggggaaagcaatgcaagccttagaaatgcaatatccagctctgcctctcatcacatacattcagaggtcaactcggacgcggccttcctcatgccacagagaggggatggacttggggagggggccagggtctgtggggcatcccacttctgtcctgcagttcctgtctgagcagtctccctcgggaagctgcctcggggtctcaaattttaggcttgactattgtttctttnnnnnnnnnntagtcttaacgttttccttccatatctgaaaaaggagcagcaacctgcatttagaaaaacagcttaaagtgttgttgttcagattggctaggaagcgctttcaagcagtggaataaactaggcaaacagtatgtctggagccaccgtgacacgacatgtaattaaaaatatatttatatatgtatacatatttatatttcacttcttcttcacactctggtcctaacagccaatggggagctgcccctgtggccaggccatcaaggagcccgttcggaggaaggagaatcaggccccaaggtgcccacaacacagccccctccacacagtgtttcggagcgtcctgcgtgaagcttgctctgagctcaccgttgggtctgggagaccccactcccctgcctcctccctgacctgagctcccactcccaggtctctcctctcttcgggggccttgcctcctcctagcggacaaaccccacatgcttcaggggggcaggggccactgaagcacaggtggaggctgcctggccacgatggcaagctcgcccntggggcctgccctgagcagccccgcatcagcccggctcctccctcgaggcctcctacccgcggggcatctgtgttcccaggctgggctggggaggaagggcagtgaggcctcgtgccgaattcgccacccaggcctcgctacctt

SEQ ID NO: 79420 - DNA, 375 bp, Homo Sapiens
cttcctccctgggaccttttccccttcctgtttaagaagccagggctgcctggaggaagctttgtcagatctagtggaatgtgacctccctggaatatgtgcccaggggtttgtctaagcagttccaggctatggcctttactccatctggtccccatccctcttatctctctcatgtgtggctgcacctggacgcttggaccatagctgtcacagccccctggggaggaacccactccttggccatgtcagcctgtgcaatgcaaggctcttgtttgatctgtgtgctgacagaaagcccagcttccttaagaacttttcatgtggaacactttggttttgagaagaaaataaatcagaaaccattaaaaatca

SEQ ID NO: 79421 - DNA, 583 bp, Homo Sapiens
gcacgaggtgaacacaagcaaaccaagttgcacctggcttctgcacactcctgcgaaagtcggtgaacattcactccacattgacccctccctagcctggcaggtgacgtcagggtccttcacagacaaacacgcttgggctcggcaggagctgccgtggccacccccgctgcccagtgtctgccctctagaagtaggctgtgtttccaggtgttcacccgtggtgcccacagtgccgacccgtggctgggtcggagctccatgttcctaagctaggtctaggtctacactcctaggacgcacgcatatcagcccgtgtaccctgtgacagtgactgtccccacctcctgtgttagtggtgcccttactgccgtcgctcatccactcgtgtgggacgtaggattgcacagggctgtgccagtggcgtgtagggaacactgccctggctcagcgtgcgagctaaggtggcgatgtatgcgatgggactctgcatgggatagtacagttgtgtagacgtcttccaaataaattatgtgttggtgcatcgcacatgctcaataaatatttttaaatgagaaaaaaa

SEQ ID NO: 79422 - DNA, 733 bp, Homo Sapiens
aggtcacactgcagcaggtcggacgtgtccgggttctgctgcaggacgatgggtggcttatggcgagaggctccgggacggagagacgtgatggttccctcgaggacgtgtgcccgcttcatcaccagccgtgtggtccgtggagtgcaatgtccgcaggatggagcgtctgcgggtggagacggacgtgtagccctggcgaggccagtccggcggcagcacagcctgtccccaatcagcaagtggtcgtgcctggctctagagagcgtggggagctggtctcaaggacccagcatggttccctggggcttcccagagagcctgtggctgtggtgccgggcatccagacacttcacggaaggaagatcacatgtccccagagaggcacccccaggcaagcgtcgaggggggtccacaccgtgctcctcagggagcccagcctatatcgccgttggctgtgtctgggcccctatcagctgctgggccccacgctctcccatctgcacccagggggacaactctcacctggactgatgggcacaggaggcaccaatagcgattattgggggcaatgcgaggtctcctcctatgcccttcctacccctgagtgggacaagaagggccctgagtgcccaggagtgccccacgttctgagaaggggccggccggagggaggggacccggcagggagatttcggttttgaggtttctaaatacattaaagttatttctt

SEQ ID NO: 79423 - DNA, 526 bp, Homo Sapiens
  misc_feature (259)..(352): n is a, c, g, or t
  misc_feature (439)..(449): n is a, c, g, or t
ctatttaaagagtaaacatttacggtataaattatgcacacataatagtagacacagagtaatgcataacggtgtgacggggcgaggggacctcaaggtgacaagaaagctggtcctgggctggtcaggaggagtcatcaccaagatactcactcataaagttcacccatgataatctaattactgcacatgtaatatattaaaatatattaaaacataagaaaataggacaggcatggtggctaatataataaaatannnnnnnnnnnnnnnnnnnnnnnnnnnnnnnnnnnnnnnnnnnnnnnnnnnnnnnnnnnnnnnnnnnnnnnnnnnnnnnnnnnnnnnnnnnnnnccttcctggtagtttccattccatctccctgtatttttctcttatcactctcgaagtctatctttcttgttcttttcctccctagcnnnnnnnnnnnaaacactcctttcaagctgtgtccaacacccacaaggaatgactatttttaactaatcttactgacctcatttaatc

SEQ ID NO: 79424 - DNA, 282 bp, Homo Sapiens
ccccatcccatcccccatctcccgaaccaggctcctcctgcttcaacagacccttggggcccctgatgccaccgagacactcgcactgtcccttggctgccgggcaccccactgagcccctgcccaccccaaagtctgccagcaacaggccctttgcctgggtgagacgggggtcagggtggcccagatgggggtgatggcgaccaaggtgctgcgtccccacccttctgacggcagcctcccctggaggggagtgctcggcccaataaaagctggaatcgg

SEQ ID NO: 79425 - DNA, 473 bp, Homo Sapiens
  misc_feature (154)..(154): n is a, c, g, or t
tgttgtcatctttaccgatctctgatgataaatgcagaagggatctgagagtttttaaagcaagtagagtcaatcagagttttgaacatcatagtaatacttccgtgattcagagttagatcatataaatcaaagtaacaatttggattttttntaaacaacaatatcataactgtcataaaacagatggtccaaccccaggagcagataataacttgggcagctctgtggggaacaagacggggaaaacaactgttctaactgcccactagaacagtggtttcaactactacaattctcagtgtttgagaggtacaagggaagaaaggactatgtggatcccttgtggctatgcagatacctacctcacagagttgttgtagaagactggtggtttggttcaaaccttgtgattaaagagtttgtcaagcattttattcttttgaataaaagcaacatatctaaaacatttt

SEQ ID NO: 79426 - DNA, 670 bp, Homo Sapiens
ccgggacaacaatattttcaagcaacaaaaactggggtggggaagcttattctgaaggtacatttaaaactgaaataacaacttaatgaaaattaaaaattgcataccgctgtgaatttacccttcagcaaaacaaaacagaagctatttggtattgatacaaatccatctatttgatagttagtcacccaatattatgtacatattttatatactgaatgtcattttaagtcctgttttccaaactccatttttctgttgcggggtttttgttttttgacaagttaaacactttctggcactttctatgacagaatttcttctgaacatacatgaactgacattctcccaaagcgtcccttgtgagtggacgtgcctttctgctacatatcgttcatttgttacaaaatgaaataatccacagtgcgacgtgtctgggtccaccgtgcacagcaacatccaggctaaaccaggctggaccaaaccttctcaggccagggttcttctgcctctctctcctccgctctccagagtcccaactttcagctggtaaagcttcagaaagcattaacaagcaccatggttaaaggcctctttgtccctgcacgcagagatttttgcatttctttttctctttgtgttgtatgtggttgtggctttaaattaaacc

SEQ ID NO: 79427 - DNA, 1179 bp, Homo Sapiens
gggtgtcttggctgttctccatagtggtgttcggctccatcgtgaacgagggctacctcaacagcgcctccgagggggaggagttctgcatctacaaccgcaaccccaacgcctgcagctatggcgtggccgtgggcgtgctcgccttcctcacctgcctgctgtacctggccctggacgtgtacttcccgcagatcagcagcgtcaaggaccgcaagaaagccgtcctgtccgacatcggtgtctcggccttctgggctttcctctggttcgtgggattctgctacctggccaaccagtggcaggtctccaagcccaaggacaacccactgaacgaagggacggacgcagcccgggccgccatcgccttctcctttttctccatcttcacctggagcctgaccgcagccctggccgtgcggagattcaaggacctaagcttccaggaggagtacagcacactgttccctgcctcggcacagccgtaggcctccccggcttgcagaggccggcagccctgtatcacccctggcagtgaggtggcaggagcagcctagtgccagaaatgtccaagatgccagggcatgcagggcagtggaaggctggcttgaggaaccaattcaggttctccactgactcattcattccttcaccgcctccttcattgattcttcatgcgttcattcattcagtaaacatttattgagcagctgttttgtgcctagtgatgaattaggtggggtccttggctccaggagcccacaggctggggaggagaaaacaaacacatcaatatctcttccaaatggacagccgtggacagttaccaggtaggtagcggccccatacatgggctgccctagaggcgttcatggtccccattgctgagctgtgggtgcagagcaatagcctctcccttcacagcggtgtgaagagtgacctcactgtccttagggttagcatcctggccgaggatgtcacagggctcctggtctggctctgtcctcatgtgctatgtgaccctgacaaacccgtgcacctctctcagcctcagtccacttacctgaactgaggggtgataatggaccaacctctcaaggctgttgtgccaatgaaacaaaggccagcccagggcttagcacaagcatgctcaataaatgtaagctcttttgttcattc

SEQ ID NO: 79428 - DNA, 845 bp, Homo Sapiens
  misc_feature (57)..(114): n is a, c, g, or t
  misc_feature (136)..(146): n is a, c, g, or t
agagatggagtctcactatgttgctcaggctggccttgaactcctgggctcaagcannnnnnnnnnnnnnnnnnnnnnnnnnnnnnnnnnnnnnnnnnnnnnnnnnnnnnnnnnctttgaatcctttacgaagagnnnnnnnnnnnttaaagaaagcctttagatttatccaatgtttactactgggattgcttaaagtgaggcccctccaacaccagggggttaattcctgtgattgtgaaaggggctacttccaaggcatcttcatgcaggcagccccttgggagggcacctgagagctggtagagtctgaaattagggatgtgagcctcgtggttactgagtaaggtaaaattgcatccaccattgtttgtgataccttagggaattgcttggacctggtgacaagggctcctgttcaatagtggggtttggggagagagagagcagtgattatagaccgagagagtaggagttgaggtgaggtgaaggaggtgctgggggtgagaatgtcgcctttccccctgggttttggatcactaatccaaggctcttctggatgtttctctgggttggggctggagttcaatgaggtttatttttagctggcccacccagatacactcagccagaatacctagatttagtacccaaactcttcttagtctgaaatctgctggatttctggcctaagggagaggctcccatccttcgttccccagccagcctaggacttcgaatgtggagcctgaagatctaagatcctaacatgtacattttatgtaaatatgtgcatatttgtacataaaatgatattctgtttttaaataaacagacaaaacttg

SEQ ID NO: 79429 - DNA, 518 bp, Homo Sapiens
  misc_feature (17)..(17): n is a, c, g, or t
  misc_feature (41)..(41): n is a, c, g, or t
gtaaacattgttggctntgtattgatctctccagtcatttntgaacacatccaatagaaacattggcagcatgtcttccaaaacaaaaagcagtaacatgcatgtttaattgcataccattctcttcacagtagcaggcttaccaatttccatagtctcatgaggccgaaatgaattacaatgtaaagtgttccaggaaccaaattggattttctttcttttgtcattggacacggtttgcaaagttggacatcacttgagttccttcttaaacttttcggcaacttctcttggatcctgttatcacagttttttactgtgatgaaatcttgttaaccaccactagggaatctccagatgaactattaatgcactgtcttatgcctctcattggtgatgtttggaaaatagaagacatctctaatggaatcatgggggaaacgggttggaatttgtagccatggaatatatattagatgtaaagaattttctgcaataaaagaaactagacttgttaa

SEQ ID NO: 79430 - DNA, 1280 bp, Homo Sapiens
  misc_feature (138)..(138): n is a, c, g, or t
  misc_feature (193)..(423): n is a, c, g, or t
  misc_feature (441)..(457): n is a, c, g, or t
  misc_feature (841)..(863): n is a, c, g, or t
  misc_feature (897)..(906): n is a, c, g, or t
ttgtgtcagggcggactatgaaacccagcaccgcttttacgtctgcccttgctgcctttctacattcttctgcgtatccctgatcttgatacctataccgctttgatgactgtacgctccgcagccgacgaccggcgnagcgatcatgagcgaggagcggagagccccatacgcaaccgctctccccgccgtnnnnnnnnnnnnnnnnnnnnnnnnnnnnnnnnnnnnnnnnnnnnnnnnnnnnnnnnnnnnnnnnnnnnnnnnnnnnnnnnnnnnnnnnnnnnnnnnnnnnnnnnnnnnnnnnnnnnnnnnnnnnnnnnnnnnnnnnnnnnnnnnnnnnnnnnnnnnnnnnnnnnnnnnnnnnnnnnnnnnnnnnnnnnnnnnnnnnnnnnnnnnnnnnnnnnnnnnnnnnnnnnnnnnnnnaagaattcggcacgaggnnnnnnnnnnnnnnnnnatttaaaatgttctttttttatttgtcgtttaaaaacaaacttggaagaagcaaaatccaaaacttgccctttgcctctcgcaacataaatatgtacagttcagaatgatcgctgatacaaaacatgccaaggacaggggcgctgagggtggagggagagagggcgctttaaaaaagggaaccatttcatccgttgttacgaaggaccaaccttgctgtacaggatacacacaacacaaaataaagtcttcacgggattcacacttgtcagcgatttattttttaaaaagggggagggtcctggaggtgaggggagaagactgtaaaggggaaaactgaaaactgagtatgtgcgagtgtaaaccaacccaaaatacaaacacnnnnnnnnnnnnnnnnnnnnnnnatatcttgaggcaattatacaggcagggtacttnnnnnnnnnnccaaccaaaattccaaccttgtagcttgggtctgagttatagtttatataaaaattaaaaactgtataaggtttcttcactaaattctacaggactatcggatacctagcatatgcttacaaagtctgccccatccccttttcccaatcccagggcccaagccccaaacacagcctgactcacgggagccaatctccccctccctgtagcctagaccttctgctctcggaaaaggaacatccaagggctgtggctttgagggcagcagcccagtcttcctactgtctgatttaattacagcggttcctgtgggagtgggggctgttattctcttaaacattggcagctggaaacagttgaggaagcagctttaa

SEQ ID NO: 79431 - DNA, 720 bp, Homo Sapiens
  misc_feature (63)..(63): n is a, c, g, or t
gtaggggcacaaagtcaacaatggggcactgagagagcagtaataacgcaaggtgcatgtagnttgccacaaggtaaaggttctttccacccaggggcccacaagtgagaggcccttcacatattcccacccttagatcagggatagtaatggaggtgccgcccggaaatacacgaatagcctgcagaggaaagctggctcatgtttctttcccactctggggcccatgccaccccatgcataattggccaaggcctatcccgttgtcttccagtactccaggtttaccttcttgctctactgttcattgtttcatccctcctcgacctccgattttcaatccctttctcactatgcctcttccttttgctcctcctccgatatttggtcctccactgccttcttattttgcccatttccattctgggggaatgccagctcctgcatcacccaacagagagcacagctgatggcaaaaaggaaggatgaaaaaagggttgtggaaagaggtgaaagttattcatttatgcttttatatttgaaaccttgtaccctcccacactctgtttagcactaatgtgccctacttgaaaccacgtaccctcccacactctgtttagcactaatgtgccctatttgaaaccttgtaccctaccacactctgtttagcacaaatgtgccctacatactggagattaaataaagattgtgaagtctgaa

SEQ ID NO: 79432 - DNA, 974 bp, Homo Sapiens
  misc_feature (108)..(108): n is a, c, g, or t
  misc_feature (192)..(192): n is a, c, g, or t
  misc_feature (252)..(252): n is a, c, g, or t
  misc_feature (294)..(294): n is a, c, g, or t
  misc_feature (534)..(562): n is a, c, g, or t
tgggcggtacaattcacacagaaacagtgtgactgatacgatttaatagactcctataggaattggcctcggggccaagaatcggcacgagattgttcgactcgtgcntatgataaagcaagcaaagttgcagaactgtctaagaacattatttttttccctttataagtattttacactttagtatctatntcagagtcatatttaaaactatttattagtgactacagtacatgagacaacaaggtactngagatacaaattctcaaaaggttaatgataatgtggttatanctgtgccttaatagtaatgctatttaagatatttatttttaagttttactatgctgcactctaaagaaaggaactttagatgtgacactgtaaaattatgtattcatctcatggcataaattatttagtaagtctagatgtagcgtattaaatattaacctattcaactaaagatgttgacttggatttatttaaattcatatgtgcactgtataagagagtactcttacattaacacannnnnnnnnnnnnnnnnnnnnnnnnnnnnaacgatatattgctagtttcatgcttcctcctctgattttgcctgtgtagatttcatttattggtaattcattagtttaacactattatgtagtttttaaatgctgctttacatttttcttctgaaactgcaatacttgcaatttttattcttaaactaaattgaatactattttacactgtattggatttttatacttgaacaatttcatacaagggaagacaggttagcatttttatggactttctccattatcactggatttactttaagtattcccatactagacagtgttatgtaatgtagacatgactctcctgtgcaaattatttattcgttgtgtatattgctttataacatttcagatcttctaatctattcacttgtattaaatataatttttaaaaacttc

SEQ ID NO: 79433 - DNA, 727 bp, Homo Sapiens
  misc_feature (654)..(668): n is a, c, g, or t
gaccccctggatcaaaagggcttccttggaattagcttgttttagtaacttctgttccaaagaaacacaggtctgatattgctaagaactgaaatcggaggagccagaggcccttttcagtccaggccaacattgtgcacggccactgtgggactgacaaccgggatagctcaagttcgaaagaccaggtttcaaacattataagttccaggctttgcaagtctttattctctggggtaatatccagtctttctgttattgtctcttaaaattctcttccatggcccacattaagggagtttgcagagagtgagggaggcaaaacttgaaaagggcctgcaacactttaaaccttctcaggttcacccacatgaaacagctgtgctgagtgtgctgccggtgcccggggagcttctctgactgtgacccggcagaggcttctgtggcggtgcatgagcggccctacagtggagggttctctttggaaacaaacagccctgcttggtttcagtttgaggccacttatcttcaatgtgacatttcttgccaagccctgtgacactccccattgatgactcccataggtacagataaagttaagaacaggaaacagaagggtaggatgcatagggagggagagaagccctgaaaacnnnnnnnnnnnnnnngaagcatggaaaacaaatcttttatgccactccagccataaataaaattttaacttcaa

SEQ ID NO: 79434 - DNA, 1027 bp, Homo Sapiens
  misc_feature (77)..(78): n is a, c, g, or t
tcaaagtgccttctgaagcatcagagattaaatattgttcaaactaatagttattgctgtggcttttaatttatctnntggaagatagctatatggtaactcatcattaaccagaacacctctcccctcaaattccgtgaccaagttgtgcagcttgagcaaatgccgaaagagggtattatgggtgggtggtgtgggcttgcaaatacaagcttggaggtgagacatggccagacatgactcctgcttccccttaggaagtaaatcttacttatggttgtgaactgcttggagtccaggatgcccagatgtgaggggcagatgaagggaatgttgctggaaaggtgccttttaaggctgctgagaatttctggactgtgtcctgatggacgcagcaccatcaaagcccagaatttctgaaaacggtgacaaggttaacataaggacaacaaatactccaccctgtcatggtatgtgaggtgtgggtgtggcggtttctgtgtacgtttgctcatacacgcacatccaaaagcctgtgcctcattcctggccatgggtgaggacttggtctgtcacggctgatgaggactcccacaaccggccaagttatgtcttattatacacccccagaaagagagaaagctgccttctggaggactgattccacatgctatattcagctgagttgatttctgtgtctatttcaacccataacctgaagaatgatcaccttattccttattcattaattttcttgattaatagggaaacttgggaatagctataaagtaaaacttgggtggaacctggggccctggcatcacacaagtgtgattaggatggtcaaggtcatcaggagtacagcctattatattcccacatcctgagaaaggtcatttctcccacacacgacaaagtcacagacatcctgcacctgccactaggcatcctcatcctactgacatgcccatttctccagttttcttaatctgagactcccttcccaagtttccccggtaccgagctg

SEQ ID NO: 79435 - DNA, 1251 bp, Homo Sapiens
  misc_feature (439)..(439): n is a, c, g, or t
  misc_feature (1040)..(1083): n is a, c, g, or t
  misc_feature (1189)..(1210): n is a, c, g, or t
atggactgtcccacagcactgcaccagctcatgctggactgctgggtgcgggaccggaacctcaggcccaaattctcccagattgtcaataccctggacaagctcatccgcaatgctgccagcctcaaggtcattgccagcgctcagtctggcatgtcacagcccctcctggaccgcacagtcccagattacacaaccttcacgacagttggtgattggctggatgccatcaagatggggcggtacaaggagagcttcgtcagtgcggggtttgcatcctttgacctggtggcccagatgacggcagaagacctgctccgtattggggtcaccctggccgcccaccagaagaagatcctgagcagtatccaggacatgcggctgcagatgaaccagacgctgcctgtgcaggtctgacactggctcccacggggacccntgaggaccgtgcagggatgccaagcagccggctggactttcggactcttggacttttggatgcctggccttaggctgtggcccagaagctggaagttgggaaaggcccaagctggacttctccaggcctgtttccctccccaggaagtgcgccccaaacctcttcatattgaagatggattaggagagggggtgatgacccctccccaagcccctcagggcccagaccttcctgctctccagcaggggatccccacaacctcacacttgtctgttcttcagtgctggaggtcctggcagggtcaggctggggtaagccggggttccacagggcccagccctggcaggggtctggccccccaggtaggcggagagcagtccctccctcaggaactggaggaggggactccaggaatggggaaatgtgacaccaccatcctgaagccagcttgcacctccagtttgcacagggatttgttctgggggctgagggccctgtccccacccccgcccttggtgctgtcataaaagggcaggcaggggcaggctgaggagttgccctttgccccccagagactgactctcagagccagagatgggannnnnnnnnnnnnnnnnnnnnnnnnnnnnnnnnnnnnnnnnnnncacgcactggcctgcacagagagcatgggtgagcgtgtaaaagcttggccctgtgccctacaatggggccagctgggccgacagcagaataaaggcaataagatgnnnnnnnnnnnnnnnnnnnnnncctgagcaggcggccgcaagcttattccctttagttgaggg

SEQ ID NO: 79436 - DNA, 689 bp, Homo Sapiens
  misc_feature (498)..(506): n is a, c, g, or t
gcatcctccagtggcccaacccaaagcagaaagcagaaaccacagaccccgtgagtctccccataccttgtttccaataacttggcaaaacttcttggtgcatattggttacaccctctgggattcataatgccattaggctaaaaccctaagagagagggttgacagaaacacacgcgagaatgaggcagatcccagagcaaggactgggcccagactctccacatgtgctctactagtgagtgccttatactctcagtattttggggcttacagcttcttatttgtgctaaaaaggtgcagttccaaagtaggaactgccacacaggccccagcatcctctctccaacttcatacctctctcctggtggggggagcgggcatccaggacctccggaatcaaggatgtgcagagaagagcgaaagtaatttttctagtcacatgaactgattggttccaggcaattagaaaatggctataaaataaccttaattttnnnnnnnnntcttgggtcttcgttttcctattaggagactgaactgaccacatgtattgatttatatcctgaatatatgggaacttctgtgtttgggatgtcctactgtaagactgatgaatgtacagagttaatttcagggtacagttttgccttaatggttttaaaaaataaactattttttaaaattta

SEQ ID NO: 79437 - DNA, 516 bp, Homo Sapiens
cagtcgacggtaccggacatatgcccgggaattcggccattacggccggggggtccggcgtggccattttcgttggtggtgttcagttgtggcggttgctggtcagtaacagccaagatgctgcggaatctgctggctcttcgtcagattgggcagaggacgataagcactgcttcccgcaggcattttaaaaataaagttccggagaagcaaaaactgttccaggaggatgatgaaattccactgtatctaaagggtggggtagctgatgccctcctgtatagagccaccatgattcttacagttggtggaacagcatatgccatatatgagctggctgtggcttcatttcccaagaagcaggagtgacttcagtcatcccagcaatcgcttggttcagtttcattcagctctctatggaccagtaatctgataaataaccgagctcttctttggggatcaatatttattgacttgtagtaactgccaccaataaagcagtctttaccatgaaaa

SEQ ID NO: 79438 - DNA, 875 bp, Homo Sapiens
  misc_feature (548)..(698): n is a, c, g, or t
  misc_feature (701)..(721): n is a, c, g, or t
  misc_feature (723)..(723): n is a, c, g, or t
  misc_feature (732)..(732): n is a, c, g, or t
  misc_feature (737)..(807): n is a, c, g, or t
  misc_feature (816)..(828): n is a, c, g, or t
gcaccccaacaccccccaccgaccaccgagtcatagtgaatatagaacagttgtacaaaaagcaggctggtacgcgtccggaattcccgggatatcgtcgacccacgcgtccgttcagttgtggcggttgctggtcagtaacagccaagatgctgcggaatctgctggctcttcgtcagattgggcagaggacgataagcactgcttcccgcaggcattttaaaaataaagttccggagaagcaaaaactgttccaggaggatgatgaaattccactgtatctaaagggtggggtagctgatgccctcctgtatagagccaccatgattcttacagttggtggaacagcatatgccatatatgagctggctgtggcttcatttcccaagaagcaggagtgacttcagtcatcccagcaatcgcttggttcagtttcattcagctctctatggaccagtaatctgataaataaccgagctcttctttggggatcaatatttattgacttgtagtaactgccaccaataaagcagtctttaccatgaaannnnnnnnnnnnnnnnnnnnnnnnnnnnnnnnnnnnnnnnnnnnnnnnnnnnnnnnnnnnnnnnnnnnnnnnnnnnnnnnnnnnnnnnnnnnnnnnnnnnnnnnnnnnnnnnnnnnnnnnnnnnnnnnnnnnnnnnnnnnnnnnnnnnnnnaannnnnnnnnnnnnnnnnnnnnanaaaaaaggncgcgnnnnnnnnnnnnnnnnnnnnnnnnnnnnnnnnnnnnnnnnnnnnnnnnnnnnnnnnnnnnnnnnnnnnnnngaaaattgnnnnnnnnnnnnnctctaaaagaaacccgggacaaagaaaggggggttgggtcttcccac

SEQ ID NO: 79439 - DNA, 669 bp, Homo Sapiens
  misc_feature (221)..(221): n is a, c, g, or t
gggggtggtgttcagttgtggcggttgctggtcagtaacagccaagatgctgcggaatctgctggctcttcgtcagattgggcagaggacgataagcactgcttcccgcaggcattttaaaaataaagttccggagaagcaaaaactgttccaggaggatgatgaaattccactgtatctaaagggtggggtagctgatgccctcctgtatagagccaccnaccatgattcttacagttgggtggaacaagcatatgccatatatgagctggctgtggcttcatttcccaagaagcaggagtgacttcagtcaatcccagcaatcgcttggttcagtttcattcagctctctaatggaccagtaatctgataaataaacccgagctcttcttttggggatcaatatttattgacttgtagtaactggcccaccccaataaagcagtctttaccatggaaaccccgaccttcccacaacactaatatatctttgtcggccccgccctcggccccctcaaaaaaacttttcctaaaaccattctttttgggccccccggggcccccaaaaagggaaattggaaacatggggcccataacctggttttccctaaagaaaaaatccctggggcccttgaaataagggggcttttggaatttccctcccccaat

SEQ ID NO: 79440 - DNA, 750 bp, Homo Sapiens
  misc_feature (32)..(32): n is a, c, g, or t
tcattaagcacagtccgatcggatatccggtntgggcaataagagatgtaaataaagtgaggatttaaagcccaaaggcctccttgctataaaaacgcacccaaaacgcctcacctggaccccgcgcgcacccagaaggatcacgttcagagacagaggtgcaacatgagtcaaggtccgatggacagtggcacgtgctcagtagcagatgtgttagaacccggagcagcacaccccaatccgggttccgggtggtggggtctctcgcactcacaagggaggggcttaggggaggaggtagaggaatgtatattgtttagcactttgattttggatctagacgctggcggtattgagaaatgcccggcatgctcggctttgtgtgtttaaaatcgttttatcttctgtttcagagatttcatctttactaattgggttgcgggggcttttgtttataaatttcactgtaggatcattttagctatgttcagttgaggaacgcagcagatctggatgacagaagaaaccgaatattaaccaggaaggccaacagctcaggagaagccatgtcactggggagccacagcccgcagagtgactccctgacacagcttgtccagcagccggatatgatgtattttattctcttcctgtggctcctggtgtactgcttgctgctcttcccacaactggatgttagcaggctctgatacgtgtgtctggataataaaaaagacaggaccctgaaaa

SEQ ID NO: 79441 - DNA, 904 bp, Homo Sapiens
  misc_feature (446)..(461): n is a, c, g, or t
cacccctctcaaaggttccgtcattccccacgacctcttctatttcccacactatgaggttcccctggctgcagttttggaggcttatgtagaagacccggaggatctaaaaaatgaagaaatggatctcgaagagccagagggctatattccagacctggactccagggaggaggaggccgatggctctcagagcagctccagttcctcggtgccaggagagagcctccccagtgccagcgaccaggtgctgtatctcagcaggggtggtgtgggtaccacaccagcctcagaacccgctccactggccccccatgaggaccaccagcaaagggagaccaaagagaatgaccccatggacagccatcagtcccaggaatccccaaacctggaaaacatagcaaaccccctagaagaaaatgtaacgaaagaatcaatcagtagtnnnnnnnnnnnnnnnnggaaacatgtggaccacgtagaaagttcactatttgtagcaccaggaagtgttcaatcctcagatgacctagaagaagacagtagcgactacagcattccttccaggactagtcacagtgactccagcatttaccttcgacgacatactcataggtcttcggaatcggatcattttagctatgttcagttgaggaacgcagcagatctggatgacagaagaaaccgaatattaaccaggaaggccaacagctcaggagaagccatgtcactggggagccacagcccgcagagtgactccctgacacagcttgtccagcagccggatatgatgtattttattctcttcctgtggctcctggtgtactgcttgctgctcttcccacaactggatgttagcaggctctgatacgtgtgtctggataataaaaaagacaggaccctg

SEQ ID NO: 79442 - DNA, 542 bp, Homo Sapiens
attgctgctgtagaagttggaggtggagctgtgactggctgagctgctgtggccgggctgggcagtgtgccccaacagctcagtgctttcctgacactccagtgtctggggtggttgaggagcgagttctctcttcctcccagaccaagttcctccctcgggtttgccttgagacgtgttgcgtttttgggccccgtggcctctccctgttaggctgccacaggccctgcttctggaaggtgaacagctcctggctgctgccgagagggttctcgttggggtcaccaaagtgtgcccggctgctatgaaaaacgttgggaatcttggtttcagttttttattctatgctaggttgtacagacttatttatatcatcgttttgagggactaatggaggcttattgtaacatataatattagtgaaaccatggaattatatgaaaatgatacatgagaaataaggaaactattttgctgattgtaaatttttgtgggaaattttgtgataacttgagaattatacttgtttgaatcaaggcaaa

SEQ ID NO: 79443 - DNA, 668 bp, Homo Sapiens
  misc_feature (556)..(612): n is a, c, g, or t
tgaaaactctagagttggagcaagtcttccatttgcttcttatccccttaaaagaatgccttccacttcccaacagcccccatcaagggaccccaagaggccaccatgctcttatctcgcactttctttcctattccccttgcctgaatctggagtggggttgagccctctgccttcaaccttaagatttaggaagttctttccccaactgtctaacttggaaaggtagatgagtctgaattttgaagtaacgaatgcaaattccactcagcagaggcaatgttatttatgtacatagggatagtggaatgagttttaatagattctgtccaaaaggggtttgttcctcttatttcctctatgtaggaagttgtgtcttaggcaactttatcagtatcaatggaaaaatgataggcactacaatgaaatggcaggatgccaatatgagatatttcaggaataataagaaatacagtttgtttgtataaaataaactatctcaagaaagttttcaacgacagtgatagtgttcatttgtaagagagagttctagaannnnnnnnnnnnnnnnnnnnnnnnnnnnnnnnnnnnnnnnnnnnnnnnnnnnnnnnntggttagtccaaattgagatgtgctctaaaggacaataaaaggttaaatatctcct

SEQ ID NO: 79444 - DNA, 691 bp, Homo Sapiens
  misc_feature (16)..(16): n is a, c, g, or t
taccatgcagaccttncaggcagcatggaaaataccagcgccatctttcagaagccctcatctccacttgccaggagccccgacaccacccttggagacacggcttgttccaggtaatcagagtcttctggttcaacaagcagaggagctgggattttccatcctaaagaggatgtggccgggatggaactccatcaccatcctgaagccacagcagaggtggcaggtaacagacagtccagagctgctcactgtcttcatacatgacgtgaggacggtggttccagtgcgccgcaaggtgggactgaggttcagagttgagaggaaacaataggaaggggctgagatgctgcaacaggtcacgggctgctattgtaaacacttttttaaggataggttcaaataagagcttcttggcttggagaactgaggggaagtatgactaacctaatattctgaggacaagaagacatttaataccacatgactttttttaagtaagaggtctcattttctaaataacttgaaaatagaggctctccaagggttccgttacaggagagaataatcagaggtgaagaaaacccatttagagctgactccctttcccagggaatgagcttttggtcctcatagactggcatcctgcagacacgcagagagaaagaataaagcctgcctgtgcattgtt

SEQ ID NO: 79445 - DNA, 731 bp, Homo Sapiens
cgttcatactgtctgtgaaaggacccagctcacctttccctcttatctcccagtccttcccaacagcgccgacacctcatggaaactgattgcaaatgtgctacttctcacttctgtgtggcccgaggaggctgggttaatgctgggcttggtaccttaagcaccctttctcccttccccatcttcattctcagaattacacctgtctgaagcaggcattttccaatgccctagatgggaatataagtgtaaggagatgtgaagcatttgcctgtgtgtcagaacattcactgaggatcctcataggcacttctagaaaccaaatccttgaagatgactaaccagaaatgcccgtcatagcactgtttacagttgcaaaaactgaagccaattgaaatgtccatcaggaggggattaaatgaattatggtacagttacaccgttgaatattttacagccattgaagatgatatatagctatattcattgacaaggaaaactcatattttttagtgaaaaaagcaggttatagaattgcatgatattcacatttatataaaactttatatatgggaaggatgttgattgaattgttaataactatggtcacctctagagatggaagtttgcattacctttaatttttaataccattttgtattgcttaaaatttgtatgtattatcgttaaaataagaaaaatcaaataaagctattttcattatgggaaaa

SEQ ID NO: 79446 - DNA, 961 bp, Homo Sapiens
  misc_feature (569)..(579): n is a, c, g, or t
  misc_feature (647)..(655): n is a, c, g, or t
ggagttttttattgggcttttttaaaaagttaacttttaacatagctgctcagggattaaatcagattggaaaacccattctgactccacatactgctacaaagaaatacatcgttgtttatattgagctgcaggagatagtacactttaaacttaagaaagttaaatgtttcacaataacattgcaatataatcttcagctactctctttccattggtaaaatctctgatggtgtgataactctttgccaacctacgaaacccatatctggaagaatcaccagctcccgtgagcagcttcatgtaaatagatgcactccaagcagattgcatgcctcaggtgtttgtcttctagtaatcatggagtgtgcaacacccagagtaacactacaaggggcaggactgcaaacagcaggtcctggctaaaaacccttaatgctgcattgctgccagttgtaaagagatgcctgaatggaggcaagttctgccctgtgggtgaaactgatgatgtactgtactgtcatatataaatccactaaatccagctacctggaactgtggccatgcannnnnnnnnnnctttaaagaccagtgtgatagtaggccatgcatctgagatacgatattccttggtaactagagggagnnnnnnnnntcaagtaggttcaggcttatgttgtattttgagagtctggttttatttgaacagaaataactctacagaaagctcttgtaaataatgctcaaatttgcacccgacgatcaaatccattaaaaatgaatcttgtatatgatgtgtgtggcttgtttcttgcatctcttttccattattcatagaaaattatttagaaaatattaagtgttagtcttaccatgagttagtaagacataccttcttagtagcttatatgtcctgtatatcctgggaaggtaggattgttgatttttaataaatctgaac

SEQ ID NO: 79447 - DNA, 720 bp, Homo Sapiens
tcaggagtgtgtgttcaagcccaaagcaagtggaaaggtgcaggaaaattcatccttaagctaaaggagcagtgcaggcatctcgagaagataaaaagaaaggcatttctttcgcaagtgaactcaagaagctcaccaagtcaactaaacagccccgaggacttacatcaccttctcagctcttgacctcagaaagtatccaaaccaaggaggagaaacctgtgggtggcttgtcctccagtgacacaatggattaccgacagtgactaagggcagcatgtttaacccaggtgaagatctttaagcaagaagttaaagagtgaacatggtggaaaaaatataattattttcatcagacttaaactggaaattgatgatttctgaactgaagccttcacacatgtgagatccatgctgaggagaagcaaaatggcacagggctagttgccaccaaccaatttactgatgaatgaagcccaggggactgccattttataaatgtcagcagttggaaaaatcgtcacgaattgacttagagcaagggtcagcaagcttgtctgtaaagggccaaacagtaaatattttagggctgggggccataaaatatgttgcaaccacccaattctgccattgtagtgcaaaagcagccatagacaacacatacatgaacgaacgtggctgtattccaataaaactttatttatggacactgaaaaaaaa

SEQ ID NO: 79448 - DNA, 858 bp, Homo Sapiens
aacattcctaatggttgacaacatgaagagatcatctcttcgcacaggcagcttctttttgaagacatgttaagaaaccccagagcctggaaagacacgacttgaagccggctctacacagcacatcccttgatgcagattgatgacaatgtgatgaggaagtttcacggctataactccctgaaggaatactatgagaaagaaagttgcatgcggtacctgcacaggatttatgttcctctcatgctggttaatgcagctgacgatccgttggtgcatgaaagtcttctaaccattccaaaatctctttcagagaaacgagagaacgtcatgtttgtgctgcctctgcatgggggccacttgggcttctttgagggctctgtgctgttccccgagcccctgacatggatggataagctggtggtggagtacgccaacgccatttgccaatgggagcgtaacaagttgcagtgctctgacacggagcaggtggaggccgacctggagtgaggcctccggactctggcacgctccagcagccctcctctggaagctgcgtcccctcaccccctgtttcaggtctcccatctccctcagtgacctggatctgacctcacaccatcagcagggggcacccaccatgcacacctgtctcggagtaggcagctcttcctgggagctccaggctatttttgtgcttagttactggttttctccattgcattgttaggcatggtgacaagtgacagagttcttgccctctgtccagtttcagcatctggttgcttttaagccaagtacatctagtttccctattaaaaatgtgtctgaatagcgactatgctttgccaccaaaag

SEQ ID NO: 79449 - DNA, 843 bp, Homo Sapiens
ttttgagaccctgtctcaaaacaaaacagaaataacaaaaaataaggtgacttgctggaggccacatggctgtgagccaaatacaggtctgggttatcagggctcacatacttctaagtacaccctactgccttggaatctgctgaagaccaagcccctgcccccaagccatggcaaagaaggagggaaggaagcaaaggtgcccagcggggacaactcggggaggggcgaggtgcccagggcccaggaaggccaagcaacatgttggcaggccagcatcaggtgactcccaagaaggaatgaggagaggatgtgaggaaagagccacagcacagaggcctgctgttaggtcagcggagaccacggcccatgggacctggatctacccttgatgctaacaatgttctttggggaaaaaatctataatcacaaagtttctgcaactggactgtagtcatggttgcagaactgtatagatttactaggaaccatcaaattgttcacttacaatgggtaaattgtacagtacataggttatccctcagtaaagctgtatgaaatttatagtcatgaaactaatagtgacaaacgagctgggtaagtaggtctcagctgttctgtaggcactttgagaagaggaagagtagcatctcggttttaataaaagaaagcctggcccatggcgtccagcttctgcttgaatactttcagtgcccgggagctcagtatctcaaagcagcccactcctgtttaagagaactctaaaccttagaatgttgaaatacatcattattattctagtactgctgtgaaaaataaatgtctttgttttgccacataaca

SEQ ID NO: 79450 - DNA, 639 bp, Homo Sapiens
actatattagctattatgaataatgtccagtataagaatatgcttctggaattgagttctccttttaagtaccaatgatacttaaatttctcagaaatgtaatggtgtgtcattgccttgaaatgcttgcttagggcttcttttatgttatcttaaaaagtgctggtgaattttccattttttacatccatttcacatgtaagagacaaaaaagtctagattggtcttgatattgagataataaaaagtaagtagcattaagaaaggtaacaatcttcattctacagatgaactcattgaaacaatttaggggaatgaggggcaaaaggggagaaatactgctaaagaacatgagcataaaaatgcgtgcgtttcagtgtttaagaaggcttgataaagaatgtcacttttttatttaactgataagatttttgttattttttactttgataagtaaaccaaagaatatttgtatttcaagcagtttgtgtggtgtttctatataattttctgtgtataaataataaagtaggcatttgtttattttgtaaaaaagaaatgaaaatctgctggccagctatgtcctctaggaaatgacagacccaaccaccagcaataaacatttccattgtcactgtg

SEQ ID NO: 79451 - DNA, 1955 bp, Homo Sapiens
  misc_feature (1280)..(1290): n is a, c, g, or t
  misc_feature (1730)..(1773): n is a, c, g, or t
tcctgcaagttccgcccctggcctctgcctccttttctcccgccggctctaacccgcgcttggctaaggtccgcgggaacccgtgagccaccgagagagcagagaactcggcgccgccaaacagcccagctcgcgcttcagcgtcccggcgccgtcgcgccactcctccgatggccacagatgtctttaattccaaaaacctggccgttcaggcacaaaagaagatcttgggtaaaatggtgtccaaatccatcgccaccaccttaatagacgacacaagtagtgaggtgctggatgagctctacagagtgaccagggagtacacccaaaacaagaaggaggcagagaagatcatcaagaacctcatcaagacagtcatcaagctggccattctttataggaataatcagtttaatcaagatgagctagcattgatggagaaatttaagaagaaagttcatcagcttgctatgaccgtggtcagtttccatcaggtggattatacctttgaccggaatgtgttatccaggctgttaaatgaatgcagagagatgctgcaccaaatcattcagcgccacctcactgccaagtcacatggacgggttaataatgtgtttgatcatttttcagattgtgaatttttggctgccttgtataatccttttgggaattttaaaccccacttacaaaaactatgtgatggtatcaacaaaatgttggatgaagagaacatatgagcacatgagttaagattgtgactgatcatgatttatttgaagatggagcactgctgatttatgaaggaaaaaagaagaattttctaaagattacacatatttcagaaagactttacccaattcagttgtcagacataatgatttatttgaaggcttgttttatttgaagaaaagcatattgccaaaaattctggttaaaagcttcctaacgggtaacagaccatgggagagatatgtggttgggtaatgcaaatgtagttatacaaagaaaaatacagatgtctccagacctgaggactttttaatagggcagttgttgtgttggtggcacattggatatttctaacatgtacaaagctatgtattttgatttactttcatttcttgctatgtatatgtacttttcttaaaatgccaagaactttctcttgctatcattgctccttttgaaacaattcaattttcatgtctacagctgactgttttgttaagattgagtcatcgacattcaggatttaagtctgaggtagtcaaccctcaggnnnnnnnnnnntggcttatctgaaatcagtactgtggaaatgaactatattagctattatgaataatgtccagtataagaatatgcttctggaattgagttctccttttaagtaccaatgatacttaaatttctcagaaatgtaatggtgtgtcattgccttgaaatgcttgcttagggcttcttttatgttatcttaaaaagtgctggtgaattttccattttttacatccatttcacatgtaagagacaaaaaagtctagattggtcttgatattgagataataaaaagtaagtagcattaagaaaggtaacaatcttcattctacagatgaactcattgaaacaatttaggggaatgaggggcaaaaggggagaaatactgctaaagaacatgagcataaaaatgcgtgcgtttcagtgtttaagaaggcttgataaagaatgtcacnnnnnnnnnnnnnnnnnnnnnnnnnnnnnnnnnnnnnnnnnnnnaagtaaaccaaagaatatttgtatttcaagcagtttgtgtggtgtttctatataattttctgtgtataaataataaagtaggcatttgtttattttgtaaaaaagaaatgaaaatctgctggccagctatgtcctctaggaaatgacagacccaaccaccagcaataaacatttccattgtc

SEQ ID NO: 79452 - DNA, 1187 bp, Homo Sapiens
  misc_feature (1075)..(1109): n is a, c, g, or t
tcccacattctccccagtgttacccttaggaagttttacccagattttggcaatagctttctccattaaccgcctgtccaagaatcattatgtctgccatgactttgggtaaagttctgttcggaaatatgtgtattcttgaggaaaattgcttctgtggtcccttcagtcaatcaccagtgctccaatcttcaaatacattcatgatccagtcacattcttaacttcatgtgctcatatgttctcttcatccaacattttgttgataccatcacatagtttttgtaagttgggtttaaaattcccaaaaaggattatacaaagcaaccaaaaattcacacatctgaaaaatgatcaaagacattattaacccgtccatgtgacttggcagtgaggtggcgctgaatgatttggtgcagcatctctctgcattcatttaacagcctggataacacattccggtcaaaggtataatccacctgatggaaactgaccacggtcatagcaagctgatgaactttcttcttaaatttctccatcaatgctagctcatcttgattaaactgattattcctataaagaatggccagcttgatgactgtcttgatgaggttcttgatgatcttctctgcctccttcttgttttgggtgtactccctggtcactctgtagagctcatccagcacctcactacttgtgtcgtctattaaggtggtggcgatggatttggacaccattttacccaagatcttcttttgtgcctgaacggccaggtttttggaattaaagacatctgtggccacttccttggattcttctgcttcggagtgcataatgtcaggataaccagctgcaggggcgattaccgctcacatgtactcggacgagccgcaagttcgctctgcagcgaaatccgcacacgacggaaaataaaaggaagaaagccactaaaatcaaaacctccccggggcgcgagagcgggttctggtgcagggattttcagggggaaagttctgcaagagtccccggccgtaatggccgaattcccgggcatatgtccggtaccgtcgactgnnnnnnnnnnnnnnnnnnnnnnnnnnnnnnnnnnncggccgcttcctcgctcactactcgctgcgctcgtcgttcgctgcgaaccgagctacccctatagtgactatcatccc

SEQ ID NO: 79453 - DNA, 490 bp, Homo Sapiens
ctctgccgctgtcccagcccagtccctctcccggagccttggcagcctcccacaacccagacacttgcgttcacaagcaacctaaggggcaggtgaagaagcgcagccctgccagacgcgctagattcctctaaggtctctgagatgcaccgttttttaaaaaggcgtggggtgaactgattttgatcttcttgtctagatgcaataaataaatctgaagcatttaatgtagtcatcttgacattgggcctacactgtacgagttccttatgtttccttgagctaaaaatatgtaaataatttttgtcccagtgagaaccgagggttagaaaacctcgatgcctctgagcctcgggaccgctctagggaagtacctgctttcgccagcatgactcatgcttcgtgggtactgaacacgagggtggaaatgaaaactggaacttccttgtaaatttaaacttggcaataaaagagaaaaaaagtttcccag

SEQ ID NO: 79454 - DNA, 820 bp, Homo Sapiens
atgttttaagagaacacttaaggagttccgtgatcgaccgaaaggacttaataatcaaaaggattaagcccaaaccccagcaaggagatgacatcacagtggtagacgtagagaagcagattgaggccttccgcagccgcctgatccagatgctgggggagcctcttgtcccccaactccaagacaaagtgcacttgttgaagctcctgctcttctatgctgcggacttgaaccctgatgcagagccctttcaaaagggctggagcggctcctgagggcctgccaagcactgaatgccaagaatacctcctgaactctctctccaactgctcagaagctctaaaagcatgaaaagtggttaaaatcttacaggaccaaacctgcattatttaatcagtaggttgtaatttctaactctagtaaatatctttttttaaataatcctatcctagcctgttctcaaatatggcttaaatatacaaggtatatatattttttaataaattatttatctatacttttttgaaacaggttaatactctgtgcatcacatgtttaacattttcattcaagatgtggaaaaaatccctctgctgaacctagtctatacaccaatattatgtcattcaaggtaccgacaacctgtttcaggagagagacgttcatttttccctaatgaaatgcaagcattctgttagacctattatattgcctgttaatttgactgtaatgaatagggggtagaaacaaaaggatcaagtgtgttataaaacatttgatgttaaaaggagacaataaaaaggcaatggtttttcaaaat

SEQ ID NO: 79455 - DNA, 527 bp, Homo Sapiens
  misc_feature (54)..(110): n is a, c, g, or t
gcggaggaaacgaggttgagggtgtgagtggctctggagatgcaccccagtctnnnnnnnnnnnnnnnnnnnnnnnnnnnnnnnnnnnnnnnnnnnnnnnnnnnnnnnnnggacatgtaatacaccgttcaataaatagaaaaaaagttacaaaatgatgtggtattttgtccttaatatacaagaagggaaaagatgtgggggtgacttgggggggtgatgttctcccttctcctccctgggtcaaggtgggggaaaggaaggatggccaaagagagagggcggcagggacttaggtgcaaagagaaaggcaggtaagtgccgggaaaaatggaaacagagtaagatgaaggggcgaagcaaaaagacaggaggcgaaagggtgaaaaagccagaaaaacaccaagatacaggtctctttcctttccaaatcgggggtgggggtctccggctctctcgcgtctgtgtcccccaaccccaggttggaaggggcagtgtgagcctcgctcagttcctgagttgtacgt

SEQ ID NO: 79456 - DNA, 733 bp, Homo Sapiens
tctctcctgccaccatgtaacatgtgccttgcttccccttcaccttccaccatgatgtaaatttcctggtgcctctccaaccatgaggaactatgagtcaattaaaccatttttctttataaattacccagtcctaggtagtatcttcatagcagtgtgataacagactaatacagagaattggtaccagcagagttgggtactgctataaagataaactgaaaatgtggaagcgacattggaactggcaaacaggaagaggctagaacagtttggagggctcagaagaagacaggaagatgtgggaaagtttgaaacttcctagagacttgttgaatggttttgaccaaaatgctgatagtgatatgaacaacgaagtccaggctgaggtggtctcagatggagatcaggaacttacagggaactggagcaaagatcactcttgctatgctttagcaaagagactggcagcattgtgctcctgccctggggatctgtggaatgttgaacttgagagaaattatttagggtatctggtaaaagaaatttctaagcaccaaagcattcaagatatgatttgactttttctgaagcatacagtcaaatgcattcacaaagagatgatctgaaattggaacttatgtttaaatgagaagcagagtgtaaaattttggaaaatttacagcctggccatgcagtagaaaataaaatcccattttctggtaacaaattc

SEQ ID NO: 79457 - DNA, 810 bp, Homo Sapiens
cgcgacggcggcgagacggacatgaagcaatatcaaggctccggcggcgtcgccatggatgtggaacggagtcgcttcccctactgcgtggtgtggacgcccatcccggtgctcgacgtggtttttccccatcatcggccacatgggtcatctgcacatccacaggagtcattcgtggacttcgctgggcccctactttgtctcagacagtgccgggagtggcagtgtggccagaaggattcttaatgtaactgacccagccctttgcccccacccctggggtaccgagacatgggtagggattagaggcaagagtggagagtcagaccatccaggaaccacatctctggaccttcagaaggaggacaacatggcctattggaaagcctgccaaggtactggaaggttggaccctgctcaggtctatgctagcgggcccaacgcatgggacacggctgtgcacgacgcctctgaggagtacaagcaccgcatgcacaatctctgctgtgacaactgccactcgcacggtggcattggccctgacatctgatgcgctacaacaaacagcaccaactgggaatatggtcgacggctctgcttcttctggcctgctctacgggaagtaccgttcagcgtaggagacctatcggtgaagacctggcttgcccttcatccttctcctgggcatcatcctcaccgtcagcctggtctataacctccggtgattggctgctcggtggcccacacccaccaggtccccgaggaaacagccgccatcccttttggttccagattttttttctcctcacc

SEQ ID NO: 79458 - DNA, 983 bp, Homo Sapiens
  misc_feature (824)..(824): n is a, c, g, or t
agcaatatcaaggctccggcggcgtcgccatggatgtggaacggagtcgcttcccctactgcgtggtgtggacgcccatcccggtgctcacgtggtttttccccatcatcggccacatgggcatctgcacatccacaggagtcattcgggacttcgcgggcccctactttgtctcagacaggccgggagggcagtgtggccagaaggattcttaagtaactgacccagccctttgcccccacccctggggtaccgagacatgggtagggattagaggcaagagtggagagtcagaccatccaggaaccacatctctggaccttcagaaggaggacaacatggcctttggaaagcctgccaagtactggaagttggaccctgctcaggtctatgctagcgggcccaacgcatgggacacggctgtgcacgacgcctctgaggagtacaagcaccgaatgcacaatctctgctgtgacaactgccactcgcacgtggcattggccctgaatctgatgcgctacaacaacagcaccaactggaatatggtgacgctctgcttcttctgcctgctctacgggaagtacgtcaggtcccttcctaggcagagagattgagtgagtcgcccatggtcgccacagcatggacacagcagagcccagactcgtgagccagcatagcgttggggccttcgttgaagaactggctgcccttcatccttctcctgggcatcatcctcaccgacagcctggatcttaaacctccggtgatggctgctcggttggccctaaccaccagggtcccgaggaaacagccgtcatcccttntggttccagatttttttctcctcatcccaaaaggcagggttgggcctgctgtcgtggaccgggggtcggggctggcaggatggacggactgaggaccatgcatgaagtggggcgttgttgtctccctgcctctcagaagcaccctggtccctcctcccc

SEQ ID NO: 79459 - DNA, 1676 bp, Homo Sapiens
  misc_feature (1579)..(1610): n is a, c, g, or t
ttctcctccaccgccctataatagacaacgaagcatcacaatcgatggtaccggtccggaattcccgggatccaggatggcggaagtggaggcgccgacggcggccgagacggacatgaagcaatatcaaggctccggcggcgtcgccatggatgtggaacggagtcgcttcccctactgcgtggtgtggacgcccatcccggtgctcacgtggtttttccccatcatcggccacatgggcatctgcacatccacaggagtcattcgggacttcgcgggcccctactttgtctcagaggacaacatggcctttggaaagcctgccaagtactggaagttggaccctgctcaggtctatgctagcgggcccaacgcatgggacacggctgtgcacgacgcctctgaggagtacaagcaccgcatgcacaatctctgctgtgacaactgccactcgcacgtggcattggccctgaatctgatgcgctacaacaacagcaccaactggaatatggtgacgctctgcttcttctgcctgctctacgggaagtacgtcagcgttggggccttcgtgaagacctggctgcccttcatccttctcctgggcatcatcctcaccgtcagcctggtctttaacctccggtgatggctgctcggtggccccacacccaccagggtcccgaggaaacagccgccatcccttttggttccagatttttttctcctcaccccaaaaggcagggttgggcctgctgttgtggaccgggggtcggggctggcaggatggaaggactgaggaccagcatgaagtgggggtttgttgtctccctgcctctcagaagcaccctgtcccctcctccccaggcctgtggactccggccctggaagcccctttgttcttctgttgaaaggctttggcttcccgctgtagagctgctcccgccaccacctgctggggtcctgcctcagcccagtgcccagtatggggagaggaggacatttgggctcacctgtcaaggtggccctgggaccagagctggtcccagcatggggtgcaccgggtacacttaacgtgtctctataagccaagttgcttcaggaccttcaccactggcctctagaatggtccagaggggctggctgggtccctttgtcagactcctgccggcagctgccctgggggacatgtgtgcccatctggcatcctccagcccgtgcagtccgctcttcactgttccacggcctcccagtgcctcccagcattggacccatctccccctgcagtttgaggccagagaggtgagtggacctgacaagtgccagagtaaccgtgtagacagagcagtgtagacagcactcagccccagccccaggtgtggacctcatgctggtgatggctcccctgggtggcctgccagcacagccagtgccatcagggagctgaaggggctgtcccccacctaactccagctcccccttcacgttgtcaccaaggccctgtgccgcccgcctcgcccccctgctctgtggattcctttgggaagggctccctgggcaggacaataaagagttttgactccannnnnnnnnnnnnnnnnnnnnnnnnnnnnnnngaccgcgtatgcggccgcaagcttattcccgtttagtgagggttaattttagcatggcactggccg

SEQ ID NO: 79460 - DNA, 893 bp, Homo Sapiens
ggatctcctaaatgctgaagaaggtggcttatgtctttttcctagaggaagaatgctgtttttatgtcaaccaaacaggattagtaagggatgccacccaaaaactagccgattggtaccataagatatgacaacagctgtctgagtcatggggcgcctagtcaaaatgctaatttggggctcacatctccttcctctggccagtccactattaattattatacttgccttggcttttggatcatgtttgttaaatcttttaaccagatttatttcttcttgcctagagaccattatgataatgcagcagggccaccagtcagtttcagataatgatgtcaaccccggccaccaagaagtaaccttgtctccactagacagagcagggtgagagttctgtaatccccagtaggtagggactgtgccccaagtcagcatgaagtagttatggaagaaagaccatgggtccctctgcctcccagaaagatttatggggatcacatctctcaggggaaaatgaggcaggagaatagggtctggagacagggaacctaaagctgatttgtgctgagtttctaggattgaatgaaaaggaaaaccccacctctccacacccaagtaacaaaaggatcagaggctactccctttgcactgcattgcagataaaaaatggaaagtacctcagattggtcccctcccacaaccaatcagactggccatgggctactccttcgtttacatagggtgtaaccaagtaaccaatgggaaacctctagcgggtatgtaaaccccagaaaattctgtaaccagtgctcttgagctgcttgctggagcctactcccactttgtgaagtgtactttcatttcaataaatttgtgctttcattgcttca

SEQ ID NO: 79461 - DNA, 153 bp, Homo Sapiens
cccctctcccctattttttaagtaccttggaggaggagaggttggtgacatgcatggtggggatctatggcctctggtgctttgtcctgtatttggtttaatgtttttgtcctaatcttcaatcaataaaattgtgcgtatttaactaaaaaa

SEQ ID NO: 79462 - DNA, 516 bp, Homo Sapiens
  misc_feature (19)..(19): n is a, c, g, or t
cggacctcggctctactgntctgactgggatgacatattacatgctgtagtacatttataattctttttccttgtttgagtatttctgtctctgaaataaccttttacttggcttttctagatagctttatttgatttcgagtggcaaaatgttttttattacggcttttctattgctgtatgatacagaactcttttggcataaatatttgtgttcccagtacctcacttgttcggatttgactgcctgtatatgttttgtgaaatggtcctgtttttgggtaggtgacacgtggactctagtatgtaaatgttacttgaatctgtgcttcataatagtgtgtggcatgtatgtgcagactcttggatgctttatgcctgcgcagcaggagccctgtcctcacgttcccaggagggcggcttcacccttcgtaaccaggagacaaggcggccatggatttgcccttgattctattttgctaatggaagatagaaaggagagaaggtagagccgag

SEQ ID NO: 79463 - DNA, 1077 bp, Homo Sapiens
tttgcactttgaggcagtttaatctcactttatcctcataacaagtctgtgaggtagatagggcaggcatcattattcccagcgggaagctgtggctcagaaaggttgacttggggtctaaaaactagtacaggcatctggtttgaattaagacctgtaaacgctagtacggagcagagaagctgagcactggctttgaaagttattcagttcccaggttgtccctgatcttcctcattccttgtgcagtcttcaggagtccggggcaagattccatgcagaggcagccaaagccacaccgttctctgtcccagggctgccagcatggctctgaggaggaaagctcagtaactgcccactggggaataaaggtcagttccatccttctgcagtgacctcccccagaatatcaaccctttggatgcattatttcagaagagatggttggatccagccagcttgcaacactgacagtcacacagagatatgcataccattgcgcataaatacacatctgcaacatgctgggcccagacaggtcaccatgccaaaaacactccacggacacctgacaatgagtgagttcacattgtggaagcccagggatttctggtgaggaggaagagccctggagctgcggcatcttgggggcctctcaagaaaccaaggttcctgaccagactgcttagaggagaaagattcagccctcgactcaagagaggagggcaggcgtcagcagcttttcctggcaatgtggagaagcagcaagagggcagagggcgaggaagacttcacagcaagtcccctccacccagggtcaccaggtgcaccgagaggtctcagcctacagaaaggttttttgctcgttgcttcttaaccactaatgatggcataaaggtcttccggtgggggcggcactgaggcctttcagggaggtccctggactcgatcctggggtcagagccatcaggaggggcagggggctcagggtggtggtggcttctccagcagatccggttgagcaggaccttgaccatgtgtccctgggaggatggcaagtggtacgttggcggccgc

SEQ ID NO: 79464 - DNA, 775 bp, Homo Sapiens; identical to SEQ ID NO: 6898

SEQ ID NO: 79465 - DNA, 1011 bp, Homo Sapiens
  misc_feature (586)..(586): n is a, c, g, or t
  misc_feature (685)..(893): n is a, c, g, or t
  misc_feature (911)..(911): n is a, c, g, or t
gagtaacacctctttactcagcaacgtgctcctccctcgggggaccttccccagtgcccctccatgctcgaagggcctggaaggatcagaatgcaggcctttcccaaggacggcacagaacgtgatgaggagatgccactgggggtgcagaaagctccccatccccctggggagaggcgtcagcgtgccctcagggtagtcaggtcctgagctttggactcctcgcttggttaaaggcactgtcccttgtgcaatctagaggaatgctcctcaaagcatctctcctggggaccaggagagccgcccctgctcccaatacaacaagatccctgatcgccagcctcttgcctccctcagagggagacaagtccgcactggagggagcacggctgcctagctccctgtcacctcctccacctctctatctgttcactgggacaacagaggatccctgaagccgctggaggagctggctttgcaggtcttcctccatcaccttccaccaagagaagttctcaccccgaacttttgggggttcatcctggatccctgggctccgaaaagccacggtcaccagcacattcanacagatgccatcactgtgatctcggcccaggtgctgcagtccaagcaacccttgatctcaccaccaagtggtgcagggtcacctcgtgccgaattcttnnnnnnnnnnnnnnnnnnnnnnnnnnnnnnnnnnnnnnnnnnnnnnnnnnnnnnnnnnnnnnnnnnnnnnnnnnnnnnnnnnnnnnnnnnnnnnnnnnnnnnnnnnnnnnnnnnnnnnnnnnnnnnnnnnnnnnnnnnnnnnnnnnnnnnnnnnnnnnnnnnnnnnnnnnnnnnnnnnnnnnnnnnnnnnnnnnnnnnnnnnnnnnnnnagctgcattatgaatcgncacgcgcgggagaggggttgcgtatgggcgctctcgctctcgctcatgaatcctgggctcgtcgttcgtgccggacggatcagtacccaagcggtaacgg

SEQ ID NO: 79466 - DNA, 645 bp, Homo Sapiens
gccgggggtcgtggtacctgcctgcggggagaatggagccaggggagaccatcgtggaggcgctgcagcgggaggtgaaggaggaggcggggctgcactgtgagcccgagacactgctgtccgtggaggagcggggcccctcctgggtccgcttcgtgttcctcgctcgccccacaggtggaattctcaagacttccaaggaggccgatgcggagtccctgcaggctgcctggtacccacggacctccctgcccactccgctgcgagcccatgacatcctgcacctggttgaactagccgcccagtatcgccagcaagccaggcaccctctcattctgccccaagagctaccctgtgatctggtctgccagcggctcgtggctacctttaccagcgcccagacagtgtgggtgttagtgggcacagtggggatgcctcacttgcctgtcactgcctgtggcctcgaccctgtggagcagaggggtggcatgaagatggccgtcctgcggctgctgcaggagtgtctgaccctgcaccacttggtggtggagatcaaggggttgcttggactgcagcacctgggccgagatcacagtgatggcatctgtttgaatgtgctggtgaccgtggcttttcggagccagg

SEQ ID NO: 79467 - DNA, 579 bp, Homo Sapiens
  misc_feature (194)..(202): n is a, c, g, or t
ataaaaaagcaggcataaaatacaattacattactacgaagatgcaacaaaattttaaaaaagaaaaaggggtgcaatttttttcagagaggacagctgatcaaatatttataattttctaaaccatgcagttcattacttattacaattccaaacaaaactcattattatggggatgggagtcagggagaggnnnnnnnnnaagcatgatatccagcgctgtcacacagtgcttatgttcaaagtgcttacaaatggtgtcttcacagcatagggaagctgaagccttattccagggaaggagaggtgagtcagtagcagtgtcaatgcagactcagaagctcggcagtgacttgctcaaatcagattttagacacgatttaaagcatgtttcagtaaggttaatatagtgtccgagtttctctactttaccaccagaatcctagaagagagtaacagcagcagcataacttcttaaaactgtggtgtggcaacctagagtatttctgtttaagatctatatataaatggatgcaaaatagatactttagagccagattcatgtaactctaacacagg

SEQ ID NO: 79468 - DNA, 1425 bp, Homo Sapiens
  misc_feature (57)..(97): n is a, c, g, or t
  misc_feature (101)..(135): n is a, c, g, or t
acgcaagcaaagaacacccaaatgatcgaccactatgggcgctagcgtcgtttcttnnnnnnnnnnnnnnnnnnnnnnnnnnnnnnnnnnnnnnnnnccgnnnnnnnnnnnnnnnnnnnnnnnnnnnnnnnnnnncagtcgacggtaccggacatatgcccgggaattcggccattacggccgggatcccaaagtgctgggataacaggtaagagctaccatgccctactcaatatgaaacttcagtgaaagaaataatggaatttactatgttaaataaggtctgaaagtggagaaagagaaacctgaagcaacagtaagaaaagccgaaggtttaaaccttcagtcatgtgaatatttacgttaaatatcatattgtgctatatttttgtgcactatgtatatatatattctgccaaatcttattttaagattaaacttctgacacaaaaagttgtgtcttatggtagcatagattcttgggtagaacgctcaaaacttgtcttcctcagaagcaccctactagtaagaaatgcgcttatagaatgacaatgatctttctggttccagagcaaaactcaatttaggtacaagagtttttcagtgacaagcagattaattttttagacccttcattctagctgcaaatccaactacaaacaactgggttatctttcttgaattaattcttattttcttgttaaacttagggccactgtttgtggaagatataatgacaatggtgctgtgtaaacccaaacttttacccttaaaatctctgactctggaaaaactagagaaaatgcatcaagcagcacagaatacaattcgccaacaagaaatggcagaaaaggatcaacggcaaataacccactgaatgataactgagcactttagggaacaacctgccttatctactatttaacaataactagaaaatatgcttctgtgtgctgaaagtagtatgtgttatcaataaaattgatagtattcatagaaatacaaaaatatccaagattgatgaaatttgtattgtgaatgtaaacactctggtttgtattgaacataaacagttaaactatgaaccaagttttatggggtttaagtcatgtttttagaattgcaaattaaattatttgttcaccattcctattgctatcttttatagataacattcttgggatcttttatagcattcttgggcacaagggattaaatacaacttttatatacagaggatctttacatgtttattaaatctgaatttgaagatacattccaatcttgcataaagtgtttgttgggcttttacattacgtaattaaaaaacaaaattttttaaccaattttatgtgccatgtcacgtttaatgctatcttgtgtgaccagatcccaccagtaatgacaaaactgtcttaaacctca

SEQ ID NO: 79469 - DNA, 466 bp, Homo Sapiens
cgccagtctcaccgttacccggggcaacagctgagccgcctgggaagggatgcatcttttcttctgtatgcttgagtcaagaactctaagtcatcttggtaataccgggttggatgcttaaagctgcagcaaaaagaccagaactttcaggaaaaaacactatatccaacaactcagatatggcagaagtgaagtcaatgttccgggaagttcttccaaagcaagggccactgtttgtggaagatataatgacaatggtgctgtgtaaacccaaacttttacccttaaaatctctgactctggaaaaactagagaaaatgcatcaagcagcacagaatacaattcgccaacaagaaatggcagaaaaggatcaacggcaaataacccactgaatgataactgagcactttagggaacaacctgccttatctactatttaacaataactagaaaatatgcttctgtg

SEQ ID NO: 79470 - DNA, 973 bp, Homo Sapiens
  misc_feature (30)..(30): n is a, c, g, or t
  misc_feature (128)..(128): n is a, c, g, or t
  misc_feature (324)..(325): n is a, c, g, or t
  misc_feature (336)..(336): n is a, c, g, or t
  misc_feature (339)..(339): n is a, c, g, or t
cccatagatgctggccaatgcaggcgcatntgcaacaacctgtccctcaaagtagtgcatccaacagccgcgtacagatctaacgtgcagcgtgcgagagtgattatgttcatctcccttgcaagctnacaagagtcggacagcctgatcttgtgcaatcgcgtcagtgctcattcccggaagggtagtctcctgaccttgagctcaaatgaccagatgtccgggaggacggactgagatgtgcgtcctgtacaagcgagtccacagcctttgtgcaggccatgatggagggtccccacacaaaagcagacctgcgagaatctnntcccagaaggntgntaagaagcacccagaatatgtaccgcctggccatgaccggggcaggaatcgacaggcacctcttctgcctttacttggtctccaagtacctaggagtcagctctcctttccttgctgaggtctctcggaaccctggcgtctctccaccagccagatcccccaatcccagatccgcatgttcgacccagagcagcaccccaatcacctgggcgctggaggtggctttggccctgtagcagatgatggctatggagtttcctacatgattgcaggcgagaacacgatcttcttccacatctccagcaagttctcaagctcagagacgaacgcccagcgctttggaaaccacatccgcaaagccctgctggacattgctgatcttttccaagttcccaaggcctacagctgaagcccttaggtacctgtgttttgtttgggaactcggaggccctccccctcccccagctcagaccacagaggtggcaagagaagggctgaagctggaagactgttcatgagggacttgtgtgacctgctttgaaatgtgtgactctgctgagtgacgtaggctctgagatagctgtccacgcccacgtgtttgcttggaataaatacttgcctcagaaccttcaaa

SEQ ID NO: 79471 - DNA, 380 bp, Homo Sapiens
tttccaagttcccaaggcctacagctgaaggttggagaaatgccagctgccctttcgtccccacactgtggaggaagggacctgtggcagctcacaggcatgaggggtggccgtgcacaggtgcccaggctccaaggacagctccggcagcagcccttaggtacctgtgttttgtttgggaactcggaggccctccccctcccccagctcagaccacagaggtggcaagagaagggctgaagctggaagactgttcatgagggacttgtgtgacctgctttgaaatgtgtgactctgctgagtgacgtaggctctgagatagctgtccacgcccacgtgtttgcttggaataaatacttgcctcagaaccttcaaaaaaa

SEQ ID NO: 79472 - DNA, 2403 bp, Homo Sapiens
  misc_feature (175)..(214): n is a, c, g, or t
gctaggtacgaggctgggtgttaatcggccgaggctgaggtctgctcggtaggtgtggcctgaaggagatgtgtttggctctcaagacatttctccagaggaagagatccagtggctgaaacaaatcctctctgctccacttccccggcagcagggcccagaggaacgtggggcnnnnnnnnnnnnnnnnnnnnnnnnnnnnnnnnnnnnnnnnttgcacagtggtccaggtgtcggagaaagaatttaattttctggactacctgaaacgctttgcatgttcaactgtcgttcgagcctatgtgctgctactaaggagctaccagcagaatagtgcccacactaaccattgcattgtgaagatgctgcaccggctggcccatgacctcaaaatggaagccctactttttcagctgtcagtcttctgcctcttcaatcgtctgcttagtgaccctgctgctggagcctacaaagagctagtgacttttgccaaatacatcctgggcaaattttttgcactggctgcagtcaaccaaaaagcctttgtggagctgttgttctggaagaacacagctgtggttcgagagatgactgagggctatggctccctggatgacaggtcttccagtcgcagagcacctacatggagccccgaagaagaggctcatcttcaggagctgtacctcgccaataaggacgtggaagggcaggatgtggtggaagccatcttggcccacctgaatactgttcctcgaacacgcaagcagatcatccaccatctggtacagatgggactggctgacagtgtcaaggacttccaaaggaaaggaacccatattgtactgtggacgggggatcaggagttggagctgcagcggctttttgaggaattccgggactcagatgatgtcctgggtcatatcatgaagaatatcacagccaaacgctcacgggcccgaatagtggataaactcttggctctgggggctggtggctgagcggcgggagctgtacaagaaacggcagaaaaagttggcatcctccatcttgccaaatggagcggagtccctgaaagatttttgccaggaagatctggaagaagaggaaaacctgcctgaggaagacagcgaagaggaagaagaagggggctcagaagcagaacaagtccaggctagcttagtcctttcaaatgaaaaccttggtcaaagcctgcatcaggaaggcttttctatcccgctcctatggctccagaactgcctgatccgagcagctgatgatcgggaagaggatggctgctcccaggccgttccattggtgccactcacagaggaaaatgaggaagccatggaaaacgaacagtttcagcagctgttgcgcaagctaggggttcggccccctgcctctgggcaggaaaccttctggcgaattccagccaagctgagtcctacccagctccggagggcagcagcttctttgagtcaaccagaggaggaacagaagctgcagccagagctgcagcctaaagtccctggagagcaaggctctgatgaggagcactgtaaagagcaccgagcacaagccctgagggccctcttgctagcccacaagaagaaagcgggcctggcatccccagaggaggaagacgctgttggtaaagagccgctgaaggcagcacccaagaaacgacaattgctggacagcgacgaggaacaggaagaagatgagggcaggaacagagcaccagagttgggagctccaggaatccaaaagaagaaacgataccagattgaggatgatgaggatgactgaagagctaagaagcctaggggtagagatagacacgtttttagatggtgcattcaagtcagagttggaagggtcatacaggacccagaagctcctcttactggacagagcagtagaatcccaggctctttcacggatttaggctgagaaacttcagcagcagtattggacttctctgctgtcagtctttgtttctcccagtttttatcggtatgccccagcagctctctggagatttagttctcttcttctaggaaccatttcttttggttattggagctccttagcaaataagaggagtgagtgaaatagagaaagcaccccggaccccttttattggtctgttcctttggctttctcttggaggtgggtcgcagcaccagatggggagctttatgacatgacaggcgggagttttgtaccacttttagaagataccagatgcctctgtcctcattttgtttcctatgatcatcctctagataccagatagaggcccattcctgcatttgagatagggttggaatatagtactctagatgatgaatgtgtttgctttgtgtttggtattaaacatgtaagattagaagttctcaa

SEQ ID NO: 79473 - DNA, 2064 bp, Homo Sapiens
gcgagggcgagggcgaggacggcggccgccccggggaggcaggctggcaggtggacaggcgggcaaggacagctccgcgagccccctacaactcgtttccttccgttcaccttcgcagggcggcgactggcggcgcgatggacctgaccgggctcctgctggacgaagaaggcaccttctccctcgccggcttccaggacttcacgttcctcccaggacaccagaagctgagtgcccggatccgaaggaggctctactatggctgggactgggaagccgactgtagcctggaggagctctccagcccggtggcagacattgctgtcgaactgctccagaaggcagcccccagccctattcgccgactccagaagaaatacgtagctcatgtgtcccgggaggcatgcatctccccatgtgctatgatgctggctctggtgtacattgaacggctccggcaccgaaacccagactacttgcagcatgtgtcatcctctgacttgttcctgatctccatgatggtggccagtaagtacctctatgatgaaggggaggaggaggaggtcttcaacgacgaatggggagctgctgggggtgtggccgtgcccactctcaatgccttggagaggggcttcctgagtgccatggattggcatctctacactgaccctcgggagatctttgaggtgctgagctggttggagagctgtgtggctgagcagcagggacggtggcgaggctggtacacctacacagacctgtgtgtgctgctggagcagccgacctggcagttggccctgggctccctctgacagcggctggtaaagctgtcttgcctgttagctgtggcatatgtgaagcagttgtggccctggctgtggcatcggtgggccgtaatacatccagtctttggggctgtcctgcacccctacacctgggccgcctgaccttggactgacctcccgttgcctcctggagccctgcataccttctgtgccacaatgcctgccgtctcccgctaatgtctccagctgcctggaaggcagcatggggctgcggtcactctggggcagtcttctggcctcactgactcctccaccattgcctcccccagacccccctgcccctcccactcttcttcataactgccacctttgccagaagctccagagagactccccaacctgccatgcctgcctccaccccaaccgtacagtccccactgcgctgtccagcccctggtaccatacctatggcctggctcccccctggccttggagcccggtgcccctttcacttcctcagcctcagcaatgtcccttttcagtgtcatggagctggctcgcctcaagtctttcgttttcccaggctaggtagggctgtgaggaatgcattaagagggtttgggagtttctgagaacctggaggagcaaagcttgattcagatcctgtctgcctcgctgggtccttggcaggtcccctgtcctcctgggtgggagcttatggggtggtggggcagaaggactgaaggtaattcactcctagatcgcagtggctggctgcttggccaggacagtgatgccaccagggagagcttccgcttggtgaccagggacatgtcccagatggacatagaagcccctctctgcctccctgggattttttagacttttacttttgatttccctaggatggaagagtataggtgggagataagggaagtggggtgagaggagaaaggaaatgttggcatgggcctgtgtgatgtccctgaggcagaagagccggggactgatgggttcaggtgggagctgctgggtgaggcagggaacccttttcactcccattccttagctttagtctaatggagccaaggactgctgggaccttcaaccctgatcttttgtcttccagtcttctcttagtgtcctgctcctaggtttccctctcttctggttcttctcccaggtattctcttcccaggcctctctggccactgctttgtatcagggtttttcacgcttttgtagaactgaggtttcaataaacagtttcagttgcaaa

SEQ ID NO: 79474 - DNA, 477 bp, Homo Sapiens
  misc_feature (17)..(17): n is a, c, g, or t
  misc_feature (67)..(67): n is a, c, g, or t
  misc_feature (85)..(85): n is a, c, g, or t
ctgctatttactaacanatggttgaattggccttatggagacttttcaagtttccttatttttaagnctgaatgctatcccagtnttgtacgtgccctgtttgctgaatctactcatccttaagggtacatttgcttccaggtaacatgtttgtgagtaatactacaatgtgcatatatctattccatgttctgctttgtctgtttgggatatttttcatacactgattcagtaccatgtgtattcccttgcttttgttgtctcatccgttgatgttacgtcccccaaattattgccacgaccagttgtcatgaagcttcacccttctgtattgtgctaggaattttacagctataggttttacattatagtcttcattcattttttaaaattgacacatgtaattgtgcatattttggggaaacaattatatatatatgttgtataacaataaaaatcagagtacttctaaaaaaa

SEQ ID NO: 79475 - DNA, 1032 bp, Homo Sapiens
cacgttccttctgctttatttcctctccctagtgaaacattaaacacaggaggaaaagatacagatgtagccatcagaaggaagtgaggctgtcattccaaatggccccccaccatgaagaaacccaggcttcttaaatcaggaacctcacgtctcagttttccctcaggtttctttctgtggtgtgaggacagaaacaggcgtccctgcattcctcagcaatcctctccttcctctaaaggcacgggagaggatttccgagcgcctgcgatgctgtggggaaccgcaggctgggcaccgtcaccaacgcgtcacaacagagcaaatctgcatagccttccccaactaccaccgaaaggatggctccggctcagcttggtgaacgctcattaaacaaaaagcacactcgagtttcctagcttcattccaaaactgctattgtggcacaacaaattcacaacaaattcacatcggagtcccctcgaccgggagctgcgggcctgggaatgcacagcacaggcagaagcattcgtggttcgtcagctcctggcagacgggactcacttcacggacacacagacccacgatcttcatgctattagggtaatttcatcttcacagtaaaaaatcaccaattcccagagaaacggagcatcagcccagctgtcgcacagggtctcgcgggtgctggtcacgggacctgcggccactccaagctaatgaagagccgtttactccggaggtgagtccccgagggaggactgaagtccaagctaaaaaggcggcgccagcgaagcggaggccgcttcctccagggaagagcccccagccctcccgggcccatccgaggcgccccacgcgggagcgcacggtggccggaggcggcgcggagccgagtgtgaggagggcagccgccgccacggcagtggccccacgcgcgcctcggtggcaggtgctccagcgggcggggcacgcggagcccgggctgtaccggacagtcctggaaaaccacaggaaagctacgcgagggtg

SEQ ID NO: 79476 - DNA, 1266 bp, Homo Sapiens
  misc_feature (78)..(124): n is a, c, g, or t
  misc_feature (139)..(181): n is a, c, g, or t
ggatcatatggaaattgatgctttagtgagggtgttggctatcctattgttaatttcctgcatccttttttcttcttnnnnnnnnnnnnnnnnnnnnnnnnnnnnnnnnnnnnnnnnnnnnnnntgttcctgggctcannnnnnnnnnnnnnnnnnnnnnnnnnnnnnnnnnnnnnnnnnngtgtgagccactgtgcccagcttgtccttttttcattacacaaaaagactgaatttggttagttctaagttggaagataaagatggtatgcacaggaggcccttgggagccctcagataactttctcattcttccaaaatcaggctgggatgcattctgtaaattttccctgcctaggatgtatacctgaggaataaggtaaggaagatgtcagcaagtcagcctctggtttacctgctagctggcatggatccttaaggaagcaggagggagttgggaagagaggaaggggtgaagttggtatcttttaaagcgagagtgattttacctcagattttgaagaatactaaggaatccagttgttggggtacatgctattattagaaggatctagataatttgtcctctgagtcatacttgacattgtacctgtggcacatcaatccgcactgtttgatactctggctgaatctcagctttcaccaacattgtcaaaggaccttttttagtgcccagccatgcctaagagtgtgtcatctgaagagggaagcatctgcatactgctgtcctgattgctcagtcctcactacctaccagacccgttggtaaggtacaaaagtacatgcttggaaaagcagtctgcaccaccagtgataagctgtgacagagtggaacagcctcaatgaaatgaaggaaggattgctacagtggcattaaggatggtctcttaatcctgtgttaaccactagattaactttacaatcaactcaaaatccttcaaaggctttccactttctttagtggcattcagaccccctctagtttgacccctacctccaacttgaacctctgttactcttccgtatgaacattttcctctagccctggactactagtaccgaagtcactagtcacataggactcatttgaaatatgactagtctcaattgagatgtaatgtaagtgtaaaatacacagcagatttctaagacagcacacaaaatgtaaaatatgtcaaaaatatttgatactgattacatgttgaaatatatgtgttgggttaaataaaatgcattaaagttaaa

SEQ ID NO: 79477 - DNA, 1026 bp, Homo Sapiens
  misc_feature (76)..(76): n is a, c, g, or t
  misc_feature (105)..(105): n is a, c, g, or t
  misc_feature (249)..(249): n is a, c, g, or t
  misc_feature (719)..(967): n is a, c, g, or t
tggagcctgtgtccagtatcaagactgaggatccatggagaccttcatgtacatgtgtagcctcatctgcgttccntcgagactgagcactccactgatgaaccntatatgtcagttggaagcttagtgattctctccttcaaatctgagacactcacactgagagagccatatgagttaaggaatgtggaaagcatcagttgttcaaataccttgctcaacataaaagacccacacagtagaaaaccntattgagtgtaaaacatgtagaaaagccttcagtcatttcagtaacttaaaagtccatgaaaggattcactctggagagaagccatatgaatgtaaggaatgtggaaaagcattctcttggctcacttgccttctacgacatgaaagaattcacactggagagaaaccctatgaatgtctacaatgtggtaaagccttcactcgttcccgtttccttcgaggacatgaaaaaactcacactggagagaagctgtatgaatgtaaggaatgtgggaaagcattgagttctctccgttccttgcatagacataaaaggactcactggaaagatactctctaaatgtatggaatgtgggaaaacattcagtactttaatttcagaaacttgaaagaactcactttggagatagaccctatgaatgtaaacatgggataaagccttaagtagtttcaatttttttaaatacagnnnnnnnnnnnnnnnnnnnnnnnnnnnnnnnnnnnnnnnnnnnnnnnnnnnnnnnnnnnnnnnnnnnnnnnnnnnnnnnnnnnnnnnnnnnnnnnnnnnnnnnnnnnnnnnnnnnnnnnnnnnnnnnnnnnnnnnnnnnnnnnnnnnnnnnnnnnnnnnnnnnnnnnnnnnnnnnnnnnnnnnnnnnnnnnnnnnnnnnnnnnnnnnnnnnnnnnnnnnnnnnnnnnnnnnnnnnnnnnnnnnnnnnnngcaggcccaccctacgtggtatatgtcaccccagaacattaaaatttgttttaacattc

SEQ ID NO: 79478 - DNA, 651 bp, Homo Sapiens
aaagcacggtgcttgacaatactatattgaatgcaataaaagttggatttcattcatatgtacaacaaactactttcttcttcacttcaagattcggtacaactgttcctgaattccaactctccatacatcccaatgtcagggtccctgtagctcggagcccttatccaggtagatgaactgctgcccagtgaacactatgtacaaagcaatttgagcaccattctcttttctggcagtgaggtaaaatcaggtctttttggaaggggagaagccacattgcatctctgctacacacaagattactctgtcattgcctttgagtctttcacgctcccttcttctgaagcatcagtttttatggaaacttatcacacctgtcttgtgggcacatcttgctccatccctcctctcttcatattgtccgttttccggtattgagtaagggaaagtaggcaggtattccctgtcattcctgactgaggcttggtgtatctgtcaaaagagagaaaaggtagggggcattctgaaaaatgatcactcatggcttgcaggagcaagaaccagacaggactttgcaactggcagctttctgagtggataagacctccacctctagactatctcttcagtcatgggtagccccttcag

SEQ ID NO: 79479 - DNA, 766 bp, Homo Sapiens
  misc_feature (59)..(59): n is a, c, g, or t
  misc_feature (77)..(77): n is a, c, g, or t
gaaggggcatcagagccaccaccaaagcaccagcacagagtagcgccagctacagcccntgaggagccctcccgctntctgagagggctccccaccgccactccatgccggaactggggctccgcagtgtccccgagccgcccccagagtcccccggccagcctaacctgcgcccagatgatagtgccttcggtcgtcagagcaccccacgcgtcagcttccgcgaccctctggtgtctgaaggaggcccgcgccggaccctgagtgcacccccggcccagcgccgcaggccacgcagtcccccacccagggcccccagccgtcgccgccaccatcatcataatcaccatcaccatcacaaccgccacccaagcagacgtcgccactatcaatgtgacgcgggatcagggtcagactcggaatcttgctccagctcgccctccagttccagttccgaatcatcagaggatgatggcttcttcctaggagagcgcatccctctgcccccgcatttgtgcaggcccatgcctgctcaggacactgcaatggagaccttcaactccccatctttatcgctccccagggactctcgcgcagggatgcctcgtcaggcccgagacaagaactgcatcgtggcttgaaggcaggccgtcctggagggggctccattctccagtcagagtagatgatgaggcccatgcccctcacccccacgccccgcccctacaacctaagtcataaatcctcttcctccctcctttaaaaa

SEQ ID NO: 79480 - DNA, 1191 bp, Homo Sapiens
tgttaccattctgatgttggagccggcgccgcgccaatagccggacggggatctgagctggcaggatgaatgtgggggtggcacacagcgaagtaaaccccaacacccgagtgatgaatagccgaggcatctggctggcctacatcatcttggtaggattgctgcatatggttctactcagcatccccttcttcagcattcctgttgtctggaccctgaccaacgtcatccataacctggctacgtatgtcttccttcatacggtgaaagggacaccctttgagactcctgaccaaggaaaggctcggctactgacacactgggagcaaatggactatgggctccagtttacctcttcccgcaagttcctcagcatctctcctattgtgctctatctcctggccagcttctataccaagtatgatgctgcgcacttcctcatcaacacagcctcattgctaagtgtactgctgccgaagttgccccagttccatggggttcgtgtctttggcatcaacaaatactgagggatgggttttgggacagctccatgggcatggggaaggcactgaaacagaggactataaaacatccttctcttattctccatactgtcttctacacctttaaagcctgagaactatacaacctttcccagactcccaagaagagaagagattggcaaatggggctcctgggcccagtcctgctagtggcaagtttctttgaatcaggaaggcaggtgaggtaagggccaaatcactctcctccatagcaggaagccatttgggcagcttctttggtgattacatctttccatatcttttacacttaccaccttccagctctgttttgctgtgtatttttcttacaataatttttttcagctatagctgcagtttaatcaggatgggtagagagctgtcctcataaggctgggggtgggaagatggaatactgacctaatgtataaaacttaaaacaattctccaatcccctctcctttggtccagtaggaggtgcccttcactctaagcttaacacttagtagggaagagattctcaaatgagaaaaagggctccggctatatgggcaacaaagagggaagatacaggttgccagttatacatttatagaaagataatcccctggctttaaatagtcatgtacatacaaatatgaacaaactt

SEQ ID NO: 79481 - DNA, 731 bp, Homo Sapiens
aagtatgtcagttacttagaacaatcagaaaggggcagaacaagctggggtgtggagtcaggggtcagggcacagacagcatctcttgtcttgcagagagaatgctagcaatttgcaagttacttgaaaaggtttgtgattttccaacgccctgagtaattctagccaaaatgcgtgactcgcctcacactagatgcttgctgtaattgtgtctctgtattaaactgaccgttctttggagcttcagaatggaccaggaggaaaaggtaaataccaacctcgctacaacctcagaggcatcaacgccctcctgctacagacgcatctgttcatcgcctggctcctgccggctgccctgggagaggccacaaaatgccctccacggagacaaggcctgagaaccttcgggacgcccgctgccactcactgtgttgaagaactgcccgttccgcaccccgggccctacacacacggctctgcggaggacgaggaagtgccgtcaggtgagacttcaccgtgaaatatcttctgagacacaacaatctccctgaattaaaactacagactctaatttataaaaactgtctgtttcaaaagctccaagtgtttacattctccatcattccttcttctaatttattttaggaaataatgcagagtactcacaaaaatttatatagaaagatgttcattgcagaattcattataataaaaacctttaaatgctcaaa

SEQ ID NO: 79482 - DNA, 991 bp, Homo Sapiens
  misc_feature (654)..(766): n is a, c, g, or t
  misc_feature (782)..(794): n is a, c, g, or t
ctttggaaaataaatttaatcggaaaaaatacttgcaacataccgaaaatctctctctatgtataagtgtatgtgtgtgtataaattaacaattttatgttagatattaatgcatttttaaatgcatagataggtgctatttgacaagtatagttatataaactttacatagaatctctaaagtggaacaatcctgagatttgatttttagaaagtttgatacagatgattaggttaaagtgtttatagtcagttacatttttttgagtatgtgtgtcaaatgttccatttgatcctttctaggcaactgggacatctttgagaataacttgactaaataacttattttcagagtaggcttgcaaagcaagttaaaaaggcagagaatttaggccactgaactgtacatgacttcaatcagaaggtctttggggggataattaagcagtcatggtataaactgtctttctgaaacacaagattttaagcctgggatgcttcaaatttcaaaaaagaaggatgattctactacaatggtgatagcttttaaatgttcgctattttcatttagattctgataaggcataatttacactgtggtgtgtgcacctcagatgtcagcaaaaatttgagttcaaaaaagattgtactggnnnnnnnnnnnnnnnnnnnnnnnnnnnnnnnnnnnnnnnnnnnnnnnnnnnnnnnnnnnnnnnnnnnnnnnnnnnnnnnnnnnnnnnnnnnnnnnnnnnnnnnnnnnnnnnnnccaaaaaataacttannnnnnnnnnnnntgcaccctatggtccccactctctggaggttgaaaccaggaggatgtcttgaaccccccttaattaaagcttgccccgcacctatgaattggggcattggactcccgatctgggcggacaaaccaagccctcgttcttccctcaaccacacacacctcccccttgtatttgcaaagatttccgggcaacactcgagt

SEQ ID NO: 79483 - DNA, 1015 bp, Homo Sapiens
  misc_feature (38)..(38): n is a, c, g, or t
  misc_feature (40)..(40): n is a, c, g, or t
  misc_feature (42)..(42): n is a, c, g, or t
  misc_feature (59)..(59): n is a, c, g, or t
  misc_feature (80)..(80): n is a, c, g, or t
  misc_feature (121)..(121): n is a, c, g, or t
  misc_feature (154)..(154): n is a, c, g, or t
  misc_feature (180)..(180): n is a, c, g, or t
  misc_feature (187)..(187): n is a, c, g, or t
  misc_feature (209)..(210): n is a, c, g, or t
  misc_feature (218)..(218): n is a, c, g, or t
  misc_feature (237)..(238): n is a, c, g, or t
  misc_feature (690)..(727): n is a, c, g, or t
tgaacaagacagcgtcgatcctacaagaggccaccaanantnttgaagtggctagcccntgtgtgtgtgaactcagtgcntcagacattcatgatctcttgacactcagatagctatcccnacagagagcttgaacatgctgcattgcatcagntcaaatgagcgagagaacattggctnaaatatntgatgaaatctactgcagtgtnnccaaaagnttccgtatgacccatcatnnaacgaagcaacagcagtcagatccatacaaaagacagacatgagaaaagaaccagcatgcttggattctcctaaaccagaatatttccttggcagtgtggacaaaattcctgataaagatcacctttcagaggagaagaattttaaagaatcctgtctgttcgacagggatttaagagagcagttaactactatagataaagaaacacttcaaggagcagctaaaccagatgctcactttaggactatgccctgcgggcagcttctgcacttcctgcagaggaacaccatcatcgccaccgtctcaggggtggccatcctcatggccatcgtgctgttgctgcttgggttggcctcatacatcaggaagaaacagccatcatctcctctggcaaacacgacatataatatttttataatggatggaaagacatggtggcacaattctgaagnnnnnnnnnnnnnnnnnnnnnnnnnnnnnnnnnnnnnnttgaagagcagctcctgtgtctaagccaggtcgtggggccgtcaaaccaggacttgaaaccacaatgcgaggacattctccatctgcgcaccacagggaggcaattccatttctgcccgggaggtgtattctacaaaaacgtctgcttcccatcccaatttgaatggaccaagaaaaactgctttaccataggacacttgtggcaatatggcaccgatggctggcgtcggtgaacccgacagactatggatttatcatttaataaagcattgattcattttttcagtc

SEQ ID NO: 79484 - DNA, 662 bp, Homo Sapiens
  misc_feature (52)..(52): n is a, c, g, or t
acagagcttaggtaaaggcacacactcatacacacacaacaaagggccctgntaacttactcctcatgctgcttcagtgacctttgttcatgtcacattcctggcgctggaaaaaaaactcaaaggttgattggttgctttttcaccttggacacatttgcattttacccacaaggcaaacaaaagaatcaggaagtaaaaaatggttgggagtgggacaggtatggtaccgaatttttaatgaacattgtaaatgaagaggcttgaatgacagcccaaatctagagaaggcactcagcaagaccaaccaaaagaaaagctgtgtcgtggtatggggccaccgtgatcagctacctggggcaggatgcttctgagacaggcctttcaactgcttagtgttagtatgtccttgcttatgaaaatggggacactcatcagtacgttaactactaaaggggagatggttctccaaccacttcataaaatatgtatgttctgttgttcctaaggctttgataatatcctgtacagattttggtttagttttgcaaatatattgctaataggtcactcttatagattattgcttggcccttcaaactcagtacacacacactgaggccctttgacctagtgttttatggaactatttgctttgagag

SEQ ID NO: 79485 - DNA, 897 bp, Homo Sapiens
  misc_feature (630)..(647): n is a, c, g, or t
ggtgggatgttttgcctttaaaatttttatggcttagtgtgtaatttaatttttgtctggacatgcttgagatagaagaggtactggatatatgaggatattttccatgctttatttttcctgtggctactagttagcattccataggggttgtgaatttttaattatttgaatattttgtgtacatatacatatttgaagggttttgggggggtcttatttgtttaaaggtgtcttctgtttgcctatttcaagtgtacttcagctttgcaaagattatagggctgtatgttacagaaataggaaatgctggccctgtactggggaccactacaaaaattccctttagccgtgagccactgcgcctggcctaaatttcataacagaaccatgacagcagaatctacctttgcaataagaatgtttcccaggagttagagaccagccctgggcatgatggtaaagaccccagctaattatacaaaaaataattagccgggtaggtggagtgcatctgtggacattcgtggtcccagctactaggtaagctgaggcgggagatcacaagtccaggagtttgaggctgcacgtgacagcgtaggtgatgacagagcgagacactgtctcttnnnnnnnnnnnnnnnnnngtttcccagtttgaatttgtattgctgaagcatttttttgaaatgctatatagatgcctgtcatgtcacagtggcccagtatcaacattttaaaaagctcacttggtagctgggctggtttctattcctgagaaattccagaatgcctcagataaaattccttagtataatccccattttccttaccaaggatggtaggcttagtcactccttgggaggtgccacaggaaaattcagcagatgtcaacag

SEQ ID NO: 79486 - DNA, 782 bp, Homo Sapiens
gaagatagatttgtcacataaaaaatgcagcttatttgtagtgttttgaaaggatgtaagaaaggatgagtggcttcagtattgagtcaatcgatatcaaatgaatggatgtgtgagcacatggaaaaatctgctgtcagtcacatttctcataacattgaggtacagtgccgagatcttgcataagaaattgtatggatattagttggcaaaattgaaatgaatgagacacagttgggccctaaagaactaaggagggggattgacaaagaatagaattaaactacttgactcaatatgttaagagagtttatgaaaagatagtcgtgaagggtgaagctaatttgtaaaactaatgcctgaaaaaaacataagcatgaagtccatggagagggaattgagagctgacacttcataactggagaaactggaaattaaagaaagggaaacaaaagacttaaaatttttgtttgccgaaatttttacgaaagtaaactgtgttgtagttttaagaatttttttaaaaaatctgattagctgagcaaagttaccagaaaactgctatcctagttgaaatcaaacattacttgcaaatgtgttttctgagtgttagcttcctgcttaaatgttacatatgcaaaattctgaagttttcctgtgctactcctgaaagcattcagaatctgtgacacgtattgacttcatgctttgagattcaaaatttattgttctgaaagttatatttagaatcagtaaatcttgatattcacctttaaaaaaaa

SEQ ID NO: 79487 - DNA, 744 bp, Homo Sapiens
  misc_feature (74)..(74): n is a, c, g, or t
  misc_feature (105)..(105): n is a, c, g, or t
aacatccagcataagtaaaattgcattaaatgctgatgggggggagatataaataataagagacaaacctatcntcaaaaagactagtaatgtgaaataaacatntgcatgaaacagtaggattgaagaataagaacaaaagagcactacgtgtgagaagctcacttgaaagtcccaaattgaaataaacactgttttgatgagaaggggcctcctttttaatattctttccatgtggaatcatcagcagtaaagagatctatagatctggaagcagaagagctggctggatggaggggactttgctgacatcccctctgaaaaataaggtcagaagagtgggcccagggggagggtgattttcatgatccatggcatttcattacccttgtaaacagatactggagctgtgctcatagccaaactggaaaactagattatttagcaggttttctttccatagctgagccataatcttcccttaggagagatactgtatcttatccttgatggtacagtcagtgcctagaactgaaaaactactcaataaatggatttgttgttttgtgataaggatgatgtcttcttactttgcccaagcctggaaagtaggccaaatatataatagagtttctttcatcttcccagctcgagagtcaggatgtctcagatttaacaacagttgaaagggaagactcatcattacttaatcctgcagccaaaaaactgaaaatagataccaaa

SEQ ID NO: 79488 - DNA, 1190 bp, Homo Sapiens
  misc_feature (59)..(59): n is a, c, g, or t
  misc_feature (70)..(70): n is a, c, g, or t
  misc_feature (87)..(87): n is a, c, g, or t
  misc_feature (102)..(102): n is a, c, g, or t
  misc_feature (106)..(106): n is a, c, g, or t
  misc_feature (711)..(771): n is a, c, g, or t
gtgcctgtagtcctagctactcaggagacttgaggtgggagggtcactttagcccaggngttccaggctncagtcatgccgctgcanttccagcctaggtgnttgngccaggccctttctcaaaccaaacggaacccaaaccaaaccaaaactctcttggaaaggttttctctctgaaagcaagttcccctgtccagaagatgcttatggcccacggtatcttcttccaactggtcaagacagttaaatacttcaaaatgccccaagaggtcccaaaatttagtcaaggcaagtatcaatcaggctacatactttctaggtgtgacaaatatcagagttttgagaaagacattaaaatcatcatggaatccttggaagcctgagatactaaagcacccaatgccagaccagtcttataggaagtctggaaccaatacttcttccgtcagtaacataggcctttctagactttggtctagaagaagatgatttttttgtgcttcgagttagggatctgtccttttgactgtaaccttctaacggcttccctcatatgtttggttgtatggtgcatctctccccacttctcacacacatccagtgccttttgatggctgccttagggaaagctgagcggcgatacatgttcataacggttcagctgctcctcagaaaaagaagaaaccaggatttgcatcttctgaatctcannnnnnnnnnnnnnnnnnnnnnnnnnnnnnnnnnnnnnnnnnnnnnnnnnnnnnnnnnnnnctgcaggattaagtaatgatgagtcttccctttcaactgttgttaaatctgagacatcctgactctcgagctcgccttcctccgctgcagcttctttcaagtccacatctgcgtctccgtcagtttcctctgggattccatcggtgtcggtagcccccgggtccccgggcacagcggccgtctcatccgactcccctgtctctccacctttgtcggagggcgactcgtgggcatcgtccatcacggataggattggaggggagaggagatcgcggagatgcctgaggcagaagctcggcctcgtgccgaattcgccacccagcctcgctaccttaggaccgttatagttactgccgtcccgtttttaaagaacaaaccacctgctgtggtttttgtaccaaatctgtgtggccttcagg

SEQ ID NO: 79489 - DNA, 998 bp, Homo Sapiens
  misc_feature (356)..(405): n is a, c, g, or t
aaactaggctagtacgagccttgggttgaattcggcacgagggcagctcgggtttctgagcttctgcctcaggcatctccgcgatctcctctcccctccaatcctatccgtgatggacgagtgcccacgagtcgccctccgacaaaggtggagagacaggggagtcggatgagacggccgctgtgcccggggacccgggggctaccgacaccgatggaatcccagaggaaactgacggagacgcagatgtggacttgaaagaagctgcagcggaggaaggcgagctcgagagtcaggatgtctcagatttaacaacagttgaaagggaagactcatcattacttaatcctgcagcnnnnnnnnnnnnnnnnnnnnnnnnnnnnnnnnnnnnnnnnnnnnnnnnnntagatgaagatgagattcagaagatgcaaatcctggtttcttctttttctgaggagcagctgaaccgttatgaaatgtatcgccgctcagctttccctaaggcagccatcaaaaggctgatccagtccatcactggcacctctgtgtctcagaatgttgttattgctatgtctggtatttccaaggttttcgtcggggaggtggtagaagaagcactggatgtgtgtgagaagtggggagaaatgccaccactacaacccaaacatatgagggaagccgttagaaggttaaagtcaaaaggacagatccctaactcgaagcacaaaaaaatcatcttcttctagaccaaagtctagaaaggcctatgttactgacggaagaagtattggttccagacttcctataagactgtctgcattggtgctttagtatctcaggcctccaaggattccatgatgattttaatgtctttctcaaaactctgatatttgtcacacctagaaagtatgtagcctgattgatccttgccttgactacattcgggacctcttggggcacttgaagtattcactgtcttgacagttggcagaaga

SEQ ID NO: 79490 - DNA, 920 bp, Homo Sapiens
gccggaattcccgggatatcgtcgacccacgcgtccgcccacgcgtccgcggacgcgtggggtgtaataaaaaagaattacctaggttgccaaaggtaatttaggaagggtctgatcatttagatgagagttctttggggcttattttctgggtaaggctcatctttaaaaactggcttcagaggggagaggggagaacaatgaattggctctattttctctattgggaattacaggaccattttgattcttagaatgtaaaaagcatatcgctaagtaaatcatcctggaggtcccaagtagctctatgcctgcaatcatggagacacaggcagacagataagcttcatggggaaggcatggggcatcctctgtcttgggatttgtatccatggtggtctggtccctgccttttaatccgtcctctacgcttgggcttttctgttaccaaacagcactatcccaggaactattgtctgcctgggaacactcagtagggagacactttggagacaggaggtgatgaacctttttatgtgcagctggtatgatagaaggaaattgggaaaacttgtatgctaggcacttttgtccagagcctgctgtcccatggagaaaaagttttaagcactgaaaaaatttgattaatgtatttaaatgtattatttgaagcatcattcacttgttgatttttacaatcccatgtcttaaaaaggatgaatccatgttattgtattgtaaataatttagattattaaaatggattgtttaaaaagttttaaaacagaaaagaccaccataaagggcggcccgctctaaagaatcccccccgggggcccaaacttaggccgtacccggctttctcttgaccaaaggggccccctaaggggagccctattataacactaagccctggccgg

SEQ ID NO: 79491 - DNA, 1037 bp, Homo Sapiens
  misc_feature (18)..(18): n is a, c, g, or t
  misc_feature (59)..(59): n is a, c, g, or t
tcattcacatgctgggtntgcaagcgagaagccaggcagtggaggaactagagagagcnaggcgtgtgtgtggacaagcgctggagccgcagccctcagactggcacgggaacgccagcgttgggtgttcagattccacgcgtatgtctgggctcactcacagcatggccgagtgtctgcagtgctggtcctgacccttccagagcagcagtggacagatgagataagactgtttcagaaacaaagatggccacagccttcctaacaagcaggtcatctggccatgtctgtattgtaactggtaaaaggcttcaagtcagattgatgatcaagaaaagtcaaaaccccagcccaagattgggaaagcaggtggtggttccaagcttttaaaaaattattgaagctctccatcctgttctgtgagtgtgtcttctctttctccttcacgtcatagccgtgacccaccgttcatctctgctcttgcgtaaagatgaccgatggagtccaaagccaagtggcttcaccagctgacaagccaccctcctgcagcctgagtttcacagtccactgggttcgttgtcatgcggtgtttgaatggttaagcccttgcagtatttcagatcgggcaaaaaatatcggatgcacatagcagaaccattggtggtatttatagctttgctttgtactcctcactgtttctgcctacgcaaaatatccatgtttcctctgagaaatctgttgtggactgaaagcgctgctggctgtgaaatttaataaagtgtgtatgctttgctagaaaattatttcttggacaataggaacagccattgatctgtaaatcctgcctcttaacagtgagtggccaaggactggatcagcccatttctgggaccctcagggctttaaaatttaagtagcactgcattttgtaatgttgaatatgactctagtgacttgtaggaggcacttgtgaggagatgcttgcttcagtgtaaaagatgctcatggcctgagtcagttgagttttctttcaagaa

SEQ ID NO: 79492 - DNA, 775 bp, Homo Sapiens
  misc_feature (30)..(30): n is a, c, g, or t
gaggaggtgcagagccagcagaggattgcnataaaactgaaaaggagtctgtctgcatgagaaaggatggcaagtctctgaggtgacctcagggtggaattctctgttaagtccaccctgccccagggtgctcctaccctcttggtctttttaaagtcaaggtgcgatttgggcacctgactgtccagtttaccttaacaagtttgggaatccatgtgatgtttttgatacttcttcctcatttgggacattcagtaggagcatttgggcttccggggcccctgagaccaaagaagaggggccaagtaccctgggaaatcagctgaaggtcaacaaaagactggttgtgagttgcagctgtcccgaaggccccagttgggaagccatgggcagtccagatcaaagccaccaccgtgccctacgatggcctaacaggaagtgcccattggcagattacacaatgtaaatatgacctcagacaaaaaggaaccagaggcccaagggcaataataaggtggaatttgcaggtcagcccaggaattggcagaggaagtaggtgtctgataaccctttgtggagaatgagattccccccacctgtgtgagaaaaataaacagctctggagtcttgttcctgactccagaggaacgagagcattccaggaaagagagattccctggaaaattgaaaatgtgaatcctagggggaaattggggattgtgtctttccctgttgaaaatgtttggatgggaataaatatcttcaggaaaaaaaa

SEQ ID NO: 79493 - DNA, 850 bp, Homo Sapiens
gcaatcacttctgatccagcacttcgtcaatttgctgaatattctgcaaagccacctgtgaccatgggtcaagaacaggaaaatgctggatctctttccttcagtactctatgaatgtgtacccaggagaccccagagatgttgccctgcatacatagcaatggatcaggctataaaaagacttgggagaagagaaatgtctgagacttctgaactttggcagataaagttggtgttagagtttttcagctcccgaagccatcaggagcggctgcagaaccaccctaagcgggggctctttatgaactcggaattcctccctgttgtgaagtgcaccattgataataccctggaccagtggctacaagtcgggggtgatatgtgtgtgcacgcctacctcagcgggcagcccttggaggaatcacagctgagcatgctggcctgcttcctcgtctaccactctgtgccagctccacagcacctgccacctataggactagaagggagcacaagctttgctgaactgctcttcaaatttaagcagctaaaaatgccagtgcgagctttgctgagattggctcctttgcttcttggaaatccacagccaatggtgatgtgaccgtgtctggcggtgaacctaccctgaaacgtgacttctgcacaacaaacgtgaccaaacatcaaagctaaagcaatgtttataaagttttatggtataactagggggaaatgagctgcacaaacctcaatgtattttaaatctgttgctgtcatcattaacggtatatgacatataaaagcaagttaaaatttacttttgtaaataaagtttttggtttgtttccaaaaa

SEQ ID NO: 79494 - DNA, 821 bp, Homo Sapiens
  misc_feature (42)..(56): n is a, c, g, or t
aacaatcacaaaatataggtttaattactacttttaaacttnnnnnnnnnnnnnnnccaagaaaacaaacataggtactccagtaagacttgctactctgaataatgtaacattttttctaagttctataaatatatactggaagttttagaacacatacagacgcttaggaaaagaaaggctagttccttggaaatgacgatccaggatgatacaatcacttgatgacagaaggtaagcctttcttacaattagattttagcagataattttaccactaatataaatgggtgatgtgtggatcacaagttctagaaggcgaataaaaatactgactccaggtaatttctggatactacaaaaatgaagtttgcttgttttttttagaaccaaaaatactatcttgtaaggtacaaagaaagcttgatattaagtatgaaaacataagcataacatttgtaactaatcacacccatgaaagacgactagatgacacctgaaacatttttcaaaatactgtaacacagatgagtaatattagtataaattttttatgtacattaagatctgtttcagtttgctggtgtgaccaaaccttagaaggtaatcccaagggataaagcagaacataagagcagatatttagatattagtacaggctcaatttgatgcaatcataaaccttcaagatttctagtcactgaaaccccattgtaggtagtgttctggagtctgctataagtaaatctttaatgactagatgttttccttaccatctacactgaatggaaataccatgaatatagacacattttaagtag

SEQ ID NO: 79495 - DNA, 1059 bp, Homo Sapiens
  misc_feature (320)..(322): n is a, c, g, or t
  misc_feature (775)..(775): n is a, c, g, or t
  misc_feature (839)..(839): n is a, c, g, or t
  misc_feature (845)..(845): n is a, c, g, or t
  misc_feature (854)..(854): n is a, c, g, or t
  misc_feature (858)..(858): n is a, c, g, or t
  misc_feature (901)..(901): n is a, c, g, or t
  misc_feature (932)..(932): n is a, c, g, or t
  misc_feature (944)..(944): n is a, c, g, or t
  misc_feature (980)..(980): n is a, c, g, or t
  misc_feature (992)..(992): n is a, c, g, or t
  misc_feature (1024)..(1024): n is a, c, g, or t
  misc_feature (1029)..(1030): n is a, c, g, or t
gtagtatccagaaattacctgggagtcagtatttttattcgccttctagaacttgtgatccacacatcacccatttagattagtggtaaaattatctgctaaaatctaattgtaagaaaggcttaccttctgtcatcaagtgattgtatcatcctggatcgtcatttccaaggaactagcctttcttttcctaaccgtctgtatgtgttctaaaacttccagtatactatttatagaacttagaaaaaaatgttacattattcagagtagcaagtcttactggagtacctactgtttgttttctaggtttattttttttnnnaagtttaaaagtagtaattaaacctatattttgtgattgttctcctggtctgtgtttttaacattcctttccttcagttttcctcatgaagatgtttcagatactgaatttgtttagacattgaatgactttgttaaaggcacaattaatcacattcggttgtactctgaagacagacttctttaagaaaaaaatataaacaatttaaaacaatgtgtgtgattatagattaatgtaatatacgccatccttaaaaccacaacatataacagatcacaaaagtgctttcaccaagttacaaccgtaaatccttacctttttacatcatctaagtaactgcaaataaatttctcctcagggaatcagtgcagtcttctttttccttttaaaacttagctggagttacttaaactaattcttaatactattctgaaagtataaatatattgtttnagaatacagaaaaggctaagagagtacaaagactttagtatatttttttcattttcatgatcangtaganatagtgcangtanggtatatatacatggtaatgagatgaaaaatgtttagatgtgnatcactagactttgctgtactggattcacangtgaaagattcnctagattctgacttttatgtctctcaatacttccantgtacaacatanaacttacatcggtatatgcactacctttttangatanngatacgaatttgagatctcagtaattcca

SEQ ID NO: 79496 - DNA, 747 bp, Homo Sapiens
cagacttggaaagatccccatgaaaaagatagagccacgaactgctttggagataatgatcgtattgatgttgaaaataggctcaaagattctgtctgtgggagaagttattcatgtgaagatccttggaattttggctcttattgatgaaggtgaaacagattggaaattaattgctatcaatgcgaatgatcctgaagcctcaaagtttcatgatattgatgatgttaagaagttcaaaccgggttacctggaagctactcttaattggtttagattatataaggtaccagatggaaaaccagaaaaccagtttgcttttaatggagaattcaaaaacaaggcttttgctcttgaagttattaaatccactcatcaatgttggaaagcattgcttatgaagaagtgtaatggaggagctataaattgcacaaacgtgcagatatctgatagccctttccgttgcactcaagaggaagcaagatcattagttgaatcggtatcatcttcaccaaataaagaaagtaatgaagaagagcaagtgtggcacttccttggcaagtgattgaaacatctgaaattctgctgtcaagattcccatctctaaggactccaagactctttttccccaagtgctagagacaagggggtctatgagcatttactgacttcctgttaaaacttcattttttcaaactttttgagctatgcaatatataaataaacagtaagaattttaaattaaaa

SEQ ID NO: 79497 - DNA, 1267 bp, Homo Sapiens
cagtcgacggtaccggacatatgcccgggaattcggccattacggccggggattgacgccatgagcgcgctgctgcggctgctgcgcacgggtgccccagccgctgcgtgcctgcggttggggaccagtgcagggaccgggtcgcgccgtgctatggccctgtaccacactgaggagcgcggccagccctgctcgcagaattaccgcctcttctttaagaatgtaactggtcactacatttccccctttcatgatattcctctgaaggtgaactctaaagaggaaaatggcattcctatgaagaaagcacgaaatgatgaatatgagaatctgtttaatatgattgtagaaatacctcggtggacaaatgctaaaatggagattgccaccaaggagccaatgaatcccattaaacaatatgtaaaggatggaaagctacgctatgtggcgaatatcttcccttacaagggttatatatggaattatggtaccctccctcagacttgggaagatccccatgaaaaagataagagcacgaactgctttggagataatgatcctattgatgtttgcgaaataggctcaaagattctttcttgtggagaagttattcatgtgaagatccttggaattttggctcttattgatgaaggtgaaacagattggaaattaattgctatcaatgcgaatgatcctgaagcctcaaagtttcatgatattgatgatgttaagaagttcaaaccgggttacctggaagctactcttaattggtttagattatataaggtaccagatggaaaaccagaaaaccagtttgcttttaatggagaattcaaaaacaaggcttttgctcttgaagttattaaatccactcatcaatgttggaaagcattgcttatgaagaagtgtaatggaggagctataaattgcacaaacgtgcagatatctgatagccctttccgttgcactcaagaggaagcaagatcattagttgaatcggtatcatcttcaccaaataaagaaagtaatgaagaagagcaagtgtggcacttccttggcaagtgattgaaacatctgaaattctgctgtcaagattcccatctctaaggactccaagtgctagagacaagggggtctatgagcatttactgacttcctgttaaaacttcattttttcaaactttttgagctatgcaatatataaataaacagtaagaattttaaactaggacaaacaacaaaccagaccaaataaaatcgtgtcggc

SEQ ID NO: 79498 - DNA, 1063 bp, Homo Sapiens
cctggcggcatagtaatatagaacagttgtacaaaaagcaggctggtaccggtctggaattccctgggatatgtcgacccacgcgtcggctgcgctgctgcggctgctgcgcacgggtgccccagccgctgcgtgcctgcggttggtggaccagtgcagggaccgggtcgcgccgtgctatgtgccctgtaccacactgaggagcgcggcagacctgctcgcagaattaccgcctcttctttaggccctcagcggtagccgcgcggtccaggccaccttacttcccgcggggagcgctgcaccgagtcacgagaactgccagcgaggaggcggcgggatcaagaccccaaagctggagagcagaggcgcagggctgccggctgggggggtagatagcgccctgttgccctgccgagccgccctccccgagggggtaaggcagagtgcaagcggccaccccgcggcggcctgcagcacattagccggcccggccgccgttacccggttcacacaagctcagtgaggaagggaaggcagagccctgcgcacacggccggccttcctagaggcgtaagaaacctcctactgcgggaagctccctgacgttcggagaggcaggccggaactttgcgggatgcctaatccagcgcgtctctttagcggggggactcctgataaggtctttccccacagaagctttgcttgggtacgccacgaagtttaacccctgagttgtgcaatccaccatcccaaaagggcttccgtttgggtcccagggacggcagccccgttttcccctccccacaggtttgaacaatgcccccagaaagctaacgggacttcgggggggcgccagaagtttgccgagcccaagggagacggcccatggttttcgggagccatatggcgcgggatacgccaatagggcgactatggagcgttacccggacagagagatatgagtcgggggtgtttacacccccagaattgcgagactcggggtggaaacacggggcgattgcccccttagaacaagctggcggcaaataaagggcgcgtaatc

SEQ ID NO: 79499 - DNA, 478 bp, Homo Sapiens
gaaataagaatgagtcagactacatatttggtagccagatttttttcactcagtgatatatcatgaacatatttccatgctaatataattttctaataattttagatgctgtaactacaatttcattgttaatgggcaatttgttgctttacaaaatggtaaattatatgataaataatatgatcattattcttgtagccaatatcattattagaaatgatggaccgcattaaagctataaaattaaataagaatttataaatgtaaggagttattcagacatcttgtatctagtattacaatatcagaaaactcagcaggttatatgacatatacactttgagatagtcactcagaggttttcacatacaggattaaccttgctgcagtgcgtgtgcaagattaaaaaagatgtcatgggtcactttgtaatgtcatatcgttgctgttgataaataaaggaaatgttataaataaa

SEQ ID NO: 79500 - DNA, 694 bp, Homo Sapiens
taatatgcatatatattttcctgctaaaattgtttctacaattgagtaaatggcaaatatatgaagcaatgtccctaaattttataaagaaattatatttaatgcacatttcaattttcattcttatttttgaccttttataaaatattttcatgttgctataagtaaatgatgatgccaccccatgttgactatggtttttctagaaagcaactatgctgctaaccatagaggaacatagaagggttccagaatctttagtgctggttttaacaaccgatgcaacattaaaaatgtgttagtgtgctgtgcaattggttttcaattcatattaatcttaatgacagagaacaatgtgttactaattattttggttgtatgccattagtaaattgatagaaaaattaaggggattaacataacttcatttcattgccttatattaacatcttataatacaatagtttaagactaagggaaacagatggagctgtttattgagacaactggtgaggaattatcatgtgttcattcccattttagagcgtgaaactcctacattagaatatataaagtcactttaaatatctatatttgtaacagaagtagtgtacagatattttattacagcatttttgtgtaaatgcagaattaaagtgaataaataagaattttcagtggtgcacaaaaaaaa

SEQ ID NO: 79501 - DNA, 503 bp, Homo Sapiens
gtactgagtatcggagcactttacagaagctgactgtacattcctgttctgttgtgaagagaacattcccagaccctggcaccctcctgagccggcgtgtgccggtccagccctccgagatgccacaattccttggatgggggagaagttcaaggaatttctgctcggccacgcggtgggaaccccgcgtccccgccatgtggcagaggggtctcagtcgtgctaggcatcgggcggcagcgccgacagcccttccctcgccagtgcccctcggccactcctgggttggagcccgattttatttgtaaagttgacagtcgagcaaatgttcctattttcgtgggatctgcacacgtctttgtcagttgtggtcatgatcttagtcacctgctaattatttttacaatgattacaacatttcctcactgcgggatatttctgacccgctttagaacttaagacctgattctagcaataaacgtgtccgagatgaacctcgttcc

SEQ ID NO: 79502 - DNA, 840 bp, Homo Sapiens
  misc_feature (670)..(698): n is a, c, g, or t
  misc_feature (780)..(780): n is a, c, g, or t
  misc_feature (804)..(804): n is a, c, g, or t
ggggggctgccgctggctcttcgcacgcggccatggccgactccgagctgcagctggttgagcagcggatccgcagcttccccgacttccccaccccaggcgtggtattcagggacatctcgcccgtcctgaaggaccccgcctccttccgcgccgccatcggcctcctggcgcgacacctgaaggcgacccacgggggccgcatcgactacatcgcaggcctagactcccgaggcttcctctttggcccctccctggcccaggagcttggactgggctgcgtgctcatccgaaagcgggggaagctgccaggccccactctgtgggcctcctattccctggagtacgggaaggctgagctggagattcagaaagacgccctggagccaggacagagggtggtcgtcgtggatgatctgctggccactggtgtatgagtgaccacagggcctcccagcccaacatctccagctggatcccagggaaatatcagccttgggcaactgcagtgaccaggggcaccggctgcccacagggaacacattcctttgctggggttcagcgcctctcctggggctggaagtgccaaagcctggggcaaagctgtgtttcagccacactgaacccaattacacacagcgggagaacgcagtaaacagcttttcccccnnnnnnnnnnnnnnnnnnnnnnnnnnnnnaaaacatgtcgggccggcctcgggccccctcgagaagcttttcttagaccatttcggtttgggcggcggccgggcccccagnaaggggtaaggtggaacattgggncccaataaccttgggttttccctagagggaagattc

SEQ ID NO: 79503 - DNA, 868 bp, Homo Sapiens
ggggcgctcgggctgccgctggctcttcgcacgcggccatggccgactccgagctgcagctggttgagcagcggatccgcagcttccccgacttccccaccccaggcgtggtattcagggacatctcgcccgtcctgaaggaccccgcctccttccgcgccgccatcggcctcctggcgcgacacctgaaggcgacccacgggggccgcatcgactacatcgcaggcctagactcccgaggcttcctctttggcccctccctggcccaggagcttggactgggctgcgtgctcatccgaaagcgggggaagctgccaggccccactctgtgggcctcctattccctggagtacgggaaggctgagctggagattcagaaagacgccctggagccaggacagagggtggtcgtcgtggatgatctgctggccactggtggaaccatgaacgctgcctgtgagctgctgggccgcctgcaggctgaggtcctggagtgcgtgagcctggtggagctgacctcgcttaagggcagggagaagctggcacctgtacccttcttctctctcctgcagtatgagtgaccacagggcctcccagcccaacatctccagctggatcccagggaaatatcagccttgggcaactgcagtgaccaggggcaccggctgcccacagggaacacattcctttgctggggttcagcgcctctcctggggctggaagtgccaaagcctggggcaaagctgtgtttcagccacactgaacccaattacacacagcgggagaacgcagtaaacagctttcccacaaaaaaacaacatcgtctccctacaacacacacactactcctcagacacaacacgagcgg

SEQ ID NO: 79504 - DNA, 948 bp, Homo Sapiens
atgatgatgtaaaaccccaataggattgggatgaaacagctgcagtagcactgtatctgagcatgaaagaactgaaacgctcctaacgtcgagatggtggaccttgaagccctcctgagcccaacatgcaaatctggctgtgacggttcatctgacacctgtgtaaagctgaccagcctgctctgtacagtgacaatgaggagcccctctcttccttaagtaggaatctgtgaagcaaaatgtttgctgccaaagacaaatcagactgtcagtcattaaaaacagcattagcaggatgaggatagcaatggggaagggttgtgggcaatgcagtaacagggaaatggcttcagaaatggtttgagttggaagacaacattcttcatctctcaggacttctaattccttgatgctaaaagaagaggcatggattctatgagcttccaagtccctttccactttaaccttctacaaatctttcagaggactgcctagtagcaaaggttattcctggacacaggaaagacgggcattacagggaccaaagctctgaaaggtgacttttattaccaacacactggctggaaaagggacaaaccacatcacgggtgagtgatacttctcagtcttctctactcattcaacaaaggaaatgtgggctggggcagaggtcttttttcatttaatactggaaaaatattgaagagcatccatgttcacttatggctggttttgctatagaaattggaaaataaaggccacttttttgaaatccccagtttaattaaaccagattttggcctattggtataaacacatcagaaggtaagtttgaggttagctagcagctaactagttctaatagaaccagtcacagaatagtgggctaagattagaggtaaaactcattctaggccagtggttctcaactttaccatattgcgagct

SEQ ID NO: 79505 - DNA, 738 bp, Homo Sapiens
acatcatgcagttagcatatgaccttgtagtgctatgtgatatcttcccacccagaaactcttccagtaacagcaccacgactttcctctgttagattcccttcctcactccctacagaactgtaggtggaattgactccacttcccttctgggatgtgcatgtaaccaagttttgaccaatcagagtgtggtgcaccccccatctctggttggttgacagatagtcacatgataaacagcagtgagagggaaaccttcagtttagtcaggagagactgggaaagtggccagaaatgcctcattttcctcgaggcttggtgcagtaaggatgaaaacctggagctgctgacagctgtctgactggtggtcacatgcaggggcctatctgagggcagtggcagcacagagggaggcttggaagagagaagaaagtagggagagagtcaggaccttgtggcactctttaaccagtgaatgctagttgaaggcaatacaaccctctaggaggagtttggaaagttgtcaaggttttcaattgtctggaggatgtggttccgactggaactctttggaaaacagttggcattttctgttaaagccaaacacatacacctacccaatgtccagcaattccattccattcttaggtatatatccaacagagatgctatgaatagatgtgttcacaaaagagttgcaaaagaatgttcatagcagcctttttctctaataacaaa

SEQ ID NO: 79506 - DNA, 770 bp, Homo Sapiens
  misc_feature (221)..(221): n is a, c, g, or t
  misc_feature (526)..(556): n is a, c, g, or t
cttcatgataatagataagtcattagcaaaccagaccgaatctttagggtgaagagctccccaaagccatctggtgaggtcattgtggggaccagggactgattatttgtcacctggatcacaaagatgggactgtctgctcaggctggtggtgacaggatcctgacccgtggtcctctcccgctccctctgctccaccaggacacatgtataggacactngtgctgtgtgcagtggagaaatctccctgggccaggggaaagttcagacagtgcctctagattgtgttttgcctcctccaatgtagagttgacatctggaccccagagcccagcagggctttctgtcagacatgctagggtggtagaaatgggccctccaggtccccctgcagtgcactgggcagagacctccggaaagccggcagcgggagcgcttcctgggcagcttcccccagcacagtgttcccaaaccagtccatccggaaaacagtctgtacagcaaatgctgtgtgagatcttaggcnnnnnnnnnnnnnnnnnnnnnnnnnnnnnnnaaagaaagaaaaaaatacaattaacaagcctcttttgtaaatgggtttcctttctatgtataaaatcgtggtggtcccttgtttttacatgttcatgctgtgtaattttgagatgttactgagatatgttctgaacataatgtgcatttttttctgtacagatgaaatgggagaatttaataaagagtttgcaggtttttacttaataaaaaaa

SEQ ID NO: 79507 - DNA, 1120 bp, Homo Sapiens
gggtaggctatgtgttttgtcagtagttcaatgtgatcatctatttggtacaaaagaacgatcatcaattaattcaatttctggagatggccatgatatgatgctcaaacctaaggtatgccaggaagccaaattaattactttgaatatacaaaaattcctgtttgtgtttaaaactgtctatatgaggcaaagtagaattgttcttaacatgtatgaaactgggaaattttgggatttaccactctttcaaaaagatataaaatattactaaatggcttgatatatatttaagacaaggcagaactgactataaaagaatgaaatatttctgccaaagaattttaagaaaatattttaaggttatcatattaatatgttttaaaatatgtattaagactggtacaaccatgggtataagtgttctttattttaaaaagcaccactgcttacagacaaaactgtaatagacatggcttgggaggaaaaaatacatatatatgaattatggcttgaaaatttctgaatatcagtatttaacagcgattttaaaactctgccatcacaccaatcttcagtgtaagaaagaaacaaatctgcatcacatcttcaagtcctaaggatccatttcacttcatggtaccctcaaaatacttgccagctctgtgttctcacgcagaaggtgactttcataatctgcaccttcaaaatatattgtccaagtacctggtgaacgtgtgtgaggaattaacctgcaaaatcctctctggcacagagggtctaaaaattcttgtaaaccatttggaatgtttctgacaacatcacaagaataaccatcttctggcaaaagaaacggcagctgcagatcaggatcctcctccaactgcacttcccttccatcactgcgggccagctcatcggcagtgttttcagccacagtcactacattttctataagatccgttgggataaaaggctcatcaggtgcacagtgatagttctgtaataaggcttgaagttgtaatgaatttaacttaaagcaggtgctgtttatatttggaatgtcatcaggtgcatacttatccatggtaagcaaagtcgttgctgcacgatcctgctc

SEQ ID NO: 79508 - DNA, 654 bp, Homo Sapiens
ccctgattttcgtgtttggttttcaactgttgtgttctcaaatggtctgggaaacttctgcatagacctagaccttgaagtgtcctcctcccccaacctgtccctctagggagcttatgatggttaattttaggggtcaactgagctggattgagggatgcctagatggctggtgaagcattgtatctcggtgtgtctgggaggacttgtgagtcagtggcctgagagaggaagaccggtccttagtgtgggcagaacaccatcccatcggctgggggcccagctggaacaaatgggcagaagaagggggattcactctctctctgctgttcctctctaccttttggagaggagtgctttttctcctcctgcttttgtacattggctcttctgcttttgaactctgggactcgcactagcggccttttgggaactcttgggcctgagctggcttccctgaacctggctggcttccctagttctgaggctctggaagttggactgagccatgctctggtctccagcttgcagaccacctgtcagaggacctcacctctgtgagcctgtgagccagctcccctaataaaccccctttcttatatcctgctggttctgtctttctggaaaacgctgaaaaataaagagctcaatcac

SEQ ID NO: 79509 - DNA, 1124 bp, Homo Sapiens
ttttttagacaaatgctcactttaatcacaattctaaattaattattttcacattaatatagatatttccataaaccaagaaaaactgagttattatacattttttaacagctaacatgatttgaaaattttttattaaaaattgatcagaagctagttgaaattctcaatgtaaatataaaatattcattacaattgtttttcaaagtaaattcagatctaagcttcctgaaaagctgtactatctcatatcataatagggatgactaagtacttgacaactactttctaaagaacttaacaaaaagtgactacttgaagattacatttacaacagaaaggctaacattctctgcagagctctcattttatcatgaaatgtggacaatcaggaacacgtggatgagtggtatcaagaaaaagggcatttcaaaatatttccacttttattaaaggttttgacaatgaagatttcataaaatgtctttaaatactattttctagagaataaccatctaaatcggagacatatgccataaaactgcaaccattttagtgtgtaaaataattctaagtttgtactataaaaagatttggctaaaatacaaaacatctttgcgataaaactgacaacgtagcttaagtagcttataagatttcagaaatgtcttctgaaagaaataagaatgttttcctctgccagataaaactgaacagttaaagttaaggtgctataaactagacaaagctagaaaggcacatcatgtaactagaaaagaacagcatgtgatgtggacttcatgtcgaactgatagaaaaacagaatacgctcttcacaaggaaaggtatgagaagataattcttataaacaaacttctcattgaagtcttgaagagttttacagagaacataatcataaaatggctagaggtcatttataggacatggtaatggattcctttatattacaatacctgcctcaaatataaacacaaatcaaatataaacacccttgtaaagctgtgattctcccaaccaaacattcctcctgtaccacactcaggtgctagtggcatttggatgcaaaggtttaactcgtgctaatctggacaagccaaggcgga

SEQ ID NO: 79510 - DNA, 982 bp, Homo Sapiens
  misc_feature (24)..(24): n is a, c, g, or t
gtgctgtatcgatggcccaacccntgcagggaatcacaatgagccacaccaccactcccatggtgacttaccctatcgcttcccagagcatgcgcatcacggccatgccacactgatggggctaatggacactcccctggtatagcctcgcagggctggggtcagggggcccttgcccactcacctagccttccccatccctgtctgaagggctcccttgagaactaggacaagagactacaaggagtatgtcctgaggaggggttgggatggtgtgttatctctcacctcccttttatgagggtcctcttgtccatcttcaagcctcacagtgggggcttgcagaggagtgcagactgaagccagcagagaggaaggactgactgaggggctgtgtcctcttatgggaatttgggaacatccctcgtcttgtcctctcttctgcacagcacaggttccagcactggttttagaagaaaaaaataccctgcccagagggaaagccaggaaagattgggaagtgggtggtcaggagagaaggcctgataggagccttcagacaatttgggtcctagttgcttgggttggacaatacaggaattgcttctgggccctgggaaagctgggaccatagtgctccagcccaaagactaggggagcattcattaccctagtttgacctgaaaatccatagggcagggcccactactttccaaagaaataaaagaacaattatttttaacaaatggaggcagtgaaaacttgcttagctattctgtgtggaagatgggagcagtaaatagatctcatgccaaaatgggataaagaccccagcctcacatagctttggtaagatggatagaagccagtgaagaagggtagggacccagaacaagaccaaatggggctttggggaaggcactttatggggtaaaagctttggagccacccagtctagttttaaaaatagttccatctgaaa

SEQ ID NO: 79511 - DNA, 1538 bp, Homo Sapiens
  misc_feature (1457)..(1479): n is a, c, g, or t
gggaggtaggagcgatgtggcctgggaacgcctggcgcgccgcactcttctgggtgccccgcggccgccgcgcacagtcagcgctggcccagctgcgtggcattctggagggggagctggaaggcatccgcggagctggcacttggaagagtgagcgggtcatcacgtcccgtcaggggccgcacatccgcgtggacggcgtctccggaggaatccttaacttctgtgccaacaactacctgggcctgagcagccaccctgaggtgatccaggcaggtctgcaggctctggaggagtttggagctggcctcagctctgtccgctttatctgtggaacccagagcatccacaagaatctagaagcaaaaatagcccgcttccaccagcgggaggatgccatcctctatcccagctgttatgacgccaacgccggcctctttgaggccctgctgaccccagaggacgcagtcctgtcggacgagctgaaccatgcctccatcatcgacggcatccggctgtgcaaggcccacaagtaccgctatcgccacctggacatggccgacctagaagccaagctgcaggaggcccagaagcatcggctgcgcctggtggccactgatggggccttttccatggatggcgacatcgcacccctgcaggagatctgctgcctcgcctctagatatggtgccctggtcttcatggatgaatgccatgccactgggcttcctggggcccaccaggacggggcacagatgagctgctgggtgtgatggaccaggtcaccatcatcaactccaccctggggaaggccctgggtggagcatcagggggctacacgacagggcctgggcccctggtgtccctgctgcggcagcgcgcccggccatacctcttctccaacagtctgccacctgctgtcgttggctgcgcctccaaggccctagatctgctgatggggagtaacaccattgtccagtctatggctgccaagacccagaggttccgtagtaagatggaagctgctggcttcactatctcgggagccagtcaccccatctgccctgtgatgctgggtgatgcccggctggcctctcgcatggcggatgacatgctgaagagaggcatctttgtcatcgggttcagctaccccgtggtccccaagggcaaggcccggatccgggtacagatctcagcagtgcatagcgaggaagacattgaccgctgcgtggaggccttcgtggaagtggggcgactgcacggggcactgccctgagctctgggtaaggacgagaagagccaaggtccgcctgctgccacagggtcaaaggaggttttcgatcagcccagaccagaggctctgagccctgaaccaaagtcccagagctgggctgggacgtgacctgtgctgagggctgtgagaatgtgaaacaacagtgtgaaaattggctgtgacnnnnnnnnnnnnnnnnnnnnnnncctgagcaggcggccgcaagcttattccctttagttgagggttaattttagcttggcac

SEQ ID NO: 79512 - DNA, 648 bp, Homo Sapiens; identical to SEQ ID NO: 4082
  misc_feature (425)..(473): n is a, c, g, or t

SEQ ID NO: 79513 - DNA, 852 bp, Homo Sapiens
tggggaagaggccttgggggtctgctctgtgcctgggatcagtggggccccaaagcccagcccggctgaccaacattcaaaagcacaaaccctggggactctgcttggctgtcccctccatctggggatggagaatgccagcccaaagctggagccaatggtgagggctgagagggctgtggctgggtggtcagcagaaacccccaggaggagagagatgctgctcccgcctgattggggcctcacccagaaggaacccggtcccaggccgcatggcccctccaggaacattcccacataatacattccatcacagccagcccagctccactcagggctggcccggggagtccccgtgtgccccaagaggctagccccagggtgagcagggccctcagaggaaaggcagtatggcggaggccatgggggcccctcggcattcacacacagcctggcctcccctgcggagctgcatggacgcctggctccaggctccaggctgactgggggcctctgcctccaggagggcatcagctttccctggctcagggatcttctccctcccctcacccgctgcccagccctcccagctggtgtcactctgcctctaaggccaaggcctcaggagagcatcaccaccacacccctgccggccttggccttggggccagactggctgcacagcccaaccaggaggggtctgcctcccacgctgggacacagaccggccgcatgtctgcatggcagaagcgtctcccttggccacggcctgggagggtggttcctgttctcagcatccactaatattcagtcctgtatattttaataaaataaacttgacaaaggagaggg

SEQ ID NO: 79514 - DNA, 1636 bp, Homo Sapiens
  misc_feature (1434)..(1461): n is a, c, g, or t
ccggaattcccgggatcaataaagcctaggccaaactgcacaaatcagattgacccagtcgacaggatctgaacttccagtgaccatcccaggaacagaaagcaactgtgttaccagttctgcttttcctggacctgttccaagctctcacgttccacatcacacatgggacatctagtgtcaggctcccagagagcaggaaccaggtgaaatataagagcacagtcctcccagccggtggcatggggataatcggacaatacaactctccacccttttttatgaattcaagccaggaagaagcagcaatctgtcttctggattaaaactgaagatcaacctactttcaacttactaagaaaggggatcatggacattgaagcatatcttgaaagaattggctataagaagtctaggaacaaattggacttggaaacattaactgacattcttcaacaccagatccgagctgttccctttgagaaccttaacatccattgtggggatgccatggacttaggcttagaggccatttttgatcaagttgtgagaagaaatcggggtggatggtgtctccaggtcaatcatcttctgtactgggctctgaccactattggttttgagaccacgatgttgggagggtatgtttacagcactccagccaaaaaatacagcactggcatgattcaccttctcctgcaggtgaccattgatggcaggaactacattgtcgatgctgggtttggacgctcataccagatgtggcagcctctggagttaatttctgggaaggatcagcctcaggtgccttgtgtcttccgtttgacggaagagaatggattctggtatctagaccaaatcagaagggaacagtacattccaaatgaagaatttcttcattctgatctcctagaagacagcaaataccgaaaaatccacccctttactcctaagcctcgaacaattgaagattttgagtctatgaatacatacctgcagacatctccatcatctgtgtgtactagtaaatcattgtgttccttgcagaccccagatggggttcactgtttggtgggcttcaccctcacccataggagattcaattataaggacaatacagatctaatagagttcaagactctgagtgaggaagaaatagaaaaagtgctgaaaaatatatttaatatttccttgcagagaaagcttgtgcccaaacatggtgatagattttttactatttagaataaggagtaaaacaatctggtctatttgtcatccagctcaccagttatcaactgacgacctatcatgtatcttctgtacccttaccttattttgaagaaaatcctagacatcaaatcatttcacctataaaaatgtcatcatatataattaaacagctttttaaagaaacataaccacaaaccttttcannnnnnnnnnnnnnnnnnnnnnnnnnnngtcttttaaagatggcctgtggttatcttggaaattggtgatttatgctagaaagcttttaatgttggtttattgttgaattcctagaaaagttttatgggtagatgagtaaataaaatattgttaaaaaaccttatggcctataaagtatattaaaacattgttggctaatata

SEQ ID NO: 79515 - DNA, 1608 bp, Homo Sapiens
  misc_feature (646)..(648): n is a, c, g, or t
  misc_feature (966)..(992): n is a, c, g, or t
  misc_feature (1020)..(1029): n is a, c, g, or t
  misc_feature (1336)..(1336): n is a, c, g, or t
cagtcgacggtaccggacatatgcccgggaattcggccattacggccgggggggctcttcctcgcggaagtggggaggaggcggttgcggttagtggaccgggaccggtaggggtgctgttgccatcatggctgaccccgacccccggtaccctcgctcctcgatcgaggacgacttcaactatggcagcagcgtggcctccgccaccgtgcacatccgaatggcctttctgagaaaagtctacagcattctttctctgcaggttctcttaactacagtgacttcaacagtttttttatactttgagtctgtacggacatttgtacatgagagtcctgccttaattttgctgtttgccctcggatctctgggtttgatttttgcgttgattttaaacagacataagtatccccttaacctgtacctactttttggatttacgctgttggaagctctgactgtggcagttgttgttactttctatgatgtatatattattctgcaagctttcatactgactactacagtattttttggtttgactgtgtatactctacaatctaagaaggatttcagcaaatttggagcagggctgtttgctcttttgtggatattgtgcctgtcaggattcttgaagtttttattnnnatagtgagataatggagttggtcttagccgctgcaggagcccttcttttctgtggattcatcatctatgacacacactcactgatgcataaactgtcacctgaagagtacgtattagctgccatcagcctctacttggatatcatcaatctattcctgcacctgttacggtttctggaagcagttaataaaaagtaattaaaagtatctcagctcaactgaagaacaacaaaaaaaatttaacgagaaaaaaggattaaagtaattggaagcagtatatagaaactgtttcattaagtaataaagtttgaaacgattnnnnnnnnnnnnnnnnnnnnnnnnnnnccacaccaacaaaacaacaaaacaaaannnnnnnnnncggccataaaaaatttatccctcagggaggcgcccaagaatatgagagatccccacggttttttgtgaaacaagggtggccccttaaaggggagcgccgtataattaacagccagcaggcaccgggcgcggccttaaaacaaaccgtctcggtggtcggaaacgaagcgttcgcggcagacctctgggggcagagacccccacattcggcgcggggtgcgacgatcgtcgggcgcccaacccccccagggggcgattgactggccgcgagggggacataattaacatgagcggtgcttatcggctgntaactccacaccgcacatatcgtctcgcggtgacgaaaatttggtacccgggactgtttctggacaactttacgtggggtgttgtaaataaagagcgaaccacaagcgcacggaacagagacagagccagtaaaccagaccatggcaccaggaacacgtcaggtgatacatcaagccgatcacgacgagaggcagcctaccaggcaccacagccaacgactgccgaccctgagaagcaactagacaccatgacccgaagaacagcgtaggaa

SEQ ID NO: 79516 - DNA, 515 bp, Homo Sapiens
  misc_feature (94)..(298): n is a, c, g, or t
gaaggagactggccttactctgaaattaggaaactaaagaagtgaccagaatggagactaggtagagacaactagttctctaccaaacatgtannnnnnnnnnnnnnnnnnnnnnnnnnnnnnnnnnnnnnnnnnnnnnnnnnnnnnnnnnnnnnnnnnnnnnnnnnnnnnnnnnnnnnnnnnnnnnnnnnnnnnnnnnnnnnnnnnnnnnnnnnnnnnnnnnnnnnnnnnnnnnnnnnnnnnnnnnnnnnnnnnnnnnnnnnnnnnnnnnnnnnnnnnnnnnnnnnnnnnnnnnnnntttgtatttttattgaattgttttggggtggggggcagctgtatctttcttagtaatagaacccctggttttagctgggcacatgactgccctcaataaagattaaagtaccccagccttccttgagattgtggccatgtgactgaactttagacagtgagatataagcagatatcttctgtggcagtgttaggaaactattaaagacagtaagaac

SEQ ID NO: 79517 - DNA, 1299 bp, Homo Sapiens
ttccagcttggcaacagatttattagttcagagtagaaagagcaagagtccaagtgctttgattgttcagtaaaaactatgcctcctgactggagagctgccagcctgctctcccccactcttaacaacttaccctactattaaggcacttgagaagagggagagcaaggaagtcccagaccaaaccccttctggatcctggagagagccagtgctgttgcactggtttccttcagccatggttgagcaaggaaagagccggcagagacctctgtagggcaggaaggccagcccctcaaacgctggtgttaggcacagggacaatgccagtgccatacaggggctggtatctggggcgttattttgattaagctgtaatgaatccatgatggaagacacttgataaggctttgtgggctcaaaggccttacctccagcctgcttctgtctctaggagagtaccagaagctggaggatggggatgggggaccccagagttccctacagagaagggagctgaccatcaggacaggggaaaagtttgagtttccccagctcccccctttccagagaagttaatgcttctgcttaagcacctccaaaaagagagagagatacagatactgacaataaaagaataaaatatggctcccccctccaaggaagacatccacaaagttgggggcagttggaacacaccccaccagaatccgtaagtgcttttggagggcttcaatcccctgcaacccagtgctctggggagggcaggcgtcacccccttaggagctgatctgactcagcagggctgagaagtccatgtccgcaatggaggagaagtcttcatctcctgaaaggaggccattggggagccccggggcccccagtggagcaggagctgggtcggggggcctctgggcccctgtcactaggcgagttatagcctcagggtactccatcagcatgggctcagttgtgtggggggccacaggtatgccctggttcagcagctgctgaaactcggagttgtcgacggatgccaggtctgtgaacacagctgggtctgtgctgttgccaagcaaggcccccaggtcttcatcatcaaactgcagctgcagcagggcctctgacagcgttccttccccagcctgggtgggcttgggggcaggtggggccacagcctgaggagggcctggggctaggactgggacaggggctggggcctgggccagagctgataccatggctggagcaggggcaggggctggagcctggggcaggacttggggaggggccggggcc

SEQ ID NO: 79518 - DNA, 227 bp, Homo Sapiens
gcctactactactatacggctgcgagaagacgacagaaggggtttggtctgggacttccttgctctccctcttctcaagtgccttaatagtagggtaagttgttaagagtgggggagagcaggctggcagctctccagtcaggaggcatagtttttactgaacaatcaaagcacttggactcttgctctttctactctgaactaataaatctgttgccaagctaagc

SEQ ID NO: 79519 - DNA, 980 bp, Homo Sapiens
tcctaagtagcgaggcctgggtggcgttctcagacgaggcctccctacgcagaccccaccctgcaggctcctgtgcgtgtctccatgcagctgcggcggccttccgaccgggagctcagtgagcccatggaattccagtacctgccagatacagacgatcgtcaccggattgaggagaaacgtaaaaggacatatgagaccttcaagagcatcatgaagaagagtcctttcagcggacccaccgacccccggcctccacctcgacgcattgctgtgccttcccgcagctcagcttctgtccccaagccagcaccccagccctatccctttacgtcatccctgagcaccatcaactatgatgagtttcccaccatggtgtttccttctgggcagatcagccaggcctcggccttggccccggcccctccccaagtcctgccccaggctccagcccctgcccctgctccagacatggtatcagctctggcccaggccccagcccctgtcccagtcctagccccaggccctcctcaggctgtggccccacctgcccccaagcccacccaggctggggaaggaacgctgtcagaggccctgctgcagctgcagtttgatgatgaagacctgggggccttgcctgggaacagcacagacccagctgtgttcacagacctggcatccgtcgacaactccgagttttcagcagctgccgaaccagggcatacctgtggcccccccacacaactgaacccaggccgatggagcaacccggaggctactaactcgcccaagtggaaaggggccccaaaggcccccccggaaccaagctccaggctccaatgggggggcccccggggcctcccccaatgggccttcttttcgggaaaattgacgaccttttcccttctttgtgcgacctgggaatctttctgacccccggctggagtccaaaccacccttccccaggggggcgcaccccc

SEQ ID NO: 79520 - DNA, 695 bp, Homo Sapiens
gggcttggcacccacctctggagaaactcggggccacctccactccatgtgcccagccccgccacaacctctcctccagcacattccagctctatgtaaaaagtaaagacacccaccgactcctgatccccctctttttctatggagaacgttgccttatactctacttcagatgatgaacactgtgtactgtgtgtgctttaaagaagttttatttaattgctcccttcttccttttccttgttattcacctccctgatgcctgctttcagttgagggttgggggcaatgatgagcatatgaattttttctcactctagcaattcccttttctaaatgacacagcatttaaactcaaatctggattcagataacagcacctgcacatcctgcacctcctccctctcccttcacctcacccctgcccggcccaagctctacttgtgtacagtgtatattgtataatagacaattgtgtctactacatgtttaaaaacacattgcttgttatttttgaggcttttaaattaaacaaaaatccaactttatttttagttgtaactgcttgaggtatgttttatgaattaagtgacagatttgttatcctttattaacgtactttgttggtcagcactgggctgacaaaaattttttcttgctaataaatttagttgcctgaggcaaaatcttcaaaa

SEQ ID NO: 79521 - DNA, 1606 bp, Homo Sapiens
ccatctccatcctcctttatccaacccaaccgccacctaacaaacactaaagtagcgaggcctgggtggcgaatccggcacgagggcgcggcggacgcagaccttcctggagcagtcgaaaacccgatttaacaagaactacaaggggatgagtctatccaaaatcaccaccaccgtgggcctaaacatcggcactgtggatgtgggaaaggctcggctcatgttctgggacttaggagggcaggaagagctgcagtctttgtgggacaagtattatgcggagtgtcacggcgtcatctacgtcattgactccaccgacgaggagaggctggctgagtccaagcaggcgtttgagaaggtggtgaccagcgaggcgctgtgcggtgtccccgtcttggtgctggccaacaagcaggatgtggagacgtgcctctcaatccctgacatcaagacggccttcagcgactgcaccagcaagatcggcaggcgagattgcctgacccaggcctgctcggccctcacaggcaaaggggtgcgcgagggcatcgagtggatggtgaagtgtgtcgtgcggaatgtgcaccggccgccgcggcagagggacatcacgtaggcgcagccgcgctgccgtcgggacggctggtcccctggtgctggaggagtggcctcctgttggctcccatgctgctgatctggggggtgggtttgctttgctttggggttcttctatttactttgttttctcgaagacaaactttcctctatgtctggaaaagcgtaggcatccggaggctttggaggggagtctggcagcccggctggcccaggccctgcagcggcagcctttccacagggcgcagcggcggcctttcgaggccctttctggggggtctgagggagacctggttgggaattggggctccagtgctcaggctggcttgggctgcatgaggacagccctgtgggaccctcgggagaccccgtggctgtctccgccccatcgaggaggaggcccgtcagccatggctgccatctggcttctgccctgtgaccccgtgaccccgtgaccccggaagtggtctggggctgatcttgccttgaggaagacccaggccatgttcccaaaggccagcgggggccctggattgtgatgcagcctcgggacagggctgaggcctgcgggggaagacctataccccacgcctgggcctggcttcacctcaccctaatcccccgggagggagctgactgatgcaaaaagctgagggggcctgctgggagtggctgtttttatgccccagccccgcaagttggggagtgtttgtgggggtccagagccctcccccagccaggagagaacctcccggaggggttctctgtggggccctgtgtcccctgctcgggagtaaggctggtcctggggtcctccctgcacggaccccactgggcctgccgagtgctgtgttcttcctcagtctggctgtgggcaggagcggcctgcccagtgtcacccagggtgagtgcaaaataaagacggcgagtgtggctctgtccatcccttccctcctggagggtggaggctcctggctgttggacacggaaaaaa

SEQ ID NO: 79522 - DNA, 1156 bp, Homo Sapiens
  misc_feature (934)..(934): n is a, c, g, or t
gctgggtggcgaattcggcacgagggtcaggcgccgcgcggggttagcgcggggtcagcggaggtcagcgggggtcagcagcagcggctccgagggcgcggcggacgcaggatgtacacgctgctgtcgggcttgtacaagtacatgtttcagaaggacgagtactgcatcctgatcctgggcctggacaatgctgggaagacgaccttcctggagcagtcgaaaacccgatttaacaagaactacaaggggatgagtctatccaaaatcaccaccaccgtgggcctaaacatcggcactgtggatgtgggaaaggctcggctcatgttctgggacttaggagggcaggaagagctgcagtctttgtgggacaagtattatgcggagtgtcacggcgtcatctacgtcattgactccaccgacgaggagaggctggctgagtccaagcaggcgtttgagaaggtggtgaccagcgaggcgctgtgcggtgtccccgtcttggtgctggccaacaagcaggatgtggagacgtgcctctcaatccctgacatcaagacggccttcagcgactgcaccagcaagatcggcaggcgcgattgcctgacccaggcctgctcggccctcacaggcaaaggggtgcgcgagggcatcgagtggatggtgaagtgtgtcgtgcggaatgtgcaccggccgccgcggcagagggacatcacgtaggcgcagccgcgctgccgtcgggacggctggtcccctggtgctggaggagtggcctcctgttggctcccatgctgctgatctggggggtggggttgctttgctttggggttcttctatttactttgttttctcgaagacaaactttcctctatgtctggaaaagcgtaggcatccgggaggctttggaggggagtctggcagcccggctggcccaggncctgcagcggcagccttttcacagggcgcagcggcgggctttcagccccttttcgggggggtctgagggagacctggtttgggaattggggctcagtgctcaagctggctggggctgcatgaggaagccctgtggggacctcggggaaaaccgtggctgcttcgcccccatcgaaggaggaggcccgcaaccatggctgccatttgggtttggctggaaccc

SEQ ID NO: 79523 - DNA, 1110 bp, Homo Sapiens
tcggtctccgaggtccccagcgtcctaagcaccacagcagctgacaactgcaccccactcccaaccaggttccctgcagaccccccaggaaggccctcgcaagccgccagctgcgccctggtggaaagggcaccgctgcagggcctgggccaccggggctgccagactccccgtccaaagcctccgggatgcctacgcttgttccagacatagaggaaagttgtcttcgagaaaacaaagtaaatagaagaaccccaagcaaagcaaacccaccccccagatcaagcaagcatgggagccaacaggaggccactcctcagcaccaggggaccaccgtcccgacgcagcgcgctgcgcctacgtgatgtccctctgccgcgccgccggtgcacattccgcacgacacacttcaccatccactcgatgccctcgcgcacccctttgcctgtgagggccgagcaggcctgggtcaggcaatcgcgcctgccgatcttgctggtgcagtcgctgaaggccgtcttgatgtcagggattgagaggcacgtctccacatcctgcttgttggccagcaccaagacggggacaccgcacagcgcctcgctggtcaccaccttctcaaacgcctgcttggactcagccagcctctcctcgtcggtggagtcaatgacgtagatgacgccgtgacactccgcataatacttgtcccacaaagactgcagctcttcctgccctcctaagtcccagaacatgagccgagcctttcccacatccacagtgccgatgtttaggcccacggtggtggtgattttggatagactcatccccttgtagttcttgttaaatcgggttttcgactgctccaggaaggtcgtcttcccagcattgtccaggcccaggatcaggatgcagtactcgtccttctgaaacatgtacttgtacaagcccgacagcagcgtgtacatcctgcgtccgccgcgccctcggagccgctgctgctgacccccgctgacctccgctgaccccgcgctaaccccgcgcggcgcctgacgggacgcgggccggcctcagggaatgagctgaaccgcgtcccagcggcctccgcgctccgct

SEQ ID NO: 79524 - DNA, 452 bp, Homo Sapiens
accaccaccacccaactggggctagagtggggaagatttcccctttagatcaaactgccccttccatggaaaagctggaaaaaaactctggaacccatatccaggcttggtgaggttgctgccaacagtcctggcctcccccatccctaggctaaagagccatgagtcctggaggaggagaggacccctcccaaaggactggagacaaaaccctctgcttccttgggtccctccaagactccctggggcccaactgtgttgctccacccggacccatctctcccttctagacctgagcttgcccctccagctagcactaagcaacatctcgctgtggacgcctgtaaattactgagaaatgtgaaacgtgcaatcttgaaactgaggtgttagaaaacttgatctgtggtgttttgttttgttttatttcttaaaacaacagcaacgtgaaa

SEQ ID NO: 79525 - DNA, 1005 bp, Homo Sapiens
ccttagtttgcctgtctttgccatttcctgttcccgttgtgaactatcccttgtggttaactccccagcaagccggccggatagtgcggagcgagacgccaagccaccccttcccggcgtgccgttttaagcactgccgacagttcccattgaaagcggcatgacgcaaccaattattgagtagctcatcttagcaccccagctttacatttgtcttccgcttgtatgtttgtggaatttggccgataacatttaccacagaaacaggttgacatgttacgaattaatacactccctatagggaattggccttgaaggccaagaattcggaacgaggagaaaaatctggaccagtgtccctccagaaacaatcggcccagaaggttatattaaaaaagaaagtttctcttttgaatagtgccacaagaataacgggcggtggaaatctggaacagagtatcctgagaatctgcgcacccttgaaggctacaattgaaaataaagattctgttctgaatacagccaccaaaatgaaggaggtacaaacatccacaccagaacaagacttagaaatggcatcagagggagagcaaaagaggcttgaagaatatgaaaataaccagccacaggtgaaaaaccaaatacattctagggatgaccttgatgacataattcagtcatctcaaacagtctcagaggacggtgactcgctttgctgtaattgtaagaatgtcatattactcattgatcaacatgaaatgaagtgtaaagattgtgttcacctattgaaaattaaaaatacattttgtttatggaaaagattaataaaacttaaagataaccactgtgagcaacttagagtaaaaattcgaaaactgaaaaataaggctagtgtactacaaaagagaatatctgaaaaagaagaaataaaatcgcagttaaagcatgaaatacttgaattggaaaaagaactctgtagtttgagatttgccatacagcaagaaa

SEQ ID NO: 79526 - DNA, 1076 bp, Homo Sapiens
  misc_feature (41)..(83): n is a, c, g, or t
  misc_feature (87)..(121): n is a, c, g, or t
  misc_feature (348)..(404): n is a, c, g, or t
acccgaagacgtacgaccatcatatggcgcatcgcggtttnnnnnnnnnnnnnnnnnnnnnnnnnnnnnnnnnnnnnnnnnnnccgnnnnnnnnnnnnnnnnnnnnnnnnnnnnnnnnnnncagtcgacggctaccggacatatgcccgggaattcggccattacggccgggtaataaaacttaaagataaccactgtgagcaacttagagtaaaaattcgaaaactgaaaaataaggctagtgtactacaaaagagaatatctgaaaaagaagaaataaaatcgcagttaaagcatgaaatacttgaattggaaaaagaactctgtagtttgagatttgccatacannnnnnnnnnnnnnnnnnnnnnnnnnnnnnnnnnnnnnnnnnnnnnnnnnnnnnnnngttaagaataacagaagagcaatataggatagaagctgatgtgacaaaaccaattaaaccggctctcaaatcagcagaggtggaattgaagacaggaggaaataattcaaatcaggtttctgaaactgatgaaaaagaagacctgctgcatgaaaaccgcttgatgcaagatgaaattgccaggctcaggctggaaaaagacacaataaaaaaccaaaacctggaaaagaaatacttaacaagactttgaaattgtgaaaagaaagcatgaagaccttcaaaaggctctaaaacggaatggggaaacattagcaaaaacgatagcctggtaatagtggacagctagctgctctgacagatgacaacacaacgctccgttacaaactggagaagcaaagagcgaagcaggcaacgatgggaaacagaaaggcaatcataccatggtcgactgaaggctgcccaaagggaccatgaccaaaggcatcccatcagaagaagacaaaaaaactgaataccagggccaggacaaacaggcgcgccctgcagggagaccatgaaaccacacagataggaaagcaacaccgagcactacacagcgtaaagaaagcccacagagcccagaagaagacaccacaaggacggacgaaacaagacagcgtaaaccaaaaagag

SEQ ID NO: 79527 - DNA, 761 bp, Homo Sapiens
  misc_feature (145)..(180): n is a, c, g, or t
  misc_feature (198)..(443): n is a, c, g, or t
  misc_feature (648)..(648): n is a, c, g, or t
  misc_feature (655)..(655): n is a, c, g, or t
  misc_feature (657)..(657): n is a, c, g, or t
  misc_feature (663)..(663): n is a, c, g, or t
  misc_feature (675)..(675): n is a, c, g, or t
  misc_feature (705)..(705): n is a, c, g, or t
  misc_feature (719)..(719): n is a, c, g, or t
  misc_feature (747)..(747): n is a, c, g, or t
tttttttagagacagtgtctcactctgtctcccaggctagagtacagtgtgcaatcatagctcactgcagccttgaactcctggcctcaagcaatcctcccaccttggcttcccaatgtgctaggtttacaggcgtgaaaacatnnnnnnnnnnnnnnnnnnnnnnnnnnnnnnnnnnnnagacagagtttcgctctnnnnnnnnnnnnnnnnnnnnnnnnnnnnnnnnnnnnnnnnnnnnnnnnnnnnnnnnnnnnnnnnnnnnnnnnnnnnnnnnnnnnnnnnnnnnnnnnnnnnnnnnnnnnnnnnnnnnnnnnnnnnnnnnnnnnnnnnnnnnnnnnnnnnnnnnnnnnnnnnnnnnnnnnnnnnnnnnnnnnnnnnnnnnnnnnnnnnnnnnnnnnnnnnnnnnnnnnnnnnnnnnnnnnnnnnnnnnnnnnnnnnnnatgagccaccacgcccggccaaaaacatttaaaaaatgactgtccctgctcaaatactgcagtaggaaatagtaatttgacatatatcacttccagaaaaaaactttaaatctttctataaaatgaatttgatacatcatcagcatgaagtgaagttaaaatctcttacaaagtaaattcaggtatatcaacaatgagatccacncagctangnttgcanttgtcttccctntcatgtatcatacctggaatgggatccganacttgatgtggganctaggaaaaggcctgaagattccccagntataccagtctgga

SEQ ID NO: 79528 - DNA, 1963 bp, Homo Sapiens
  misc_feature (1746)..(1755): n is a, c, g, or t
  misc_feature (1851)..(1851): n is a, c, g, or t
  misc_feature (1887)..(1887): n is a, c, g, or t
  misc_feature (1895)..(1895): n is a, c, g, or t
  misc_feature (1918)..(1918): n is a, c, g, or t
ctggaccggtccggattcccgggatatcgtcgaccacgcgtccgcggaaccaagatggctgcgctgttgctgagacacgttggtcgtcattgcctccgagcccactttagccctcagctctgtatcagaaatgctgttcctttgggaaccacggccaaagaagagatggagcggttctggaataagaatataggttcaaaccgtcctctgtctccccacattactatctacagttggtctcttcccatggcgatgtccatctgccaccgtggcactggtattgctttgagtgcaggggtctctctttttggcatgtcggccctgttactccctgggaactttgagtcttatttggaacttgtgaagtccctgtgtctggggccagcactgatccacacagctaagtttgcacttgtcttccctctcatgtatcatacctggaatgggatccgacacttgatgtgggacctaggaaaaggcctgaagattccccagctataccagtctggagtggttgtcctggttcttactgtgttgtcctctatggggctggcagccatgtgaagaaaggaggctcccagcatcatcttcctacacattattacattcacccatctttctgtttgtcattcttatctccagcctgggaaaagttctccttatttgtttagatccttttgtattttcagatctccttggagcagtagagtacctggtagaccataatagtggaaaagggtctagttttccccttgtttctaaagatgaggtggctgcaaaaactccccttttttgcccacagcttgcctactctcggcctagaagcagttattctctctccatattgggctttgatttgtgctgagggtcagcttttggctccttcttcctgagacagtggaaacaatgccagctctgtggcttctgccctggggatgggccgggttggggggtgggttggtgaggctttgggtgccactgcctgtgggttgctggcttaaaggacaattctcttcattggtgagagcccaggccattaacacctacacagtgttattgaaagaagagaggtgggggtggaggggaattagtctgtcccagctagagggagataaagagggctagttagttcttggagcagctgcttttgaggagaaaatatatagctttggacacgaggaagatctagaaaattatcattgaacatattaatggttatttctttttcttggatttccagaaaagcctcttaattttatgctttctcatcgaagtaatgtaccctttttttctgaaactgaattaaatactcattttatctttgactctccttgaaatctagagaaaccaagaaaatggctgttgggaaggaaccaatttcctcctcttccctcgggtctcaggcatttacatcctccctctccccgcaatctgacctttaccaggagggaaacagttctcctacatctcatcattggaaaagttttcagggaatcagatagaacttagccagagatttaaatatcacagaaaagcctcagagaaggaaggagaaaaagaaaagaagtgacgcatgtagagtgcttttgggttataggcaccaaaatcccattaaggactgattataagcttcatggtacagttcagcaaattatgattcattgaggggcacagaggaccagtgttggtgacagctaggggatgatgacctgaggttataggcttggggtgaatgaagcatagagnnnnnnnnnnaaaaaagaagggattgttgaaaaccctggcaaaaatgtataatttaatggagaaaacttgctgcttttaaaatccctatagggccagctttagcangcatgctggttttgatagttttttgggaactctggnaatagagnacttatctcatctgtcactttcnagttgttggcccagccagttaaagctggggggtcgaagaagggga

SEQ ID NO: 79529 - DNA, 922 bp, Homo Sapiens
  misc_feature (903)..(903): n is a, c, g, or t
ggggaacccaagatggctgcgctgttgctgagacacgttggtcgtcattgcctccgagcccactttagccctcagctctgtatcagaaatgctgttcctttgggaaccacggccaaagaagagatggagcggttctggaataagaatataggttcaaaccgtcctctgtctccccacattactatctacagttggtctcttcccatggcgatgtccatctgccaccgtggcactggtattgctttgagtgcaggggtctctctttttggcatgtcggccctgttactccctgggaactttgagtcttatttggaacttgtgaagtccctgtgtctggggccagcactgatccacacagctaagtttgcacttgtcttccctctcatgtatcatacctggaatgggatccgacacttgatgtgggacctaggaaaaggcctgaagattccccagctataccagtctggagtggttgtcctggttcttactgtgttgtcctctatggggctggcagccatgtgaagaaaggaggctcccagcatcatcttcctacacattattacattcacccatctttctgtttgtcattcttatctccagcctgggaaaagttctccttatttgtttagatccttttgtattttcagatctccttggagcagtagagtacctggtagaccataatagtggaaaagggtctagttttccccttgtttctaaagatgaggtggctgcaaaaactccccttttttgcccacagcttgcctactctcggcctagaagcagttattctctctccatattggggctttgattttgtgctggagggtcagctttttgggctcctttctttcctgaggacaatggaaaccaatggcaggctctgtgggcttcttgccctgngggaatgggcgcgcgccta

SEQ ID NO: 79530 - DNA, 1748 bp, Homo Sapiens
  misc_feature (21)..(21): n is a, c, g, or t
  misc_feature (1580)..(1595): n is a, c, g, or t
caatggaataacagatgatgngaaagaaattaatgagaaaagttctcagctgaagaatctttctgaacttcaggacactagccttcaacagttagtttctcagagacattcaaccccccaaaataaaaatgctgtatcagtgcactctaatctgaactctgaggctgtaatgaaatcattaactcaaacatttgcaactgtggaagtaggcagatggaataacaacaaaaagagccccataaaagcaagtgacttgacaaagtttggtgattgtggtggtagtgatgatgaagaagagtccacagttataagtgtcagtgaagacatgaacagtgaagggaatgtagattttgaatgtgataccaaactatacacgtctgcgcccaacacatctcagggtaaagataattctgtcttactagttctcagcagtgatgaaagccaacagtctgaaaacagtgagaatgaagaggatactttatgttttgttgaaaatagtggccaaagggagtcattaagtggagacacaggaagtctgtcatgtgacaatgcattgtttgtaattgacacaactcctggaatgagtgctgataaaaatttttacttggaagaggaagacaaggcaagtgaggttgccattgaggaagaaaaagaagaggaagaggatgaaaaaagtgaagaagattcatcagaccatgacgaaaatgaagatgagtttagtgatgaagaagacttcctaaatagcacaaaggctaaacttctgaagttgacaagcagcagcatagaccctggtctgagtatcaagcagttgggtggtttgtatattaatttcaatgcagataaactacagtctaacaagagaaccctaacacagatcaaggagaaaaagaaaaatgagcttctgcagaaagccgtcattacacctgattttgaaaaaaaccactgtgttccaccatatagtgaatcaaagtatcaacttcagaaaaaacgcagaaaagaacgacaaaaaacagcaggggatggctggtttggtatgaaagctccagaaatgacaaatgaactgaaaaatgatctcaaagcactgaagatgagagccagcatggacccgaaaagattttacaagaaaaatgatagagatggcttccccaagtacttccagattggaaccattgttgacaatccagctgatttctaccattcacgaattcccaagaagcaaaggaaaagaactattgtggaagaactgctggctgattctgaattcagaagatacaaccgaaggaagtactcagagatcatggctgaaaaagcagcaaatgcagcaggaaaaaagttccgaaagaagaagaaatttcgcaattaagatttaccaagcaaactgcaacattttacattgctcctttatttacttattaaagacgtttggaaaactaacaccatcatctaaattaatttaccatagactggccctgttcatacaggaatttgtatttggaaaaagttgatttgagaatcgattacatgcccttagaaaataggggtgtctaaaagacccaccctggtgtagactctttaagggnnnnnnnnnnnnnnnntctcaaccattttaagataactgatggtttgtaaagttttcaatgcttagttatttaaagaaaatttaattaaaagataggaagtataaagtttgctaacatgttcaaagaactttaaaaaatgatcaaagatatataaacactattgtaatt

SEQ ID NO: 79531 - DNA, 1208 bp, Homo Sapiens
  misc_feature (59)..(59): n is a, c, g, or t
gcagccaggtctctgatggcagccggtctgtcacagggggaggacagcactcccccgtntagcagccaggcagggcgatgtctgccatccgtggccatttgcaaagaccccaaagacccctgttctggttccctctctcccccatgaatatcctctcacacacatgtacatgcgaacacacacaacacgcacctcgtgagacccgggacctgccccggacccccagttcctgggttgaacgaccacatcatgccacggtgcttgctcaggggaagccacgctccctctgtggggcctgctggggcctgggagccccccactgagcccacaatgccacggaaatccttgttggctgcccccgagaggggccttcccagctgggaagagctcagagctgacagctgcctcctgccatgtcaaggccccccaaagagcctcaggggctctggggccctggagggtggggttggggggtgggactctcctcccccactcctgctccctctcccttttcactgttgctttctatgtatagctccctagacctttcacttttttaaaaacgcgttttgtgtagagaataaggaacgtggatctttttattttgcaatcctgggccagctagaagccaggagctgattgaccttttaacttttttcagtggccacattttggttatcgatgtacctagaagtatgtaaattagattaaatttctcttctggaaacaccctggggcaggcggccagcgtgtgtatttctgtcaagtggacaggctggcattggctggcagccggggctgggatcggggcctcctctgtccagagcgccatggaggccctgggtttccagttggccgccaagccgacagacgcagctggggatgagcccaagttcccagctgtggctcttaggccatggctgggcggggtctctggctgctggcaaagggctccagtgagcagatgaaccaggttctggcagctgtctgggaaggagcaggatcagacgcagtgagtaagagctatcaaggagagtacagcgagtgtagaccgtggacctcggtgggccggggtggagacggacccctgttaatgatcttgaatgcccgcagaatgggaagaggcaggctggggtatcgccgatagattaaaaagggcctttaaaaagtgggggaaggctcctctgcgacttttaaaggacacagag

SEQ ID NO: 79532 - DNA, 537 bp, Homo Sapiens
ggcacgaggaaaaatgactcctttagaacaaactacataaaacaagctcctgaatatcaactcactgagacagaatcccaatcaatattagtttaaattacctgtctcccacacctagaatttcatttttgctaaaacccagcacaataccttcttcatttctcaccactttcccattttaatataatcagcaaatgtaattaaacctcattttttgcccattagtaagtactcaactaaatgctttgtttaccattaaatccaatgctttccaatcccaaagttcactgctaatgtgagctgattgaagccttatccagttggctccattaatattaatttgtggttaacttttgcttaatccgaaaatcagttttccatttttaggattgagttcatatctaaaataatttgtactaattttgaaggtcaaatatcaggggaaatcatgtcaaaaccattaataaaaccttaatagaaagcatctattgtattctgtttatattcacatcattcaatggcataagtctactaagt

SEQ ID NO: 79533 - DNA, 756 bp, Homo Sapiens
ctagccctcttccattcatttctcacacagcactttgctctgttaaatcctctctctgtctcagaccattgcttgccccttcaaagggtatggttcaggctcctttcaagacatttggagtttctctctggggaaagagagccccctactggtttggcttcagtctaggtccaccatccctctcgatctggcatcttggagattaatttaaaaggcaagctcaccacaatgtaagcctatggtctggccaaccttgcttttgggaactgtgacaccaaagcccccaggactatctgcctctccaggagccagatagaatgacatgcctttttcctaattgtccacattccacccccaacccactgccactgtgggccaagccatccatcttgcaatcttcatctaaaacagctctcatttcatgccagttttgctcaaacctgcaccgtcacaagatattcagaagatgaaaacgtagaagacacccctgaattaaaaacacttacatagcagtggctggaattactccaaaacgtgcccagtgatcgcactgtaacatgggattttctcacccaaataggcaactcatgcttcctgagtgtaatcaaagcatgtggtgttttggggccatatgcaccaggtttctattttagaaaccttcagctgtcttgcttatgtaccgtatgtaaatttattctttttaaaaatcacttttatttgattttgacttattaaatgctttaaaagccaaaaaaa

SEQ ID NO: 79534 - DNA, 471 bp, Homo Sapiens
cctttcatggcaggctgagggggttatactatagggaggattttaaaaagaggagctggtggactggtgagcagggcatataggtgacacctagccaacttgagaggtcagaatacatgattccagaaggctaaggagaaggctgccagttttgctcaaacctgcaccgtcacaagatattcagaagatgaaaacgtagaagacacccctgaattaaaaacacttacatagcagtggctggaattactccaaaacgtgcccagtgatcgcactgtaacatgggattttctcacccaaataggcaactcatgcttcctgagtgtaatcaaagcatgtggtgttttggggccatatgcaccaggtttctattttagaaaccttcagctgtcttgcttatgtactgtatgtaaatttattctttttaaaaatcacttttatttgattttgacttattaaatgctttaaaagccc

SEQ ID NO: 79535 - DNA, 803 bp, Homo Sapiens
aatatttaattgaacagggagatcatcgcctctcctccaggaacgcaactagaggaaaggacttgccttgcagcaagagagacctcagcgagccgggaagaggctcctccccacagaactgggcaccacccagcactgcccaccacaccaccgcgccacctcctcacctgcagcttgtggactttgtcattgagctccgcccgggcccgctccccatcgctgcacttggactgcagctcctgcacctgcgcctccagcttcttcttcttatgttccacctcctgcttggcctggcccaggacccgcagctccccggccagaccctgacctgtagtaatttgaggctgctgatgtcactcttatgtgtcatcaccaaaaagcatcaccaaaaagcattaccctcttgaactgctcaagctgctctgtgagctcctccaccgcctgtgcgtgtttctgcctcatctcctggacctgagcctcatgggaccgcgtctcttcatccagggccttcttcagcaccgtcacctcctgctccctcttggcccttggtgggaggaacacagtgaatggcagttgggtggagacagagggtcatctcagtgccgtgcaaaagaatgagagctcttccaggacccagagctgcagtcctcatcaccacccctctctagctgtgtgaccttgggtcattcacctaacatctctggacctaaaatttcctcagctgcaaaatgtggagcatatcacctgcctaggacatctgtaatgactggcaaacaaatacacaaagtaatagaattgaaaaa

SEQ ID NO: 79536 - DNA, 1077 bp, Homo Sapiens
  misc_feature (68)..(68): n is a, c, g, or t
  misc_feature (84)..(84): n is a, c, g, or t
  misc_feature (116)..(117): n is a, c, g, or t
  misc_feature (143)..(738): n is a, c, g, or t
  misc_feature (785)..(802): n is a, c, g, or t
cgtgatcagagtagtacggtaggccacgtcggttaacgggttcgtcaccagcccgctggaggacgacntacccgattgagtacnacgcgtgagtttgagaagcccacgctcccgannggagaaagcgacagtatcccgtagcnnnnnnnnnnnnnnnnnnnnnnnnnnnnnnnnnnnnnnnnnnnnnnnnnnnnnnnnnnnnnnnnnnnnnnnnnnnnnnnnnnnnnnnnnnnnnnnnnnnnnnnnnnnnnnnnnnnnnnnnnnnnnnnnnnnnnnnnnnnnnnnnnnnnnnnnnnnnnnnnnnnnnnnnnnnnnnnnnnnnnnnnnnnnnnnnnnnnnnnnnnnnnnnnnnnnnnnnnnnnnnnnnnnnnnnnnnnnnnnnnnnnnnnnnnnnnnnnnnnnnnnnnnnnnnnnnnnnnnnnnnnnnnnnnnnnnnnnnnnnnnnnnnnnnnnnnnnnnnnnnnnnnnnnnnnnnnnnnnnnnnnnnnnnnnnnnnnnnnnnnnnnnnnnnnnnnnnnnnnnnnnnnnnnnnnnnnnnnnnnnnnnnnnnnnnnnnnnnnnnnnnnnnnnnnnnnnnnnnnnnnnnnnnnnnnnnnnnnnnnnnnnnnnnnnnnnnnnnnnnnnnnnnnnnnnnnnnnnnnnnnnnnnnnnnnnnnnnnnnnnnnnnnnnnnnnnnnnnnnnnnnnnnnnnnnnnnnnnnnnnnnnnnnnnnnnnnnnnnnnnnnnnnnnnnnnnnnnaagaattcggcacgaggctgatgttggagcggccgcggctgtaggcnnnnnnnnnnnnnnnnnnaatgattctatttatttggaatcctaaaaaaagcaaatgaatctacagtcacagaaagcagatcagtggttgcctagggccagaggttaagggtagatagatgttgactgggacactatataggagggaatttagggggataatagaaatgccttatatcctgattgtgattgcagtaattacaaaagtgtatacatttttcaaactcatcaaactgtttgcttaaaatgggtatatcctgtttaaattatacctcagtaaaattgatttttatg

SEQ ID NO: 79537 - DNA, 714 bp, Homo Sapiens
  misc_feature (392)..(402): n is a, c, g, or t
ctagtagaagcatcttggatttgggatgtttttccaaattttggaatacctgcatacacacaataagatatcttggagatgggacccaagtttaaacacaaattcacttgtttcatatataccttatgcacatagcttgaaggtaactttatataacattatttttaataattttgtgcattgagaccaagtttgcataccttgaaccatcagaaagcaaaggtgtcattatctcagccactcatgtgggtaatttgtggttggttgatgtcaccatcattcctgactgaatgtatatgctaccaataagcagttattttcttatacttattcatgcataagtacttaacagtaaaaaatatgacataactcgcacaggaacaaggatggcnnnnnnnnnnntatgacacaccactgatacagtgaaaaaataatgtggtcagggtagctaggcaacagtagcatcaccagaaacctgtatcagctgttaaacggcaacaacaatggcaggctttcagtttcccacttaatgatgctgtattttaaaaggttattgtatactgtaattttatttttgtaggtgaagagaaacagaagcagctgaagggccaggaagtggatctttctagggatgtggcattctgctggatggctttttaaaatgggttttttcctttagggagaccgaataaactgtgttgtaaacctgcaaaa

SEQ ID NO: 79538 - DNA, 1231 bp, Homo Sapiens
ggacacagctggtatttaatagacgcacaccagatggacagatctgctactgacgttgtcctcaacacgtacccgcttcttctcacagggccgcaggcctgaccacgtcctcaatccgtcagggggcccgcaggtccgcacggggctgctgggaggggtgctagtgcccggccctgcggggacctgctgggcaccacagttttcctgcctgggagcgccctcggctgccgtgccctcggggacagcggcagcgggtgtggggccctggctgaaccggcgcagggcctgctcagctcgctcgaagcggacctcgcgcttccgcagctgctgctgcagggctttgtccaggccgttgcggatggacgggggctgggtcccgcgggccgccaactcctcctgcaccaggttctgtccctcgggccccaggtgggccccagcgaagcggcaggtcacgccgtaggggcaccggccgaaggtctcgaagagcacgcagcgggggcccaggtcggccggcttggtctccaggtagcgccccacgtcgtgcagaaagcggcagcgatcaccgaagaaacacttagcagccgactcctggattagggagggacacagcctgttcttgtcgtagttcgtgggcttcacatggggccggcccttgttttgtccccgggccctcttctgagtctgtagctgctccccgggctctgctgcctcctccgtctgcccgtccgccgtctgtccatcctccagtcggatccgcttagcctcaggctcagccagctcattgccagcagggtctcctacctcggtttcccggcaagtcttctcctgccctttggcttccaggaattggtgaaactgctccttggtggtgaggtattgacgcttaatgggcgccactcctcgttccaaagctccggctcccgagtcgccaccaccaccattctctagaggagcctccgccgttccctccgccatcggcgcccctcacatccgctctggagtgtggcgggaagaccttccgggtcacgcgtgtcttccctgattgtgctggggaagtgcgcatgctcatgtcgttccaatgacgccattgctcgctcgtgacgccacgggggcggtgcctgcacatgggtggagcctcaggtcctatataaactagagcctggccaattgcgaactggactgcaatcagcttctggactgaggaaatttaactgttagggtgttttggaaa

SEQ ID NO: 79539 - DNA, 1728 bp, Homo Sapiens
  misc_feature (164)..(164): n is a, c, g, or t
  misc_feature (183)..(183): n is a, c, g, or t
  misc_feature (189)..(189): n is a, c, g, or t
  misc_feature (193)..(193): n is a, c, g, or t
  misc_feature (199)..(199): n is a, c, g, or t
  misc_feature (201)..(201): n is a, c, g, or t
  misc_feature (208)..(208): n is a, c, g, or t
  misc_feature (214)..(621): n is a, c, g, or t
gaaaaagcagaaagtccccgtaggcggaggtccgaaccggagacccaggaggactttccgggggaaccctttgttttttatagtccggcgggttcccccaccttttgatttagcgtcgatttttgtgttctcgttaagggggggcggagcctatggaaaaaacnccaagcaaccgccgccttnttacgnttcntgcccntnttgctgncccttnnnnnnnnnnnnnnnnnnnnnnnnnnnnnnnnnnnnnnnnnnnnnnnnnnnnnnnnnnnnnnnnnnnnnnnnnnnnnnnnnnnnnnnnnnnnnnnnnnnnnnnnnnnnnnnnnnnnnnnnnnnnnnnnnnnnnnnnnnnnnnnnnnnnnnnnnnnnnnnnnnnnnnnnnnnnnnnnnnnnnnnnnnnnnnnnnnnnnnnnnnnnnnnnnnnnnnnnnnnnnnnnnnnnnnnnnnnnnnnnnnnnnnnnnnnnnnnnnnnnnnnnnnnnnnnnnnnnnnnnnnnnnnnnnnnnnnnnnnnnnnnnnnnnnnnnnnnnnnnnnnnnnnnnnnnnnnnnnnnnnnnnnnnnnnnnnnnnnnnnnnnnnnnnnnnnnnnnnnnnnnnnnnnnnnnnnnnnnnnnnnnnnnnnaagaattcggcacgaggctgaaagatggagatgtgattaagactgagggagccactctaagagttctatatacccctggccacactgatgatcacatggctctactcttagaagaggaaaatgctatcttttctggagattgcatcctaggggaaggaacaacggtatttgaagacctctatgattatatgaactctttaaaagagttattgaaaatcaaagctgatattatatatccaggacatggcccagtaattcataatgctgaagctaaaattcaacaatacatttctcacagaaatattcgagagcagcaaattcttacattatttcgtgagaactttgagaaatcatttacagtaatggagcttgtaaaaattatttacaagaatactcctgagaatttacatgaaatggctaaacataatctcttacttcatttgaaaaaactagaaaaagaaggaaaaatatttagcaacacagatcctgacaagaaatggaaagctcatctttagtttcagattaaagaaagctttgttttattttgctttgagagaatggtatgttttcttaactataggttattttatagagaatataaaagtataaaacattaaaaataaccctagatatactttaaaataatgttatatttatgctaaaatatgtaaattacactatacaaccatatgataggttatttctctaaccttgtcttctaacgttttaccaaaaattcataatctaatagtttatcagttttcaatagattaaataaaatgattactttaaaaataataaaatttatctaatttaaagttgatattatttttggccgttagttatctattactagtgatcagttatactgttttctatagctactttatttacagcacagatttctatgcacctttactctttcctcaacccttgtctctatctgtacataattgctttgtcttgatgtttctatcaactatatcatgactatctattggttccataactctgtatcatgtgtattttcttattctggtataccacaaatgattcatgcaaatgaatttttggtgattgaaaaatattaaattcccaatttaaagt

SEQ ID NO: 79540 - DNA, 587 bp, Homo Sapiens
aagaattcggcacgagggaagactctccagtagtgcctttgatgctctacatgcctgccaaaattggcgcctttggacgggagatgctgaagcggaacatcggtgtcgttgtggttggatttcctgccaccccaattattgagtccagagccaggttttgcctgtcagcagctcataccaaagaaatacttgatactgctttaaaggagatagatgaagttggggacctattgcagctgaagtattcccgtcatcggttggtacctctactggacaggccctttgacgagacgacgtatgaagaaacagaagactgagcctttttggtgctccctcagaggaactctccctcacccaggacagcctgtggcctttgtgagccagttccaggaaccacacttctgtggccatctcacgtgaaagacattgcctcagctactgaaggtggccacctccactctaaatgacattttgtaaatagtaaaaaactgcttctaatccttcctttgctaaatctcacctttaaaaacgaaggtgactcactttgctttttcagtccattaaaaaaacattttattttgcaaaaa

SEQ ID NO: 79541 - DNA, 1292 bp, Homo Sapiens
  misc_feature (50)..(50): n is a, c, g, or t
  misc_feature (714)..(734): n is a, c, g, or t
  misc_feature (843)..(857): n is a, c, g, or t
accccaggctggaacttagcatctgaagttgccgcttgtgggctctgggngaaagtgtagccccggagaggtaactgaggacatgagcaaccagtgccagggagggtgggatttgccagatgccaaaatcaggggacgggtggtggtgtctgtcagacacacacaggtcgccagtgacttcacacacacctcatgtgagaaccatgccttttttagtgtgtcctatttcatacctgtacacacttcctcgttttgtaatgagatttacttacacccaaacagatcctgaaagaaagcttcaagttttctcagatgatggatatgttttcactgtattcaataactgacggatgtaaggtgcacgtttcctgatgtgacgcactgtattccagctggtgatcaagtctgggaacagccgtaacaggtcaaccttgtggagccatcgcgagttagagggtgaaagatggcagaaaaaaaagtcttgtgtgtgagtgtgttttttgagtttgcatcaatcttaatgtctcttcataatacttttataatacattaagcctcttgtctacatatttggagagaatatgactttactagcagagaaatacaatatatcttgtctactggactgtaaaatatatgtatgaaataaaattagttccatttggtcttctagtatattaaagtgctatctgacgttgttatcctgtttttgcnnnnnnnnnnnnnnnnnnnnngttaactacagaccattgtttctaataagcagagagatctattttagtagtaaactgaaggtttagttgtgagcttcagattttgtgaactccagatgttgtgcggtgnnnnnnnnnnnnnnnaagacaacaactaaaaaaatgcaaggaatatgtacactggaactgtagtggtagctttcagtattgtaaagagattgttctatacggacctttttgctgtttatcctgtatgtaataaagtcctttctagatcctatgtgaaaagaaaagtgaagcaactgaatcttcagcatgttctcatcggcggagccttcttgtgtaatgtaaactgtgccatgttattaaaaaatgtgaactaagcttccagctgcttgtttgtgtgaggtgaccatcattaccttagggaagaagccatacctgtacaagaccgggctcttgaaaagaaacacctcgaacccagcccgtgtaagaacagaaggctcacctgcagtggctgaccaccctacccaactcggttagtgtctcaccaatttgttactataaacattgcacccc

SEQ ID NO: 79542 - DNA, 1134 bp, Homo Sapiens
  misc_feature (693)..(693): n is a, c, g, or t
  misc_feature (695)..(695): n is a, c, g, or t
  misc_feature (697)..(765): n is a, c, g, or t
  misc_feature (769)..(780): n is a, c, g, or t
  misc_feature (849)..(865): n is a, c, g, or t
  misc_feature (1014)..(1022): n is a, c, g, or t
aggcacagtaatagcttatttgccctataagaaccttcccagagcagcagaggcccttctactccctcttgactgtctcagcctctgggattgcagcctttgtagtgtgcttccttgcttcctatcagagggtgctgatccagaggctcagtaaccccatcaacttggtggccctggtgtctcacacttgtatccttctgccctcgagacctggcacagcagtatcccttgaagaaatcctgaggctttgtagagtgctccttgaccatgtttaataattcttccctcccctgcttgtctattttcttctcttcacggctcttcctataccttaggccagtctcaagcactcactggagacccttgggccttgggcgaccattgagtcctagtctcccttgtttgtgcccctgtaggaggtaggtccttttctcctccggcctagtaggggaccttgggtaacatcccatttttcggccaaggtgagttgttttaggataaaaaaatttaccacaaattctcatttaaatttccacagaaatcctgttcgtatccccattttgatttccctaagttccttgttctccctctaaaaagagaatgattgcaccctgcctgtttacctcaggattgttgtgattgtagaaacgaagctatgtgaaaattatataagtattataaaggtgaaatacnancnnnnnnnnnnnnnnnnnnnnnnnnnnnnnnnnnnnnnnnnnnnnnnnnnnnnnnnnnnnnnnnnnnnnncacnnnnnnnnnnnnccaaaccttcgccctcatctctcttctttcttctttcattctctttcacacaaaaccttttttgcgggnnnnnnnnnnnnnnnnntaaaaaaatttctttcaaacccccttctttttgtggggcccggggcggcccccaaaagggaaaaaaaagaaacacgtgccccacaaatcctgttttctcaaacggaaacacctctggcgccaacagacccacgggtgtgtcgggccttnnnnnnnnnacaaaaaaacaacacccctccgcggggggagaaccctcgggtttcctctcctgaaacaaccctcaccccaagagcgcggtttccttggggggcctttttatgtgggggttct

SEQ ID NO: 79543 - DNA, 345 bp, Homo Sapiens
agaaagtgtatagaaactattttaatgccaagatagttacagtgctatggggtttaaagactttgttgacatcaagaaaagactaaatctataattaattgggccaacttttaaaatgaagatgctttttaaaactaatgaactaagatgtataaatcttagtttttttgtattttaaagataggcatatggcatattgattaacgagtcaaatttcctaactttgctgtgcaaaggttgagagctattgctgattagttaccacagttctgatgatcgtcccatcacagtgttgttaatgtttgctgtatttattaattttcttaaagtgaaatctgaaaaatg

SEQ ID NO: 79544 - DNA, 1383 bp, Homo Sapiens
  misc_feature (36)..(36): n is a, c, g, or t
  misc_feature (97)..(97): n is a, c, g, or t
  misc_feature (126)..(126): n is a, c, g, or t
  misc_feature (155)..(156): n is a, c, g, or t
  misc_feature (174)..(174): n is a, c, g, or t
  misc_feature (177)..(177): n is a, c, g, or t
  misc_feature (182)..(696): n is a, c, g, or t
cgagcgtcggctaacgggggtcgtcacacagccagnttgacgacgacctacaccgactgagtactacagcgtagtatgagaagcgcacgctccccgnaggagaaagcggacagttcggtagcgcangggtcgaacaggagacgcacgaggagctnncaggggaacgcttgtatntantagtnnnnnnnnnnnnnnnnnnnnnnnnnnnnnnnnnnnnnnnnnnnnnnnnnnnnnnnnnnnnnnnnnnnnnnnnnnnnnnnnnnnnnnnnnnnnnnnnnnnnnnnnnnnnnnnnnnnnnnnnnnnnnnnnnnnnnnnnnnnnnnnnnnnnnnnnnnnnnnnnnnnnnnnnnnnnnnnnnnnnnnnnnnnnnnnnnnnnnnnnnnnnnnnnnnnnnnnnnnnnnnnnnnnnnnnnnnnnnnnnnnnnnnnnnnnnnnnnnnnnnnnnnnnnnnnnnnnnnnnnnnnnnnnnnnnnnnnnnnnnnnnnnnnnnnnnnnnnnnnnnnnnnnnnnnnnnnnnnnnnnnnnnnnnnnnnnnnnnnnnnnnnnnnnnnnnnnnnnnnnnnnnnnnnnnnnnnnnnnnnnnnnnnnnnnnnnnnnnnnnnnnnnnnnnnnnnnnnnnnnnnnnnnnnnnnnnnnnnnnnnnnnnnnnnnnnnnnnnnnnnnnnnnnnnnnnnnnnnnnnnnnnnnnnnnnnnnnaagaattcggcacgaggtttgctctgcgtcgactcctatatcaagcttatttttgcatcaacatcatgacagtgagttggagcaaagcagaatactgatggatgatttggggctgagccaggattcagcagaaggactctccatgtttaccggagaagaggaaatctttgcatttcagcgcacaatttcccgactcacggaaatgcagactgaacagtactggaatgaaggagacagaaccaagaagtaactgccacttttgcataaataaaactctagacaaatggttaacgcaggcagaactccttattgtgggacttgaaggaatcattttctcatcattaattatgcactttgtcctctggaccattttaatctaaaattgctctcaaggatctagtggattagtaagttaaacacttaacattttttaggtctgctttttcttatttggccttatttctgcaccatgaaattaaaatcatctcattcctgaagatgaatgtaggaccagacattttagcttcacattaaaccacctgaatgaaccttgaatgcacaagtaaatgcaagacgtctggataccttcaagctttggctgcatggtggtggcatgttagaaatacatcttttataatgggggaagaatgccctatgtttcaattcaaaacaaagacagttttccaa

SEQ ID NO: 79545 - DNA, 1580 bp, Homo Sapiens
  misc_feature (539)..(561): n is a, c, g, or t
  misc_feature (1335)..(1448): n is a, c, g, or t
gcaaggatactcgtcatcggccattgcactggggaactccctcaccccatggcttcccaacttgaaacccagatttacctccagggagaggtgagaaaaaaattgtaaatagacttgctaaagagcaactcagggttggggtgtgttttaattctcctgatcacttgaaataatctgtaggctgagtgcttatgggggtgggggagaagggtgactccagggtccttccattttgtgaagctctgggggtggagtgtgggcatctgaggccctatgatggcactacattgagctgtctgcccttccggaaacccaacctgcaatcaactgcaaatcaaattcttcacattccagctacagtctttctttccccattgaatctcagtccctggccatgtggtcaaggtggctttctgttaagctaccctaatttcgggaatgggaggggagagaggagggccattacaactctgccttcaagactcatctcttaaaaacaaaacgaaacaaaactacaaccaccatcaaaaccacacgcnnnnnnnnnnnnnnnnnnnnnnnggataactttaaccgaaggaagggtttggttccattcaactccacattcattgtgcctttacttgcattagatttctgtgctttcttcctttccctctttgaagcaattaaaatcttccttgataactgctgtttctttctactcttgtttctggcaatttagtgggttccttctctagtggtcttaaatctcattccactggtggcaagatggggcctagccttcttttcacatgtctaatcttttcctttctcatggtgccctccatggaagtcacagtcaacactgaataaatgactagaatgacacgtgtgcgtgcgcacgcgtgtgcgtgtgtgtgttcatctgtctgcatgtggatcaatttcttttagaaaataatttattgtatgatttattttggagttatattctgattacagtgctccctctcccaaatagcattgattttttcccccctctaaaatgtataatctggtctcaggttggattctttggtacatttctctcttctggatgccatgcagcttaattaaaaccttgcttaaaaacaaaaagtgaaaattgtgtactcttgtctggaataccgcctcaggtggtggcacagagaggggagaaaacctttgcctcataatttgggtaagtgtagtggtttgattccaggtcccttgaaaaagtagatctactgaattgggcagactcatctatagctttctgaggggtcttctctcctcctctccagctgtattttgaaaattacagttctagttggnnnnnnnnnnnnnnnnnnnnnnnnnnnnnnnnnnnnnnnnnnnnnnnnnnnnnnnnnnnnnnnnnnnnnnnnnnnnnnnnnnnnnnnnnnnnnnnnnnnnnnnnnnnnnnnnnnaacccccgtcttctactgaaaaataaccaaaaattaaccccggcggtccttgggcgcaatggccttggtgggtccccagatcttacctcggggaaaggcccccaaggctacggaaaaaaatacccccttttg

SEQ ID NO: 79546 - DNA, 1283 bp, Homo Sapiens
  misc_feature (180)..(180): n is a, c, g, or t
  misc_feature (189)..(189): n is a, c, g, or t
  misc_feature (195)..(195): n is a, c, g, or t
  misc_feature (211)..(211): n is a, c, g, or t
  misc_feature (592)..(616): n is a, c, g, or t
cccatcccagcccacagtccagtgtcacggatccgtcgacctaccctaacctggacatgagatgaaatgatcacatggactacccatgggacagcacaacacaacatatgggtgggtggttagggctacaagccttacacaggcgagggtggtgggagggtgccctgcacatccatctcngctcacacntgcctntatttgagctgcagcntgctgtccctcccattctaaagctgaatgtcaaacagtgccaaatgctggggcagggggtgaagaaccctctgtcccacccctagccaccagtgtcctccaagtgccccctcacctctccaggtgctcattgtaaccatttctcactagtgtcaggcccccagtgggaccacatgccactgcctgcacctttcggcagaggaacccccaccagacatcaccctttgccttagcaggggtgactttgtctctcctggctgggccatccttccgccaatctggcccttacacactcaggcctgtgcccactccctatctccttcccacccctacacacacactccctgcttgcaggaggccaaactgtccctcccttgctgannnnnnnnnnnnnnnnnnnnnnnnnggtggggactgggcacagctcttcacaccattcattctggtcatttcccccaaaggcatcccagcctgggggccagtggggaactgagggcaaggggatatagtgatggggctcagatggactgggaggagggggagggtgatgcattaattaatggcttcgttaattaatgtcatgttgcttgtcgctttctcagtgtgtgtgtgtggtccatgcccactgctggtgccagggtgggtgtccatgtgcacccggcctggatgccagctgtgtccttcgggggcgtgcgtgtaactgtagtgtagtcaggtgctcaatggagaatataaacatatacagaaaaatatatattttaagtttaaaaaacagaaaaacagacaaaacaatccccatcaggtagctgtctaacccccagctgggtctaatccttctcattacccacccgacctggctgcccctcaccttgggctgggggactggggggccatttccttttctctgccctttttttgttgttctattttgtacagacaagttggaaaaacaacagcgacaaaaaagtcaagaaactttgtaaaatatcgtgtgtgtgattccttgtaaaatattttcaaatggtttattacagaagatcagttattaaataatgttcatattttcacttcaa

SEQ ID NO: 79547 - DNA, 1099 bp, Homo Sapiens
gcatccatgccttcgagaaacctttcccacgggaaaggttattttcgtctaatgttacccataactcattcgctatttgacgtagttctcttaaataaatcatcctttagtaactcttagaattatctcctaatttacaaaaactgaaatgaaaaggaactactaaatcattagcaggagtggttgcaatcttattttcttgtaagtaaagggaaaatgataaaaatcaaccagaaaagaaattcatgggcaagaaaagtattttctaaaatctgtctccgtagagaaagatgccagcttgggtcgctccccgtcacccctaggctcggttaaacagtttggtcaaaggaggacagaaaagtccttatgagggcctctgcctgcttgctgtttgctgacttttggaccaggtcagaaggaaagtgttgtttgttcttgagactttggacacaatgtcctatgccttctgatagagatactctagcatttgaaaatctccttgcttctttttaagagctgaaaatgtcaccgttagcagaaagcacgactactgttgtctagaggtgtgggttgagctgttagttgttaaggacgagcagaagcaaaagaataaggaaattgagttttaggccttgggcagaccttgctgaacagctcacacatcctccgtcccctggcattaaaatacacacagttcctttgctggtgaagcctctttggggccaacgccaccccccatataggcagatgttcctgccagctcttgtctcctggggtgggtaggctcaggctgctgtgacaagttgggggacggagtccaagggatcctgggagattctaagtgtggctgatggaaccaaccagaatggggagggtggagggctcaggtgctggactctgtgtccccactgtggccctccttttgaagtgggtgcctcccctaacaacacctgcctggcccacctgcatcctaaacccaggacaagaaagacacagctgcagggaggaacagaagctgctggaggcccctcggagaacagactcaggccagggtcccactggtcgtacccttggatgtgtggcaggctgtcttgccccc

SEQ ID NO: 79548 - DNA, 1067 bp, Homo Sapiens
  misc_feature (486)..(504): n is a, c, g, or t
  misc_feature (539)..(941): n is a, c, g, or t
  misc_feature (947)..(947): n is a, c, g, or t
  misc_feature (950)..(951): n is a, c, g, or t
  misc_feature (1013)..(1013): n is a, c, g, or t
aagaattcggcacgaggattttctcggccctgccagcccccaggaggaaggtgggtctgaatctagcaccatgacggaactagagacagccatgggcatgatcatagacgtcttttcccgatattcgggcagcgagggcagcacgcagaccctgaccaagggggagctcaaggtgctgatggagaaggagctaccaggcttcctgcagagtggaaaagacaaggatgccgtggataaattgctcaaggacctggacgccaatggagatgcccaggtggacttcagtgagttcatcgtgttcgtggctgcaatcacgtctgcctgtcacaagtactttgagaaggcaggactcaaatgatgccctggagatgtcacagattcctggcagagccatggtcccaggcttcccaaaagtgtttgttggcaattattcccctaggctgagcctgctcatgtacctctgattaataaatgcttatgaaatgnnnnnnnnnnnnnnnnnnngcctacagccgcggccgcctcgtgccgaattcttnnnnnnnnnnnnnnnnnnnnnnnnnnnnnnnnnnnnnnnnnnnnnnnnnnnnnnnnnnnnnnnnnnnnnnnnnnnnnnnnnnnnnnnnnnnnnnnnnnnnnnnnnnnnnnnnnnnnnnnnnnnnnnnnnnnnnnnnnnnnnnnnnnnnnnnnnnnnnnnnnnnnnnnnnnnnnnnnnnnnnnnnnnnnnnnnnnnnnnnnnnnnnnnnnnnnnnnnnnnnnnnnnnnnnnnnnnnnnnnnnnnnnnnnnnnnnnnnnnnnnnnnnnnnnnnnnnnnnnnnnnnnnnnnnnnnnnnnnnnnnnnnnnnnnnnnnnnnnnnnnnnnnnnnnnnnnnnnnnnnnnnnnnnnnnnnnnnnnnnnnnnnnnnnnnnnnnnnnnnnnnnnnnnnnnnnnnnnnnnnnnngggcancannaggcaggaccgtaaagggcgcgttgctgccgttttcataggtccgcccctgacagcacacanatcgacgtcagtcagaggtgggaacccgacagatataagatcaggcgttccctg

SEQ ID NO: 79549 - DNA, 821 bp, Homo Sapiens
  misc_feature (23)..(23): n is a, c, g, or t
  misc_feature (68)..(68): n is a, c, g, or t
  misc_feature (95)..(95): n is a, c, g, or t
gtcaaaagggaatactttctctntaaaggatagctcccacgcatacgggttgagtgggtattttcttnttgtgctggaatccagaggctccctcntgttctcaaggaaaatgtcagataacccacctgaccctgcttatgcacgtcattcaggttgcaagacacagaaagcttgtgccttcagtcaaggggttccttcacatgatagtggtcataaccccctttgccctttattaagccattgtccctcaactccaaacctacctttctatgctctgctctgtgatgctgggactggactctgcaaatgccacttctcctttgcccactggctcccattagagtactctagagggtgcctacaaacctggggcatcaagaaggagcagctccttccagtgtgcttctggctcctgtcaggatcaccccagcaatgctcacattgtctgtatatgccaagcaccagctcgttttccggcattgtcagagccagcttcattatgcccctccccagcagagcactggctgacctcagaggcctgagtatttgattcatgcccctcacttctaagctcttgagacaccagaaccagccaaacaaaaatctctccttagagatctgggtcccatttctgtggcgtccctcctcccaactctaggtcctgatggcctcacccttccgtttgttaccccagacacgggggtagaagcagcattctgtgggtacagccttggttgccccgatgccttctttgcctcctcagtctcagtcccatgcctgtttaaccagcttcttatattaaagtctctatgttgaaaaaa

SEQ ID NO: 79550 - DNA, 879 bp, Homo Sapiens
  misc_feature (850)..(850): n is a, c, g, or t
ggcacgaggcagtttgactcccaagtaccaaaatattctgcaaaatggatagatggaagtgcaggtggcatctctaactgtacacaaagaattttggagcagagggaaaatacagactttggactttctatgttacaagattcaggtgccactttatgtcgtaacagtgtattgtggcctcatagtcacaaccaggcacagaaaaaagaagagacaatctctagtccagaggctaatgtccagacctagcatccacattacagcagagaggaattgaattcgatgactcttggtgaggtagagcaactgaatgcaaagctcctacagcaaatccaggaagtttttgaagagttaactcaccaagtgcaagaaaaagattctttggcctcacagctccatgtccgccacgttgccatcgaacagcttctgaagaactgttctaagttaccatgtctgcaagtagggcgaacaggaatgaagtcgcacctacccataaacaactgacctaaacagacttacttcgtatgccctgccctttattggtctcccagacatgcaaactttgaagaagtttgaagaaagttgtggtccgtttttttatggtcattaaatttgccaaacataaggcagtatttaacatctttgtcaaataaagcagatcattatactctagtcttctagggctaatcattttggctcatttggggactcttttttcccagaattactaaacaaattttatcacatgtgactacttaaatatactgtacagtgcatttataacatttaatcactgtcaaacaacagttactcctagtgaactactaggtattttaaggggaatggatcnacaccctattatatggcaattattaaatt

SEQ ID NO: 79551 - DNA, 1053 bp, Homo Sapiens
  misc_feature (193)..(211): n is a, c, g, or t
  misc_feature (528)..(538): n is a, c, g, or t
tcctgagctcaggcaatcggccaccttggcctctgaaagtgctagaattacgggcatgagccaccgcatccagccagaaagatacatatctaattctagaaatagcatgcagtatcagtcatagtaacagccatgtgctgacctaaataaaatttcttgatattgtgtatttaacctgaagtattgagctagnnnnnnnnnnnnnnnnnnnggtgctgaacattttggtctaattctttggcttcttagaacattttaaaaaatctatgttttgctatcagccaaagtaaatgtgttcacactaacatataagttactaaccttcattatacagcaaagctaaaaagtggtgggatatttggggtcttaatgaaaattgtatcatttaattccataaatattaaaatatttgggtaccttttaagctttttttctttccttctataatggtggtacaagttctatattcattcagtttaatctcatttgaaattgtttaaatcagagtacatgtaaatatttgtgggnnnnnnnnnnnggtttatagactcgagctttccttttacacagttttttttagggaaaaactaaagctattaggaaattctaaatcttgttgatgaagagttgggctttctttgatataattaataaaagggatgtatggtatttatggctgggtaggaccagaaatgcactttgtattacagagtgttaaggctggttgctatagtatggaacagaaacacctctccttggtctccctagtaatggttcaagttcttcccaggaagtcttacatattataactttgttcattatctttcccttatagcatcattttcctttttgtagagtggaaatcagactagctgctaaacatattaaggttaatcctccagaaatgtactggggaggcattttagtcacaacaacttacatttggctttggaagttgttaacaaagcatagtcgatgtttttaaatcaaacataatttgtatcttggaacttacattttgacatttgaataaaacaaaaagactaaatgaaa

SEQ ID NO: 79552 - DNA, 772 bp, Homo Sapiens
  misc_feature (16)..(16): n is a, c, g, or t
gggttctctctgggtntggacatgaaatgtaagaaaagatttcactggagcagctctcttaaggagaaacaaatctatttagagaaacagctggccctgcaaatgtttacagaaatgaaattcttcctacttatataagaaatctcacactgagatagaattgtgatttcataataacacttgaaaagtgctggagtaacaaaatatctcagttggaccatccttaacttgattgaactgtctaggaactttacagattgttctgcagttctctcttcttttcctcaggtaggacagctctagcattttcttaatcaggaatattgtggtaagctgggagtatcactctggaagaaagtaacatctccagatgagaatttgaaacaagaaacagagtgttgtaaaaggacaccttcactgaagcaagtcggaaagtacaatgaaaataaatatttttggtatttatttatgaaatatttgaacattttttcaataattcctttttacttctaggaagtctcaaaagaccatcttaaattattatatgtttggacaattagcaacaagtcagatagttagaatcgaagtttttcaaatccattgcttagctaactttttcattctgtcacttggcttcgatttttatattttcctattatatgaaatgtatcttttggttgtttgatttttctttctttctttgtaaatagttctgagttctgtcaaatgccgtgaaagtatttgctataataaagaaaattcttgtgacttt

SEQ ID NO: 79553 - DNA, 761 bp, Homo Sapiens
  misc_feature (612)..(612): n is a, c, g, or t
cctaaagctgcaagaaaaagcatcagagagtgatgcagagatcaaagacatgaaagaaaccatatttgaattggaagatcaggtggaacagcaccgggctgtcaagttacacaataatcaactcatcagtgagctagaaagtagtgtgatcaagctggaggaacagaagtcagacctggagaggcagctgaagactctgaccaagcagatgaaggaggagaccgaggaatggaggcggttccaggcggatctgcagaccgcagtggtggtggccaatgacatcaagtgtgaggcccagcaggagctgcgcaccgtgaagaggaaactgctggaggaggaggagaagaatgcccggttgcagaaggagctgggggatgtgcagggccacggcagggtggtcaccagcagagccgcccctccacctgtggatgaagagccagagtcctctgaggtcgatgctgctggtcggtggcctggtgtctgtgttagcagaacatctccaacacccccagagtcggcaaccaccgttaagtcacttatcaagtcatttgacttgggacgcccaggtggagctggacagaatatttctgtccataagacccccagaagtcncctaagtgggataccagtgaggactgctccagcagctgctgtctctccaatgcagaggcattcgacttacagcagtgtgcggccagccagcagaggggtgactcaacgcttggaccttcctgacccttccctctcagatattctaaagg

SEQ ID NO: 79554 - DNA, 855 bp, Homo Sapiens
cgaaggatgcagagagagcgatcaacacgctgaacggcttgaggctccagtcaaaaaccattaaggtgtcgtatgctcgcccgagctcagaggtgatcaaagacgccaacttgtacatcagcgggctcccgcggaccatgacccagaaggacgtagaagacatgttctctcggtttgggcggatcatcaactcgcgggtcctcgtggatcagactacaggtttgtccagaggggttgcgtttatccggtttgacaaacggtcggaggcagaagaggcaattaccagtttcaatggtcataaacccccaggttcctctgagcccatcacagtgaagtttgcagccaaccccaaccagaacaaaaacgtggcactcctctcgcagctgtaccactcgccagcgcgacggttcggaggccccgttcaccaccaggcgcagagattcaggttctcccccatgggcgtcgatcacatgagcgggctctctggcgtcaacgtgccaggaaacgcctcctccggctggtgcattttcatctacaacctggggcaggatgccgacgaggggatcctctggcagatgtttgggccgtttggcgccgtcaccaatgtgaaagtgatccgcgacttcaacaccaacaagtgcaaagggtttggctttgtgaccatgacaaactatgaagaagccgcgatggccatagccagcctgaacggctaccgcctgggggacaaaatcttacaggtttccttcaaaaccaacaagtcccacaaataactcgctcatgcttttttttgtacggaatagataattaagagtgaaggagttgaacttttcttgttagtgtacaactcattttgcg

SEQ ID NO: 79555 - DNA, 1035 bp, Homo Sapiens
  misc_feature (221)..(221): n is a, c, g, or t
gtgaaagtgcacccgtccgtgaattcttccgcaaaaagcatgacgagtattgtgggactgtgtttgagggaaccgtaagattgtgttccccaggcgtacctttcagctggctatgccatcgcgcttcttcatattgtcatgtcacaaaccaaccctgtgcacttgttggtgttgaagtcgcgggatcactttcacattggtgacggcggcaaacggcccanacatctgccagaggatcccctcgtcggcatcctgccccaggttgtagatgaaaatgcaccagccggaggaggcgtttcctggcacgttgacgccagagagcccgctcatgtgatcgacgcccatgggggagaacctgaatctctgcgcctggtggtgaacggggcctccgaaccgtcgcgctggcgagtggtaccagctgcgagaggagtgccacgtttttgttctggttggggttggctgcaaacttcactgtgattgggctcagaggaacctgggggtttatgaccattgaaactggtaattgcctcttctgcctccgaccgtttgtcaaaccggataaacgcaacccctctggacaaacctgtagtctgatccacgaggacccgcgagttgatgatccgcccaaaccgagagaacatgtcttctacgtccttctgggtcatggtccgcgggagcccgctgatgtacaagttggcgtctttgatcacctctgagctcgggcgagcatacgacaccttaatggtttttgactggagcctcaagccgttcagcgtgttgatcgctctctctgcatccttcgcggtcacgtagttcacaaagccatagcccaagctgtgtcctgctactttatcccgaataagttttgcagattcaacttcaccaatgctgctgaacaggcttcgtaactcatcctgggtcatgttctgagggaggtagttgacgatcaaattcgttctcccgatgtcacccctgcagtcttcggccatgtggtcttcataaccattagacattgtatttttcaaaaatctggat

SEQ ID NO: 79556 - DNA, 692 bp, Homo Sapiens
tggggtctcgcaatattgcccaggttggtcttgaactcctgggctcaatcgatcttcctctctcagccacccaaggtgctaggattacagggataagtcactgtgtccagcctggagtcactgttttgattcccatgaaagacaacgccccatcggaagtaaacggctttcctacagacacctttctgatggaggttgtggtgtggagctgcagaatgattctgaaacgcgctctctgacgggatcagtctatcatccccgtggtttctattctgtggctgtgccgtcgcctgccagcggggctaagtatggctttcaggagcgcacaccctcccgacccacctgaatctctgcgcctggtggtgaacggggcctccgaaccgtcgcgctggcgagtggtacagctgcgagaggagtgccacgtttttgttctggttggggttggctgcaaacttcactgtgatgggctcagaggaacctgggggtttatgaccattgaaactggtaattgcctcttctgcctccgaccgtttgtcaaaccggataaacgcaacccctctggacaaaccttttcaacaaatcaacaaaaacggagttagggggaaaaacgctaggactttcaaaactgaaaagcaaaagtcaggtcagtctactgtgggccaggctagaagtctggacaaaccttttcaaaa

SEQ ID NO: 79557 - DNA, 1136 bp, Homo Sapiens
  misc_feature (348)..(370): n is a, c, g, or t
cgtatgtgaatatagaccagtggtgtaaaaagcaggctggtacggtcggaatcccgggatatcgtcgaccacgcgtcggcggagcggctgggtaggaagcaattgttctcaaacttcactagccccgtcggcgcggacgcttgtcgagaatgcagattcctgggtactgccagatacgaattgagcataccacaaaaaagttctcattttgtgtcctcccatcccattctcctcactaaccaaaggctaggaattatctgtgaatgtaggaccactggatttgcagtcttcatctgacactgtggagagtttctaggaatgaaacagatatatggccttgggtccccnnnnnnnnnnnnnnnnnnnnnnnaaatagagacgagcatctcactatgttgcctagggtagtcttgaactcctggcctcaagcaatccccacccgactccgcctctcgaagtgatgggattacaggcataaaccaccacgcctggccagaaggtgctttaacaccaaatctgaaaattgttcagaagagaaacattgagcatgaacaccatctgtgcgagtcatttacttattgcccctcacctctaaatctaccttctgtactcttcttccctgtaatgatggggctagttgtcctcaaactgtttctcagacttctttttaagcttgcttcctgttcagttctgccaataggggtcactagagagagactgggaggcagaaggagagaatatgcttcctgtttttttctgttcttgttaatgttgcttacaggaccagcaatgcttcttcacctagagacacttctcccagcagtggcagtgccacttcagcttctttcagcactactggaatcagcctcagtgattccccctgtacccgctcagagattatccacagcagccagatggttctaccttccacaaagattgtggttgcaattctgggcttctaagttctggttacttcatatttttccttttgttcctccagccctagaggtggtagctgctttctgaagttattatttctagatgacttttggtttttcagcctttgtattttgcttttcagccctctaatgcctgtataaccaatttccctgtaataaataaatttcctccattga

SEQ ID NO: 79558 - DNA, 939 bp, Homo Sapiens
  misc_feature (278)..(286): n is a, c, g, or t
tgtggctaagaacaagtgggtcaaaaagcaggctggtacggtccggaattcccgggatatcgtcgaccacgcgtcgtttatataaaacctgacacaggcatagtacaagtatttcctgcatgttgctaaaatgttttattgtagctccacattctggtgtagtttaaaatgcctttgggggcagtttgaagcagttcttcatgccacttagtttgaaaataaaattctagatatgcaaatgattttcttagaaaacttcacaaaataaaagatcttgnnnnnnnnnccatagcacagtaatgaatgtggttatcaatcacatacttttttggattatattgtagcaaaaagttgattagcttaccaagattattaatagcaatgtatgtgttataatacaacttagtacattaaagctacgaaaactcatcctggctgtaggatagtaataaaggaagaattatgacttcattatgaaaaaaagaagttttaaagttttcaattacgagcaatttggaagaaaaaacctaaggtgcttttcaaaagagtaactgaaattgttgcaggccaaaacagcaatatgatatctcagatttagttcaataagaacagtgaaacttttggttcactaataaattctgagtaaattagtggtgaagacaaaatataacttgttttagtgagccactgaggaaagaatatgcttattacaaagacaaaatgtggtgcagaaactatcttgcacctgtgtgcataaactgttagtcgtgactgacttggtgtgttgctattgtgtttctatatactccgtccaatatagataatgttttaataacaactgtgggataaaagttatcttccccttggaaagactaatgagcacaatgatattaatcacttttatggtgaataataaatgcaataattgcctcatgggtg

SEQ ID NO: 79559 - DNA, 966 bp, Homo Sapiens
  misc_feature (30)..(30): n is a, c, g, or t
  misc_feature (32)..(32): n is a, c, g, or t
  misc_feature (92)..(102): n is a, c, g, or t
  misc_feature (104)..(249): n is a, c, g, or t
  misc_feature (252)..(267): n is a, c, g, or t
  misc_feature (305)..(361): n is a, c, g, or t
  misc_feature (551)..(617): n is a, c, g, or t
caccccacccccccaaccaccaggtggggntnacaaaaacaggctggtaccggtccggaattcccgggatatcgtcgacccacgcgtccgannnnnnnnnnngnnnnnnnnnnnnnnnnnnnnnnnnnnnnnnnnnnnnnnnnnnnnnnnnnnnnnnnnnnnnnnnnnnnnnnnnnnnnnnnnnnnnnnnnnnnnnnnnnnnnnnnnnnnnnnnnnnnnnnnnnnnnnnnnnnnnnnnnnnnnnnnnnnaannnnnnnnnnnnnnnnagtagagacagggtttcaccatgttagccaggatggtnnnnnnnnnnnnnnnnnnnnnnnnnnnnnnnnnnnnnnnnnnnnnnnnnnnnnnnnntggcatgagccaccgtgcctggccagcaattagaattttaacactggcagttatgaataatatgaaggagaggtagatttctgagtgattctggtttaaccagctgggtggatggtggttccacgtattcaggtggcaaacaggaaaaacatgtgttcgaagaagaatggaggtaggtggtctcttaagnnnnnnnnnnnnnnnnnnnnnnnnnnnnnnnnnnnnnnnnnnnnnnnnnnnnnnnnnnnnnnnnnnncaaacttgtcagctattatttgttgagtacgtactatttgatttatgaccacaggcagctgagcctcagtgttggtgcctagtgtacaagattgttaaagaataaagttattttgcaaagtgtaacccatttttagcactgacatagcactgacagtagctgctgatctcattatgggctaaaataagacaatattcaaaggtcagagatatctagcccgaatctgatggaggctggatttcagattttgttacagaattagacagaggaaacagaggggacaggctcattaggtggagtgtgggtagggagaaaaaaacagctttgatataattattggatcattgca

SEQ ID NO: 79560 - DNA, 1021 bp, Homo Sapiens
  misc_feature (56)..(56): n is a, c, g, or t
  misc_feature (73)..(73): n is a, c, g, or t
  misc_feature (91)..(91): n is a, c, g, or t
  misc_feature (754)..(766): n is a, c, g, or t
  misc_feature (770)..(949): n is a, c, g, or t
  misc_feature (956)..(958): n is a, c, g, or t
gttgaatggtggttccacgtattcaggtgccaaacaggaaaaacatgtgttcgaangaagaatggagctaggntggtctcttaagaatggnttaagaggcttgggagtcagactgcttgggtttgcatcccagctttgccgttttccggctatcaaacttgtcagctattatttgttgagtacgtactatttgatttatgaccacaggcagctgagcctcagtgttggtgcctagtgtacaagattgttaaagaataaagttattttgcaaagtgtaacccatttttagcactgacatagcactgacagtagctgctgatctcattatgggctaaaataagacaatattcaaaggtcagagatatctagccagaatctgatggaggctggatttcagattttgttacagaattagacagaggaacacagaggggacaggctcagttagggtggaggtgtggggtagggaagcaggacttgatataaattattggaatcattgtcttttaaaccagtggtttatgtcagggtatagcgtttcaagggatttgagggtcagatggggaaatgtagccccttattttgccagtgtgaagcagataccctgcttttctttacagtagcggagtcagcttaagagctttaaaggtcctaaacttcaaaaacattacagtgccccatcctccgccttaatgtaattcaaaatacaaacaatactaaactgtaaaataaatgtaacaaagtccaataaagnnnnnnnnnnnnnctcnnnnnnnnnnnnnnnnnnnnnnnnnnnnnnnnnnnnnnnnnnnnnnnnnnnnnnnnnnnnnnnnnnnnnnnnnnnnnnnnnnnnnnnnnnnnnnnnnnnnnnnnnnnnnnnnnnnnnnnnnnnnnnnnnnnnnnnnnnnnnnnnnnnnnnnnnnnnnnnnnnnnnnnnnnnnnnnnnnnnttttttnnncccctcggcccccaaaaaaaatttttaaacaactttttttagggggcggcggcccccccaaga

SEQ ID NO: 79561 - DNA, 583 bp, Homo Sapiens
  misc_feature (139)..(188): n is a, c, g, or t
catagttctctcttccaaattaacagcactctaacatactgtgacaatgtccggcatcctttagggcattttgttacccagaattttctaactatggaagttactaatgaatgcttctattacgcttattacagggtgnnnnnnnnnnnnnnnnnnnnnnnnnnnnnnnnnnnnnnnnnnnnnnnnnnccaacattagtgctgttagaagtcccacgggctgagcaagtgctggctgcaaggcattgaggcaagcaggcagggctgctgctcaggagccacggcaatgccaccgtgtggccatactatcagtgcagtgtataattcaggctaaaaacaaatctgcggcatttgcattatttcaaattttgagcattaagaagggttttatttttcaaatagcataacgaaaattagcataaaatgcattgcactgctttaaatcacctatttgaaaccttcatataatggcttgaagttattagtattgaattttaggtgtttgttctggctcttcagcctatatttccattcctcgaaaatatacttgcatcataaaattttaaacctatgaaatctattct

SEQ ID NO: 79562 - DNA, 1422 bp, Homo Sapiens
ggccgggcccgccattaaactctccggttattaggccagtacccaatctaataccgaaaaggttatcagtcgacggtaccggacatatgcccgggaattcggccattacggccgggggaagacctgattgggaatagtcgaaagccttgatatgtgcaaagaaagaaccatttgatcaacccagttcttaatacaggatactaacttaaaatatagactcaagttatacgataattcaaacatttattgtatttatactattctatatgtacttttccaggaaccaggaatacaaaactgacatttctctgtacagaggctcagactagtagagaacagttaggtacgccgttaattataaactaatatgtatcatcaattatgggtttttatgggggtttggcaggtggaagggaccaggagagatgatgagtgatgatggtaatgtagtctttaggaggatgcaattataacattgctcttcctttcacgcaccacatgatttagcaagtacttcatattggctccaccattaacatggtcaatggcttctggatactcacagttcaggcaacagtttctcctgaagattttttacctctcccatctttaaagaaattgtctggatgtccatgaaagatgctgacacttgtattaattcattaaaaaacaccaccccctccctgaaataaactaaaaagtaatgaattcatagaaaaaaatttcaccaagattgaaactagagaatatacctagacttgcactttgagctttgagaaatgtgtacctattcaccattccaacgtgaagaagctctgcagtaggaaaaataattaacacacttatagtctactgcccatgtaaggatcagctccggctaagaggccaaagatgggtgacatcgttatgctctgcctttattttttctttcttacccacttagcttcctaattggaggaaggaggcgtggtaaaggtatatgaagactatggtttaattagaccagaaaacactgtcataatctctggggtcatcagaatgtccagttttgtctttgggccaagataagggcagtgggatttatgatgtgttgtttatagtctgaaactactctggtgatcaccagggtcagtttctttaatgatggtttccaactggcctaatacattaagtaagactggctgataacatgaccagacagacataaagaccctgttgggaatgacattgaactctcaaagtcaagatttcttacacaaatctatcagctggagaaaatgaaggcagtgtggtatatgtgtgcaaataaggacattatgaagcttaaatatggaatgtctcttggacccccgatgtcatctgtattctctttttcttcttgtactatatcctttgcctgtaaataaaaggtttatttgaaaa

SEQ ID NO: 79563 - DNA, 2213 bp, Homo Sapiens
  misc_feature (2136)..(2154): n is a, c, g, or t
agctaggtagaggctgcggtaaaatcggcacgagggtcggtcgtgcgttgagaggaaagggaaggaggaggtcccgaatagcggtcgccgaaatgttccggtgtggaggcctggcggcgggtgctttgaagcagaagctggtgcccttggtgcggaccgtgtgcgtccgaagcccgaggcagaggaaccggctcccaggcaacttgttccagcgatggcatgttcctctagaactccagatgacaagacaaatggctagctctggtgcatcagggggcaaaatcgataattctgtgttagtccttattgtgggcttatcaacagtaggagctggtgcctatgcctacaagactatgaaagaggacgaaaaaagatacaatgaaagaatttcagggttagggctgacaccagaacagaaacagaaaaaggccgcgttatctgcttcagaaggagaggaagttcctcaagacaaggcgccaagtcatgttcctttcctgctaattggtggaggcacagctgcttttgctgcagccagatccatccgggctcgggatcctggggccagggtactgattgtatctgaagatcctgagctgccgtacatgcgacctcctctttcaaaagaactgtggttttcagatgacccaaatgtcacaaagacactgcgattcaaacagtggaatggaaaagagagaagcatatatttccagccaccttctttctatgtctctgctcaggacctgcctcatattgagaatggtggtgtggctgtcctcactgggaagaaggtagtacagctggatgtgagagacaacatgggtgaaacttaatgatggctctcaaataacctatgaaaagtgcttgattgcaacaggaggtactccaagaagtctgtctgccattgatagggctggagcaaaggtgaagagtagaacaacgcttttcagaaagattggagactttagaagcttggagaagatttcacgggaagtcaaatcaattacgattatcggtgggggcttccttggtagcgaactggcctgtgctcttggcagaaaggctcgagccttgggcacagaagtgattcaactcttccccgagaaaggaaatatgggaaagatcctccccgaatacctcagcaactggaccatggaaaaagtcagacgagagggggttaaggtgatgcccaatgctattgtgcaatccgttggagtcagcaggggaaagttacttatcaagcttgaaagacggcaggaaggtagaaactgaccacatagtggcagctgtgggcctggagcccaatgttgagttggccaagactggtggcctggaaatagactcagatttcggtggcttccgggtaaatgcagagctacaagcacgctctaacatctgggtggcaggagatgctgcatgctatctacgatataaagttgggaaggaggcgggtagagcaccatgatcacgctgttgtgagtggaagattggctggagaaaatatgactggagctgctaagccgtactggctatcaagtcaatgttctggagtgatcagggcccccgatgttgggctatgaagctattggtctggtgggacaggtagtttgccaccagttggtgtttttgcaaaagcaactgcacaagacaaccccaaatctgccacagagcagtcaggaactggtatccgatcagagagtgagacagagtccgaggcctcagaaattactattcctcccagcaccccggcagttccacaggctcccgtccagggggaggactacggcaaaggtgtcatcttctacctcagggacaaagtggtcgtggggattgtgctatggaacatctttaaccgaatgccaatagcaaggaagatcattaaggacggtgagcagcatgaagatctcaatgaagtagccaaactattcaacattcatgaagactgaagccccacagtggaattggcaaacccactgcagcccctgagaggaggtcgaatgggtaaaggagcatttttttattcagcagactttctctgtgtatgagtgtgaatgatcaagtcctttgtgaatattttcaactatgtaggtaaattcttaatgttcacatagtgaaataaattctgattcttctaaattnnnnnnnnnnnnnnnnnnncctgagcaggcggccgcaagcttattccctttagttgagggttaattttagcttggcac

SEQ ID NO: 79564 - DNA, 398 bp, Homo Sapiens
ttttttaaggaccagatatagcctttaattcctaatgttcaaaaacaatcctgtcttctaaatcacaacttttcgagttacaagatttatccacttcaaataaggataccttttataaagtactttcttgtggttttacagatttcaaggtgcttctacgtggcttcagcaattctcacaacaaaccctcagtgggtcagggtcttctaagattaaaatgttaacaccaatgcgtgtgaagtacagtgaagtacagtgaggttaaggctcagtggcaaacgttaaagaggcccacacaacacaccagggatcagagccaggtcaaattcttgctccccacctccaccccacctcaagaagaaatttatttcttgtttttatttttagaaacagtctca

SEQ ID NO: 79565 - DNA, 802 bp, Homo Sapiens
  misc_feature (61)..(61): n is a, c, g, or t
  misc_feature (71)..(72): n is a, c, g, or t
  misc_feature (175)..(175): n is a, c, g, or t
agggaagagatgaatgtaagtgagagtgcagagcactggggagggtgacagtgaaatgcantagagcagcnnaagagagtcctagtctgttctcacataaccggacttgaacgctccagtgcgagcagagtgctgggggtggattccactgccgaaccacggcagctttgcttanctcttcagcatgggggtggtaactagctgcacagcaagttatgaaatggaaagcaagcttaacagctgtaatctcatcggataccctggagcaaatgccttgggattgcctgaagtgaagtgtttagcatccaccaaatagttgagtttctaagatgggccatgcgggatccctgccacacgggtgtgggggcagcgcgctcctccctgcctcggctgctgtgtgtcttagtcttcatgtttcccctgggcgtcccctctggtccctgtccatcttgtgcaccatgtgtccctgagggcgagtcacacctgtgtcttgagtctgctgtaaggtgttcagtctacctcaaggggtcatcatggtaagctctatcccacggcatcctccgtccatcaccacacacactggaatgtatcccccccgccctgccccttcgataacctcctgaccttgtctttcctataatcaccacaaactcctagtgcaaattggatgctgctttaaatgtgaaaacaattgttcaaaagctataaaacctgaatgaaagctgaagctgaatttataagccttgttgcatatgagccaaaagtgcaaaaagctctatataatgaactaacctgccactcg

SEQ ID NO: 79566 - DNA, 398 bp, Homo Sapiens
tccatctcaaaaaataaatgaattaattaaaagtatggctgttgagctaacagatgattttataacatgacccaatgctatcttgatccaacttaagcctaagaatcgttgctccccaccccgttcatcaaaaacatcagcagagactttttgggcatgcaaggaaatgttttttatttcataattattttgagatttattttggtgatgtgtttctgactgactgccatattctttgttctcataatttctctactagtattttcactcccaacccccgtgccattcccacttgatttttatgtctgctggcagtgagaggctaaaatggccaacttaagccaaagctgtaaacaacagttgaagtaagtctttcaataaagactagactatatgat

SEQ ID NO: 79567 - DNA, 963 bp, Homo Sapiens
  misc_feature (868)..(912): n is a, c, g, or t
gagccactgtgctcggcctctgacactaaataatgtcagttaagggaatgagaaaaagggcaggtcacgcacctggaacctgggctgtgccaaaaggtcaaatgtgcacgtatatacagtgactaggtgacaaatgcaatggagcatcccaggctgggatgaaggccaaggccacctacctatgaggaacaaccactgcctggctggaacgttccagaacccagtggtttccatagctgccctacgacttccgagatgactaaacccaccaaggactctatcacactgcttgtcttggccactcacccaccgtggatgtgcacagaccagtggctcccacgcagcacaggccagacaaaagctggaaggtgaaggcttcttaccttagaaagacaaagtggggcaaccgtggaaggccacattccagacactaaggggccaggagcaaaggcagccctgggccccggccctggggagatgtcaggcccgtcacatcccaggcgacatgtcaggaagatggaactcaggggtgctttcccgccccaggtgtcttccgccctgcagagcagctatggatctgcaaaggggactggaatgctgcagagccccgggctccatttggaaactctggcaggatgaagaagctggagaccacgtcctgggaaggctggggtacagcagggctccctgcagcagacgaggggtccctcaaattcatgtgcacccagacctcagaatgtgaccttatttggaaacacgggttttgatgatataattagttaagatgaggtcacagtgtattggggaaccctaaacccagtgagtggtggccctaccaaaaaagagactgggcatggcggcacacacnnnnnnnnnnnnnnnnnnnnnnnnnnnnnnnnnnnnnnnnnnnnncccaggagttcaagagcagcctgggcaatatagaaagacctcttccctacc

SEQ ID NO: 79568 - DNA, 1030 bp, Homo Sapiens
  misc_feature (408)..(425): n is a, c, g, or t
  misc_feature (467)..(859): n is a, c, g, or t
  misc_feature (873)..(873): n is a, c, g, or t
  misc_feature (879)..(880): n is a, c, g, or t
  misc_feature (887)..(887): n is a, c, g, or t
  misc_feature (912)..(912): n is a, c, g, or t
attcggttcagtctaatcaggcatgaggttggctgtccttttaccctgttatcatcaggcaatcaaagatgtacaaagggcacaagaggtgcaggtggagaggagatggcgtcgagagaagaggatatttgaagggctttgcaagggaaagcacacagagaggaggaaatggtcagcatgaagttcattttggggtctccaatatttttacaaaaatgcagctttgtcatggaatctgaacatctctttttctggacataatactcattaccaccaggcattgagctgagccattaaccatgggtggggcaggaggccagtagctaggagcagcattataatttcaggtttccatgtctatgacttacagtcatgtggcaggagaaagaagtataatttgaaattacnnnnnnnnnnnnnnnnnngcctacagccgcggccgctccaaccctcgtgccgaattcttnnnnnnnnnnnnnnnnnnnnnnnnnnnnnnnnnnnnnnnnnnnnnnnnnnnnnnnnnnnnnnnnnnnnnnnnnnnnnnnnnnnnnnnnnnnnnnnnnnnnnnnnnnnnnnnnnnnnnnnnnnnnnnnnnnnnnnnnnnnnnnnnnnnnnnnnnnnnnnnnnnnnnnnnnnnnnnnnnnnnnnnnnnnnnnnnnnnnnnnnnnnnnnnnnnnnnnnnnnnnnnnnnnnnnnnnnnnnnnnnnnnnnnnnnnnnnnnnnnnnnnnnnnnnnnnnnnnnnnnnnnnnnnnnnnnnnnnnnnnnnnnnnnnnnnnnnnnnnnnnnnnnnnnnnnnnnnnnnnnnnnnnnnnnnnnnnnnnnnnnnnnnnnnnnnnnnnnnnnnnnnnnnnnnnnnnnagcaaaggcagcanaggcanngacgtanaaggcgcgtgctggctttttcaaangtcggccccctgacagatccaaaatcgagctcagtcaaaggggggaccccacagactaaaattcagggttcccttggagctcctcgtgtctcctgtttgacctgcgctacggaactgt

SEQ ID NO: 79569 - DNA, 1077 bp, Homo Sapiens
  misc_feature (273)..(384): n is a, c, g, or t
ctcttggctggaatccttcaatagatgtgaaaataatttaaaatgcttcctcactgctcttgggcaatttaaagttactgtcagggactatggctggtaacaacagtgtggttttcagttatctgttgagttctggaaaccttgtttttgcttggaagaaagaattgatacttggatgttaaagttctgtaggggtacagcctggcgtggtagctcatgcatataatcccaaggagctgggattacaggtgtgtgccaccataagtggcaaannnnnnnnnnnnnnnnnnnnnnnnnnnnnnnnnnnnnnnnnnnnnnnnnnnnnnnnnnnnnnnnnnnnnnnnnnnnnnnnnnnnnnnnnnnnnnnnnnnnnnnnnnnnnnnnatgagccaccatgcctggccgaatattttcataatgagaacacattcctaattagttgtattagttaccagtgcaggagtcttctgataacgttagacatagctccatgcagcagttagggggcatagccaggtttatcaccttcattctaagtttttgtatttgtgaatgtgatgacattatgtgaggacatgatatgcttgtggtcatggctaaactttaaatataatttaaccaacatatccctccctacgcttttcttttgttttggtaacatagtaaatattggacctatttctgagagaactgtatagtgtttacagcagtgcaggtattagggaggaagggatgttgggcagatctgcttagggtaaagatagccttgagaggaggtccagagctctcttgtctaaaaggtagagaagggagaatgagcaaaagagaaatctaaaagttctgaatttataaaccagaggaaaccaggcagctggacatccaggcctaggtgttataggagacccctagttatgactgctgccaggtgttgaattcggggtataactgtagattgttggggctgtggctcatgtggctttaattaatctttttctctttttaaagaatccattaatttattgaagtggagaaattggagtctctgctgacttgtatcaagaaaaagaactaagacct

SEQ ID NO: 79570 - DNA, 509 bp, Homo Sapiens
  misc_feature (424)..(435): n is a, c, g, or t
ctaagtattagtacatctgttcaggaaatggaaaaaaaatgctgcttaaatttgttttatcagctgaggttgtggaggatttttgtccactgatcttttgcaacagaaaagcatactttgtcagcttctaataagatagccaggtttgaattatttgcaaaatttatataagcaaataagatctcttggtaacaattgacattgcactagaatttgaatgatactgttgttggcatttctgtttctctttcaagtagttgtaaataatctctttttctcatataaacggaatgcataatgtcttactcttgagtcatttagtagcattgatatggtaccaagttgtatagcagagtaacaaaatcatgatttgacaatgaaatttacatattgcctcacctagagatgttttgtctgtatgacnnnnnnnnnnnnaagtttgtcttactgttactttaaatgttttgggtaaattgtgtaatatgaaaagttcaataaaatgtcgaaat

SEQ ID NO: 79571 - DNA, 982 bp, Homo Sapiens
  misc_feature (92)..(101): n is a, c, g, or t
gtaaatttctgtattttagttttgaagtgctttctatttaaaaataaaaaacatgatttattttcatttctgacacagaagtgtttcttttnnnnnnnnnngaccacattttaaatttctgcttaaatgtatataaagtatacatttaagtatactggcactcgcaacaaatgaatccttccccagggataaatggattggaaaatttgtttttcattcaacatttggaaagagaacaaacctgaaatatgtaatttttaaaattatgtgaaaataatgtgaaaaatttcatatagtatttgtgtgaaaatcaggtggaaaaaaacttccatgaagaacccaatttacaaaaattcacatctttttaagatttacatttaatacaatactactgttttaactgaattgtgtgtgtatgaggtggtttttgcagggagaggggagttgtatagtgactacttttttgtgaccactcaccttcaaccttgggggaaaatgcttactatatgacaaatgtaaattaagatcattactcttccgtcacagatgatttcctagatttgagaacaaggtctttaatggatgaagaaagttcttgaagctctttacgagtagtactggcaacatcttcttgttctttgtctaattcattattcaagggataatctccctgcccagtcttcttactttgactgactagctgctttacaaccaaaccttgatactttaccaaaagagcatgctgatcctctggaattttactattaagaaaagcaatgatctgtgggacacatcttccaggtgcatggagcatgctgtgggttgaaaactgaaacaacaggactgatgtgaggtgcagaataagagcagggtcttctgtgacctttagctgttcagccagtgcttgtcgatgttggaacagtatctgtctttccctttttttgtctcccttttcaccataatatcacaagcttctgctgca

SEQ ID NO: 79572 - DNA, 442 bp, Homo Sapiens
ggcacgaggtgaagcaaattttttctctaaatgtactgggaagaaaactaatctattcaatctagtaatttcatttccaaagttgagacagattcactagtcaaaatcagttggtaggattgtctggttcaggtaggcatttaacacaagttgcagccttgtcctctttttctcttgccataggaaatttgctgtagaattagctctacaaataattacaccatgctgctagccaattggggctgcactaacttgtttgaacccttcaaatgaaagctaagtagttgataactgcataatatattgtagttgtaagcatttggttatttatgcagttttgcacacatgggaataattgcattttccaaactggtgatcacagaaaggatggcctttcagtaatgtttttgaccacaaaatatttataaagtattttaaaatc

SEQ ID NO: 79573 - DNA, 2074 bp, Homo Sapiens
tggaccggtccggaattcccgggatatcgtcgacccacgcgtccgcccacgcgtccggaaaggaaaagaaagtcaacattgactttgaacctttcaaaccaattaatacgtcattgtatttgtgtgacaacaaattccatacagaggctcttacagcactactttcagatgatagcaagtttggattcattgtaatagatggtagtggtgcactttttggcacactccaaggaaacacaagagaagtcctgcacaaattcactgtggatctcccaaagaaacacggtagaggaggtcagtcagccttgcgttttgcccgtttaagaatggaaaagcgacataactatgttcggaaagtagcagagactgctgtgcagctgtttatttctggggacaaagtgaatgtggctggtctagttttagctggatccgctgactttaaaactgaactaagtcaatctgatatgtttgatcagaggttacaatcaaaagttttaaaattagttgatatatcctatggtggtgaaaatggattcaaccaagctattgagttatctactgaagtcctctccaacgtgaaattcattcaagagaagaaattaataggacgatactttgatgaaatcagccaggacacgggcaagtactgttttggcgttgaagatacactaaaggctttggaaatgggagctgtagaaattctaatagtctatgaaaatctggatataatgagatatgttcttcattgccaaggcacagaagaggagaaaattctctatctaactccagagcaagaaaaggataaatctcatttcacagacaaagagaccggacaggaacatgagcttatcgagagcatgcccctgttgggaatggtttgctaacaactataaaaaatttggagctacgttggaaattgtcacagataaatcacaagaagggtctcagtttgtgaaaggatttggtggaattggaggtatcttgcggtaccgagtagatttccagggaatggaataccaaggaggagacgatgaattttttgaccttgatgactactaggtagtcgacatgggtccggcaaaacgtgccttcaccctccagcatcccaacccaaggagcataaccatgggtgaaatccaaacagatccctgccttacaattggaacatttccagaacttaatccatgagcatgggatattgaaaagaaaaccgaaacaaaaccagacccagccctacactttggtttgtcatggtgtcagcgcagcagcctacaactaagttcctaaacgccactttggactaatttaaaaaagaatcccagtttttacttttactggatggtgaaattggttgctcttgtattttatgaaaaaaaatgatttttttaaccttcatacatagaagcaaaaatactttaactgctgtaaaccttcaaaagttaatagaagtgagatcatactggtttgtttcttattttgattggagaaaaattaaattgctgcatttcgcagtgacccatttacatggcattctcagcttagactgcgtaagaagaaatatatgtggtgaaatgttggaaccatttctctcttggtctctgtttaatgttgaaagggtgagctaataggaggcactttcaacttcactccctcacgctaccccgtccccctccagactggcagtttcaaggatgcaaattgcattgcaaaatcaaactgactcatgaagcatttgggccagtgcactgtttacttccatctgtttgcagacacatttgtgcccggcgtttgggagccctttgtatcaatgttctgacaagggtccctataaccttaacctactcgaaaccggtttgggatggatatgatggggcttctgtgctattgctgggattgggagaaataaaacatgcaatttaagtggaagcgaagaaatttaaagaggattttattttgcttgggtcaatccttgttaaaagggaggtggatgtgttttccttgtgttggatggcatgagattatgtgaatgttttgatttattaaaatgaactgcaaggtttttcacaggaacgac

SEQ ID NO: 79574 - DNA, 679 bp, Homo Sapiens
  misc_feature (20)..(20): n is a, c, g, or t
  misc_feature (356)..(356): n is a, c, g, or t
aacaggtgcctcgagagtcntatgaggacactgcgagtaaagaagcaagcacttgactaagagcagaacacctgagtcctactgaacttgaagtgcctggagagttccagccacatttatcgagcaggcctcatgctaggtgcctaatggaacagaggaatattggactgggagatggctggctgctcagagcaggctcctgggcatcgcattggccagatcactgggtattacagctgaaccttgattttgtggctccagaaaattgacattgtctttatatcaagtgttgatgtcactctggtggagtgtgattgtatcccagccaggtgaaggactggtgactggtccctccnctcacataggagcgtggctccctggtggctaaaatgtccatgtcacccagatttggcatccctgccctcttctaagattctccactgtaggctgggattctcgtggtcctggtgtggaaacgagccaggctgctccttgcagtgaagagggaagaacctcactgttggagtcagagtaacttgagtctgaatctccattcccttgtatactagctgtgtgaccctgagtcagtttctgaatgtctctgagcctctgtttcctcacattataattatgtggctatgataattaaatgagattctgtgtatatattctttaaccc

SEQ ID NO: 79575 - DNA, 664 bp, Homo Sapiens
  misc_feature (41)..(41): n is a, c, g, or t
  misc_feature (47)..(47): n is a, c, g, or t
  misc_feature (342)..(403): n is a, c, g, or t
agagggtcagatatccaagctatagcagcaccatcccatantacatntgtatctatgtcctaaaccaaaactccctccagctttactgtagtttactaagttgtatattatactttatgtgggattttctcactgccccctaacatggagcatagaatctactgctggagcaatttcctccaaaatacttttcaatttggtggcttaatgggtatgcttattgcacctcctctgcagactcagaggtacttggagtctggccactgctcgtgccaatgacaaagaatgctttagctctgaagtcagagctcagaccatgagagtaaaacctatgtattagcnnnnnnnnnnnnnnnnnnnnnnnnnnnnnnnnnnnnnnnnnnnnnnnnnnnnnnnnnnnnnncagggaagaggaataagtgaaacgaatcccaggagtggtaaggcacagtgggcgccaccaggaactgccctccgatctagttctcctaacatgcagaaaaggatcctttgtagattgaactcactattcttccagcaacaactatctgatgtcagaaattctaaagcctaacatcacttccactttaagaccagcaaggtatggaggaggtgggtagtaatagagtatgaagaacatgaggctgggcactgtggcttacac

SEQ ID NO: 79576 - DNA, 697 bp, Homo Sapiens
  misc_feature (24)..(24): n is a, c, g, or t
cggtaggcaatcaataatactctntgaataataatgaggttttcaaagattctgcaagtcagactggcctctggctttgtgatattattctagagtcccagtaacccacaattgttgatgaggagtagcagtagaatatcaaggacaggtgatgagacaacaagtctatcccgcaaagggcagggaatagagggtacactggaaagaatttgaaaacaataataaagctgactacaagttggtctattttttattaccaccatgagccagcaattctaaataatatcagtgataaagtattcatcccccaaaatattttattgaactaggttctaaacaattcctgaggttactgttgagttttaaataatacatatatgtaagcttcaaagtagcacatttgtactgtttttcttcaataatcattttactccacatggaaactaattcagggaatatcctgctatatagttggctctcagtacatatggtgtcagctcatgtgtctccagcccctgtagtactatatattattgcatttaaatgatggatttgaaataaacaatgattataccatgattgtaaagacaagaaacagaacctgaaatacttcaatttttgattctatgtggcagtttagagttttttaaaacaatttttatgtataatttatatgcaataaatgccctcaaagatc

SEQ ID NO: 79577 - DNA, 842 bp, Homo Sapiens
ggcttcgaaggtttgccttgtcagccatggatatggaacagaaagactatgactcgcgcacagctctgcatgttgctgcagctgaaggacacatcgaagttgttaaattcctgatcgaggcttgcaaagtgaatccttttgccaaggacaggtggggcaacattcccctggatgatgctgtgcagttcaaccatctggaggtggtcaaactgcttcaagattaccaggactcctacacactctctgaaactcaggctgaggcagcagctgaggccctgtccaaagagaacttagaaagcatggtatgagcacaggtcatggacagcccctgctcaagaaaaagcatgagctggccacacatgtaatccataaccaccaaaaatactatggagagctacactgcttcagtggggaccaagcagtcatttggtgacttaggctagtgctttctatgggagtcaaaataccccattccctcagcagacagagtacagagaagggcctcagaggacacctgcagtacagctatccagagagactgggcttcaaggtacagcctaatggcttgccccactcaaaaccatcccagctcttcacccaggtctcctcttcctctccctgaagaaaccatcatgagagagatactctggtggagggactctagctaccatgcacatgtacatatccacagaatatgggaagtgggaatggctatatacatggctttagtagtctggagaaatctactccccttggccaggacatgctgctgctactgctaacagccaattttatagacagagaaagtattttgtgttcaaataaactttaattaccaaatc

SEQ ID NO: 79578 - DNA, 383 bp, Homo Sapiens
ggcacgaggaggaaaaggagtaattggtaaatttgaatgtgggttgtgtaacagataatattagcattagattctctggatgtacctggcaaagattcatatctgcctgcagctcactttcagatggcttggggaaaaaagtgtgtgttgggagagagaagagatggagagagcgagcacaaatgtgccaaaatgttgcttgaaaacagacaggtacgcttaggatatgtttgccaggcgtctttcttttataatgcctgtttgttgttgccattgtttgtgactgtagaagaatagttgctcattgcttatcatttggaatatggaaaagtatcatccttaattttacctgtagagattacttaataaagaattaaattgtg

SEQ ID NO: 79579 - DNA, 773 bp, Homo Sapiens
agaccagagaatcccagagatgcagacagagacttcctagagctacagagtaagccaaattggagttgccttttctggacgtcttgttaagtctgatgggttcatcacatctgagccaggactggcttttcttggctgcaagctgaaagttgggtccaggtctgctgtactgagggtctcctatcttccttggacagggacaaccagaggcctatttatctcatgatggaaggcaggagaacaagcaggcaagaccagctgtgctagcacatgccacctctttgcccacgtcacacctgctgacgtcccattggccaatgcaagtcacacaaccaaagccaacatcaacaggacaaggaaacagactctgcctctagatgcacaaactacagagtcacggacagaggacacggatccagggaaggaagatggagaatgagaacaatgaccctcaataacacagcctcccacaggtttccaaatccccaacccaggcatatatccaaggaaatggaatcatgggttcaggttttagagcaagcaatttctgctctccctgcctagtttccacacccttaacacaggggcaatgatgtcacatcaaaacatatcatacaaatttgtgatgatgtttcaacaactaaacaccagaaaaatgcttagggcagggccgggtaggaggggcagaagccaatagtaacttaacatcactgctaacccacaaagttctgggaatttctttgaatgtctaattagagaaccatgtccccaag

SEQ ID NO: 79580 - DNA, 227 bp, Homo Sapiens
gagatttgaaaatccttgggttagtgataggagaggagctctttaccaggtaaatgctaaaatacagttctcctgtgatctttacgggttttactgcaggtagtggcttcccacgatctctggaatagcttccttataaactattaaaggcatacttgcagtattcctttctgtagactttacagattcagaggaaaaattattttcctctgaatctgcctcgtgcc

SEQ ID NO: 79581 - DNA, 837 bp, Homo Sapiens
  misc_feature (133)..(142): n is a, c, g, or t
gctggaccggtccggattctccggaatcgtcgaccacgcgtccgttccgcgtccgggggaaggatattcatgaaagaatttaggcaacctgttatttataaagccttcacgtctgtaaggtgcttggcctacnnnnnnnnnnaaattagtatacatgcataaaaccttgtatcatcaatatacaaattattctgttaggggacatgtttttgttctccatgtttctgtttctattgtggtatgagttgtatttgtatcactgagataacctattgttatattctaattcattgataatatgttttgtaagaaaagctgacatccttcattgcaagtgaagaacaggtttaccatgaaatgaatgcctttattcaacttagagtcctaatgtttctgatttcacattcttgttgctgaaatgcagaagaaacagctacagcaagagcagaaggaaaactcttagacttaatgtctccaattgcaagaattgtttcactaaagaaacagtcatcattcaactactgaatttgaaagcctcagcagtttcaatgacaaaaatcatttttgattttttaaaattaatcccaatggcatgataaattttcatataaaaagtaaagtttcaatttagtttttaataatggtttaatgccttttttgaataactggtttaacctaattttttttaaatgtaatgtattaatgcatataccataatcaaaaagtttgaaatatcctgttttcttaaataatgaaaaacatttaatcaccatttaaccaagcattttgtacattcaaaacctggaatattaaaagtgaaaatggattaaccttttg

SEQ ID NO: 79582 - DNA, 1045 bp, Homo Sapiens
  misc_feature (31)..(31): n is a, c, g, or t
  misc_feature (71)..(71): n is a, c, g, or t
  misc_feature (83)..(83): n is a, c, g, or t
  misc_feature (133)..(210): n is a, c, g, or t
  misc_feature (264)..(264): n is a, c, g, or t
gcggcgtgcgatcatatgcagtgcagacagnttccatgaaagcgcagtgacgcacgcaatatgtgagtagncactcatagcanccccagcttacactttatgctccggctcgtatgtgtgtggattgtgagcnnnnnnnnnnnnnnnnnnnnnnnnnnnnnnnnnnnnnnnnnnnnnnnnnnnnnnnnnnnnnnnnnnnnnnnnnnnnnnccagaaaattcggcacgaggaatagagctagtgtaaatataaaataaaattatntaaatagcatcagtggctcaataccatctgttgaggaataaaataatttggtaacatacagaacatcgataatatacaataatgactttgtaaaaaatgagtctgatctctttggctcacctagcttcccttaataagaaaatttgagaaacttggatctgaaaagtgtagttgtacttcctaacattaaattcctggctgtaatagttaatactttggcagcattatggttagtcttgtttatgccattggcacttactaggctaaactttctgaaactgattggttttgacctatgagataaggaaacatgcctaagaaatggctagaaatgctatttattgccctatgataagtgaaatagcaaatcactcttgattcttaaaatttcatattaaaattagctagttcctacatgcatgcgtgcacaagtatatgcagacacacacacaaatcagtaatctatgtgaactagatactaatactaaattactatttaaattgggtccagaaagatgctgttttgaaaagaacactaaaaatatttcattagcgttttcttgataacaaataggaaaatatatgtttacaccctgaataaattcagctgtgggtggatttttgtttttcaaaatgattttgttagtttgaatgaaacctaaatataacattcaagtcaattcttttaacatttttctttataacagaatatgaaaaacgctgtcttaaagtgttgtaacttttctgaattttcaataaaatattttgcttgcaaaaaaaa

SEQ ID NO: 79583 - DNA, 1945 bp, Homo Sapiens
  misc_feature (573)..(582): n is a, c, g, or t
  misc_feature (1594)..(1629): n is a, c, g, or t
  misc_feature (1867)..(1875): n is a, c, g, or t
gggatagtgcctcgctagtggcgggcatgataacacacgccggagggtcgcacgcgggttccagttgtgattgctggagttgtgtattgccaggaggctctccgagattggggtcgggtcactgcctcatccaccggagcgatggcgtttctccgaagcatgtggggcgtgctgagtgccctgggaaggtctggagcagagctgtgcaccggctgtggaagtcgactgcgctcccccttcagttttgtgtatttaccgaggtggttttcatctgtcttggcaagttgtccaaagaaacctgtaagttcttaccttcgattttctaaagaacaactacccatatttaaagctcagaacccagatgcaaaaactacagaactaattagaagaattgcccagcgttggagggaacttcctgattcaaagaaaaaaatatatcaagatgcttatagggcggagtggcaggtatataaagaagagataagcagatttaaagaacagctaactccaagtcagattatgtctttggaaaaagaaatcatggacaaacatttaaaaaggaaagctatgacnnnnnnnnnngagttaacactgcttggaaaaccaaaaagacctcgttcagcttataacgtttatgtagctgaaagattccaagaagctaagggtgattcaccgcaggaaaagctgaagactgtaaaggaaaactggaaaaatctgtctgactctgaaaaggaattatatattcagcatgctaaagaggacgaaactcgttatcataatgaaatgaagtcttgggaagaacaaatgattgaagttggacgaaaggatcttctacgtcgcacaataaagaaacaacgaaaatatggtgctgaggagtgttaaaagtagaagattgagatgtgttcacaatggataggcacaggaaaccagttaggtctcaatacctgaagctatcgtaaaattaagaaaggataaagttggtaaaccttttatatttagtatctttttattcagctcatggacttctgccagcataatacttgctttggaaaacccagataaaggttcatgcaaactttattttgtgtttaggaactactgaggatcagagtaatccaagcaaatgtgaatcattttacctttgacaaaggtaaatcagactatgaagttttttttatacaggatgatgactatggaaagagtactcttgtttccttatattatggaggcaggagtttcgttttcaaaattgttacaaattgtagaagccacggtgttctgtgatataagtgtgtgtttttcataaagcaggcagaactcatctaggtaaattacagttcctaggtataattcacattgtattcagagttgatggttgtacatataagtgattgctggttttagttgcaactttgtataaaagggactgagaaatttataaacttttttcttactgtcttttttctaaagtaaaaacaaagaaattatgtgccagatttatgcatattattttatgttgcatagaataaaatttttaatctttaattttacatttcctaaatatattttaagacgaaacatttgttctatagcnnnnnnnnnnnnnnnnnnnnnnnnnnnnnnnnnnnnctgaattattttctctcgtgagtatattgatccagaaagaaaacttgtattatgtgtgttttaaaatgagaaatctaaaaaacgaaaagtctccaaagtctctggaatttgaaacactttgcataacgtataaaagcctgtttaagagacagccaactatggcctgtggatcaaatccagcctgctgcctgctttttatggcctgtgagctaggaattgtgtttataattttaaatgnnnnnnnnnaaagacttttatgatacttgaaaattaacatgaatatttagtgttcataaataaagtttgttgaaacaca

SEQ ID NO: 79584 - DNA, 1709 bp, Homo Sapiens
cctatatgtcaaaatattaagggcaattaagaaaaatgactatgaggttttaatcccagtttaagtatgtctgtagcctgctgaattcttctaataatttcaattatactataaacttccaaagtggttgtatcgctgattcctactcttttgctagatcacaccaaaattacttcctaagttgagaacaacttggaacaagctttactgaaaaccaactgactactgatgtctcatgttggtgtatttaaaattctttttgaatcttgaatttcttcaagatcgggtactgatgttccttcaggaataaaacaaaaggggggaaatcttcaaagcattactctgaatttcttgtgtaatgtccttccaagcactgtttctgaccatgtctcatgtggtattccagaagagcatcagttatactgtgtatctaagtcattgaggaaactgtttttaagctggtttagattccaaatgtatacaaatgaagtcactttaatcctataaatacttcttaatttatttttaaaaaattgtgctgttaacccttttacggggcaacaagctatgtgaaaagtacaaaactttttgtcaaatgtaatattgagagtgcttttgacatagttcactggtttatcatctggatcagtatatactgcgcaacgggcaaggctagaatccatgaaccaagctgcaaagatctcaagctaaataaggcggaaagatttggagaaacaaaagaaggaaattctttcctatccaatgtatactcttcagactaatgcactctttctatcaagccttctaaactgttaaataaagttttccaaacaagcatttaaacttcattacacagaagagcaacaagaatggtatcctgccagacaaaagacaggaaggaaaaaaatatatatactgagttcaatgggtaagcctgaatgtagcacagttcttcacaaccgatgggggaataattcaacatggtgtccaacaacgttctaacgacgtgcttcatctcaactggttactatgaagcaaggtgtaaatgtttggccccaatcgggcttcagaaatggttcttttttcatgacgagcatgtctgtccagctatcaatcatgtttgtttgcaccaaatcccaagccattaaaatacgactaattgtaagttaaacagaagtcgtctgctccaaattcaccatcaactatccatgctactgcattcctcttcaatattctggtggtctataaaaggtgctggtccccatattctaacagtgccatcatctgaggcgctggccatcatggatggaatctgtgggttccagctcacacagtttactgtacgtgtgtgccctgtcagctccgcaattggcagttcactacgtttgtgccagatgtaaaccttgtgatcttcactgccactagcgatgaagtcttcattatggcctccaaaacatgaatgaattgtataaaacccttgtgtaacaccttgatactttcttactaaaactctgtcttgcaagtcccataaatgaactccctgagttgctacatttaacaaagctaatcggccattttttgaaatagtaaaagacataataggatgatcttcttgtactatgttcctatctgtaaggtcctcgaagttatagccccgaattcgctggtgtgtatctgatgccagaacagtctttccatcactcaagccc

SEQ ID NO: 79585 - DNA, 1008 bp, Homo Sapiens
  misc_feature (446)..(468): n is a, c, g, or t
  misc_feature (513)..(899): n is a, c, g, or t
  misc_feature (918)..(918): n is a, c, g, or t
  misc_feature (921)..(921): n is a, c, g, or t
ctgttgatttgatgtcgaggtaggtgggatagtgctggttactggtgttatgcttggctccaaaatttctgactctaagccaagtcttttcaaatcctcttggtatgctttcagggcagctgcctccattgcagcaaactcctttgatgccttttcttcttcctttgccttatccaggcttttctgtttaatctcactgatcctttttgccacattttccttatgattctttcctctttcatgaaattcaacactaggcctattgtctgctatccagcacttgcagtaatcacagaatttctttggctgtgacttccagtagtccgccaagactactctggggaaaactgtagttcctcccagactctcagttaaaacaaactgttcttgagcctcaaggcaagagagaactggaaaagccatgggacttcgtagacggccgacannnnnnnnnnnnnnnnnnnnnnngcctacagccgcggccgctccaacatccctcgtgccgaattcttnnnnnnnnnnnnnnnnnnnnnnnnnnnnnnnnnnnnnnnnnnnnnnnnnnnnnnnnnnnnnnnnnnnnnnnnnnnnnnnnnnnnnnnnnnnnnnnnnnnnnnnnnnnnnnnnnnnnnnnnnnnnnnnnnnnnnnnnnnnnnnnnnnnnnnnnnnnnnnnnnnnnnnnnnnnnnnnnnnnnnnnnnnnnnnnnnnnnnnnnnnnnnnnnnnnnnnnnnnnnnnnnnnnnnnnnnnnnnnnnnnnnnnnnnnnnnnnnnnnnnnnnnnnnnnnnnnnnnnnnnnnnnnnnnnnnnnnnnnnnnnnnnnnnnnnnnnnnnnnnnnnnnnnnnnnnnnnnnnnnnnnnnnnnnnnnnnnnnnnnnnnnnnnnnnnnnnnnnnnnnnnnnnngacatgtgagcaaaggcancanaagcaagaacgtaaaaagcggcgtgctggggtttcccaaaagtccgccccctgacagcataaaaaatcgagctcagtcaaaggtggg

SEQ ID NO: 79586 - DNA, 901 bp, Homo Sapiens
agaggaccccgacccacaggtcccggttgctccgctggtcaaagtgcgtgcggagtagttggcaaagttgagagcggagacgtctctgggaacagctgtttgcgttccgggcggaggcggcgcgctgagctccttgcccttgagccagcgagcctagaaggaggatggagttttgggccccaggggaggacacagagacggcgggatggcgcagggacttgaggcttgagatcccgtccttcagctcaggtcccgtcgcgcttttaccccttcccggtgacctcaacccctttataccgaccccacctctttggagccgggagtaccgcccctgtagggggaggggagaggaggcgatttcgaacgcggattggatcgtctgggcacccgtagttgggaacagcggaacgctggtcccggggactgagtaaggtgtctggatcggagggaggttcgggtgggcatcgggcggctggaagagctcgactcgtcccgctgggaaagcgcgagtctgagtggaaccctggacgacttgcagagcggctggcgcagtcatggcggactactggaagtcacagccaaagaaattctgtgattactgcaagtgctggatagcagacaataggcctagtgttgaatttcatgaaagaggaaagaatcataaggaaaatgtggcaaaaaggatcagtgagattaaacagaaaagcctggataaggcaaaggaagaagaaaaggcatcaaaggagtttgctgcaatggaggcagctgccctgaaagcataccaagaggatttgaaaagacttggcttagagtcagaaattttggagccaagcataacaccagtaaccagcactatcccacctacctcgacatcaaatcaacagaaagaaaagaaagaaaa

SEQ ID NO: 79587 - DNA, 970 bp, Homo Sapiens
  misc_feature (96)..(96): n is a, c, g, or t
  misc_feature (119)..(119): n is a, c, g, or t
  misc_feature (177)..(178): n is a, c, g, or t
  misc_feature (199)..(199): n is a, c, g, or t
  misc_feature (231)..(231): n is a, c, g, or t
  misc_feature (258)..(258): n is a, c, g, or t
  misc_feature (293)..(293): n is a, c, g, or t
gatgtggcgatacatcacacagaacagttgactgatcgattatagatcacttaggattgccctgagccagaaatcgcacgagggaatcaccatcangtaaaaagagccagtaaagatcntgagatgattggttgctgatatatcccagaattaaccttctgctgctttctatatacnntgaactgagacagaaatgtcncaaaaaagatgattctccccagtgatgcagtntcctcaaaattgctgcagcagaaatanctgagcgagaggctgaaggctgggaagaagaaggngagctgaactgggaagataataactggtgacaatagatgtgagttaaactttaggaaaaaggattccctttttgtaaaaaaaatcaatacctcaaaagcaggctttgggacaagaaaaccccaaagtggcctgcttttcccatcccaggagctcattatccagtctgtgccaactgaagtaggagactgactgtgagtgctggctaaaagccctgggtggtgaggctcacagtactggtttccaggaggaagagcctttgtgcatttgactgaggccagtttctatgaagagcaagtagctgaggagaggtcgaatttactgctttttccaggacaattctggaagtaaagaaaatgtaattcaagctggttagcttaattttgtgccattctttaacataagagtaagctctattatgaaatacaactttaaaaaattttagctataaattatataaatgattttaaattgctgaggtttccttaggcagcttatttatttgtttacagttagactatctgagtaaatggttctttgtggacctaggcagttcctgactgttccacatgtagtacattgtaccaaagttcttaataagaatattccccacaatcctgttctctaaatgtcaaataaagattattttcactagattcaactttacaaaatttgtttt

SEQ ID NO: 79588 - DNA, 604 bp, Homo Sapiens
caagaattcggcacgaggagcaaacacactgcaagccacgctgctataaatctaaaccacatcacattcgcagggcacttctttcccaacggagcacagcactgagactctgtctaaccagtgcagggacctggcatgtttaacagcacacacggtattttcccaccttccgccacacggaataatgacaagtaaaatatggcttggccaccgggtaaaccccttcccaagcatcggataccatgtttctgttatttatgacatcactacactaccaggatggaatgcaaactaataaaacagtactataaatacgattacacaccctacagagttagtgtccgtttaatgctaaataattagagcaggatctacaagtaacaaaatagctaagtggaggggagggggcccgacttgctacacaaccagttagccaagcagagccctcctgctatcacagcatttttcatttaaaaggtgtatacgtgtgtgtagctcacatatgactggcagacaccaaagtgtctccttttcaaagagaaaatgaacccagctggagaaaacattgtcttccatatgtcaggtaggaaagaaaacatcaacc

SEQ ID NO: 79589 - DNA, 696 bp, Homo Sapiens
ctaaacaggaaaagggttaaatgaaggttgataaaatggatgttcaattgtctttctgaaagtgagtggcttgaagggatgaataaatattttcttaatatattcaaaaaagtgcattgctttctgtgatggaagttaagacctaaatgtctggaagttgtaaccctcaacacagcttttcctgatttgctgcaaaggcacatagctgattatagaagtgaagacggcaaggacggggactccaacaaaggaaaccctgttgcaggatttgggaactttcatgcttcagatgaaattcaggcatgtgagcatcactgcagaatgtggtgcatcattgccatcatgagtaatcacttgctgctcctacttctgagaccaagactcttttgtcatattctttagcaataggacgggtaaagactggatttaattgctgttcagagtataaaaactcaattgattccaacatatctgaatgtgcagtaaagtcttaaaagtcaaccgttaatcattaagtcttttgcctctaaagtcttttgcctctgaagaggtttattacatgagttgattttcatattttcattttggtggggttttcctgttgttgggcaaggtggggtcacaggacatgggactagtaagcattttactgtttactatatttgtctttttataaacagtatctcccaaaatgtg

SEQ ID NO: 79590 - DNA, 611 bp, Homo Sapiens
  misc_feature (259)..(357): n is a, c, g, or t
  misc_feature (360)..(396): n is a, c, g, or t
  misc_feature (400)..(408): n is a, c, g, or t
ggcacgagggacatttaaaaggtaaaacaagaccccttaccactacaaaattaacaaaaaatgggtcaaagtactaaagagctaaaactatgaaggaaaccagtaaatcttcatctcacctttaatatggcaataattttttagatataacactaaaagcatagaaacaaactaaaaaagtggactttatcaaaattaaaaacttttttgagccaaaggacattatcaagaaaatgaagtctgggtgtggaagctcatnnnnnnnnnnnnnnnnnnnnnnnnnnnnnnnnnnnnnnnnnnnnnnnnnnnnnnnnnnnnnnnnnnnnnnnnnnnnnnnnnnnnnnnnnnnnnnnnnnnatnnnnnnnnnnnnnnnnnnnnnnnnnnnnnnnnnnnnntttnnnnnnnnnaatagggcataacaattttaaaaagaaaatgaaaagacaacgtcagaatgggaaaatatctgcaaatcatatatctgacaaggactagtatccagaatatataaagaactcttacaactcaacctcaaaaagacaaagaatcaattaaaaaatgggcaaaggacttgaatagacatttctccaaagaagatttagcaatggcc

SEQ ID NO: 79591 - DNA, 676 bp, Homo Sapiens
  misc_feature (45)..(45): n is a, c, g, or t
  misc_feature (63)..(63): n is a, c, g, or t
ggcacgagggctaaaaacaccagatcttttcaaattccctttctntgaagccatatgttggtntgtagccaaaaacttgctggaaaccctgaaagaactgagagaagatggtttccagcctcaaacttacctagtacagggagtgaaagcactgcatactgctttaaaattatggatgaaaaaagaacttgtatctgaacatgcctttgaaattccagacaatgttagacctggacaccttattaaagaactttctaaagtaattcgagcaatagaggaggaaaacggcaaaccagttaaatctcagggaattcctattgtgtgtccagtttcacgatcctcaaatgaagcaacttccccataccattcccgaagaaagatgaggaaacttcgagatcataatgtccgaactccttctaacctagacatcctagagctccacacaagggaggtcctcaaacgattagagatgtgtccatgggaagaggacatcttgagctctaaactgaatggaaaattcaacaaacatctccaaccatcctccacagtacctgaatggagagcgaaagataatgatctacgattactgctgacaaatggaagaataattaaagatgaaaggcagccctttgcagatcaaagtctttatacagcagatagtgaaaatgaagaggat

SEQ ID NO: 79592 - DNA, 514 bp, Homo Sapiens
  misc_feature (174)..(185): n is a, c, g, or t
acaagacttggagactcagcgatgtcaggccagggccatggccacactggcccacacattcctttctacagagaatttctatgaagcccactcacttgccattccagggccaaaggagcggaggtttgcatatccgccccttgtatttgatttgcttccttttggtttcttggnnnnnnnnnnnngattttgtcttttctctacagtttagttttgtcacaattacacatatagttttcaaaatcatgcactttctaaaatggtgtcatcctgaaaaacaaaacccagtgtttgcacacacacaaaatcttgaccccgttatctatattttaaatgctttttgcccaacactgaccctatgttcaactttgtgtcatttaccttataatttgaggaggggtttccctttgggcctacagtgttacaaattactagtgctattttcattattattgtaatggaaaaatctgtggactagaataaaagagtttattgaataagaaaacctcgtgcc

SEQ ID NO: 79593 - DNA, 2344 bp, Homo Sapiens
  misc_feature (1348)..(1495): n is a, c, g, or t
  misc_feature (1570)..(1717): n is a, c, g, or t
  misc_feature (2260)..(2260): n is a, c, g, or t
ggcacgaggcctcgagccgcccagcagcccgtgggcaggcgcggcggagcgagcggggccggcggcgggcgccgagggacgccgagggacgccgaggcctcgggcgggggctggcccggggttccagatgttggatgtgatccttaaacaaagcaaagatgtctgccgtggttgaaagttgtttctaaaaggtctccagtgggggctgcagactaagcaaaatgaggcggttcctgaggccagggcatgaccctgtgcgggagaggctcaagcgggacctgttccagtttaacaagacggtggatgcatggattcacgaaccaccccagcgccctcggctacagcccgtccctgcgcatcctggccatcggcacccgttctggagccatcaagctctacggagccccaggcgtggagttcatggggctgcaccaggagaacaacgctgtgacgcagatccacctcctgccctggcagtgccagctggtcaccctgctggatgacaacagcctgcacctttggagcctgaaggtcaagggcggggcatcggagctgcaggaggatgagagcttcacacttgcgtggacccccagggtgctgcccccagtgccacacagatcaccgtggtcctgccacattcctcctggcgagctgctctacctgggcaccgagagtggcaacgtgtttgtggtgcagctgcaagcttttcgtgcgctggaggaccggaccatcagctcggacgcggtgctgcagcggttgccagaggaggcccgccaccggcgtgtgttcgagatggtggaggcactgcaggagcaccctcgagaccccaaccagatcctgatcggctacagccgaggcctcgttgtcatctgggacctacagggcagccgcgtgctctaccacttcctcagcagccagcaactggagaacatctggtggcagcgggacggccgcctgctcgtcagctgtcactctgacggcagctactgccagtggcccgtgtccagcgaagcccagcaaccagagcccctccgcagcctcgtgccttacggtccctttccttgcaaagcgattaccagaatcctctggctgaccactaggcaggggttgcccttcaccatcttccagggtggcatgccacgggccagctacggggaccgccactgcatctcagtgatccacgatggccagcagacggccttcgacttcacctcccgtgtcatcggcttcactgtcctcacagaggcagaccctgcagccagtaggagagcttcgggagtgggtgcccagggttaggtgtgggaggcatggggcaggaccatcagtaaagacagggccaggtgcagtnnnnnnnnnnnnnnnnnnnnnnnnnnnnnnnnnnnnnnnnnnnnnnnnnnnnnnnnnnnnnnnnnnnnnnnnnnnnnnnnnnnnnnnnnnnnnnnnnnnnnnnnnnnnnnnnnnnnnnnnnnnnnnnnnnnnnnnnnnnnnnnnnnnnctgagcaggcggccgctccaacatcagaatggtaacatgttaccattctgatgttggagcggccgcctgctcagnnnnnnnnnnnnnnnnnnnnnnnnnnnnnnnnnnnnnnnnnnnnnnnnnnnnnnnnnnnnnnnnnnnnnnnnnnnnnnnnnnnnnnnnnnnnnnnnnnnnnnnnnnnnnnnnnnnnnnnnnnnnnnnnnnnnnnnnnnnnnnnnnnnnactgcacctggccctgtctttactgatggtcctgccccatgcctcccacacctaaccctgggcacccactcccgaagctctcctactggctgcagggtctgcctctgtgaggacagtgaagccgatgacacgggaggtgaagtcgaaggccgtctgctggccatcgtggatcactgagatgcagtggcggtccccgtagctggcccgtggcatgccaccctggaagatggtgaagggcaacccctgcctagtggtcagccagaggattctggtaatcgctttgcaaggaaagggaccgtaaggcacgaggctgcggaggggctctggttgctgggcttcgctggacacgggccactggcagtagctgccgtcagagtgacagctgacgagcaggcggccgtcccgctgccaccagatgttctccagttgctggctgctgaggaagtggtagagcacgcggctgccctgtaggtcccagatgacaacgaggcctcggctgtagccgatcaggatctggttggggtctcgagggtgctcctgcangtgcctccaccatctcgaacacacgccggtggcgggctcctctggcaccgctgcagcacgcgtccgagctgatggtccggtcct

SEQ ID NO: 79594 - DNA, 775 bp, Homo Sapiens
  misc_feature (623)..(623): n is a, c, g, or t
  misc_feature (650)..(650): n is a, c, g, or t
gcggccgccaactacggggaccgccactgcatctcagtgatccacgatggccagcagacggccttcgacttcacctcccgtgtcatcggcttcactgtcctcacagaggcagaccctgcagccacctttgacgacccctatgccctggtggtgctggctgaggaggagctggtggtgattgacctgcagacagcaggctggccaccggtccagctgccctacctggcttctctgcactgttccgccatcacctgctctcaccacgtctccaacatcccgctgaagctgtgggagcggatcattgccgccggcagccggcagaacgcacacttctccaccatggagtggccaattgatggtggcaccagcctgaccccagccccaccccagagggacctgctgctcacagggcacgaggacggcacggtgcggttctgggatgcctcgggtgtctgcctgcggctgctctacaaactcagcactgtgcgcgtgttcctcaccgacacggaccccaacgagaacttcagtgcccagggactaacagaggccagtaaaacaaaacaaatgcataaactcagcaagcccaagaaggatggcgagctctccttctccccttcacttcntctccacttgtcaaaacagaccacccncgactaccaccctctgaggcaagtggctcagccctgctactgcccagcctctaagccaagcagaacaggtgggcacttggcctcccagccagccctcccaagactggaccctcacatcaccccta

SEQ ID NO: 79595 - DNA, 1153 bp, Homo Sapiens
  misc_feature (425)..(502): n is a, c, g, or t
atcgctgtaaaggaccatataaattgctttattttcccctttagaacattaagggctaggcttgaaagaagtgaaagcttgtctattctagtgtcagggaatcctgtgaaagaaggattaagggagggatggaaggagagaaagagcaaagactacattaggtaagtgaagctaactgcaagagcagagccaaagggggatattgcccctcactctctcatatcccatttaggacctggaaagtggtcacctaccaaggaatccctgctccaagtagggcacagccaaatacacttagtgaactgtgtgcatgatgccaacaaccactagaaattggattgacccaacattcaatgtgaagtaggaaacgttagtcttccccgccactcaattgctttagatttgagagccatactgatcaaaannnnnnnnnnnnnnnnnnnnnnnnnnnnnnnnnnnnnnnnnnnnnnnnnnnnnnnnnnnnnnnnnnnnnnnnnnnnnncaatgattccaagaggtttttaaaagggaccactgtgaaagggaattgggagtgaggggaagaaagagatcagcagatggagccccatgccctccttcactactgcagccagaggagctccctttttgtcaattgtatatacattcatgtatcactttatgatcaggttacaatctgaaaaatacatcattaggcaatctgttctgcaaacatcacagaatgtacttacataaacctagatggtattgcctgttacactcccaagctatatggcatagcctattgctcctaggtacaaacctgtacagcatgttactatgtgtgactgtaacacaatagtatttgtgtatctaaacatagaaaaggtacagtaaaattacagtattataatcttatgggactactattgtttctgtggtttttcattgaacaaaagtgtattatatgacatataactattgggtttcactttaaatttttatttaaagaatatttcgaggttttaaaaataatggctagaaaccactggattagatgaccttcaaggtcttctccaggtttcatttcccccagtccagactcctttgcagcatctcccccattcctcaatctctcagtgcctttccgttgtcctctggcagctcagaagct

SEQ ID NO: 79596 - DNA, 948 bp, Homo Sapiens
gcacagttaattaagccagacaaacccaatggaataaagatggaaaaatttgtctttgacatcttccagtttgcaaagaagtttgtggtatatgaagtattgcgagaagatgagtttcccccactaaagaatgctgatagtcagaatgggaaagacaaccctactactgcaaggcatgcttggatgtcccttcatcattgctgggtcctcaatgcagggggccatttcatagatgaaaatggctctcgccttccagcaattccccgcagtgctacaaatgggaagtcagagaccatcacagctgatgtcaatcacaacttgaaggatgccaatgatgtaccaatccaatgtgaaatctctcctcttatctcctatgctggagaaggattagaaagttatgtggcagataaagaattccatgcacctctaatcatcgatgagaatggagttcatgagctggtgaaaaatggtatttgaaccagataccaagttttgtttgccacgataggaatagcttttatttttgatagaccaactgtgaacctacaagacgtcttggacaactgaagtttaaatatccacagggttttattttgcttgttgaactcttagagctattgcaaacttcccaagatccagatgactgaatttcagatagcatttttatgattcccaactcattgaaggtcttatttatataattttttccaagccaaggagaccattggccatccaggaaatttcgtacagctgaaatataggcaggatgttcaacatcagtttacttgcagctggaagcatttgtttttgaagttgtacatagtaataatatgtcattgtacatgttgaaaggtttctatggtactaaaagtttgttttattttatcaaacattaagcttttttaagaaaataattgggcagtgaaataaatgtatcttcttgtcaaa

SEQ ID NO: 79597 - DNA, 851 bp, Homo Sapiens
gcagtaactctaagcgggtttaaggtagcgaggcctgggtggcgaattcggcacgaggcccggaagtgcttggccacagtcgcagccccggcgccccgaagcgggaaaaaggctgggtgcctgccgtcccccagctgcgcaaccctaggaactctcgggtaggaacttggctgtgttgtcctgcctcagagacaaattcatctattgtaggcctagcccctgcctttgaaaacaaggaaaggttggtagaacatcaacacagcatggaatttccagggaggtctcatttcaaaacttcataaagaacaagaaccacctggacttctgtgagggcgatgattaaactggcctgagtttgacatgaacaggataatgtatgctcaacctgtgactaacaccaaggaggtcaagtggcagaaggtcttgtatgagcgacagccctttcctgataactatgtggaccggcgattcctggaacgagctccggaaaaacatccatgctcggaaataccaatattgggctgtggtatttgagtccagtgtggtgatccagcagctgtgcacgtgtaacggtaacacgtggtttatctggtggtatatggatgagggtacttttggccccccattggctctaaggcgactggtcctggcctcacttccacatgctcggcgtcattgtccccgatcggactcgtcatccgactggcaggttgaacgggcggacagacagagtgcgccagaccccgactgggctggacctagcaacacgtgccccaagcctccactactaccacctcatgggcttacccagcggctgaagacccttacaccacacctgtcagcaccgacac

SEQ ID NO: 79598 - DNA, 1504 bp, Homo Sapiens
ggctggaccggtccggattcccgggacccggaagtgcttggccacagtcgcagccccggcgccccgaagcgggaaaaaggctgggtgccgccgtcccccagctgcgcaaccctaggaactctcgggaacttggctgtgttgtcctgcctcagagacaaattcatctattgtaggcctagcccctgcctttgaaaacaaggaaaggttggtagaacatcaacacagcatggaatttccagggaggtctcatttcaaaacttcataaagaacaagaaccacctggacttctgtgagggcgatgattaaactggcctgagtttgaatgaaaggataatgtatgctcaacctgtgactaacaccaaggaggtcaagtggcagaaggtcttgtatgagcgacagccctttcctgataactatgtggaccggcgattcctggaagagctccggaaaaacatccatgctcggaaataccaatattgggctgtggtatttgagtccagtgtggtgatccagcagctgtgcagtgtttgtgtttttgtggttatctggtggtatatggatgagggtcttctggccccccattggcttttagggactggcctggcttcttcactgattgggtatgttttgtttgatctcattgatggaggtgaagggcggaagaagagtgggcagacccggtgggctgacctgaagagtgccctagtcttcattactttcacttatgggttttcaccagtgctgaagacccttacagagtctgtcagcactgacaccatctatgccatgtcagtcttcatgctgttaggccatctcatcttttttgactatggtgccaatgctgccattgtatccagcacactatccttgaacatggccatctttgcttctgtatgcttggcatcacgtcttccccggtccctgcatgccttcatcatggtgacatttgccattcagatttttgccctgtggcccatgttgcagaagaaactaaaggcatgtactccccggagctatgtgggggtcacactgctttttgcattttcagccgtgggaggcctactgtccattagtgctgtgggagccgtactctttgcccttctgctgatgtctatctcatgtctgtgtccattctacctcattcgcttgcagctttttaaagaaaacattcatgggccttgggatgaagctgaaatcaaggaagacttgtccaggttcctcagttaaattaggacatccattacattattaaagcaagctgatagattagcctcctaactagtatagaacttaaagacagagttccattctggaagcagcatgtcattgtggtaagagaatagagatcaaaaccaaaaaaaatgaaccaaaggcttgggtggtgagggtgcttatcctttctgttattttgtagatgaaaaaactttctggggacctcttgaattacatgctgtaacatatgaagtgatgtggtttctattaaaaaaataacacatccaaaaaa

SEQ ID NO: 79599 - DNA, 1033 bp, Homo Sapiens
  misc_feature (72)..(73): n is a, c, g, or t
  misc_feature (76)..(76): n is a, c, g, or t
  misc_feature (114)..(114): n is a, c, g, or t
  misc_feature (131)..(609): n is a, c, g, or t
  misc_feature (640)..(667): n is a, c, g, or t
atggaagcccacgttccgaggagaagcgaacagtatccgtagcgcagggtcgacagagagcgccgaggactnncangggaacgctgtatcttatagtctgtcggtttcccactntgactgagctcgatttnnnnnnnnnnnnnnnnnnnnnnnnnnnnnnnnnnnnnnnnnnnnnnnnnnnnnnnnnnnnnnnnnnnnnnnnnnnnnnnnnnnnnnnnnnnnnnnnnnnnnnnnnnnnnnnnnnnnnnnnnnnnnnnnnnnnnnnnnnnnnnnnnnnnnnnnnnnnnnnnnnnnnnnnnnnnnnnnnnnnnnnnnnnnnnnnnnnnnnnnnnnnnnnnnnnnnnnnnnnnnnnnnnnnnnnnnnnnnnnnnnnnnnnnnnnnnnnnnnnnnnnnnnnnnnnnnnnnnnnnnnnnnnnnnnnnnnnnnnnnnnnnnnnnnnnnnnnnnnnnnnnnnnnnnnnnnnnnnnnnnnnnnnnnnnnnnnnnnnnnnnnnnnnnnnnnnnnnnnnnnnnnnnnnnnnnnnnnnnnnnnnnnnnnnnnnnnnnnnnnnnnnnnnnnnnnnnnnnnnnnnnnnnnnnnnnnnnnnnnnnnnnnnnnnnnnnnnnnnnaagaattcggcacgaggcgcggctgtaggcnnnnnnnnnnnnnnnnnnnnnnnnnnnncaactatatgcatttattatttattgaaaacatgaatttaacacgcaaaaaagtacttattttaatcgaaggcacagtaatgtcactctacccaattattcttagcatatgacaagcaaaatattgtattgttaatgtaatcattgtatcattgtaatatatataaagtactattcttttatctgtatattacatgtaaaatatctagaacagtgacagtcacatggcaggtgctcaataaatattgctataattagcaaaagataaaaggctgcaatcaaaaacagaataagggagctacttgctttctatcattttcacagcagtttaggtcctcatatataccctatgaaaaacatgtgcttc

SEQ ID NO: 79600 - DNA, 1441 bp, Homo Sapiens
  misc_feature (119)..(119): n is a, c, g, or t
  misc_feature (205)..(205): n is a, c, g, or t
  misc_feature (397)..(397): n is a, c, g, or t
  misc_feature (1023)..(1045): n is a, c, g, or t
  misc_feature (1063)..(1209): n is a, c, g, or t
  misc_feature (1228)..(1228): n is a, c, g, or t
caataaagttgacttgactctctcaccgtcgttttgttggaagccttaaaacacttcttagcttataatctttccactccacccactgtataagacctttttggcgcatcacggttcanacacagactgtctagtacagaacctgcctctgcaacaacggggaatgcccattttaatgtgtgtgataccttgtcgtgcttaagcncatgtactggctgtggatataagagaagtggtttatgactctgaagaccagcagacaccggacttaaaaagtgcgtaaattggaattggaaactaccagtaaagaaaccttccagataccagttccatccttgaagccctcttgttgaacaacagggcccagatcctaaaagctctttacagggagctcttnctctggggctggaacagttgattatgcaaccccattgtgtggagattggatcaacgtgagttgtgttatttttgttttaagtcaccttgtgcgagaacctcaaccgcacctatcttgggaaccgggtatacccttttctttagcactgctatcctttttgtcttcagcacaaataagatgttcaagtgagccagaagcaagaagagccattttagtcttcatagctattggctaagagagataatgagctgatggtctattttaaccttgaaagtaaaaatgtatattttttcactacaagtacattgaacagtaaaaagtgtaacagcaaagtatatatttgatgccttctgtcttttcatgataatgtgctaacaagttgtgttaatattttactcagccagagtctcattcatttgctaagcattgggaacattatgtatattgaccttaaacataggtgtcctatatttggattgtgacttgtagactcaagctaaccttactgcctctttttcacacttgttgaaaagtctgtgaagaacatagttaaagatctccaactttggaaaatatacatgatgtgaaactggggtgctatgttaaaaataaatgtatgataactnnnnnnnnnnnnnnnnnnnnnnncctcgtgccgaattcttnnnnnnnnnnnnnnnnnnnnnnnnnnnnnnnnnnnnnnnnnnnnnnnnnnnnnnnnnnnnnnnnnnnnnnnnnnnnnnnnnnnnnnnnnnnnnnnnnnnnnnnnnnnnnnnnnnnnnnnnnnnnnnnnnnnnnnnnnnnnnnnnnnngctactcacattattgcgntgcgctaactgccgctttcagtcgggaaactgtcgtggcactgctttatgaacgggcacgcgggggaaggggttgcgtatgggcgtcttcgctctcgccatgatcgtggccggcgtcggtggggagggacagtaccaagcggaacggtacacaacaggatacagaagaaggagcaagcacaagcagacgtaagcggtggggtttcaagtcccc

SEQ ID NO: 79601 - DNA, 827 bp, Homo Sapiens
  misc_feature (29)..(29): n is a, c, g, or t
  misc_feature (73)..(73): n is a, c, g, or t
atcaggaagggctgcctcaggaaaattcntagatcctaggaattcagtgagaccctggaaggaccagcatctnaatcagtgtcagtgaatccacagtctgtacttcctgcctcataaaggaccaggtctccccagtaccaagtcctttcctcatgaagttgtgttgcctcaggctgtttagagaccattgcctgtcttggtcacatgagtctgtctccttactttagtcactgggcaatccttgcttaatgcttttgttgactcaacgagggcccgaggccttaggttttctattaaggtctctgccccaggcatggtgctctatatcttggccaaataaattactttccttgaatatccaggaatcttttagtctaaagcaatgaggagttatcacctcatcctcaaactccaacaagatctatgccttagtgttgtttttgttgtctgctttgatgtaaaagcaagagtatttggagcaagaagctgcaatgcgccaaatacacaataggccttttctttatcattcatacgacatttctggtttaggtgtatgtagttgggccatgttacttgtccagaggaagagactaaagatataagaataattttttagtcctaaatgctgttttgtttactttctgtcaagatatttacccgtgtcaaattcaaactacagtactgtgtaattatgtataaagtttttttatttatttgaagttagactagatatacgtttttaaatttaacatctggctggacagtgttctattaactcattgaatgtgtttcctttgtcttgtgttaataaatattgatgcctgaaa

SEQ ID NO: 79602 - DNA, 1438 bp, Homo Sapiens
  misc_feature (380)..(401): n is a, c, g, or t
  misc_feature (1052)..(1052): n is a, c, g, or t
  misc_feature (1143)..(1143): n is a, c, g, or t
  misc_feature (1152)..(1152): n is a, c, g, or t
  misc_feature (1191)..(1191): n is a, c, g, or t
  misc_feature (1227)..(1228): n is a, c, g, or t
aaatcacccattacttttaagattagcaaagagctttacaaccaacccacacctgcttcctgctgcaataaagtgctgcacataaattgccattttaatgaccacaaaataagagcttttaaataagtataaagttagcctcctagcaggttacatctaccaggcgttaacaaaatggaatacagaattactaataacatggaggataccacgattagccagaagatcggcaaaacacaatggaaacttgtcaggggcataaactgaaccataggactaaacagcacctttttgttgcgtcattatatgtcaaagaggttgtggctaaatcttcaaacatacagtctactcattccataaaaaaggtacattttcttccnnnnnnnnnnnnnnnnnnnnnncagatgagaaacaaaaactagtgcaagaccatagcactgtgcaaaactgccatttcttttttttagtctgagcatttatacccagaatttatccaaaccccttttaatctccttggctggatttatcaaccataaattttttcacccatacatttctttttcctgcaaacaaatggtaaccactgaattaatacatctcatatatatatataatctgcccttaaaaaatgatgcactgtgtgtgtgcaccgtacacatttgtctacgtgtgggcacacacacaaaacacacttaagttctgtgatgttagctgcagtgctgcgagatatttcttccagatcagtcacttgattcctcacctcttcatcaccagagaagatctgagcgcaaggtctccagcgctctggcggaaatctccagcagcactgtagatggctaccattccttcatcgactaagcaccaggccctaccactctgtagccatcaaagagagagggaaaggtgatgaaggagcacagggagagactgtcgtggatgaacaacccaggagggaaaagaacgttcatcgctgttaaagaagccagtacaaagaatgtgcaatagaaatgtcatggcacacgacacacggctttctctttcagaatccacanacgcccacacaccgcattcacccaacagaaaacaaatgcaccagtatataagcttacaagtgctgattgctattaaggacactctctttanggtttacangacaagatcctttcagagaaaatacggaaaagggctganatgggagtgggtggctgggaagatgctctgaggtannagtagcataggcactctctgagactcgtgcgaatctggctcgagggcaatccctaatgagtcgataatcgtatctgtctagtgttcctgtgtgaatgtatcgccacatcaacacaagagcggagataatgtagctgggtgtacgatgacatcacatatggtggccacgcgctcatcggactgctgcatgatatgacgcagccggaagggg

SEQ ID NO: 79603 - DNA, 704 bp, Homo Sapiens
  misc_feature (79)..(108): n is a, c, g, or t
agagagggaaggatgaaaagaggaaaagaaaaaatatgttcttttcctggtttcaggagctctatgaggttttaagctnnnnnnnnnnnnnnnnnnnnnnnnnnnnnncataagaacagcatgaccttgaagcccacaaattgcccaaatccttgtccaactccactgtttgcagagcagagagatgacacccaggcctggcctgtatcattcgaatcctctgctcactttgccttaaaaactggttttggtaggaagaccctgggtaaaggtgggtgctgacttttctagagagggctgaggagacaagcctgaggactcaaacctgccagaggaaaaaggctctaggtattattaacagcagttgtactatgaattacataattgctattcttcgagcctgcagccaagtgccaagattcctcacacgaaccacgtgaagagggcaacaatatccccaccttacagctggaagaaaaaacagctcagaaagtgacctgatttaaaaaaagaaagacggcgatttgctgaaggtcacagagtgcatcctggaataggatgagacgggagaggcactcgcgtaaggggcaaaatctaagaggcgccaaaaaaactcaggaaccaaaaccaatgatattttaatacattttaaaaaccaaaatgtaaaaattcatgatggataaaatatcaacattttaaataac

SEQ ID NO: 79604 - DNA, 1100 bp, Homo Sapiens
  misc_feature (73)..(73): n is a, c, g, or t
  misc_feature (80)..(80): n is a, c, g, or t
  misc_feature (174)..(174): n is a, c, g, or t
  misc_feature (206)..(206): n is a, c, g, or t
  misc_feature (370)..(407): n is a, c, g, or t
  misc_feature (915)..(931): n is a, c, g, or t
gaagagagaatagtgtcacatcaaggcaggatctcatagctaggaacatttcacaaataagtgagatttgtanccaatantaaaaatgaatgtttttataagtaaataacttatttttcatatggctaaagatggtaaaatgacttcattctatagccattgtaaataagaatntgctattgatgaaagaagttcagattggcatntgaagtattgagtgtatgggatctctaaggatttcttagattttatatttaaatattttttaaaccttagaggagtcaacaaactggctcttgattttcagcaccctactctcatgaaaaaagcctgaaaggaccctttcccttataagtaatttaatccaatnnnnnnnnnnnnnnnnnnnnnnnnnnnnnnnnnnnnnntcagatgagaactcacttaaatccactcaatgtgtagatggtagagctgggactagcaacattgctgcagcccattgttggcctctctcttcactttatcattgcccaagaatgaggatatgcagtaaacagaattcaggcaagatacctctaagctgttttgaaccctctgatattttgtatttatgtgtttgtctgtctccccctactagaatgtaagctccatggggcagggacttcactgtattttgttcatagtgtatccccagagcctggaccagtgcttggcacataggagatggcaataaatgcttgtagaattaataaacaaggtgaaggagagagctaatgaaatgaaaatcttagtctcatataagaagtcttactactgctttctatggcaagttccttttctattgcatcttcccaaagacaagatgctcatctgcaaaggggtgataagatttacttggagggattttatggaaaattcagtgcaataattgcnnnnnnnnnnnnnnnnngcagtagcagtttacatagtacagcattctgcaaaaattgcatgaaatgtggacacaagatgtactgtatgacttaattacctgtcattctctgacaccattactacctactagaagttcaaataatttatctttaacattgcaatatctgataaactttttaaaatgt

SEQ ID NO: 79605 - DNA, 698 bp, Homo Sapiens
aaaactagttttgctcagaagtcatagtatgttccttgacccacagatctggtagctggattcttgcattgcttccctattctgctaaattacctggcagtgcagttcccgctaagaaaaggtcctcaaactcagcccaggggctaggaaccctttatccaccaatggactagcttaattctatttgactgtatctctaggtcccagttgctttgctccatttgtccctgagcatggactaaggcattgatttccaggcccaattagggctctggttcactgtctgggatgctgctgagcgggtggtccaggaaacacaactgtggggtttgcaacaagccctggcccagcgcacgtggcatcacaggggaagttaggtttgcatctagaaagagatctagtccgagcgtggagaaggcagaaccaaacccacatggttgagacccacatctcagttcagcagttccagagatcctgcaagccctagagcctttgcaggcagggatcagttctttgctctttgaaacgagatgatccatctcacactgaaagtttcctatcgtgaggttcagtgtcatctagagtcaacggatgaagtataagtgttcactgtggaatttctacaacacaaaaagaagaggctggataaagaagataaactgaatattgaaactgttccttttccattaaaaaatagc

SEQ ID NO: 79606 - DNA, 665 bp, Homo Sapiens
ggggggaaagcggtggtagctggttgggttgctggggctcggttgttgtagtcgcgatgttcttctccgaggccagagccaggtcgcggacgtggggagccagtccctcggaacacaggaagtgggtggaagtatttaaagcatgtgatgaagatcacaaaggatatctcagcagagaggactttaaaactgctgttgtaatgctgtttgggtacaagccctccaagatagaagtggattctgtgatgtcttcaataaatccaaatacttctggtatattactcgaggggtttttaaatattgtcaggaaaaagaaggaagctcaacgatatcggaacgaagtaagacacatcttcacagcctttgacacctactatcgtggatttttaactttggaagatttcaaaaaagcatttaggcaggtggctcccaaattaccggaaaggactgttcttgaggtattcagggatcagttctttgctctttgaacgagatgatccgtctcacactgaaagtttcctatcgtgaggttcagtgtcttctaaagtcaacggatgaagtataagtgttcactgtggaaatttctacaaccccaaaagaagaagctggattaaagaaaataacttgattattggaaactgttcctttttcccttaaaaaatacc

SEQ ID NO: 79607 - DNA, 1260 bp, Homo Sapiens
acggcaccttgcaaatatcagctccttggaacaggtgaagttccaggtaccaatgccaatcagaggaaggcagtttggttcaggctttggagttagaaacacctgaagttgaatctgggctctgttgcttccttctttcatgggctagagcacgactctttacctctctcttggcctcaatttcctcacctgtaaaatagatgaggaagctgctcacttattgttgtctcgttctgaaagcttggaaagctacatcgaagatgagctcttcattcagctttgatttgacctgtacccctggtgggggattgcactggcaacatttgggtctcagcaaaaaaaccaagcacacacatctttccttccatttattgaaaaacatctttgtaagatccattcattgaaaaacataatccatttattgaaaaatatctttgtaagatcacctgctaaatatgaaaatctgacttgaatttgtactctttaaagttgcgtatctgctctagtgggcaggacctagggcttaaaggggaacttcctttctccatttctaagaactgggactctaaaatgagaagctggttgtctgaagtaaccctgcaggtgtggttggggaaggtctgttttcttggatgaaggaactaaactaagcatatcagagcactgtcttaaccagttttatttccctggagatagaattcttttaaaaaaagttagggagctggtaataggaagtgcctttcattataactacattttgcagagcttcatatttatatacaagcctcctaggtgatacactgttagcttgcagactttcctatgcttcatttctcctgttgctttcaaagaaggcaggagacacgtttaataacggagtatctggtgataagaattgcttgggcaaaccagctcatctggactctttctcagtcttggaagtgggaagaggaaaacttgtttccttcctgcttcttaaggatattctgagggtacactgatcaataacactaaatttggaatgaaaataccatgtgatgagtttagcctgctgatgcttccagtagatccttgtatagtttcaagatttaagttttccgatttcatataaatttcttaaagtcgaggaccttataaggggtgcaatggatgtttgctaaatatgaaaaactgacttgaaattgcactcctttaatggtgcgtatcctgctctagtggggcagggacctaggggcttaaagggggaactttccttttctc

SEQ ID NO: 79608 - DNA, 978 bp, Homo Sapiens
ggcttgtgcttgtggaaggtgcgtctatgagtgccggttgttgcacaagtctttagctaatatccggttgttcccgtccaagaatatgttcgggactaccacggagtctgataatgtgaaacgatgtagacagcttgtacggcgtcaaagggctataagcgtttgacctccaggggtcccttacagctgcccatttggggattgggtaaacgctccaaagtttcctcttccaccaaatgtgttgtcctgaagtagagggtatttctggaaaatattcccctgttcgcgtctaacactttctctgtgtttccctagtctatgggtttctatgtttgtttcacctcaacagtttttgtgttttctttgtgttgaatcttgttgcctctgagtagtagactcttcaattctggaatttggttgccgaagactctaaaggagagactcactcagtaattcagtgactttagaagcaagctgagtatctcattctaaaatgacactgatttacactgttgagaatggttaagtacgtggggtaccttgcagcaaaggacaaaaagcaaaaagccagtagacctgcaattcacagctattcctgaggggtgcacattgcagcccactcttgagctccccagtgttctgagcaggggacagggcatacttctagtgatttgctcagtttaatcccttcatccaagaaaacagaccttccccaaccacacctgcagggttacttcagacaaccagcttctcattttggagtcccagttcctagaattggagaaaggaagttcccctttaagccctaggtcctgcccactagagcagatacgcaacattaaagagtgcaaattcaagtcagtttttcatatttagcaaacatccattgcacccttataaggtcctcgactttaagaaatttatatgacccggccgtaatggccgaattcccgggcatatgtccggtaccgtcgactg

SEQ ID NO: 79609 - DNA, 401 bp, Homo Sapiens
  misc_feature (305)..(329): n is a, c, g, or t
gtggtggttggtgatgctgctgctgctggggttgatgctgctgttgaacttgcagtagaagctgctgctcttctgaatgaaatccatctactgccctggactgcattagtttgttttcccataaagtttttagttccatcagtacttgttcatccactccatcatccagaaagatgtctctcacatcattaatgacatcttcaatcacagatctgtataatttaggcacggtgtttgtatttgccgagttcgccatttccacacacaacacaaacaagagggggcaaccccaagaaaacaagatnnnnnnnnnnnnnnnnnnnnnnnnnctattaacacccggagggtgacccaaatcaccgcaagattggggaaaaaattttaaacaaaatcaatcctga

SEQ ID NO: 79610 - DNA, 1120 bp, Homo Sapiens
  misc_feature (232)..(255): n is a, c, g, or t
catagtttcaatttgcatttctctgatgtctaatgaggtagagcatctttccatacaatggtctgatatttgtaaattctcttttctgaagtgacccagtttcttcttcatttcactccctggttatctgtctttttcttactgactagtaagacacaaactctttgttggttatatttggtgcaaatatcttctttcactctgaggatttcctttacactcttctagtggnnnnnnnnnnnnnnnnnnnnnnnngatgaatagggtttcttaattttaacataatccaatttgtagttgagttttaaggaagtgaggacctggttcacatgacaggatgggacgctgatagtccatggcaagcaggggcgaagtggcctttaaatttcagctgcagctgcatggaaagaagtgcaaagtctgaaaaaatgagtgcttctgacaacaattctgaagatattgaggaacacaagggctttggggtggaatggctgcttctaatcatgtcagagggcctacaataaagcaatgatgagctcaagattttaaatctttgggtaaaatctgtcaaaaagtcaggagcattttatacttttgcaagataatacattttctcttgtatccacaaggctgttctggccataaaccaaacaacatttgatcatacggatggatgaattgtactgcagacagaatttaaagaatttatataaatttatgaattcacaaccagagaaaatcatggcattgaatgggaaacagaccctgagaattgaaattgggatgtttgggaagatttaaatgatttactgaatcctcaaatccccaaatacttaaaacccactgacgctctcttagggcagcactagctccaaatattatgtctgatgaggccgatttgcttaaaagtctataacaaactcacctagggtagctgtttgcaaagggaggcaggccaatttccctcatggcccacttctactttcactgtcatcaaatctatatctagagtcagatatcagatgaacccaggagaaagcttacgcactaaaataactgcaagtatgcatttcaaaatgaatcttaccatgttaatcctccagcattccccctcaaacct

SEQ ID NO: 79611 - DNA, 2236 bp, Homo Sapiens
  misc_feature (1409)..(1484): n is a, c, g, or t
  misc_feature (2025)..(2084): n is a, c, g, or t
  misc_feature (2198)..(2198): n is a, c, g, or t
aatgcctgtttcataggaccttctgaaatgatttccagaatattttatctggctccaaaataaagcacatagcaactcacctcaacccctcatcatctccaggaaagtttctgccaaagctgtggcatagcaacttttgatttggttcttgccaattgttttatgtccctaaacctcatttggatccttggggtatagttttatctttctgcttcagtgatttactgtaacttttcaaatattggttctttctgtaccatttaagtatagttgatatatgtgaggcaaaaaaagggtttcagcatggtggtgagggaaaaaggagcttagaaatcccagttggcacagcctgggcaagcgccagctcccctcagggctaacggcactgttcacacagggatcctcagaatcagcggccacctgcctccaccttctgcctggagggcatggggctgttgtagaacctatggtagcaaatgtatatgtatgagtttgtattctgtagtgttggtgtagcacagaagaaagacctgtgtcctagagagtaggccaaggtgatctgcctcttctattgggagaaattctaatttctttcccactttctcaacaagcccaatattccctccaagttcttcttggtgctgagggctgtaggaattattgaaagcttctgcctcacttagtatcgtctggggcccagcacccagcaataactctaataatgtttcttaatggtatagcctcctgagattaaatgtaaaatcaaaaattaggaaatcttggagggagtcctcaagttgtattgctttgctgtgcttttggaagaagggacgacctggaggacacaggctcctgtgtgggtcttcatcctgcctgaccggcagatcttcctctacaccttgggcaaagtctatgcgaagatggtttcttagctctccatttgccatgattttcctcccattcatcatgagggagtttctcaaaccaggagtttatatttattttttagaaaatacacacttttcaggagaaacctgagcatgattttggattctccacctccccccagtctctgcacctgggattcagctcaaggattcagtgtcttcatttttacaaaagttcccccaagaaatcagcaaccagcctctgtttcatctgggagcccctcccttggccccctgggtttgggggtgctgccctactgggaacagcgggggtctgtcacccgtctgagccgcacccccctgtgtggatttcaggaagagcctccctttctttgcgtctccctttctttaattaacattttcaaaagtaataaattcttactgacgacttgtaacttagtcatattttatacttgtagcctttaataaagccatttaaaaaatgctacaacaacaacaacnnnnnnnnnnnnnnnnnnnnnnnnnnnnnnnnnnnnnnnnnnnnnnnnnnnnnnnnnnnnnnnnnnnnnnnnnnnncgttggtcgccccgttcggcccccgcaaaagctttgagagaacctttcttttggccccgggcctccccccaaggaagagggaaccctgggccgtagccctggttaccacgagaaaaccgccggcccgctggagatagccgcggtggccttccgcccccaaagaaaacaccactctccgggggcgcccccccgggagcgctttcttcaaaacacatttccctgatgaccgcgcgtccccggccggtccgcccaccgcgccccaatcacaccccggataggttgctttcccaccactaccccctgtctgcacgcgctgaatccggcccggggcgtggggtggtggggcgcccgccgtccgcgcttagcccacgtggtatgtaaagatcgccgccagaacgcaacgtgtgctcccgccgccgcggttggcgtagcggccgtcgagagcgacgaggcgcccggcgagccgacgtcctgccgacccctctgttgagccggggaacagcattgacccgcgcagccgttctttcatcgccctcctgannnnnnnnnnnnnnnnnnnnnnnnnnnnnnnnnnnnnnnnnnnnnnnnnnnnnnnnnnnnatccaccagtcttttgcggagcacctcccgccgcgtccgcgtgattgtgagaggggcagggcgcgcgcccccacgcgatgctctacctcctacctccgccacccgcggcgccangcgccccgcggggcgcgagcgtcgcccgcgcctcggtg

SEQ ID NO: 79612 - DNA, 965 bp, Homo Sapiens
  misc_feature (93)..(198): n is a, c, g, or t
ctggaaggaactacaaagccagatccctggggagagtacagtgggaaatcgggcagatatcagagccatgcctccctttgaagtggccaagannnnnnnnnnnnnnnnnnnnnnnnnnnnnnnnnnnnnnnnnnnnnnnnnnnnnnnnnnnnnnnnnnnnnnnnnnnnnnnnnnnnnnnnnnnnnnnnnnnnnnnnnnagatgctctcaggtgtcaagtacataggactgcaccctgcatcctagagggccctcgggaagatttttctgctctctggttcagctacctaggaaagagggatcctcccaggagagaatcctgagtttcagccagggtcaggggcttagtgagcatcatcctcacagtagagcggcatgtgtgccacacctggcatggccaagggagaaagcactgctcctggcccggcctcctggtgtcatggactccggagcaggccctcccttgactggctgaggagtaaaagcacaaagagcacaaagagagatggcacaggtaggtgcatagtaagcacgtatggttgtcacatcagataagccccagggatcagtgccttctggaatggacgagaagatgggcaccccaggacagactgacaccagggaggaaaggaggggtcagagctggagacatccacatccacccaccccaatgccaccaacctagggacctggcccaccagacacacctgccccgagcagcatgaaaggcaggccctcaggtcagcctggacacccaggtcacaccctggaagtaagagctggggggccaggaggaggtcactcagggacccacatggcatctccatgagctgggcttcggggacagaggtggcacagacacacacgtgccagcccccacagaacttccagaaacagagctgatggctcagtgaacggttcgattcggtttcattcatccgcccataaatattcatttatccaccc

SEQ ID NO: 79613 - DNA, 1070 bp, Homo Sapiens
  misc_feature (25)..(25): n is a, c, g, or t
  misc_feature (127)..(243): n is a, c, g, or t
  misc_feature (250)..(251): n is a, c, g, or t
  misc_feature (300)..(383): n is a, c, g, or t
ccttgtgcctttgccactgtcttcngcgtatccctgatcttgatacggataccgccttgatgagtgtacgttcccgcaccggacgaccgaggcagggattagtgaggaggaagccgagagcgccatnnnnnnnnnnnnnnnnnnnnnnnnnnnnnnnnnnnnnnnnnnnnnnnnnnnnnnnnnnnnnnnnnnnnnnnnnnnnnnnnnnnnnnnnnnnnnnnnnnnnnnnnnnnnnnnnnnnnnagcaccnnccaggcttacacttttatgcttccggctcgtatgtgtgtgggaatgtgnnnnnnnnnnnnnnnnnnnnnnnnnnnnnnnnnnnnnnnnnnnnnnnnnnnnnnnnnnnnnnnnnnnnnnnnnnnnnnnnnnnnaggaattcggcacgagggcccgcggctgtaggcgagttggaggattaatcttccatacactgagtgctacgatcctgtaacaggagaatggaagtctttggctaagcttccagaatttaccaaatcagagtatgcagtctgtgctctaaggaatgacattcttgtttcaggtggaagaatcaacagccgtgatgtctggatttataactcacagttaaatatttggatcagagttgcctctctcaataaaggcagatggcgtcacaaaatggctgtcctccttggtaaagtatatgttgtcggtggctatgatgggcaaaacagacttagcagcgtagaatgttatgattccttttcaaatcgatggactgaagttgctccccttaaggaagccgtgagttctcctgcagtgactagctgtgtaggcaaactgtttgtgattggtggaggacctgatgataatacttgttctgataaggttcaatcttatgatccagaaaccaattcttggctacttcgtgcagctatcccaattgccaaaaggtgtataacagctgtatccctaaacaacctgatctatgttgccggtggactgaccaaggcaatatactgttacgatccagttgaagattactggatgcacgtacagaatacattcagccgtcagttaataacataaagcagtac

SEQ ID NO: 79614 - DNA, 628 bp, Homo Sapiens
ggcacgaggggtattttcaagatgaataacattgatggaaaagaactgttgaatcttacaaaagaaagtctggctgatgatttgaaaattgaatctctaggactgcgtagtaaagtgctgaggaaaattgaagagctcaggaccaaggttaaatccctttcttcaggaattcctgatgaatttatatgtccaataactagagaacttatgaaagatccggtcatcgcatcagatggctattcatatgaaaaggaagcaatggaaaattggatcagcaaaaagaaacgtacaagtcccatgacaaatcttgttcttccttcagcggtacttacaccaaataggactctgaaaatggccatcaatagatggctggagacacaccaaaagtaaaattgttgatattgtattatttatattttcagtgatctcatttgaatgatttataggtaaatactaatcagacattattaaaagcaaaacaggaaaaaggtaaacttcttaaatttagttacctataaaaattgtcaattttcattctttaaaaacacatggacttactataaaagcctttttgtactagtgaaaagaatcttcagctatatagaaataaagttatactttaaattgc

SEQ ID NO: 79615 - DNA, 1066 bp, Homo Sapiens
ctggaacaacttacttcccgtctttccacttcagagagggggaacctaggatcaatgaagttgatgggttttcgtctgctggagtaggaataaccgctcctgccgccgtggtcgctggagctttgcctctctaggccggcagcgcctctcctccatggtcctgtctgtcagcgctgttttgggagcccgccggtgaggccgggccacgctcagacacttcgatcgtcgagtctgtcactgggcatggcgggtcagttccgcagctacgtgtgggacccgctgctgatcctgtcgcagatcgtcctcatgcagaccgtgtattacggctcgctgggcctgtggctggcgctggtggacgggctagtgcgaagcagcccctcgctggaccagatgttcgacgccgagatcctgggcttttccacccctccaggccggctctccatgatgtccttcatcctcaacgccctcacctgtgccctgggcttgctgtacttcatccggcgaggaaagcagtgtctggatttcactgtcactgtccatttctttcacctcctgggctgctggttctacagctcccgtttcccctcggcgctgacctggtggctggtccaagccgtgtgcattgcactcatggctgtcatcggggagtacctgtgcatgcggacggagctcaaggagatacccctcaactcagcccctaaatccaatgtctagaatcaggccctttggacatcctgctgacacttgggccccttaacaccttgggctgctcagaccctccagatgaggtccagcccagatctgagaggaaccctggaaatgtgaagtctctgttggtgtgggagagatagtgagggcctgtcaaagaaggcaggtagcagtcagcatgacagctgcaagaatgacctctgtctgttgaagccttggtatctgagaggtcaggaaggggacctctttgagggtaataacataattggaaccatgccactcttgagccacaatacctgtcaccagcctgttgttttaagagagaaaaaaaatcaaggatatctgattggagcaaaaa

SEQ ID NO: 79616 - DNA, 627 bp, Homo Sapiens
  misc_feature (135)..(144): n is a, c, g, or t
cagcagcttaagtccagctcatttcagtttctatcaaccttcaagtatccaattcagggtccctggagatcatcctaacaatgtggggctgttaggttttacctgtgaactttcatagcactgcagaaacctttnnnnnnnnnntgcttcatgaatttctcctttcctacagttgggtagggtaggggaaggaggataagcttttgttttttaaatgactgaagtgctataaatgtagtctgttgcatttttaaccaacagaacccacagtagaggggtctcatgtctccccagttccacagcagtgtcacagacgtgaaagccagaacctcagaggccacttgcttgctgacttagcctcctcccaaagtccccctcctcagccagcctccttgtgagagtggctttctaccacacacagcctgtccctgggggagtaattctgtcattcctaaaacacccttcagcaatgataatgagcagatgagagtttctggattagcttttcctattttcgatgaagttctgagatactgaaatgtgaaaagagcaatcagaattgtgctttttctcccctcctctattccttttagggaataatattcaatacacagtacttcctcccaa

SEQ ID NO: 79617 - DNA, 1080 bp, Homo Sapiens
ggtcaacacattggaattgatgtcggtcatagtttcctgaagcatttagttacaacctgaaggaataaaatgatttgtggaaatgcttaaaatagacctaactgaatacagtctcatcttgccgcgcctggcttacctatctgtggaaagctaggcttcccaggctgggctctgcctgtctggtgcctggaggtgtgggagggaagatgagttatttaactggtaagcgatttgaaacactatttttatattaaagtaaatggcatggagtatagtgcaaattcatttttaagatagaacacaaaacttgaaagaagttttatgcgtgtgacagtgtatggggctgcagttggtctccctggaggggacttccacacctcctgcctttaggccatgggtggaaagtgctcagtgaagtacacctgtgtggcccagttctgaaagctttatacagttgaattttaagtggggttgataacaccttggactgttagtgttaaaaatctagtgggttgacctttaaatgcaacagtttttaaaatatattgctgcattttatagaatagtaaaggtacgattatacttgagattttcctccatttttatttcttcgtgaacatagagtttggggccgaaaatgtttttaaagtatgtgtttgagttaaatataaagttggttcacttcaaagctaaaaaattgttaaacttgcagcttggtattgcagagaagattttataagaattttgctttagagaatgccactttggctgaactacaagtgtaggccaccattataatttataaatacagcatacttcaaaactgtttgttatctcttgttaccatgtatgtataaatggaccttttataaccttgttctctgcttgacagactcaagagaaactacccaggtattacacaagccaaaatgggagcaaggccttctctccagactatcgtaacctggtgccttaccaagttgtgcttttctgttttcaagtgtaaatgatgttgagcagaatgttgtacttgaaaatgctataagtgagatggtatgaaataaattctgacttatgaat

SEQ ID NO: 79618 - DNA, 1421 bp, Homo Sapiens
  misc_feature (88)..(560): n is a, c, g, or t
  misc_feature (675)..(685): n is a, c, g, or t
gacaggagaccccgaggagctccaggggaaacgcttgttcttatagtctgtcggtttcgcacctctgactgagctcgatttttgatgnnnnnnnnnnnnnnnnnnnnnnnnnnnnnnnnnnnnnnnnnnnnnnnnnnnnnnnnnnnnnnnnnnnnnnnnnnnnnnnnnnnnnnnnnnnnnnnnnnnnnnnnnnnnnnnnnnnnnnnnnnnnnnnnnnnnnnnnnnnnnnnnnnnnnnnnnnnnnnnnnnnnnnnnnnnnnnnnnnnnnnnnnnnnnnnnnnnnnnnnnnnnnnnnnnnnnnnnnnnnnnnnnnnnnnnnnnnnnnnnnnnnnnnnnnnnnnnnnnnnnnnnnnnnnnnnnnnnnnnnnnnnnnnnnnnnnnnnnnnnnnnnnnnnnnnnnnnnnnnnnnnnnnnnnnnnnnnnnnnnnnnnnnnnnnnnnnnnnnnnnnnnnnnnnnnnnnnnnnnnnnnnnnnnnnnnnnnnnnnnnnnnnnnnnnnnnnnnnnnnnnnnnnnnnnnnnnnnnnnnnnnnnnnnnnnnnnnnnnnnnnnnnnnnnnnnnaagaattcggcacgaggtttagcataaaataagatggtagatttaattacattaaatacacaatggacaaaatgctccagttaaaagacaaggtgtgttttatatgctattaacnnnnnnnnnnntgaaattaaaaatacacaatttacaatagactaaaagaaacataaaatatttacaaatcaaacttaagataagcaagaccacaatggacaaaaatataaaatcctattggtaaaccttaaagaagacccaaatggaaagagaggtaaaccatgttcatgaatcagaaaactcaatattgtaaagacgtcaattttcccaaaactgattgatagctataataaattcccaaactatcaagtgcatcattgttgttggaattgacaagctgattttaaaacttatatgggagaaaaaccttacatgaaaatacaaagagccagaatagtcaagacactctcaaagaagaaaaataaggtggaaaagacttactttatcagatctcaatacataattgataataatgaagacagcttgatattggcacaagaacagacagactaatggaacagaggaaagaatccaacaacagatctacatatgtcatatgtggacatatgacagaggtggcattgcagatgggcgcagaaagttagattacaaacaatgataggacaggtgtgtaaccctatggagagaaaaaaatgaaagtgaatccttacctcacaccatatgcaaaaaaccaaatctaggtgaattaaaggcctaaatatgaaatttacatttataaggatttcagaatataatctaagagactatcttcatgaccttggagtggaaataatttcagtggttttc

SEQ ID NO: 79619 - DNA, 1250 bp, Homo Sapiens
aacatacgctaggtagcgaggccggtggttaattcggcacgaggggaggaggaggggagaggcctggaggacaccaacatgaacaagttgaaatcatcgcagaaggataaagttcgtcagtttatgatcttcacacaatctagtgaaaaaacagcagtaagttgtctttctcaaaatgactggaagttagatgttgcaacagataattttttccaaaatcctgaactttatatacgagagagtgtaaaaggatcattggacaggaagaagttagaacagctgtacaatagatacaaagaccctcaagatgagaataaaattggaatagatggcatacagcagttctgtgatgacctggcactcgatccagccagcattagtgtgttgattattgcatggaagttcagagcagcaacacagtgcgagttctccaaacaggagttcatggatggcatgacagaattaggatgtgacagcatagaaaaactaaaggcccagatacccaagatggaacaagaattgaaagaaccaggacgatttaaggatttttaccagtttacttttaattttgcaaagaatccaggacaaaaaggattagatctagaaatggccattgcctactggaacttagtgcttaatggaagatttaaattcttagacttatggaataaatttttgttggaacatcataaacgatcaataccaaaagacacttggaatcttcttttagacttcagtacgatgattgcagatgacatgtctaattatgatgaagaaggagcatggcctgttcttattgatgactttgtggaatttgcacgccctcaaattgctgggacaaaaagtacaacagtgtagcactaaaggaaccttctagaatgtacatagtctgtacaataaatacaacagaaaattgcacagtcaatttctgctggctggactgaactgaagatcaatcctcacaattcagactgagggttgagacaaaactttaaggatacatcttggaccatatcgtatttcattcttctaatggtggtttgggcttgtcttctagtctgggccgctctaaacatttataattccaacattgtggatttcatcttatatctgtggaccatcctagtttattctcccataagtcttagaagctttatggtgattattttgaggttttcattctcgcataaagcacaatgctgtcttcatcagaaaacagttggcataagaattaaacatatgaacatcac

SEQ ID NO: 79620 - DNA, 1051 bp, Homo Sapiens
  misc_feature (154)..(154): n is a, c, g, or t
  misc_feature (162)..(162): n is a, c, g, or t
  misc_feature (188)..(188): n is a, c, g, or t
  misc_feature (196)..(196): n is a, c, g, or t
  misc_feature (203)..(203): n is a, c, g, or t
  misc_feature (242)..(242): n is a, c, g, or t
  misc_feature (248)..(248): n is a, c, g, or t
  misc_feature (253)..(253): n is a, c, g, or t
  misc_feature (271)..(271): n is a, c, g, or t
  misc_feature (300)..(300): n is a, c, g, or t
  misc_feature (303)..(303): n is a, c, g, or t
gtgacgtatagtcagcttgtactaggggacacattaggactggcgagtcagaagcatatcacttcgggagcatacgctccacctgtcgctagatgtatgaagtctatcgatgtactactcccacagtatcgagagcatgtatggctacaacgtnacaaactntggagcaatgcacagaccctaccctntagccacngttgtcntgagacccatgacacaggagaagccaaacagtatagatnaagccntgacncaaaggccagatacatgnaagctgtgtgaaaaaaaagcagaactacntangcagagaacagaaatatgaagatggaatgctttgctgaggaacgcactggctaatcagagtgactgtgtcctgcatcggatcctaggagatttccttgtagctgtcaatgagtatcaggaggcaatggaccagtatagtatagcactaaggtaggcactagcctcccttgggggaaggccactgaggagggtagaggaggcagtgagctgtgtcacaggagttatggaaacacacacacactttgtgtccatggttgaaagcagaataataatagtaatggtagaagagttatttgtgaattcatgacttctaaaaattttttcttaaaatatattaacaacattagagaactgtttcactcataaccatcccacaccactataacatctgtgttcatttgtatagctcatcttctgtccttgcccacacacacatatttttatagggctgtacctagtatatattttatattcttctttttcaaatcaaagtattgtaagtactttcccatgtttctatctactgtagtcattaagaacttgaggtctgaagttttgaatactaccttcaccacctgtgatcttgggcaagttactaacacatttccttgtctatatctagctaccttattagatattaaatgatcgaatgagggttaaatgattatttcatgtaaagctcttagccctgtgcctggtacatagtaaatgctaaataaatagtggtattcttactgtttaaaaaaaa

SEQ ID NO: 79621 - DNA, 239 bp, Homo Sapiens
caaaattttaccttttaagttttgtttcaaataaaattgagtctgttcacttaagagtgagtctaaaccagtttctctaaagagtaactgggtgcagatttaaatgtgctttaaataaagattttaaaatgctttatccaaaagagaaaactataggtaggaattccaagtaataccaacaaaagataatgaagtactttgcaacatagaaaagttgaagtcattgaatgcctacagcc

SEQ ID NO: 79622 - DNA, 741 bp, Homo Sapiens
  misc_feature (34)..(34): n is a, c, g, or t
  misc_feature (46)..(46): n is a, c, g, or t
ctaatgttaagtgaaaaaaagcagactacaaatntgtccatgatancaactgggtaaaaataatttaagatctatgcaaaaataaggagacaagatgatgggctcatggtgagcagctgtgaagcagggatgaaaattaatgtgcccagaagcagattctctgtgaagcatcttttttcatactacctgataagtgtcttgctacatggcagtagcagcagtaagacgggtgatatcaaagagaactatctggaaacatttatcttcaatccaaaatggagccttatgtttgtcataaatctacgtactcttcttttccaggtgactacaattgcaaagtagaatttgctttgacacctgatgccaggacaatagtatgttaccatccttctatagacattccatatgaacgcacaaaacctatcccttgaccagatcctgtgtataataatgaagaaacacatggtcaagtgctgaaaactagagaagaaaaaagtgaacaccttgagcgagaacccataatagaacaacttagcaaaatgttctttatgctaagtacggttggcatcttcgtggacattagcacagatgtcagaagaaaccggaacctccagaagacagatgatattgaggttcttggggaattaaagagaaatattaccctctgcctcatttgccattggagacagtgcaatctggtgtatgcactaataataataataacatgtcttttcatatttt

SEQ ID NO: 79623 - DNA, 724 bp, Homo Sapiens
  misc_feature (45)..(45): n is a, c, g, or t
caaagccacaatgagataccatctcagacctgtctgaatgggtantatcagaatgggtattattaaaaaatcaaaacatagatgctagtgaggctgcagagaaaagcaaatacttatacactgctggtgggaatgtaaattaattcagccattgtggaaagcactgcagcgatttctcaaagacataaaagaacatagcattcaacccagcatcccattactgggtgtatacctaaaggaatataatcattccaccataaagacaaacacttgtatgttcattgcagcactattctcaatagcaaagatgtggaatcaacgtaaatgcccatcagcagtagaccagataaagaaaatttggtacatatacaccatggaatactatgcagccataaaaaagaacaagactgtgtcctttacagcaacatagatggagctgaggctcttatcctaagtgaattaatgcaggaacagaaaatgaaatatcccatgttctcacttataagtgggagctaaacattgattacacatggactcaaagaagggaacagtagacacgggcttatgggtggaggttgggaagaggatgaagattgaataactgcctgttgggtactatgctgattacctggggacaaaattaactgtacaccaaactcctgcaacatgcagttgacccatgtacacatactccttgaacctaaaataaaacaagaaaaaaagc

SEQ ID NO: 79624 - DNA, 1097 bp, Homo Sapiens
  misc_feature (1005)..(1026): n is a, c, g, or t
tctcaacaagaagatgatgaatttgtgtgtcagataatttatgtcttctacccagatggttttcccaccaagccacaagagacggtcataatcaaggaaacacaggctccagcatatctcatagacctaatgcatgataagaataatgaaatccgaaaggtctgtgataatacattagatattatagcggaatatgatgaagaatgggctaagaaaattcagagtgaaaagtttcgctggcataactctcagtggctggagatggtagagagtcgtcagatggatgagagtgagcagtacttgtatggtgatgatcgaattgagccatacattcatgaaggagatattctcgaaagacctgaccttttctacaactcagatggattaattgcctctgaaggagccataagtcccgatttcttcaatgattaccaccttcaaaatggagatgttgttgggcagcattcatttcctggcagccttggaatggatggctttggccaaccagttggcattcttggacgccctgccacagcatatggattccgccctgatgaaccttactactatggctatggatcttgataaagtatctgtttccatgtgtaatctcagcttagaagaaatctgtgtgggttgggttaattttggatctttgcctaataatgcatgttgatgttattgtgggtctgtgtttgtttttatttttatatgttgttagctgcagattaaccccagcccctctgtcttctgttaagtacagttgatactgacattgttcactcatcaaaccacatcttgatgctaagtaacatttcccatgagcctcaaaactgaatgctgaaaagctactagactggaaaacaaacactgcattatgtatgttaagtgactaatttaatttcaattaaaaagcgtaaagtgaaaatgaataagtgaaagtcatgtgtttatatttcacacatttcactacgaattacatgttaatatagggtgcgcgtgaannnnnnnnnnnnnnnnnnnnnnctgtttgtaaactcttgagtaatttgtataatatatgctacctttaaaatttataaaaagaacatcacctt

SEQ ID NO: 79625 - DNA, 695 bp, Homo Sapiens
ctcatcagctgtcctgagatggaaaactcagtggatataggaccctgattccgatgaaaggggcacttggtcccaatgctggagctcctctggcaggttctaaaagcacactacggagcagcggtgccctgccggacactgctggcgggggctcagtgagcactactcacagatccacacctgaccctgttgggtcgagtcaggctgggccttggtctgcactgtagcacctgtgttctttgagttcacatcatgaatgtggtgacttcccagataccatctcaggcttaacctagcacatcctatttcttttcttctatgatatccaaattggactgacctcacttcaaagttgctgtcccattttgtcaccctatcttatctcggggaaattgcagactgatggccagaccaactctgttgaaattcttgcatagagcaaacctgtgctcatttttaagtggcatgggagaggccccaagcctagtaaagcctagtctgtgtcttcacagtgctggtagaatgtgtttgtgtgtataaatatatgatatagatttatatatgttgctaacgccatatattgaaggccaacataactggtggacagggtgggtgacagaaaatgaaagtctttttggtgattgttaaagcaagatgtgtataaagaaataaatagtttttctttccctgaaaaa

SEQ ID NO: 79626 - DNA, 1717 bp, Homo Sapiens
  misc_feature (1504)..(1521): n is a, c, g, or t
  misc_feature (1523)..(1537): n is a, c, g, or t
  misc_feature (1541)..(1557): n is a, c, g, or t
  misc_feature (1559)..(1567): n is a, c, g, or t
atgttctttgacccacaccatcaacactaccctcaaatctaattgccctacagcatattctatcatgtggactaggttcctggaaagccggaactcatgattctttttcaaactgccagaatagaagggagagagaaaacatttctaccctttgatcaccagtgtgaacagaatccggaatgcagtttcagcgtgacctgcagtcattcatgttcattggatttgacagatggaaacccaaggttatcgaagattggaaggttatcattgtgaagaagtagctcaaaggactccggtttctgtctacaagtgtgatgtctccatgaagaagacttagtatggatttgggtgggtaagaaagcatttaaacgcccaggaaaggacatgattaaagttgaccttttaatactgtagtaccttgctgttaagtaaccccactattgtatctgcatttatcttttgttcatctactttcacttacatacagtattatataagtagagaaaaatgggaaaatgcaagcaaattcaactttattttatacattgtatatatgtacaccctacactattcatttgggttttattaaagagatagtcacaaagggcttacgaaaatcatttttgaattgataattagaatattgaataagcaatcctatgatccactaatttgttttatcagttaataatattaatcaaagacatttactgtatattctagtcattttgatttgagttaaccccaaatataaaattacctgtagtgatgtctctctcccagcccttatatgtggatattttttaagtggacttgtatgctgataattctagaccaaagtaaatatggcagaatatttatacatgaaaaaataattttgcaaatattttctataattgtattcatttaaaatgttgatagcttgtgttagtttcagggaggggtgtatattttgataaaaaaatacttgactttgtaattctgtatattctatacaatttatagcagagccgttttaagacagccttgtcacatttttttgttaattgtgaaaattttattgagtgatgtttaagtatgcattgagtacatgaccaactagaattaaagtaagtgtaaacagtgaacatactgtatgctgtacaagatataatgtaacttgctgttttagcatctgtattttggttagaagatattattaaatgcagatgttaaggattggaaaagtctaattttatttttagaaataatggatataaatttgtttttgcttgattaaaatagcttattcctacattaagtctctttttaaatgttttcatgttatttcttttgtgcagctatttcatctgtgtgagtcacagctttgtttccacgtattattcagtttatttctgtttccttacttgtttacattccgtggtacctacttacatgcttaggagtcaaatggattatgacattaggaaaaaagcagaataaaagagattgaagtcttctgaannnnnnnnnnnnnnnnnnannnnnnnnnnnnnnncgcnnnnnnnnnnnnnnnnnannnnnnnnnaaaattgtgtggcccgctctcgcccttaaaaaaatttttcataaacattctcttttggcgcgcggcgcccaaaaaggaaaggaaacttgggcaataccgtgtttccaaaggaaacccgggccaaggactaggggcttggaatcccccccc

SEQ ID NO: 79627 - DNA, 751 bp, Homo Sapiens
gaggacacacggaataaagtcagcagctggcctgggcagctctgctctctgtgcttgctcacctgtgtgccccagaaagtgtctctgtgacattcctgacttcctctctgtcttttctcctttctttccattcaagaaaaccctctcttagaaacaatagtagccaacatgtgttagcacctaccatgtgctggtgttgactaaggactttatatgcattcggtcctcacaatctacaaggctctccctggagtcagcagacctggcttcagtgttcttgatgagtgagtgacttgggccagtaactcacttcccccttggaagtccagagggcaacacggcctgccctgatcttgggaggcactagaggaatgaagcagctgtgcagccaggacatgtgtgtacacagtgaggggggacacacccgtgccttcccttctcctcgggctgttttcttctctcacgtggccactgtcatcccggaactactgtggcccaactccctccctgaagccctgaacccgaagggtagggattccggagcccctgccacagagactacactacttagagagtcattccaaaagacaaaggggaacctccaaaatgccttccttttcattctgaggagtctgtcccttctgtgcatatttatagtctacacgggagtgtctgatgcaactttgaattatgcaaatgggaaatagtgcacttgtgtacaatctttatattaaaaaatgtgaaataatgc

SEQ ID NO: 79628 - DNA, 627 bp, Homo Sapiens
tgagccacacctggcctaaaaatcatttaattttttatgcttgcctagttataaggtcaaagagaatcaaatgactgatgcagtcagcacctaacaacctctgtatatgggaagggggtaatgagaacatactatttggaaataataacagcctaagagccaagtgctgaagttacatttctgcctaccacagctaaagctctcctcactgtctcctacccagtcctcctttccatcaattaccagtctcttgtataaatgtatccattaccaggctcacagactgggagtgatttttctcctttggagctcgtccagaatccatcagcctcacacacatatttacctgcaaatcattggaaaagcaaaaatgtttaactgcatgtataagatggttgtcatttgcttgaatacccccttgaaaaatgttgattcttgagcatcagtgggacatagaggtgtctgaagaaccattttacatgatttcataaataggaggtctctgcattaccatgtttgcttgcaaagtggaaaccttttagatgtgtaacttgaatatgtatcaagatctcaagtgcttaatgataaggtgttgacttgttaaattaaaccatttggaatacaaaa

SEQ ID NO: 79629 - DNA, 1154 bp, Homo Sapiens
  misc_feature (101)..(143): n is a, c, g, or t
ggtccggaattcccgggatcccgcttcctttgaccgcctccccccccggcccggcggcgcccgcctcctccacggccactccgcctcttccctcccttcgnnnnnnnnnnnnnnnnnnnnnnnnnnnnnnnnnnnnnnnnnnngccgccaccgcccaggaccgccggccgggggacgagctcggagcagcagccagaaagcataacccctactgtagaactaaatgcactgtgcatgaaacttggaagaaaaaccaatgtataagcctgttgacccttactctcggatgcagtccacctataactacaacatgagaggaggtgcttatcccccgaggtacttttacccatttccagttccacctttactttatcaagtggaactttctgtgggaggacagcaatttaatggcaaaggaaagacaagacaggctgcgaaacacgatgctgctgccaaagcgttgaggatcctgcagaatgagcccctgccagagaggctggaggtgaatggaagagaatccgaagaagaaaatctcaataaatctgaaataagtcaagtgtttgagattgcacttaaacggaacttgcctgtgaatttcgaggtggcccgggagagtggcccaccccacatgaagaactttgtgaccaaggtttcggttggggagtttgtgggggaaggtgaagggaaaagcaagaagatttcaaagaaaaatgccgccatagctgttcttgaggagctgaagaagttaccgcccctgcctgcagttgaacgagtaaagcctagaatcaaaaagaaaacaaaacccatagtcaagccacagacaagcccagaatatggccaggggatcaatccgattagccgactggcccagatccagcaggcaaaaaaggagaaggagccagagtacacgctcctcacagagcgaggcctcccgcgccgcagggagtttgtgatgcaaggtgaaggttggaaaccacactgcagaaggaacgggcaccaacaagaaggtgggcaagcgcaatgcaacccgaaaacatgctgggagaatccttgggttccaaaatccccgcagggggcagccccacccaaaccccgcacctcaaggtccggagggagaaagaaccccccattaaaaagaacccaggggggatggg

SEQ ID NO: 79630 - DNA, 671 bp, Homo Sapiens
  misc_feature (609)..(609): n is a, c, g, or t
ctacctttggatttgctctgaagagactatcaagaccttgattcctattcagagcaaatccaaaggtagaagaaagagagaaaagagccaaaagccttgaaagtctcatatagatgagtacccggacagataaagatggcaaaggaatccaaagccttggaagtccgattaaagttaatcaaaggactgacaaaaatgagaaaggaagacaaaatctcgaatctgttgctaaagtgaatgccaggatgaataaaacgagcagaagaagtgaagaccttgataatgctactgaagtaaatcccaaaggacatgaaaataccactggaaaaaaagaccttgatgggcttattaaagtggatcctgaaacaaataaaaatattacgaggggccagagccttgataatctcatcaaagtgacccctgaagtaaagagaagtaaccaaggttccaaagaccttaataacttcatcaaagtgtatccaggaacagaaaaaagtactgaagggggccaaagtctcgacagcctcattaaagtgactcctgaaagaaacagaactaaccaagggaaccaagacttggaaaatcttatcaaagtgatcccttcagcanacaaaagcagtgaacaaggtcttggatgaacatattaatgtcagccctcgtgccgaattctt

SEQ ID NO: 79631 - DNA, 665 bp, Homo Sapiens
agaattcggcacgtgggttataatgtaatatgctcttttcacagacatttacaacatgaggcagtacaggatgctttagtatttatatgagatattgatttctacattatgtgaattctaagatgcaagtttcaatacctctaatgtctatcaatagcaaagtagttgaatgcatcatagtgtttccaccctggggaatactgtgtagttattagaaaataaatttaagttcaatctatatatgttatacctgaggaatatccaatatgcttttgtcaaatcagaaaagccacttacagagtaatgtgcttattgtgatccctggttttttaaaaacaaacaaaacatgtgctttgtgtgtgtttttgtatgtcatgttattactatgaaaaacaatataaaaggatacaagctattagcatcgattattggaaggggtgggttatggagggattagcaggtttatttttatagatcttttcattgttttattgtttcattttcactcaggttaatgagtacacttttttaaattcaagactaaaaatcaaaaacatctagagactctgaaacactcaatatgtatttgggtaacacacccaatattagaacctagacctaacaatttcattcagtggttctttccattaaaataatctttattg

SEQ ID NO: 79632 - DNA, 658 bp, Homo Sapiens
  misc_feature (68)..(68): n is a, c, g, or t
cctgtgcttttaatgtatctctttacatgatctgagagaggattcaagttgatagaaatagctgaggngaaaagggggaacatcttgggatgaagcttgtccttatggtgatggtttaattacagattaaaaaattagaaggaaatttcagtggattaagtgtatagctttcatatctacatttcaagaaattaccattgtaacttgataagagatgatttattttatgtaaacatctttgcaaagcaaggtgtagcagctcagctagatttattactgtgcacgaaagtaaatacctatctcaattattctttttcttttccaatataaagtttgctgaatgtacaagaagagtttatcacttaggatatagaatttttttaggggttgggggaggggatctgttaggaaactgttacctataaacaaagattgactggattcgatccaaaagataaaacttgaagctattctggaactaacatggaaaaatgaaatggctattgtttaaaaaaatgatagaaatacattgttgatgggatatgagttaagtttattttctacaaactgtaattgatgaggacatggataatatcttcatgtttctgagaagtaatctgtatgtggggggaggggataataaatatttctaaccaac

SEQ ID NO: 79633 - DNA, 807 bp, Homo Sapiens
  misc_feature (31)..(31): n is a, c, g, or t
gagaatgtacgagagcgcatcgcaaagaacntagtagagaaagtattctaaccactgagaagcagaatttcctgctatttgacatgactactcatccagtgaccaatacaacagagaaacagcgactagtgaaaaaacttcaagatagtgtactagagcggtgggtaaatgaccctcagcgtatggacaagcgaacactagcactcctggtgctagcccactcctctgatgtgctagagaatgtcttctcctctctgacagatgacaagtatgatgtggcaatgaatcgagccaaggacttagtagaactggaccctgaagtggaagggacaaagcctagtgccacagaaatgatctgggctgtgctggcagccttcaataaatcttaaagccggcaggtggatttctccttttcccctgctggctggtgactgtcagagaccccatcactgagttttgtgtgatgagatgttttcatcatttttgtttccttttcttgaatcagacttgtgatttggggagagcaacttcagggcttctccatagaccttgaccattataagcagaccttatttctccctacacttccactccataggtaaataaactgggtgaagccacacacacccaatgaacattttctcccatttggtggtttagtttcacccagtgtgcttttggataagcagaaatatctaaatgggattttgagttctccagctatagaatgtgaatgagataaaaagtgaactatctattatatttttctgagtttgttttctatcataaatacatgttttcacagcc

SEQ ID NO: 79634 - DNA, 883 bp, Homo Sapiens
  misc_feature (20)..(20): n is a, c, g, or t
  misc_feature (115)..(115): n is a, c, g, or t
ctacataattatctagtatntggaaccatcttttacaaacaagaaactgtttttgactttcgaatctcagacaagagtaggtaataaactaaatgatgcagggtttatttctccnagaaattttacatagtcatcccgatacttcgtgctctttgcgagtcacttctgattttcactttttaaatgaaaggtttgatagaaagctgaaaagatgggaagaacctaaggaattaccagctgaggacagccaagacttaacaagcactgactaccgttcccttgagctaccattatcacaagggtttgcctttcaattagtaaagctttttggatctccaggcgttccaatggaatccttgttgcctgatgactatgtggttccccttgactggaagacactaaagatgatctacttgcaatggaagatgtcagtggagaaaagacagaagaagattggttgaaaaatgaaaattccttgaactttgagttctgctgtcttcatggtactgctgaagatcatgatcacggagaaaagtcagagtgctcagtgccaacccaagggattctttccagagacgtacccgttggataccaaaattagtttggataatctgttcaaccattcttgataagttatctgaataataaaaaaactcaacagaggaggtaacaatttgaacattttattgtctaatttgaagatgtatgccatactttgtttgatagaagaaagtaaggcacagaaaacttgagtaccttatttttaaaactgcattaggattaaaaggttagcccctatatccaagtattggtctgagatcccatttctagaattctgaaatccaaaaagctctgaaaatcaatagttatttttccaaatgta

SEQ ID NO: 79635 - DNA, 380 bp, Homo Sapiens
ctgtaattacttaggaagaccaaatggcaccagagataagactcccttagatccccacttagatcaccaccctttctcagggggtaataaagtcatcttccttggaatgtagcaatctataaccaatcaaagcactgtaacatatgcactggtcttgtatggaaaatgttgtaatcctgctaaaattcctctctctttgcctgtggaagtgaaaccttaacttctccagtttggaatgctcaccccattcctttggagtcaatgcttactgggtggctattctcaaactttgcactcaaagaaactctatacttagtcttattttctgaatctcattatttaaggttgacataataaacaactaatagtaagtaaagtgc

SEQ ID NO: 79636 - DNA, 1106 bp, Homo Sapiens
ttcccaaggggaattattccgggtgggaaaggaacccgggggaccggggcccttggggaccccttccaattgaaggaaagttagggatggtgattcttccccgaaagtcccttcccggatttctcgggatgctgaagtccttccccatattaaccatcttcccgcctcctttctcccagggatgggtctgggccggtgcgccagctgaacccggacaaactgggggaagccgaacacacaggctcccacgtgctccttcaacccacgcttttgtcttgggatcattgggggtagcctgagccataatcagtatccaagtcctgcagtttctccacgaactgccatttcttcacggcctggtcccgggccaccttggcacagatgctggcagcactaaccaccgggtagagggcatctgctttggccttgaccgtcacctcaatcccgggaaaactttgctgcagccgcgcctggtatgtctctggcatccctacggtgtccacgaatacctgggtgacgttcacgccctggtccaatgcatactgtataagcccagtggctgtatcatgtgacagggagttcaggttgtatttgacccgcccaagcatgctggtagagatgaggtttggagacagcacatccagcgcccagccgacaaagtccgtgtcctccattttcgcaaacagcctttcccgctcgctctccaatagggtctttgagtctgccactttcagcgcctccagatctgccaggcgaggcaggggacaataacagatggcgtagaccatggggcccagcacggggcccctgcccgcctcatcgacgcccaggacgcaaggctccttgcggcacaccgcgggcacaggcgaactcaggcgacagcggcctgtattgtctctctccagctcgctgagatccatgccgcctcagccgccaccaccagctgcaagaactaatactgcaggagcgggtctcggcgcgcgttttccgcgggcctcgaagcggcgcctgcacctcgtgccgaattcagccacaccaggcctcagctacacttaggaccagttatagttactggccgtctttacaagcctgtttttgacaactgc

SEQ ID NO: 79637 - DNA, 777 bp, Homo Sapiens
cggggggggacagcaactaagctaggtacgaggctgggtgtggaattcggcacgaggggcggctgaggccggcatggatctcagcgagctggagagagacaatacaggccgctgtcgcctgagttcgcctgtgcccgcggtgtgccgcaaggagccttgcgtcctgggcgtcgatgaggcgggcaggggccccgtgctgggccccatggtctacgccatctgttattgtcccctgcctcgcctggcagatctggaggcgctgaaagtggcagactcaaagaccctattggagagcgagcgggaaaggctgtttgcgaaaatggaggacacggactttgtcggctgggcgctggatgtgctgtctccaaacctcatctctaccagcatgcttgggcgggtcaaatacaacctgaactccctgtcacatgatacagccactgggcttatacagtatgcattggaccagggcgtgaacgtcacccaggtattcgtggacaccgtagggatgccagagacataccaggcgcggctgcagcaaagttttcccgggattgaggtgacggtcaaggccaaagcagatgccctctacccggtggttagttgctgcagcatctgtgccaaggtggcccgggacaggccgtgaagaaatggcagttcgtggagaaactgcaggacttggatactgattatggctcaggctacccaaatgattccaagaaaaagcgtgttgaaggagcagtgagctgtgttcgcttcccagttgcggtagtgggcagc

SEQ ID NO: 79638 - DNA, 1184 bp, Homo Sapiens
tagtgggccgcggttaatcgggcacgaggcgcggaaaacgcgtcgccgagacccgctcctgcagtattagttcttgcagctggtggtggcggctgaggcggcatggatctcagcgagctggagagagacaatacaggccgctgtcgcctgagttcgcctgtgcccgcggtgtgccgcaaggagccttgcgtcctgggcgtcgatgaggcgggcaggggccccgtgctgggccccatggtctacgccatctgttattgtcccctgcctcgcctggcagatctggaggcgctgaaagtggcagactcaaagaccctattggagagcgagcgggaaaggctgtttgcgaaaatggaggacacggactttgtcggctgggcgctggatgtgctgtctccaaacctcatctctaccagcatgcttgggcgggtcaaatacaacctgaactccctgtcacatgatacagccactgggcttatacagtatgcattggaccagggcgtgaacgtcacccaggtattcgtggacaccgtagggatgccagagacataccaggcgcggctgcagcaaagttttcccgggattgaggtgacggtcaaggccaaagcagatgccctctacccggtggttagtgctgccagcatctgtgccaaggtggcccgggaccaggccgtgaagaaatggcagttcgtggagaaactgcaggacttggatactgattatggctcaggctaccccaatgatcccaagacaaaagcgtggttgaaggagcacgtggagcctgtgttcggcttcccccagtttgtccggttcagctggcgcacggcccagaccatcctggagaaagaggcggaagatgttatatgggaggactcagcatccgagaatcaggagggactcaggaagatcacatcctacttcctcaatgaagggtcccaagcccgtccccgttcttcccaccgatatttcctggaacgcggcctggagtcagcaaccagcctctagcagctgcctctacgcgctctacctgcttccccaacccagacattaaaattgtttaaggagaaccacacgtaggggatgtacttttgggacagaagcaaggtgggagtgtgctctgcagccgggtccagctacttccttttggaaccttaaatagaatgggtgttggttgattaattttaaaa

SEQ ID NO: 79639 - DNA, 874 bp, Homo Sapiens
cggccagtaactactaacggtcttaaggtagcgaggcctgggtggcgaattcggcacgagggcggcatggatctcagcgagctggagagagacaatacaggccgctgtcgcctgagttcgcctgtgcccgcggtgtgccgcaaggagccttgcgtcctgggcgtcgatgaggcgggcaggggccccgtgctgggccccatggtctacgccatctgttattgtcccctgcctcgcctggcagatctggaggcgctgaaagtggcagactcaaagaccctattggagagcgagcgggaaaggctgtttgcgaaaatggaggacacggactttgtcggctgggcgctggatgtgctgtctccaaacctcatctctaccagcatgcttgggcgggtcaaatacaacctgaactccctgtcacatgatacagccactgggcttatacagtatgcattggaccaggcgtgaacgtcacccaggtattcgtggacaccgtagggatgccagagacataccaggcgcggctgcagcaaagttttcccgggattgaggtgacggtcaaggccaaagcagatgccctctacccggtggttagtgctgccagcatctgtgccaaggtggcccgggaccaggccgtgaagaaatggcagttcgtggagaaactgcaggacttggatactgattatggctcaggctaccccaatgatcccaagacaaaagcgtggttgaaggagcacgtggagcctgtgttcggcttcccccagtttgtccggttcagctggcgcacggccagaccatcctggagaaagaggcggaaagatgttatatggggaaggactcagcatccgagaatcagggaggggctcaggaagatcaa

SEQ ID NO: 79640 - DNA, 587 bp, Homo Sapiens
  misc_feature (54)..(65): n is a, c, g, or t
cccctgtagagataagcctatggaaacatagcaagacactgtctctacaggggnnnnnnnnnnnngaaactgagccttaaagagatgaaataaattaagcagtagatccaggatgcaaaatcctcccaattcctgtgcatgtgctcttattgtaaggtgccaagaaaaactgatttaagttacagcccttgtttaaggggcactgtttcttgtttttgcactgaatcaagtctaaccccaacagccacatcctcctatacctagacatctcatctcaggaagtggtggtgggggtagtcagaaggaaaaataactggacatctttgtgtaaaccataatccacatgtgccgtaaatgatcttcactccttatccgagggcaaattcacaaggatccccaagatccacttttagaagccattctcatccagcagtgagaagcttccaggtaggacagaaaaaagatccagcttcagctgcacacctctgtccccttggatggggaactaagggaaaacgtctgttgtatcactgaagtatattgtattgtttttatacgtgtctgaataaaaatgccaaagttttaaa

SEQ ID NO: 79641 - DNA, 2345 bp, Homo Sapiens
  misc_feature (2165)..(2230): n is a, c, g, or t
  misc_feature (2233)..(2240): n is a, c, g, or t
  misc_feature (2243)..(2262): n is a, c, g, or t
  misc_feature (2273)..(2273): n is a, c, g, or t
gcagtaactctaacggtttaaggtagcgaggcctgggtggcgaattcggcacgagggttccctcgggagaggggcggaggcttcagaggtgcaccagcgtggggtttgctgccggagcggagtctccggccggcgtccagtttgagtctaggttggagttggaaccgtggagatgcggaaggaaaccccaccccccctagtgcccccggcggcccgggagtggaatcttcccccaaatgcgcccgcctgcatggaacggcagttggaggctgcgcggtaccggtccgatggggcgcttctcctcggggcctccagcctgagtgggcgctgctgggccggctccctctggctttttaaggacccctgtgccgcccccaacgaaggcttctgctccgccggagtccaaacggaggctggagtggctgacctcacttgggttggggagagaggtattctagtggcctccgattcaggtgctgttgaattgtgggaactagatgagaatgagacacttattgtcagcaagttctgcaagtatgagcatgatgacattgtgtctacagtcagtgtcttgagctctggcacacaagctgtcagtggtagcaaagacatctgcatcaaggtttgggaccttgctcagcaggtggtactgagttcataccgagctcatgctgctcaggtcacttgtgttgctgcctctcctcacaaggactctgtgtttctttcatgcagcgaggacaatagaattttactctgggatacccgctgtcccaagccagcatcacagattggctgcagtgcgcctggctaccttcctacctcgctggcttggcatcctcagcaaagtgaagtctttgtctttgggtgatgaaaatgggacagtctcccttgtggacaccaagagtacaagctgtgtcctgagctcagctgtacactcccagtgtgtcactgggctggtgttctccccacacagtgttcccttcctggcctctctcagtgaagactgctcacttgctgtgctggactcaagcctttctgagttgtttagaagccaagcccacagagactttgtgagagatgcgacttggtccccgctcaatcactccctgcttaccacagtgggctgggaccatcaggtcgtccaccacgttgtgcccacagaacctctcccagcccctggacctgcaagtgttactgagtagattggatttaagacaaaaagcaagtcccccatgagtgtccacttctttgccctgccctctcagcttgtgagacaacacaggagccttctatagtatgttgatatgctagatctgtgccgttaataggcatcgtctctcagcctgagggaggctggattctgggttcctgtagtcacagggaggaaaagctttcttaaaaatggacatgtatgtgcgtgtgagtgtgtgtgtagatttatagtttttggtagtggcaggaataaaaaaaatccatcctacatcttccctaagcactgcctctctctcaccccccaaaacaagttgacgaaagggttttatgtagctgtctatgaggaattggccgtgtctgggtgggttatgggatgtgggcatccctgggttcttggaagcagctcttatgctactcatagagatgggattgactttatttttttatagtgcttaattcaccattatgagaaatgcttccagtcacaaaaatgcagcccagctcactctgaggaagaagcaggacttggtacggttttacacaactccttaccattaaactgaatcagaaatccattttctggctgaataaaaagtttggcttgcctgtgtaatgcccactcccttccccctggctccctagtgatgggacatatatgagagagaagtgtttttctatcatagacaccataggggaaagtttggggatgaaggagagcttaaaggtgtttcaattaagttagaaaactgacacaggctgttgagaattctttgccacttttcccaccccaaaacagcatggggcctgacatcttctgccctggtcccctttctcttgatgtggaaagtctgaatgcagtatttatagacttctaaggttttaaaatccagtatcaagaagaaaatcagaaatactggttggtgaaataaagagtttaggcattgttaaaaaannnnnnnnnnnnnnnnnnnnnnnnnnnnnnnnnnnnnnnnnnnnnnnnnnnnnnnnnnnnnnnnnnttnnnnnnnnaannnnnnnnnnnnnnnnnnnnaaaatttgtgnggggcggcccctgggcccctccagaaaaattttttttaaaacacattttcctttttgggggcgccgcggggc

SEQ ID NO: 79642 - DNA, 614 bp, Homo Sapiens
gatgacattgcttctgctaaatttaataaaaacttcagaaaaacctccattttgatcatcaggatttcatctgagtgtggagtccctggaatggaatccagtaacatttggagtgtgtattcaagtttctaaattgagattcgattactgtttggctgacatgacttttctggaagacatgatacacctactactcaattgttcttttcctttctctcgcccaacacgatcttgtaagatggatttcacccccaggccaatgcagctaattttgatagctgcattcatttatcaccagcatattgtgttctgagtgaatccactgtttgtcctgtcggatgcttgcttgattttttggcttcttatttctaagtagatagaaagcaataaaaatactatgaaatgaaagaacttgttcacaggttctgcgttacaacagtaacacatctttaatccgcctaattcttgttgttctgtaggttaaatgcaggtattttaactgtgtgaacgccaaactaaagtttacagtctttctttctgaattttgagtatcttctgttgtagaataataataaaaagactattaagagcaataaattatttttaagaaatcg

SEQ ID NO: 79643 - DNA, 1044 bp, Homo Sapiens
  misc_feature (935)..(946): n is a, c, g, or t
catgcatgggaaaactgaggcacagagaggtaaagtgacgtgttcaggtcacgcagcaagttagtgacagatccagggagagaatctaggctccttgatccccaaacaccctgtgtttaccatcaaacaccattccctctccaaccatggccaggcaaacccacagaaataggaactacaaatttagatgactctcttttgggttttatcaattttcatctgctgttacattagtattatgtgcactgaattaaggtattgaaattcaatcacttcattgatacctcaaagaacagcctaaaggcaaatgtttcaaaaataatgagctgacacataagaagactgctcacaattagtgtaaatcatggacaatgggcagaggcactaaactgtcaccagttcttgtcatataattctggtcaaacataacagaatataataactctagtgattagattagaagtagttatatacaaagacaaacaaacaagttaaagcagcctttaaaatagctgaacaagaaaacaactaactattgcacaatgccctcttaaagttactgctatgaattgatgtggtaaaatctacaatgctccataatttataggtgcattctggttacttgatttcttatataggcagctcatagtgttaaaattataagaaatacagattattaaaacattttagattaaagtacacattttgatttaaatgagctaaacacagttaaataactgagtgacaaaatggttgtttagggcagtcttatctgagtgaacatatcttctgtatgttgctgttgctgtgtggtaatactctgacaacactgaaatcctagccctgtaagtacacacacggtgattcatgtttacagatacagatgttcaagacataagaagtgactggtgaatataaattactaaactgtaacnnnnnnnnnnnntcaaaggcttgcaaaagacatcagtgaaaacagaatgaaggtaaatctgaaaatttaaaggaaaacataagaaagctagcttttggtatctggtatac

SEQ ID NO: 79644 - DNA, 718 bp, Homo Sapiens
  misc_feature (315)..(315): n is a, c, g, or t
cttggtgctccactatgacccctaacccatgagcccagagaaattcaccgtgataatggaatcctggcaaccttatctcatgaggcaggaggtggggaaggtcttctgcacaacctctgatcccaaggactcctctcccagactgtgaccttagaccatacctctcaccccccaatgcctcgactcccccaaaatcacaaagaagaccctagacctataatttgtcttcaggtagtaaattcccaataggtctgctggagtgggcgctgagggctccctgctgctcagacctgagccctccaggcagcagggtcnccacgtaccccctccccaccctgttccccaaaggtgggaaagaggggattccccagcccaaggcagggttttcccagcaccctcctgtaagcagaagtctcagggtccagacccttccctgagcccccacccccaccccaattcctgcctaccaagcaagcagccccagcctagggtcagacagggtgagcctcatacagactgtgccttgatggccccagccttgggagaagaatttactgttaacctggaagactactgaatcattttacccttgcccagtggaataggacctaaacatcccccttccggggaaagtgggtcatctgaattgggggtagcaattgatactgttttgtaaactacatttcctacaaaatatgaatttatactttgaaaaaaa

SEQ ID NO: 79645 - DNA, 630 bp, Homo Sapiens
ctgatctgggggctgcaatttggcctaagaagggtacagctgtgttctggtacaacctcttgcggagcggggaaggtgactaccgaacaagacatgctgcctgccctgtgcttgtgggctgcaagtgggtctccaataagtggttccatgaacgaggacaggagttcttgagaccttgtggatcaacagaagttgactgacatccttttctgtccttccccttcctggtccttcagcccatgtcaacgtgacagacacctttgtatgttcctttgtatgttcctatcaggctgatttttggagaaatgaatgtttgtctggagcagagggagaccatactagggcgactcctgtgtgactgaagtcccagcccttccattcagcctgtgccatccctggccccaaggctaggatcaaagtggctgcagcagagttagctgtctagcgcctagcaaggtgcctttgtacctcaggtgttttaggtgtgagatgtttcagtgaaccaaagttctgataccttgtttacatgtttgtttttatggcatttctatctattgtggctttaccaaaaaataaaatgtccctaccagaagccgaaaatctaaataggctacccaacaatatatcttg

SEQ ID NO: 79646 - DNA, 1778 bp, Homo Sapiens
  misc_feature (1635)..(1643): n is a, c, g, or t
gcggccgctccaacatcactgcaacatcttctcctacgactactcgggatacggcgtcagctcgggcaagccctccgagaagaacctctacgccgacatcgacgccgcgtggcaggcgctgcgcacccggtatggcgtgagtcccgagaacattatcctctatggtcagagcattgggactgtccccacggtagacttggcctcgaggtatgaatgcgcagcggtaattctccattcccctctgatgtctggtttgcgtgtggcttttccggataccaggaaaacatactgctttgatgctttccccagcattgacaagatatctaaagtcacctctcctgtgttggtcattcatggtacagaggatgaggtcatcgatttctcccatggcctagcgatgtacgagcgctgtccccgagccgtggagcccctttgggttgaaggggctgggcataatgacatagagctttatgcacaatacctagaaagactaaaacagttcatatctcacgaacttcctaattcctgaagacaacaacttgatcttacctcatttactgtgaacagaagagtcctctgttttgcacatgctttaactgggtagctgtaaaggcttgataaccatgaagaagtgcccaacctttagggtgttctaatcaaagagctgatgaaatctcagtcttttgtatctagaggtggttctgctaattcacacaacacgttaaactgaacagtcgtgattcccagcttcattaccttgcaggaatgggaatgagagctgaatgtagggacaattttctagtgctgtataaagtagcctcgcatctgtttctcaaccttatccatcatttctgacattcatgcaggacttgccctgttgccaccaatgttctcggtatttcacatgcagctctctttctgccactggatacatgggttcaatccatttgtgaagctgtgatagtgtaactggaaagctagtgtggtgaaaattcctttattattttttgttaacatgctgatctttcccggacaaatgaactgaagggtaatttactggaactctcgtgtacagcttcatcaactgtaaccatataaatataactggaatattcttaaacaaaaagaaactaggggtttttttaagtgtaaatttattactagccaacagagttttactattttgattgtctggttggtttaacaaagagcctagctgaccttccttctgtaaagtcctccttgtaggcttttttaaagtactgtacatatttgcaatcacattgtgcatagattcttaatggtagatatgatttcttttgtcaggctacaacaatgaactgcagattccttgtttgtaatgtaaatgattgaatacattttgttaatatgtttttattcctatgttttgctattaaaaattttataacatttccaagacaaaaattccaagtttatgctttgaagaatttatgtaattaaaatttcactaaactaatctttttagtttaggaattatttgggttttgacactggaagttgcgccaaataagcatcagaaataggagatgcttaacattgctatactacttgtgttggttagggggttggatctgggggttctttggttttaannnnnnnnnccacatttaaaagccttaaatgtactgtaagcctcagatcgttgtacaactggactgcggttgattgccagtttgtgtactgttgcttggatgcggcacagtggttggtaatggaataaaggatgcatggatcag

SEQ ID NO: 79647 - DNA, 750 bp, Homo Sapiens
  misc_feature (74)..(74): n is a, c, g, or t
  misc_feature (543)..(622): n is a, c, g, or t
tcaagtcgcaggaaaggtcacggcagggaagccccctcagcccctccgcgtcgcctccccgcgggccgcccctntcggccttgcgccccgcggccccgcagcctccgcgcggcctcccgccccatccccgccactttccccggagctgggccgcgaacacctcactattgatggtgtagcgctttaggggaaggaggtgattgtctaggagtaactgtatgtgcgctcagcaccgggtcacaaccaccgtgggatccacttacagagaagatttgtggagagcttcagcctgtttatggtgttactgagaaaggaattgtggccatttgatataattctggatggaagacctcttatttgtattacattgaattagagcatttttgaaacgttggggttgttggagtggttggattttccctggaattgagtgagaaattcagaagactgaagcccaggcttactgtctacctttcacggaggcctagccgtgagaggacagaagaaggcacgtggcgaatcatgacagcggacaaagacaannnnnnnnnnnnnnnnnnnnnnnnnnnnnnnnnnnnnnnnnnnnnnnnnnnnnnnnnnnnnnnnnnnnnnnnnnnnnnnnattcaaggccacgccggagctgtaccttggaaggaggagccaaaaattatgctgagagtgatcacagtgaagacgaggacaatgacaacaatagtgccaccgcagaggagtccacgaagaagaataag

SEQ ID NO: 79648 - DNA, 783 bp, Homo Sapiens
agacagtctctctctctgtcgcccaggctagagtgcaggcagagtctgagcatccagatttcaaaattaaaaaataaaagataatctagtttaatatatagtagttgaatcaccttaagtctagactgctgtatgagcacccattatctttcactatattccatcatcccccaacatatccacagtagatgaagggcagtttgctcaaacattgttttgatcctgtcatgtctgttcagaaatgcctgtctattcagaaacccacgtctaataacaaaatcttggactggttactatcaaaacccaacaacatacagactcctcagctaggccctagggatatttttctaccttgatttccaaatgttcattgaaagaatgcttaattctaatttggaaaaaagtttttggcttcccacttctgctttacacgttcatctttcttgaaatcaaatccaatccaatctatattctaagaacctgctcaaatcttggttcttcaaagctttccctggtattttgcatttttgctttgaatagttccacgaaggataacttcttactccttccttcatctttctgtatcttgcatatagtaaatattaatgacttgtttgcattttgttatcctaacttggctataaagaaaatcagatgtcttcaccagtcgttcaaacttcaggtctgcctacagattcatagatggctgtggatttttataattttgtcacaaagttagtggtaactacaggttatctcagaatatcttttttggcgtataaa

SEQ ID NO: 79649 - DNA, 641 bp, Homo Sapiens
  misc_feature (53)..(94): n is a, c, g, or t
  misc_feature (354)..(411): n is a, c, g, or t
ggcacgagcgaattcatggagatagagaatagaaggatggttaccagaggctnnnnnnnnnnnnnnnnnnnnnnnnnnnnnnnnnnnnnnnnnntggttaatgagtaccaaaaaaatacttagaatgaataagagctagtatttgatagcacaatgggggactatagtcagtaataatttagctgtacattgtaaaataaccaaaagagtataattggattatttgtaacacaaaggataaatgcttgaggggatggatacccaattttccatgatgtgattattgcgcattgcatggctgtaccaaaatatctcatgtaccccataattatatacacctactatgtacccacnnnnnnnnnnnnnnnnnnnnnnnnnnnnnnnnnnnnnnnnnnnnnnnnnnnnnnnnnnaacaaagtagggaaagctcttcaaatactatgaaattgagaagacaactaaagaaaatattaataaagacaagaacataaataatttctttggcagaacataagccatcataatcagaagataaataagctgggaaaaatatttgtaactcatatcctagataacatactcattttccctgtatataaaaagtttctctaatgtgataaataaaaacacaataaaccagt

SEQ ID NO: 79650 - DNA, 703 bp, Homo Sapiens
aaccagaaaatgcacaacgtgtgcgtgaaccgcaggtacggaggcagcggcatgccgttgctccgctgtgggaggtgtgtggggtcagcccagccactttcctccgtgttcagatgactctcgttcgccctgaccggcttctcacagtgtctcaggccactgcgccaccgcgctggtgctgagcagaagcgggcagaagtggggtctgctttcaggacttcatttcccccactcgttccggccccgcatgctccacgtctgccctttggtctgagttaaaactgcgatgctgaaaagtgcgagctctttccacgaggaggagccacacagggtggcctccgagggtgagtcgctctgctaagcaagggcagccgctgcacgtcagcccgcaggccaagggtccagcttatcctgggtgctctgtgatcagaagggtccttggatcccgaggactgcagctgctgccgtccacagcgcctcagcctctcttcctgtgtggaagcggggcaggcagggctgtggcagacaggcctggcatagcccaggttccaggtgtcctgggcagcctgaccggtttcctgagtagcctcaatgaaaacacctgagaaaaagaaaatgtaaactaaggaagggttttcccacttaatccaacccagatttctattcaacttaaaggatttaattggcatttgtgagaaataat

SEQ ID NO: 79651 - DNA, 722 bp, Homo Sapiens
tgatgttaatgtgctctcaaaacatggaaagtaagtttagtgcacatagctaaatcacaaaacatccaatttctccgtttcctcaggaagtcattactgcgccaccacatcacatgaccttaacatgatcaatgtatttctctgccttgacatttaaatacataaattgagataagtagattagaaaatcattcaaatgataccataatttgtacgggacagggtgcgggcaatggccacgtggccaaggccccgcaggaacgcgccgaggtctccctcaccctccaggtgtccttcgcacccaacagtgcgtctgaggaacgagctgcagtttgagcgttcccctgagatgtgcgtagcctccgtgtaaatgtccactcccatggcttaattgcctatcagacgcattttcccagacgaaagcaatgttgggttggggaagacagtgcagccacccagcctttaccagcagcgtacggcagacgaaggcagtcgaggtgtggaggtgatcacgaagatacatgtgtttgactgtttaatttgaaagtttacattttttatgctttgtgttggtgtgtaatttttgtactcttggtggctagtttttgtcaaatcttttttggaatattgcttaaatgttttgattttatgatagtgaagcttgtattcagtgttttgccaattaatattatatgcttgtaataaaagcaaaagaaaagctt

SEQ ID NO: 79652 - DNA, 907 bp, Homo Sapiens
tttcattgttattattgtgagaatgctgttattggggttgtgtgtgagtgcccgtcagccagtgatgcctcgggccacgctgtggggccacctcagtcctgcctgggtcctggtgccttggaccccacgtgcttgtggccaggctgcccctgggcggggccatgtggcctcagaccacaagagcggagctgccctggcccaagcactgcagctgcctgcacccccgggcttcgcagccttgcttgttttctctgaacagcaacagaacaatgttcacagcgattcaaagggtggcattgggttggacgttctgggtacaagccaacctagtcccacgttgtacgtgaatgtttaatgtgctctcaaaacatggaaaataagtttagtgcacatagctaaatcacaaaacatccaatttctctgtttcctcaggaagtcattactgcgccaccacatcacatgaccttaacatgatcaatgtatttctctgccttgacatttaaatacataaattgagataagtagattagaaaatcattcaaatgataccataatttgtacgggacagggtgcgggcaatggccacgtggccaaggccccgcaggaacgcgccgaggtctccctcaccctccaggtgtccaggtctccctcaccctccaggtgtccttcgcacccaacagtgcgtctgaggaacgagctgcagtttgagcgttcccctgagatgtgcgtagcctccgtgtaaatgtccactcccatggcttaattgcctatcagacgcattttcccagacgaaagcaatgttgggttggggaagacagtgcagccacccagcctttaccagcagcgtatggcagacgaaggcagtcgaggtgtggaggtgatcacgaagatacatgtgtttgactgt

SEQ ID NO: 79653 - DNA, 762 bp, Homo Sapiens
aggctgccttctagtaccaaatgttataatcagataattgacctggtgtttgtggtgatctgatataatcaggaaaagcattactctgcctttgtaaactcttaaattgatacaactgctggaagaagggaggacagatccaagagatctaatttgtatataatgggagttccagagtgaaatacaagagaaaagccagatttaatagaagtaaatttcctgagctgaataaagccttatatttgcaggttgaaagtgttcactaaattctaggcaggattgatgagaaaaggcatacacctaaacatactctgacagaattcctgaatctcaaagttaaagagaaaaatatataagattccagacagaaagaagttatttgcaatgggaaaagaattggactggtatcagacagtggaatcatatctatacctgttaagagaaaaggaaagtaaccaagaagtctctttccagccaagcatcattcacctgccagagtgaaagggatgcagaaaggattccaagaatctatcatctgcatatccccatctgaagaaactgaaaagaggactgtaactaaataacaaattaatgagaatagagacttcaagaaatgagaaggtaaagtagaaagggaagatgatgagtgaacaataagccttgtaatatacatgggtatgtatcttaatgtacttggatgatgatgaaatgactgaaaatgtgtactatatgtgttaaataaagactcttaagataaaaaaa

SEQ ID NO: 79654 - DNA, 691 bp, Homo Sapiens
aaagacaaagtagtattatgttgcttcagtttctttaaatacctcgtttcttttgagaccaaaaattcccatcaaggaaataaatcagcctgattttaacattttacatattacattgcctttaagcactatgattggatggctttttttctatttgtttaataatccttggctaaattcacatgtatctaaagtaaaatagctgagttactgaattctataaggggaagaaaaagcatttattttcacatgattaactgaaatggaaaagtaagacatttagcagaataattcatttaaaaataattttaaaaaatcagacatatttaaaaatctaggttgtctatccagtatgtgaatgcttaattataattgttacatgttgaatgggtattaagagtaagtcaccaggtacacaaaactgccatcatagcaaaatgagacagtgttgaaaagacaaaatattttctggaatgaaaatatattcaagttgatccatattcagatgttttctgtttaatacttcagattggtcctttgtccacatttgtttaaaacttattgtaatgttaatttatacttttggattgtgcctttgtcatgagttgagaaaagtagtcctacaaataatgtgaaagttgttaccaccacagcatgaatgtataattgtattaaaattgatcatccacag

SEQ ID NO: 79655 - DNA, 1213 bp, Homo Sapiens
aaggtagcgaggcctgggtggcgaattcggcacgaggggcaagacgtgcgcccgagccccgccgaaccgaggccacccggagccgtgcccagtccacgccggccgtgcccggcggccttaagaacccggcaacctctgccttcttccctcttccactcggagtcgcgctccgcgcgccctcactgcagcccctgcgtcgccgggaccctcgcgcgcgaccgccgaatcgctcctgcagcagagccaacatgcccatcactcggatgcgcatgagaccctggctagagatgcagattaattccaaccaaatcccggggctcatctggattaataaagaggagatgatcttccagatcccatggaagcatgctgccaagcatggctgggacatcaacaaggatgcctgtttgttccggagctgggccattcacacaggccgatacaaagcaggggaaaaggagccagatcccaagacgtggaaggccaactttcgctgtgccatgaactccctgccagatatcgaggaggtgaaagaccagagcaggaacaagggcagctcagctgtgcgagtgtaccggatgcttccacctctcaccaagaaccagagaaaagaaagaaagtcgaagtccagccgagatgctaagagcaaggccaagaggaagtcatgtggggattccagccctgataccttctctgatggactcagcagctccactctgcctgatgaccacagcagctacacagttccaggctacatgcaggacttggaggtggagcaggccctgactccagcactgtcgccatgtgctgtcagcagcactctccccgactggcacatcccagtggaagttgtgccgggacagcaccagtgatctgtacaacttccaggtgtcacccatgcccctccacctctgaagctacaacagatgaggatgaggaagggaaattacctgaggacatcatgaagctcttggagcagtcggagtggcagccaacaaacgtggatgggaaggggtacctactcaatgaacctggagtccagcccacctctgtctatggagactttagctgtaaggaggagccagaaattgacagcccagggggggatattgggctgagtctacagcgtgtcttcacagatctgaagaacatggatgccacctggctggacagcctgctgaccccagtccggttgccctccatccaggccatt

SEQ ID NO: 79656 - DNA, 971 bp, Homo Sapiens
  misc_feature (906)..(906): n is a, c, g, or t
  misc_feature (940)..(940): n is a, c, g, or t
ggcctgggtggcgaattcggcacgaggggcaagacgtgcgcccgagccccgccgaaccgaggccacccggagccgtgcccagtccacgccggccgtgcccggcggccttaagaacccggcaacctctgccttcttccctcttccactcggagtcgcgctccgcgcgccctcactgcagcccctgcgtcgccgggaccctcgcgcgcgaccgccgaatcgctcctgcagcagagccaacatgcccatcactcggatgcgcatgagaccctggctagagatgcagattaattccaaccaaatcccggggctcatctggattaataaagaggagatgatcttccagatcccatggaagcatgctgccaagcatggctgggacatcaacaaggatgcctgtttgttccggagctgggccattcacacaggccgatacaaagcaggggaaaaggagccagatcccaagacgtggaaggccaactttcgctgtgccatgaactccctgccagatatcgaggaggtgaaagaccagagcaggaacaagggcagctcagctgtgcgagtgtaccggatgcttccacctctcaccaagaaccagagaaaagaaagaaagtcgaagtccagccgagatgctaagagcaaggccaagaggaagtcatgtggggattccagccctgataccttctctgatggactcagcagctccactctgcctgatgaccacagcagctacacagttccaggctacatgcaggacttgggaggtgggagcaggcccctgactccagcactgtcgccatgtgctgtcagcagcactctccccgactggcacatcccagtgggaggttgtgccggacagcaccaagtgatctgtaacaactttccaagtggtcacccatgcccctccancctctgaaagctacaacagaattgaggatgaggnaaagggaaaattacctggagggacatcatgc

SEQ ID NO: 79657 - DNA, 1184 bp, Homo Sapiens
aaggaagcgaggcctgggtggcgaattcggcacgagggaggacatcatgaagctcttggagcagtcggagtggcagccaacaaacgtggatgggaaggggtacctactcaatgaacctggagtccagcccacctctgtctatggagactttagctgtaaggaggagccagaaattgacagcccagggggggatattgggctgagtctacagcgtgtcttcacagatctgaagaacatggatgccacctggctggacagcctgctgaccccagtccggttgccctccatccaggccattccctgtgcaccgtagcagggcccctgggcccctcttattcctctaggcaagcaggacctggcatcatggtggatatggtgcagagaagctggacttctgtgggcccctcaacagccaagtgtgaccccactgccaagtggggatggggcctccctccttgggtcattgacctctcagggcctggcaggccagtgtctgggtttttcttgtggtgtaaagctggccctgcctcctgggaagatgaggttctgagaccagtgtatcaggtcagggacttggacaggagtcagtgtctggctttttcctctgagcccagctgcctggagagggtctcgctgtcactggctggctcctaggggaacagaccagtgaccccagaaaagcataacaccaatcccagggctggctctgcactaagagaaaattgcactaaatgaatctcgttcccaaagaactacccccttttcagctgagccctggggactgttccaaagccagtgaaatgtgaaggaaagtggggtccttcggggcgatgctccctcagcctcagaggagctctaccctgctccctgctttggctgaggggcttgggaaaaaaacttggcactttttcgtgtggatcttgccacatttctgatcagaggtgtacactaacatttcccccgagctcttggcctttgcatttatttatacagtgccttgctcggcgcccaccaccccctcaagccccagcagccctcaacaggcccagggagggaagtgtgagcgccttggtatgacttaaaattggaaatgtcatctaaccattaagtcatgtgtgaacacataggacgtgtgtaaatatgtacatttgtctttttataaaaagtaaattgtttataaaaaa

SEQ ID NO: 79658 - DNA, 1035 bp, Homo Sapiens
ttaataatattcattgagcacctatgaggtactcaataacagaataggtaaaaattgctgcttttatggagcttatattctagtgggggagacaacaataaacaaaagaagtaaattatattgtatgatagaacatgaaaagagctatggaaataaataaaacatggaagaggatagggagaacaccataagggtaaaagtgacaattttaaactggcaattcagttatttttgcatgtgggaagtagtactgctttattttttgtatgttttatttgtgtagtgttttatataacaccttccaaagcactttaacctcatattgtgcttttattcttatacattgattcaacaataggggccagacttatactagactctggggtacaatgaagagcaaaagcagacatgagtgatattcccgtgaagtctttagagcatttctgtattacttccatattagatgaagtcaataatgccagtttatttatctttttgataaataatttttgtattttacaatgtaccagacacctatagtaattgcgaggttagcaagatagacatggtctctgttctcttgaatcttacaatttaatgagaaaacaaatttttaaataaacaattttggcatgttctggctatagaatggaaatgattggaagggagcaggactggaagcaaggagagatgagttaagagggagaagtaacccaaacaaactaggatgatggcctacatggtagcagaggcatgtggaaataaagaatgatactagagataaaaagaagctacatttaagaggtggaattgacagtgtttggggaaattggcttatggatgatgcaattcatagatgagggataggatgaattccgttttcaagatcctaagtttaaagagtatgcaagatatctgagtggcatgtctctgaacctcatgagacatgtcaggaatagaaatgtagaattggacgttatcagcaataaatggtaattgaagccatgagaatagataaggtctctaggcagatgt

SEQ ID NO: 79659 - DNA, 635 bp, Homo Sapiens
ctgtttaaaaagtaagtttaatgattacattattcagttttttccatatttgcttcttgtactaaatttgtccaattctgaaactgtgttttgaaggttgccactgtcatagaactatggtctagttctttttttatttctagtagatctcagttcaaatatttagttccatgtttttggtaaatagagatttgtggctgttacatcttcttcataaattatgccttttataattgtctactacctctctgtgtcctgtttagtgcatttatctataaatactgcagctgttgtaatctcaatactatcaaatacataaggaaaagtatgctaagtgtatagcctgatgggttatcacaacatgagtgtggccatgccgaagggctttcagagtagaaacatcacccgccctcggaaaaacatcactggctgtcaccaactcctcccctagtcctaggggagtttatcctaccttttaataccacagaatagtcctggccacttttagactttatgtaacattcgctgaatcacacagtatgcattctttgtgtcttaattcttttacttagcttcatgtttgtgtgattcactcatgtttgtgaacttaacttcatcctcgtgccgaattcttg

SEQ ID NO: 79660 - DNA, 577 bp, Homo Sapiens
tgagggacaggttggcttgaaaatcatgagactgttgttaaatcagatgctggttgatcacagaggggacttccagggaaagctgttatcaggtggctgcttcctggtgatgcagcctggctgatgagataaccctggctccacagatggcttagcaggtgctgtgatgatttggttttcttctcaattagactgagctgcacatggtgtttatattgcttggcacatggtaagggcttaatatttgaggtaattatgtagggcgtacactgacaagtatctgacccccccttcctttttgactcataaattggtcatcttaaccatttaagtgtacacttctatagtgacagagttagccctctgtccaagggatttgcatctgtggattcaaccaactttgggtcaaaaataatcaaaaaggatggttgtgtgtgtattgaacatgtagacttatttttcttattttcaaaatactatattttcttgtcacttattttcttgtacactgcagttgtaacagctatgtagcatgtacattaggtattaaaagtaatccagtgaagattgaaagtct

SEQ ID NO: 79661 - DNA, 778 bp, Homo Sapiens
  misc_feature (25)..(25): n is a, c, g, or t
cctgtggtggttccattgcatagcntagatgagaaaacacttgtacaaatattaactgagccacgaaatgctgttattcctcagtaccaggccttattcagcatggataagtgtgaactgaatgttactgaggatgctttgaaagctatagccagattggcactagaacgaaaaacaggtgcacgaggccttcggtccataatggaaaagctgttactagaaccaatgtttgaagtccctaattctgatatcgtatgtgtggaggttgacaaagaagtagtagaaggaaaaaaggaaccaggatacatccgggctccaacaaaagaatcctctgaagaggagtatgactctggagttgaagaagaaggatggccccgccaagcagatgctgcaaacagctaaactgtcatattgctgtcttgtatatacagcttttccttcttttgtttaggatcataattgtctctacagtctgatattaaaggcattggatctatcttggatatcatacatggtcagagaagcctttaggagaagaatcagatcatgtatataattgtaacatcacattgattttacggaagatgttatatggactttaatgacacaatgtttagagataaaatgtacattattttggttcagttttttaaaaaaaatatgctttaacaaaattcttaggaattcttttaagcaatgcaggtattgcgataactgtagattttacaataatgttactctacaaatgggaaaataaattctttaaaattgaatattg

SEQ ID NO: 79662 - DNA, 693 bp, Homo Sapiens
aggactcattctggagagaaaccttttacttgcaatgaatgtgggaaaacctttagacagattagacaccttagtgaacatataagaattcataccggggagaagccctatgcatgcactgcatgttgtaaaacctttagtcatagagcgtatctaacacatcaccagagaatccatactggggagagaccctacaaatgtaaagaatgtggaaaagcctttaggcagaggatacaccttagcaaccataaaactgttcatacaggagtgaaagcatatgaatgcaaccgctgtggaaaagcctataggcatgactcatcctttaaaaaacatcagagacatcacactggagaaaaaccttacgaatgtaacgaatgtggaaaagccttcagctataactcttcacttagtcgacatcatgaaatacacaggaggaacgccttccgaaataaggtgtaaaaacagatatttgacttgagaacaaaagccaagtgtaaattggtgatttagagtgctttaaaatttcaggactcagatatgaggaattgatgtaatgatgccaacttttaatttttcccattgtaaataaacattacattgacaggtattgactactaacacctctaaaaagtacttaagattaaaatctggtccttaaaattaaatgaattcagcattatgaaaaattcaaaa

SEQ ID NO: 79663 - DNA, 973 bp, Homo Sapiens
  misc_feature (443)..(469): n is a, c, g, or t
  misc_feature (473)..(569): n is a, c, g, or t
  misc_feature (630)..(707): n is a, c, g, or t
  misc_feature (749)..(761): n is a, c, g, or t
  misc_feature (934)..(934): n is a, c, g, or t
gggacgccccgcctcttccgcttctgtggtctgatcttcctgcggctgaaccgcccggctgagccgacattgccggcgtcttggcgattcggcccgacgagctccgctttcgctacagcatggtggcctactggagacaggctggactcagctacatccgatactcccagatctgtgcaaaagcagtgagagatgcactgaagacagaattcaaagcaaatgctgagaagacttctggcagcaacgtaaaaattgtgaaagtaaagaaggaataatctaccctgactaaagcttgaaatgctacatttccaaggtgaagatgtgtgggcacatgttatggcagattgaaaaggatctcattccatgggaaaagaaaaaatcctgtcttgttcataaattgacaatgtcaataaattgaaatatggttcactgttactcttggnnnnnnnnnnnnnnnnnnnnnnnnnnnggannnnnnnnnnnnnnnnnnnnnnnnnnnnnnnnnnnnnnnnnnnnnnnnnnnnnnnnnnnnnnnnnnnnnnnnnnnnnnnnnnnnnnnnnnnnnnnnncgcgagggagccccggggcgccgcccgccgcggcccggaccccgcccgccagcaaaggcgnnnnnnnnnnnnnnnnnnnnnnnnnnnnnnnnnnnnnnnnnnnnnnnnnnnnnnnnnnnnnnnnnnnnnnnnnnnnnnactagcgccaggctttcacgtctatgtccttggcggcgccgnnnnnnnnnnnnngacgaacgacgcgcctgcgccccgcacgtcgcgctgcgttccagtaccaccaccccgcccccggctcgccactgtgcgctctctctcgcccgccgccgagaatagtaagcgccccgcgcgcacaccccccccgcctgctgtcgctcgcaatctgtctacacgcgccgcgcgcngcgcgcacagaagtcttgtgtgcgcccgatccgcgcacc

SEQ ID NO: 79664 - DNA, 781 bp, Homo Sapiens
  misc_feature (77)..(77): n is a, c, g, or t
ggatggatggatggatggatgagcgagaacccgcgcccgcgaacaaagagcgaaccaaagcgatgcttcgaattttnaaaacggaatctctgcacccaaatgcaggactggtgacttaaggagctgcgaagtctgatttaccggcctactctcgacctgccccccacccccagctcaggggaccttttgtctgaacgccagagctactgaccaggtcggggggccgcggtggggagtggaagagccggtcctgctgtccgccctcccagccccaggtggaaggctcagttgtcggaaagacaaaagcgatttcttcccactcctgcagggccagaagttcaggctgccccgcctccactgggggatcgcacctgtgaattacctgaggtatgcatttcccagaaccgtgggcgtacccaccttggggggcatgttggttctggggggaccacctctccttgcattcaggggctgtgaagctgagtaattttcggtcacagggcaggcccctgttgaaatttcatttgtcctgctctgggcccaaaggtggtggtggtttgggtcatcagaggactgcctgggacggttcagcgggcacggagcgctgtgctggcctggctggggatggccgcggaggtgcccttttcctggtgctttgtggtggctgcagaagaccagttttgttgagaactgcttttcagcctggaatcagacatcttccagatggtttggaccctgtccatgtgtaggtcattatcacacaaagagaccaataaaaata

SEQ ID NO: 79665 - DNA, 594 bp, Homo Sapiens
  misc_feature (457)..(495): n is a, c, g, or t
tcagctcggtaccggcttagaagctggcaggtgacgtgggcggcaggaaagctgcggccgctgtggaagtcctacagccgctgcacggacggcatcatctacgtggtggactcggtggacgtggaccggctggaggaggccaagacggagctgcacaaggtgaccaagttcgccgagaaccagggcacgccgctgctggtcatcgccaacaagcaggacctgcccaagtcgctgccggtggcagagattgagaagcagctggcgctgcacgagcttatcccggccaccacctatcacgtccagccggcgtgcgccatcatcggcgagggcctcaccgagggcatggacaagctctatgagatgatcctgaaacgcaggaagtccctcaagcagaagaagaagcggtaatgcgcccggagcgaccggggagcgagcgagtgcgtcaagaaagaatgannnnnnnnnnnnnnnnnnnnnnnnnnnnnnnnnnnnnnnagcgagaacccgcgcccgcgaacaaagagcgaaccaaagcgatgcttcgaatttttaaaacggaatctctgcacccaaatgcaggactggtgacttaag

SEQ ID NO: 79666 - DNA, 776 bp, Homo Sapiens
  misc_feature (443)..(451): n is a, c, g, or t
aaagaccctgaaagaaaacgctaataaagccaaaagcttactgctcactaccatacctcagatagggtccacagaatggtcagaaaccctccataacctgaaggaaagggaggtgaggaaccaagagtttagagtacccgaagttccacatctgaatatggcccagttttctgttttattaccaagacattaaagtagcatggctgcccaggagaaaagaagacattctaattccagtcattttgggaattcctgcttaacttgaaaaaaatatgggaaagacatgcagctttcatgcccttgcctatcaaagagtatgttgtaagaaagacaagacattgtgtgtattagagactcctgaatgatttagacaacttcaaaatacagaagaaaagcaaatgactagtaaacatgtgggaaaaaatattacattttaagggggnnnnnnnnncccaccattctcttctccccctattaaatttgcaacaataaagggtggagggtaatctctactttcctatactgccaaagaatgtgaggaagaaatgggactctttggttatttattgatgcgactgtaaattggtacagtatttctggagggcaatttggtaaaatgcatcaaaagacttaaaaatacggacgtactttgtgctgggaactctacatctagcaatttctctttaaaaccatatcagagatgcatacaaagaattatatataaagaaaggtgtttaataatgatagttataataataaataattgaaacaatctg

SEQ ID NO: 79667 - DNA, 407 bp, Homo Sapiens
ctctttcactcagccaaatgtgaaagttgtgaatttaggaaaatcacttgtaatgaagtgtgaatcttgttatcaaatttatttctctgatgtttccttccttatccttgtagccaataaaacattgacattctcacgttttatagatgaggtaaaaagtcttgtgtgctgtgagttataatgcttttgcctttttaatattattagttcttaagtgttacagccccttcagaatataacttcaggacaattcaaactatgcttaatgtatgattttcgagcttctgtatgctaagaaaataggtgtgaaaaactggtgttctgaaatagcctaacatttattgtaattctgaattttctgcccttttattcattgcatattaaagtattagagtataaaaactaaa

SEQ ID NO: 79668 - DNA, 1085 bp, Homo Sapiens
  misc_feature (374)..(406): n is a, c, g, or t
  misc_feature (995)..(1004): n is a, c, g, or t
gggggcagtacaggtgtctgggcttgtatttgatggggtttctccggtccctgtttctactggatttggagccaggcccagctagccaagtttggaatggcatttgtcatgtcagtagccaccacctttgttcattgtgaacctaccaaggctttccagcttcatacacattgaccagagctcaagctcctgcctgcaactcctgcctagagttgaagaaaagcaaactggccttggcaggcacagtgtcatcataccctcaccccatatgtttggggtctgcttgaggattcataaatcagccactctggattgttgaggaatggccatggcagccacagaaaaaagaatttttctctctgagccaaggttgnnnnnnnnnnnnnnnnnnnnnnnnnnnnnnnnncatttcattggaagatctccaatggactgaacagctccagtcagcagcagttaccacaaactgtgaatctgggccccaccactcttccctgttaaccagttctgtcagcatccccctctccagcagcacttccatgaagttggttctgagactctggccgtgaacacccgtttcttcagtgatttgttttgggcttttggctcaaaaccccaggctcttgtttttgtctagactcttattctgtttcctgagcagcaggaggtagggaccactttgatgtcagacttctggtagctggacatgttctcgagatgggtggctgttcgcgacttttgtaccagagtgaaattgttagaaggagggtttctggctgtggttctaaatggagccccaggaagctgccctctccccagggtttgtgctcagtagagccctgtggatcacagtcttgaggtcctctagcaggggtgagggagagcagcgacttcagctgagtccctgccagtggttaagcaaacaatggtttcaaaattcaaggtccccaaatggcagcattttatgttctgacctgtttgtgttatatagtggnnnnnnnnnncctctttggaactcttgtgttgttaataaaatgaaatgattactttttaattaaaatgaaaaaagtacaaaaataacccac

SEQ ID NO: 79669 - DNA, 980 bp, Homo Sapiens
  misc_feature (524)..(524): n is a, c, g, or t
gcctaggtagcgaggctgggtggtgaattcggcacgaggcgacggcggcggttccggagctgaagcagatcagccgggtggacggcgatgcgcctagggccgggctggagccactcgtgccacgccatgctgtacgccgccacaccctgggtcagctcttcggccgcatccccatgcgcttctcggtgctgattgcagatgctgtttcgatcgggctgctggtgcttccccgggggcttcgtggaccggcgcttctggtcgctggaggacggccgtgaaccgtggtgcatgggcctgtgtgcctggtgctgcctgcctagcgaccagtagctcgcacctgaccgagggcccacatccgctgctcgtggcgcacctgtacgcgcggcagcttgacgctggagcagctgcacgccgtggagatcagcgcggtgcactcgcgcgaccacggcctggaggtgctgggccgtcgtgcgggtcccgctgtacacccagaaggaccgagtcggaggcttccccaacttccntgagctaactgccttctggtgagcacggctaagtgccagctcctctttgccctcaaggtgctcaacatgatgcccgaggagaagctggttgaggccctggctgcagccaccgagaagcagaagaaggccctggagaagttgctcccggcctcctcttgagggctgctgagctggtggcaccctcccctgggccggaagactgggaattctgctaagtgtggcttctagagtgtttgtgtgtaccccgttctgactgctagggcgagtgggatcctgtcatcatctccactgtcccacgcaggcaataaggggcgggcgggcagtggaaccagccatctctcagcagagcaggggccgggcccacggcgctctccaagccaggtgcctggtaatcgggcaaccccctctgacgtaccgggtagacccgggccggtgcccggggggcaccggcccaaa

SEQ ID NO: 79670 - DNA, 1459 bp, Homo Sapiens
  misc_feature (1363)..(1381): n is a, c, g, or t
aaactagctaggtacgaggctggtttgaatcggccgagggtagtgccaagatgtcgacggcggcggttccggagctgaagcagatcagccgggtggaggcgatgcgcctagggccgggctggagccactcgtgccacgccatgctgtacgccgccaaccctgggcagctcttcggccgcatccccatgcgcttctcggtgctgatgcagatgcgtttcgacgggctgctgggcttccccgggggcttcgtggaccggcgcttctggtcgctggaggacggcctgaaccgggtgctgggcctgggcctgggctgcctgcgcctcaccgaggccgactacctgagctcgcacctgaccgagggcccacaccgcgtcgtggcgcacctgtacgcgcggcagctgacgctggagcagctgcacgccgtggagatcagcgcggtgcactcgcgcgaccacggcctggaggtgctgggcctcgtgcgggtcccgctgtacacccagaaggaccgagtcggaggcttccccaacttcctgagcaacgccttcgtgagcacggctaagtgccagctcctctttgccctcaaggtgctcaacatgatgcccgaggagaagctggttgaggccctggctgcagccaccgagaagcagaagaaggccctggagaagttgctcccggcctcctcttgagggctgcctgagctggtggcaccctcccctgggccggaagactgggaattcctgctaagtgtggcttctagagtgtttgtgtgtaccccgcttctgactgcctagggcgagtgggcatcctgtcatcatctccactgtcccaagcagtcactaggtggcggccgggccagctggaacccagcccatcctctcaggcagagcagggtggtccgggcacactgggcctgcctctccagcctcaggatgctcttgtttattctgggctcagaccctcctcttgtacgtctcatcacagctggtagagacccaggagtgcctgattgtcccacaggggtggcgcacagctctgggaccactcagaagatgggatgtgtgggtggaggatgccttgtctcggtcagctcattcctgcctccttcctgagccagttcagggcctgggggagagccagcttggggtaggaagttaataatactgttaatttgggttgttgttggatttactttgctagattttctctttcaccacgtgtgaactgtgggtgaggtttcaaagtagcttcaccccacgtggcttggttcccagggacagtcagggcctcgggggcccagctatgtacaacgaagctgtcgaaggagaagacaataaagtcgctccgcagctgctttgtgtgtttnnnnnnnnnnnnnnnnnnnctccgagactagttctctctccctcgtgccgaattcaccacccaggcctgtacctagccgttgttgatagtttggtag

SEQ ID NO: 79671 - DNA, 919 bp, Homo Sapiens
  misc_feature (473)..(508): n is a, c, g, or t
  misc_feature (833)..(833): n is a, c, g, or t
aaggtagcgaggcctgggtggcgaattcggcacgaggggacggggtcagtgccaagatgtcgacggcggcggttccggagctgaagcagatcagccgggtggaggcgatgcgcctagggccgggctggagccactcgtgccacgccatgctgtacgccgccaaccctgggcagctcttcggccgcatccccatgcgcttctcggtgctgatgcagatgcgtttcgacgggctgctgggcttccccgggggcttcgtggaccggcgcttctggtcgctggaggacggcctgaaccgggtgctgggcctgggcctgggctgcctgcgcctcaccgaggccgactacctgagctcgcacctgaccgagggcccacaccgcgtcgtggcgcacctgtacgcgcggcagctgacgctggagcagctgcacgccgtggagatcagcgcggtgcactcgcgcgaccacggcctggaggtnnnnnnnnnnnnnnnnnnnnnnnnnnnnnnnnnnnntttggctctggccccgtggaaggcaccgatgggtgctgggcctcgtgcgggtcccgctgtacacccagaaggaccgagtcggaggcttccccaacttcctgagcaacgccttcgtgagcacggctaagtgccagctcctctttgccctcaaggtgctcaacatgatgcccgaggagaagctggttgaggccctggctgcagccaccgagaagcagaagaaggccctggagaagttgctcccggcctcctcttgagggctgcctgagctggtggcaccctccccggggccggaagactgggaattcctgctaagtggggcttctanaatgtttgcgggtacccccgcttctgactgcctagggcgagggggcatcctggcatcatctccactgtcccaaacagtcactaggg

SEQ ID NO: 79672 - DNA, 1140 bp, Homo Sapiens
  misc_feature (53)..(53): n is a, c, g, or t
  misc_feature (115)..(459): n is a, c, g, or t
  misc_feature (477)..(492): n is a, c, g, or t
  misc_feature (728)..(740): n is a, c, g, or t
tcaggggccgacctatgaaaaacccagcacgccgcctttacaggtcgtgcctntgttgcctttgctcacatgtcttcctgcgtatcccctgatctgtgaataacagtatacggcnnnnnnnnnnnnnnnnnnnnnnnnnnnnnnnnnnnnnnnnnnnnnnnnnnnnnnnnnnnnnnnnnnnnnnnnnnnnnnnnnnnnnnnnnnnnnnnnnnnnnnnnnnnnnnnnnnnnnnnnnnnnnnnnnnnnnnnnnnnnnnnnnnnnnnnnnnnnnnnnnnnnnnnnnnnnnnnnnnnnnnnnnnnnnnnnnnnnnnnnnnnnnnnnnnnnnnnnnnnnnnnnnnnnnnnnnnnnnnnnnnnnnnnnnnnnnnnnnnnnnnnnnnnnnnnnnnnnnnnnnnnnnnnnnnnnnnnnnnnnnnnnnnnnnnnnnnnnnnnnnnnnnnnnnnnnnnnnnnnnnnnnnaagaattcggcacgaggnnnnnnnnnnnnnnnnaagaacatcaacatttatttaacatgataaaaaaagaaatgagatatgaacatttgcatttaaacaatagtaagtagcctttaatacattacatgtgctcattgtataatatatacacaatgaacataattacatttgtacacaaactaagtaccggatttggaaacctgcttattgctgtacacatgtattccaatgaaatataagcccagtacttcaaaatacctacactttgnnnnnnnnnnnnnaagaaaagataagcagtaacatttgtgtttaagctgacaggagtgtggcagtaactgctgacattgcaatctgaccgagaaagaattatagcagaaaacaggacatacttcacttagcaataaaatggcacattttaaatacatatatataaaatttttacaaatcaagtgtgaaacaaaagcactgcagtagctaaaatgggaagaaacaaagacaaaatgcctgaggatgttacattcagccctcaagatgaaacacagaccgcaaatcataaaccagaagagcatcctgaagaaaatacaaagaacagtgttgacgaacaggaagaaactgttatttcttacgaatcaactcctgaggtttctagaggaaatcaaacaatggcagtgaacctcgtgc

SEQ ID NO: 79673 - DNA, 850 bp, Homo Sapiens
  misc_feature (458)..(458): n is a, c, g, or t
tttttgaacctgagccaaatggagtaaattctgtggaaatgatggataaagaaagaaacaaagacaaaatgcctgaggatgttacattcagccctcaagatgaaacacagaccgcaaatcataaaccagaagagcatcctgaagaaaatacaaagaacagtgttgacgaacaggaagaaactgttatttcttacgaatcaactcctgaggtttctagaggaaatcaaacaatggcagtggaaaagtctgtccccatctccttgagtcctcggcatcgccagttccatccactcagccgcagctcacagaaggatcacatttcatgtgtgtgtagtcttagaagaactatactgacttctgttgaaaccattcaaagctaaagacatggaccttcagcagtgtaagaagatattgtacagtatattttaaatctatgaaattcatagttctgatgcttnttggtcacagagcatcattttatcacttctggaaaaatgttttattccaaaacagctttaatggcccatatgtacacttcgtaatctcaaggttattattctgacaccagcttgctgctatgatttcagagcacataagtaaaggtgctttttaatgtgcagtctatttccagagcttacttagttgctgatttccagatttcgatgtttcttaagtctaggtgaatttatatatatatttttttgcttttcattttctaaagttagttattatttccattgaagcttgttttctttttttcttcccattttagctactgcagtgcttttgtttcacacttgatttgtaaaaattttatatatatgtatttaaaatgtgccattttattgct

SEQ ID NO: 79674 - DNA, 921 bp, Homo Sapiens
aatgttctcccaaaaccagagttgagagtcggagtgccagtcgtcggggcccactattcctgaataagggacatgcaagggccagaagtagcttaactctcgcctaaatatctgtgcctttgcctgtcctttctcccactctactgaaacccggaacagattcccgcttgccttctgatgaagagaggttaggtaaagagagtttggaggaaaaaagacaccaggaggcaggctgcggggtaggagagggttctgagaggaggcagcaatccagaatacctccttttctagccagcatcccttgaacttttgaaaggttgtgcctaccactggctggcacaccagggcaatgatttccctgcagaaggaaggaaaagaatgtttcacccttgcatccttcttggagaagctacagcctgtgctcagttgagtggttcacactcagactttggctttatggttttccttcctccttgtctttgccctgaccttgatcaacaggggtgaaaagaaccaccctgaggtttccatgcctctcccattttagtggtagcattttgtgtctttactccacccttcaccctagttccaccaaggttcacacaccagatgtaactgtttttcagctgagttgtatggattaacttcagtccactgtaaatacacctgggatggggtggggttggggttgtttagggagaagcagccagacttgctttgtgaactgaatgtatttttatgcaattttgagtggcctttcaaccctaagatgaatggttttgttttactggttgttgttatatagttttgagtattctgtgtttgaaagtttgggaataataatattcacttctatatgatgcctgtaaacacaacagtatttataaatgagtaaataaaactgtgttttaactttgaaaa

SEQ ID NO: 79675 - DNA, 719 bp, Homo Sapiens
gtccagggtcatcggtcagcgaggaacaaggagggaaaggtgtcttcctgccccttgatgctcaactaagcatctgttccctagaaatacatgtgtccaggtcgtctccatgggcttttctttgcagatacttttatgtggaacaacagtggcaaatgttttcatttactttgaatttgaaaatgttagggtttcctccacctttttatgaagtaaaagaacctgtcgtaccagcatcatgagctggatgcaggagcccatggctgaaaggagttaaaacgcccagtggtcattaagtgaaacatcttttatcaacctgcaaaagctgcagcgttctctgccaggtcaaatgggcatgtttagaaaataagagaagatggctgagtatagctaatgaataaatggttgtttctttagaaaattaaacacacacagagtgtaagaggagaggatacggccctccctgaaggataaagtccacctggacggtgccctgccctcgcttctcacattaactgcccaggaatgtcatgctgattggttcccggaagggtgtttggcaaggggcagtgtatggagctacgtgtagaaggagagaaatttgtgtgtggcttttgtaaattttgaccgattgcagcaattaaatagttgattactgtgttgatttaaatacttatgaaagctttcagacaaaaataaactttcacgttaccatgatg

SEQ ID NO: 79676 - DNA, 1037 bp, Homo Sapiens
  misc_feature (114)..(114): n is a, c, g, or t
  misc_feature (129)..(129): n is a, c, g, or t
  misc_feature (131)..(532): n is a, c, g, or t
  misc_feature (563)..(585): n is a, c, g, or t
  misc_feature (929)..(942): n is a, c, g, or t
cccctgtatctatagtccttcggtatcccaacttttactgagcgtcgatttttgatctcgtcaggggccgagcctatgaaaaacggcagcaagccgctttttacgggtccttgncctatgaatggcatnannnnnnnnnnnnnnnnnnnnnnnnnnnnnnnnnnnnnnnnnnnnnnnnnnnnnnnnnnnnnnnnnnnnnnnnnnnnnnnnnnnnnnnnnnnnnnnnnnnnnnnnnnnnnnnnnnnnnnnnnnnnnnnnnnnnnnnnnnnnnnnnnnnnnnnnnnnnnnnnnnnnnnnnnnnnnnnnnnnnnnnnnnnnnnnnnnnnnnnnnnnnnnnnnnnnnnnnnnnnnnnnnnnnnnnnnnnnnnnnnnnnnnnnnnnnnnnnnnnnnnnnnnnnnnnnnnnnnnnnnnnnnnnnnnnnnnnnnnnnnnnnnnnnnnnnnnnnnnnnnnnnnnnnnnnnnnnnnnnnnnnnnnnnnnnnnnnnnnnnnnnnnnnnnnnnnnnnnnnnnnnnnnnnnnnnnnnnnnnnnnaagaattcggaacgaggcgcggctgtaggcnnnnnnnnnnnnnnnnnnnnnnnaaccacacagggtatccagactctagatactaaccttgacctaccccgagtttcactgtaagggtggaaggatgctgtaagaaattatgtcatcgtggcagttcttgtactaacagctctttctcgagtgagctgagtagcggatagaccataaatatattctatagcgagtgcttctgcacgtggaaaagcaaactgcactgccttcctatggcaacagccacgggcttgttaggagagtgatgaaagatagaaaacaaactacaagaatccattccagagggataaggaaactaggggtaggtcaaggttagtatctagagtctggataccctgtgtggttnnnnnnnnnnnnnngtacatcaagcattggggggaaaagatgcagattttaaaaattgttgacagatatggagtagaaatcttaaggcaacttcctagctatgaaaagg

SEQ ID NO: 79677 - DNA, 951 bp, Homo Sapiens
atgagccactgtgcccagcctggtattgataatttatattcagataatttgttatggctctttaatatcccacaaggggctctaaaaagcaaacattcaagagtatgtagtttttagacattaagttaattattttaaacagtgacagcaaaacacaagtgattaaatatagtttatttgttccaatgactaaattttacctcatttattaatctggtcattaaggaatatatttaataatattatgtaattattctttttatgcatgatacacctagaaaaatgccttttgtttctattgatggcttcgtgtttggagctacttttgattacttattgcagtttcccaatttagtctttactttatctaactcacaaagtaaaattaactgatcacatggcaactactgtatttaaatagttctggaaaaatgaaagtgctttttgctgcttggtaaatgggtaatgcccttgattccttgactgtaggacatagctgatctaaagtactctgtcagttttaccttcacccatgactgtcattagttgtcaaagttgaaaagtactttagctgtgagaaatccttgtatgtttttattataagaggtataatcatcctcaaagcctgtttttattacatgatgtggactgattattttttctatcacagtgttaacagatggattttattgtaaatacaaagaaaacatattgattattgtagtattcttatgtcacctggcccttttgcgtgagaatatttattatttctagcaaggcttttcttccctttcttattgccccagagactgactgatacatcttttgttatttttacacataaattaaacatagcctttttggacaaattcactaaatattaatgtataaaatgtaattgagtaaatttttatcagaattttaaaaataaaagagcttagactcagtaaa

SEQ ID NO: 79678 - DNA, 674 bp, Homo Sapiens
gggagcatttaaaactccagatgcccacaccacaccctggggccacccatcagaccttctggaagcaagacctgggcctccatggccccaaaaactccctaggtgatccgatgtgcagccaaatctgagaggccccatttaaaaaagaaagaacatgggtggtacattgaggagtatttacattttataaaatgacttaaaaatttgaaggcatttttgagcatttccaattatatggaagagttacttctacggaatagtttttgctcatggaactcaaacagatgaagcaccactgttacagaataatgtgctccagatgaaaatgtctcgtttctgtgaatttcatgaagagcagaacatttctcaagaatcctcttgagccagtaatcaatcctgtctcaaaaaatgttctttgccatttcctagatactgcacaaaagtggccatgtcgacatttgtccacccaccctccaataagctggagcgacaaagggacattccatccctgtacccttagtggtagccatgacacgatggccagatcatggactccggaaagctttctgtttttactggaaacatagcaaaccttgatttagctccaagaaattgagtagggaaatatttgttttttagcaattgtcatagtaaataaaactctaagcaagtgt

SEQ ID NO: 79679 - DNA, 526 bp, Homo Sapiens
cctccctggcaatgatgtcatagaaatgcattttgttttccctctctttgctcaaagcttgcaggagactgttgtaagtggccgaatcttgcaactccttaatggtatctgcaatcacatcgctgaaaaactgcctatcaatctgaattttcttcagtgtctccgtagtcatgatggtctgccttgtaggttttttgaagacaagatcctgcattttgttaaactccacagcgaaccggcctctgtgtctgatttctggcaagttgggtccttcctcagttattaacggactgggtatttttgtgattgttgaggccattggaagtttgtctagattcgttccttctagattcatttctctgcttttcacgcagatgctctgtctcccttcgtactgaacgggcatgatgtagttcagaatagagagctggtctgtggtgtcctccagaactgccgagatcctcagcacatctggaagggacagtggctctagagtttccgggatttctgggatgatcctcgtgcc

SEQ ID NO: 79680 - DNA, 368 bp, Homo Sapiens
ggattggaaagtataatattgttaagatggcagtactccacaaattggtctacggatgcaatgtaatccctttcaaatttacaatgtttttgttgaaattgacaaattgatcctaaaattaataataaattgcaaatggccccaaaatagccaaaacaatattgaataaaatacgaggactcatactttctcatttcaaacaataaaaaggtacaataaccaaaactgtggtattggcataaggatagacatataaataaatgattggaactgatgcagaaataaacctatgcatatatggtcaactcatctttggcaacggtgccaggactattcaaaaagaaaggagggctgggcgtggtggctca

SEQ ID NO: 79681 - DNA, 514 bp, Homo Sapiens
ttttctgaataatgtatatcctacctgtctccaaaaaggtttaagataagccaccaaatatatacacaataactatatagcaatcttttaaaagatgaatgagtatgtgagaagaaaagtttgggtgagaaacataaaacaaagttggcagggagtggtccaaacaggccttcttgccttagggtttgcagtcaacgaagggcaagggcatacacagttctttgactcatgggtacataagatatgacaaccaatgtctccacaaaaatgtaggtgttctcattacagagataagatggaaatgcctcacagaactgctcactgaggaatactgtggaatgtcagaaacacatcctcattagtaaatacgacaacgttatttcactttttacacagatgtaaattaccaacaaaaccctgatagctccctcaggcacccaaaacccttctgaaatccaaatccaaattcctagcctgaaagattcaaattttgtggaaaaagcaaacctttaaa

SEQ ID NO: 79682 - DNA, 1733 bp, Homo Sapiens
cagtcgacggtaccggacatatgcccgggaattcggccattacggccgggtcgattatcaagctttaaagtgataacatatcaagatgactattaaaaaataaacatctctgaaagtgtcctttcctccataaggctttaaacaatttgcaaattcttaattgggagtatgtcccaatcattctattaaactatttacagctctacctacttctagattcagcaaacagagctactagttagagtattttgagagccaaaatagtaagagacttctgtaatggttgagatttctgcactgaccttaattagggtaccgccatagggctaccaaagtttttagtgagggctggggaggtggagcataagtaacattttttttctgcagaaggtgatggctttgtagaacactataaaatttttcaggaaaacatacagcaaattttcttatccagtgggaacagcctatttgacaaggaatgatatacaagtttgattcacctttgagcactcttagagagtttacagaagaggcgtaactggttacaaaacaaaagttacgccttcactatccagttcttaaagtttatccacatcctacaaatcttatgttcatgtaggtcaggttaaagtaagctccaaacttgtggccttcagaagcatctcctgtttaacacacctgaaattactctaacttaatacatttgtattctctaagaaataatgctgactgctgtcaccacagcatcactgatctctcagtggctgttaaaatataaacaagtggaaaaaaagtatacaagttgatagcagctgttcatgtattcatgttttgctaatacctgtgtagagaaagacagtttcacatgcagatcaccatacatttttgcttaaaggttacactgggtaaactgtctgtttatcacattacatctgggtgagattttgcatgtgaccaagaggaagaaatcattcagtcccggaaatagcaactgctatgtaaaaccacatccttgactagtacttcatctttccacagtcattcatctgctaatcaggtgaaatatcagctcagcagaacaaagcaagttatacacaaaatttcccccacattcacactgatgccgtacttagtaattctggttctaccattcccttttgcaccttctgcaagtcaaattcatgtggaaaaatgttctgtttgtagaactcatagtattcacttatagtgctcatgtcaggaatggcaagtgagtaagagcccctgataatctgcttttgttagaacgtaatgcaaagataataaaacatgtccacttcttttctagttctaatcagtttttagacatcaagatttatttactttgcatgagatttgtttcctattatttgaatatgtgctatacgcttgaattagaaaaacctgcttgaatgtattgtcagttattaaagcacatgtgactaagtttgcatttgtcagtattgttctactgtttgtactgaaagtctcattttaaaattgctacttaacactgtactataccttgtaattttttagattctccacttgtattctttaaatgtttccagatgcctttagttttagctgctgtaaaatagctactttgcgttatttgatatagaattgttttttaaaaactccatttatttatacagagacatttataatattttacaaacattcttatattctgaataaatatttctaattcc

SEQ ID NO: 79683 - DNA, 588 bp, Homo Sapiens
ggcacgagggatctctgttattcagtgtcaataggtacaggaagtttatcttaatatgggcaaaactctgaattagaatacatgcaccacctaaacatattactcagcattaacctgcctaaacacttccagtgccactggcagtactagcacataattccagtagtgagaaatactttgtgaataagtcattttattttccttctggtgcatggtagttgaggagtggtatgggaaccaatttgtggtttggggtccatcttttaatctattaaattaagaggtaaatttgaggttttctttttcagtgggatctactctttgacaggtgtagtaaaggaaagctgctcatcctgttactctgaacttacaggcatctgcataagatgtaaatattttttgttcaattgtaatcccactataaggaaaatactgtcctatgaaaagaagtgctttggtttgttaaggctgtgtttacattgtggtcctgtacagcatagtatagagatgctagttgcacttttacatttttctaaaattgttaaaactccacttggtatattgtattaataaaagccaaatccaggg

SEQ ID NO: 79684 - DNA, 594 bp, Homo Sapiens
  misc_feature (47)..(98): n is a, c, g, or t
  misc_feature (181)..(237): n is a, c, g, or t
tacacaaacatttctaaaactttttttggaaaatatatttctttctnnnnnnnnnnnnnnnnnnnnnnnnnnnnnnnnnnnnnnnnnnnnnnnnnnnnctaccccaaaatgaccagttaagatttactttcagacaactctgtgcatatttacatatgcttatatacaactatgtacaccnnnnnnnnnnnnnnnnnnnnnnnnnnnnnnnnnnnnnnnnnnnnnnnnnnnnnnnnnatcctgagaacatttgtacatgaccatagatatagatttgtattgtttttaatggctgtatagttttgcattatactgaatcttgatgtttaagagctatgtatattgaggacattatttctttgtcttgtgttgcaaattttttaccatgttattattagtcttttaaccttatttatagtttttttgttataaaagttaagttttatgatgtaaacttaatctctttgattttataattcctggttttcccgacgtgcgtagaatgaccttccccacaaggtaataaaaatacctccatgattttgcttaaaacttttatgctttatattaaatctttgttacatcttgaaaaaa

SEQ ID NO: 79685 - DNA, 798 bp, Homo Sapiens
gggcaaataagcaagcatttaatgactcaagccacatttgtaagtgcaccaatatattcttcttaggggttgctatactgtgggaaagtcacatgatgcagcatctgaagacacaaagtctcaagacctaggttctagccctggtacactttctcactgtgagatgctggccatactagctcatctccctgggcttcttttctgcaaaatgtgggagaaagaccttgcaggttatcatgaggatgaagtaagataaagtaaagcatataaatacatatagaacacaactaagagggacaagggaaaacactcctatcaggttttatggtttgcaggaaaatggttctgccttccgtaaatcccattccaggatagaactttaaaaagtactataccaggggtccccaacccccgggctgcggactggttctggtctgtggcctgctagaaacctagctgcacagcaggaggtgagcagcaggcgggcaaagagcattactgcctgagctccgcctcctgtcagatcaactgcagcattagatgctcacaggagcacaaaccctattgtcaactgcacatgcaaggatctaggttgtgtactccttatgcgaatctaactaatgcctgatgatctgaggtggaacagattcaccccgaaaccatctcccctatctggccatggaaaaattgtcttccatgaaaccggtccctggtgccaaaaaggttggggaccactgcactgtaccgtcattatgctatgtttatgtaatcttcacataccttataagcttgaaacca

SEQ ID NO: 79686 - DNA, 1703 bp, Homo Sapiens
  misc_feature (1066)..(1086): n is a, c, g, or t
aaataatcatatttattaataatgctgttgtgcatacttatagtatgcatatattcagcatatgttgcatgtcttcagaataccataaaatgaaatccctttcattgcaacttgcaagtgagaaaagatccttagtggctctggtggaagaaatagtattcttcttctcagggtgtctccctgccttggcccctccctgagccccaggctttaaaagtgaaaatgtttgaaacatgaaacatgtctgtaggaagcatcagcatggccataagtgcagtgattttcatatatgcctctgcccatttcaaatatatttttgacatgaataaatctaacagtatacagaataattcatgtaagaccctaacgtgtacatgtgaaaaagcatttctatataatgtgaggagcactggccatcaattagggaaataaaggtcatgtaatattgcaaattttcaaaatagagccctgcaagataactgcaatcataccaaaaactatttgagtaaatggatttttaaagtaatttttgtttagaagagtttatatttcagaagcagaaaatgtcaaatgatagtctttgtaaatggtggtgcaccttctctatgcacatctgtcttttacatcagaaagagctgtggtcatgctaaaattagagataactttttgaatgacttggtcaagctgtgtgtaaaatatttaaccataagtcaagtacagtgtactatgtttaataaagttacatttaatgcatttattgcatatatgaatatatacatgaagaggctttatgtcttctggtatttgattttgaatgttttttaagtcagtggtgcctttaggcaagaactttcgaaattaatcattctttgtgttttctgatttttcaggtaacatgtacactatttagaaaccatcatagtttattcaccttaaaaaattgattgtattatttaaatatatcacttagatgggcatttcctataattaggatattccaaatagttgctgaaatcaattgtgccattgaccaatggatgcacttggttagccttaattttttttnnnnnnnnnnnnnnnnnnnnnctttcttgaatatttcagtttgttcattttaagtttgtgctgctggtatttgggaagaaaaatcaatcagttaagtgctaccagaaagtgtaccaatttttataaaaattaagaatgatataaatttcacaatctaaaattttaattttgtgcaatattttcatttaatgcatgtgtatttgagtaattgtaagataaatgaatttttaattttttgagatgtagcttaaactgtcttcttaatccaacaacttacattccgttgttgctgcatccttttatttaaggacttgttttaaaagtctttttgtcactccttggaaaattcttttattagtagtaaattttgcttttaggagcatggctcctgtattacaagggaaaaaatatgaagagcacattttaggattataattgttaaaagataatgtgtgcatatcattgtacagtaagtgtcaactgtgtgcctaactgttctatcaatactttctttctttaacaaagaagaaacaacaatcagaatgtcagttatttttattcaactaaaaggattaaaaaatttatttggtttgtgttctgtccattagaaaatactaataaagtattaacaaacaaaa

SEQ ID NO: 79687 - DNA, 311 bp, Homo Sapiens
  misc_feature (167)..(224): n is a, c, g, or t
aatatgaacactttatgaatttatgtgtcatctttgcacagaggccgtgctaattttctctgtctcattccaatttttatttatatgtgatgctgaagcaagcacagcacaacaaagcaattcttaagcctttattaattttgaaggccagttgtggtggctcacannnnnnnnnnnnnnnnnnnnnnnnnnnnnnnnnnnnnnnnnnnnnnnnnnnnnnnnnncaaagctgcagtgagccatgactcaccactgcactctagcctgggtgacagcaagactctatctcttaaaataaaatttaaaataaa

SEQ ID NO: 79688 - DNA, 1065 bp, Homo Sapiens
  misc_feature (29)..(29): n is a, c, g, or t
  misc_feature (46)..(46): n is a, c, g, or t
  misc_feature (107)..(107): n is a, c, g, or t
  misc_feature (139)..(561): n is a, c, g, or t
  misc_feature (590)..(608): n is a, c, g, or t
  misc_feature (635)..(842): n is a, c, g, or t
ccgcagtcgaacaggacccacgaggactncaggggacgcctgttcntatagctgtcggttcgcacctctgattgacgtcgatttgtgatctcgtcagggggcgagcntatggaaaacgccagcaacgcgccttttacgnnnnnnnnnnnnnnnnnnnnnnnnnnnnnnnnnnnnnnnnnnnnnnnnnnnnnnnnnnnnnnnnnnnnnnnnnnnnnnnnnnnnnnnnnnnnnnnnnnnnnnnnnnnnnnnnnnnnnnnnnnnnnnnnnnnnnnnnnnnnnnnnnnnnnnnnnnnnnnnnnnnnnnnnnnnnnnnnnnnnnnnnnnnnnnnnnnnnnnnnnnnnnnnnnnnnnnnnnnnnnnnnnnnnnnnnnnnnnnnnnnnnnnnnnnnnnnnnnnnnnnnnnnnnnnnnnnnnnnnnnnnnnnnnnnnnnnnnnnnnnnnnnnnnnnnnnnnnnnnnnnnnnnnnnnnnnnnnnnnnnnnnnnnnnnnnnnnnnnnnnnnnnnnnnnnnnnnnnnnnnnnnnnnnnnnnnnnnnnnnnnnnnnnnnnnnnnnnnnnnnnnaagaattcggaacgaggcggctgttggcnnnnnnnnnnnnnnnnnnngagacagcctcactcttgcccggaggnnnnnnnnnnnnnnnnnnnnnnnnnnnnnnnnnnnnnnnnnnnnnnnnnnnnnnnnnnnnnnnnnnnnnnnnnnnnnnnnnnnnnnnnnnnnnnnnnnnnnnnnnnnnnnnnnnnnnnnnnnnnnnnnnnnnnnnnnnnnnnnnnnnnnnnnnnnnnnnnnnnnnnnnnnnnnnnnnnnnnnnnnnnnnnnnnnnnnnnnnnnnnnnnttaacatcttacaggattccccagtggtggtggtaggtgtaaccattttaatgtacctacaacttttctatcctgctatttgcattttttggtttttcatttaatagttctcaagctgggatccgtggaactactgtgatgggcggtgatgctttggaaatggaaattcccttaatattaaaatgaacatgaatatattttgatttgcatatatttttaagat

SEQ ID NO: 79689 - DNA, 899 bp, Homo Sapiens
  misc_feature (12)..(12): n is a, c, g, or t
  misc_feature (58)..(66): n is a, c, g, or t
gatccagcattngttggattctgttgaatgtttctaaattggcctttttaaggagagnnnnnnnnntcaaagggcagtctcaatacttagaaaattattgtttgtctgttgcgcataataatgacataatctgcttagcagaaaatgacgattaatctataggaaagctcaagtaaatgcattatcaactgcagaagtttgaaaaccaggttcatttacgtgagattgctaaatgcatgggggaaagcagtggtcctagcatccatcttgtattcagcttatcattattgcagggaaaatgcttttaatttaaattaatttttaattcttttggcaagttgatggcaaggacttgattgtgtcattaagcaaaagaatgtattggaagttgatggaaagacaaattcatctgtagtagtaactggccgattgctaaagagttcataaggaggtgagaagtaatttttttaaaggagaaaaattttttggctttagatttaaagtaaattgaaatgttttaaagaaaaaagtattcacagatttaatacctattaataatataagagctgaaatgtaagtcatttcttcagtccttctcctctgtcggaatcttttttgttttaccataaattcacctgacgagggcactctgagatagcactgctctggggccatctgatcaccatcgggagcaaatctctgacctccttgcctgcagcttttacttaaccctgtagtttctggacgtttgtgcagtattgaaaagacaggagaaaagaaaacagaaacctggttataacctgacgctaaaactaaaaacaaggaaatgtacctctttcttcagaattaaaactaaaatcttaaataaaacagaaaacttgatgatgacctctttaaat

SEQ ID NO: 79690 - DNA, 752 bp, Homo Sapiens
agaaagtattcataatttatacctgagacagcttaagggtgtcagaggatatttacacagagagacatgttagggatcaactagttcatcccccttggccaaggacagaaaagtaaatttatctcaattacatccatgcaataaacatttatcgcaaacatatcatgttgtggtgatacagggataaataagaaaagattgctttcttcagaggggtgctggggtttgaggaagactaatgaatagcaccacttgcccacccggcacctgcccatatctaatcacatggattgacaaagccaatgttggaagacatggcttatatcttcacgaaagcgggcttcgtaatattgagcactggaattagacttaacccattcagcagcaggcagttctggaaaactgtaggtctactcacatggaggcaggcctcttgtagcagagagatcagtatcacactccctggttggcttcactggctctcaagatagagagagacacggactgagttatacttgcccaattcatctcccaaatcaccagcaagatctctccttatcattgaaggggcaagtaaagcggggaaagagttctggtgctttgcaccaaatagaggccccttacatggaaggaaatttcaggagtgaggaagcagcattctccccgcaccccattaactcattaagcctaaggctcaattcctttaacctactacgtttttaactcagttaagcatgtagctattatggtca

SEQ ID NO: 79691 - DNA, 1230 bp, Homo Sapiens
  misc_feature (1041)..(1041): n is a, c, g, or t
  misc_feature (1201)..(1201): n is a, c, g, or t
ttagagagtatgaagtcgacggcgcgccgaattcggcacgaggggtgccgaacccacggccaggcttccgtggccagcagccctagaggaatggccatcctgtccctgcgagcccctgggccctggcaggcgatgcaggtgggatgctatggaatatgatgagaagctggcccgtttccggcaggcccacctcaaccccttcaacaagcagtctgggccgagacagcatgagcagggccctggggaggaggtcccggacgtcactcctgaagaggccctgcctgagctgccccctggggagccggaattccgctgccctgaacgcgtgatggatctcggcctgtctgaggaccacttctcccgccctgtgggtctgttcctggcctctgacgtccagcagctgcggcaggcgatcgaggagtgcaagcaggtgattctggagctgcccgagcagtcggagaagcagaaggatgccgtggtgcgactcatccacctccggctgaagctccaggagctgaaggaccccaatgaggatgagccaaacatccgagtgctccttgagcaccgcttttacaaggagaagagcaagagcgtcaagcagacctgtgacaagtgtaacaccatcatctgggggctcattcagacctggtacacctgcacagggtgttattaccgctgtcacagtaagtgcttgaacctcatctccaagccctgtgtgagctccaaagtcagccaccaagctgaatacgaactgaacatctgccctgagacagggctggacagccaggattaccgctgtgccgagtgccgggcgcccatctctctgcggggtgtgcccagtgaggccaggcagtgcgactacaccggccagtactactgcagccactgccactggaacgacctggctgtgatccctgcacgcgttgtacacaactgggactttgagcctcgaaaggtttctcgctgcagcatgcgctacctggcgctgatggtgtctcggcccgtactcaggctccgggagatcaaccctctgctgttcanctacgtggaggagctggtggagattcgcaagctgcgccaggacatcctgctcatgaagccgtacttcatcacctgcagggaggccatggaggctcgtctgctgctgcagctccaggatcggcagcattttgtggagaacgacgagatgtactctgtccangacctcctggacgtgcatgccggccgcct

SEQ ID NO: 79692 - DNA, 1032 bp, Homo Sapiens
  misc_feature (56)..(56): n is a, c, g, or t
  misc_feature (58)..(59): n is a, c, g, or t
  misc_feature (100)..(100): n is a, c, g, or t
  misc_feature (108)..(108): n is a, c, g, or t
  misc_feature (228)..(228): n is a, c, g, or t
  misc_feature (238)..(238): n is a, c, g, or t
  misc_feature (314)..(314): n is a, c, g, or t
ggcagcgcaggatgatgcactcaaagatgttatgtggaggggaagccatcgcacantnnatgtcacaaagccatcagctcaacatgcgggagacatcacntacctctntagcacccagaggctcagacgcagagcggaaagcagtagagacagcagcagcccacgcagcaaaacccaatgttatgccaccggggctcagcggaggatgtgccatgcagtggagcaccnaggacgcgtngatggggcagaatctgatggtctctgtgatgctgatcaatcacagcagcagccgccgcacagtgaaactgcacctntacctctcagtcactttctatactggtgtcagtggaccatcttcaaggagaccaagaaggaagtggagctggcaccaggggcctcggaccgtgtgaccatgccacgtcaaggagagcgggcaggtgctggccaagcagcacaccttccgtctgcgcaccccagacctctccctcacgttactgggagcagcagtggttggccaggagtgtgaagtacagattgtcttcaagaacccccttcccgtcaccctcaccaatgtcgtcttccggctcgaaggctctgggttacagaggcccaagatcctcaacgttggggacattggaggcaatgaaacagtgacactgcgccagtcgtttgtgcctgtgcgaccaggcccccgccagctcattgccagcttggacagcccacagctctcccaggtgcacggtgtcatccaggtggatgtggccccagcccctggggatgggggcttcttctcagacgctggaggtgacagtcacttaggagagaccatccctatggcatctcgaggtggagcttagccctgtgccaggagcaatgggactggagtcagatgagcaaggacattgccccaagataggggcacactacagagcagctccccaggagctcaggtggggagtccagggctcccggagagggagtcagtcttcacttgcactgggggaacagatgctaataaactgttttttaatg

SEQ ID NO: 79693 - DNA, 698 bp, Homo Sapiens
  misc_feature (68)..(68): n is a, c, g, or t
tgaagtgaccagtggaggaatctacagcccaagaagaagagggaagagcctactgcaggtgcacattntggatgcgtgaaatagatgctctccaactgactagtcagaaacatctcagcctccacctaattcccaagtgctaggccatgctatcccaaaagaaatcttaactcataatctaagaactgcagatcagtggagtgaagcaagtactgcctttggccatgagataacctggattctggctccagcccaccattaaatggttctctgttcttgggccaggcatttaatcctatgagtcgttgctgcgtcattgcaagaacataatgtaaagttctttcagtgacccagaagttatgtaacagctgtgaggtggttagcatatggtgtagaggttaagaggtctggttttggatccagctaagttcaatttctaccttcatcacttgccttgtaccgttgggcaacttatttgatttctgtgagtcttatatccttatatatgtaaaatagggtcataaacacatttaatgcctaggttgtattgagtgttctatgatatgactcataggaagttctgaatagtgtcttgcttttagtaagggcccataattttagctattactattattatttcttaacaacctcttgtccaaaagctgttattgttaattaaaattatatttattaaaatg

SEQ ID NO: 79694 - DNA, 1175 bp, Homo Sapiens
  misc_feature (271)..(271): n is a, c, g, or t
  misc_feature (273)..(274): n is a, c, g, or t
  misc_feature (507)..(593): n is a, c, g, or t
tcttcgaggaaacttccccattctggagatttggtttcagaaaagcgcttgcgggttaccccgcccggggggtttttttaattgggggagaattcccaggccactatgtccatggcccgggattttccctaggggaagcaggtattggcccaatgttccagtttaccttaacggggcccggcgcggccaaacgaaatggttctagaaaggttttttcgagggcccgaggcgggccggacaaggtttaatggggggggttggtcgtgtgatntnngtatgttaatgtaaaacttttatttgtaaaaaaaattaaaatatgtatttgaacagatttgtttaaccattattctcctgggcaatgtttataaaaagcacaaggtttctctttctccactttccatgtgggtattacaaaatgtttcaggaaatattagatgtaatataaagcaaaatgatgaatggttatttttaacattccaagtcctttacatattattttacagtgcnnnnnnnnnnnnnnnnnnnnnnnnnnnnnnnnnnnnnnnnnnnnnnnnnnnnnnnnnnnnnnnnnnnnnnnnnnnnnnnnnnnnnnntatttgcaaagaataaatgtatattaatgaatactaatatatttgcatgaaaatacagacttcatttaacttaatttgttcattatatcttaattaaaagaaatctggaaatataaaagaatgggggtattgaagttgcattctgagctatgatagagataagcatctaagaatttaaattttttaattcatttattttagaaatatgaagacaacagtgatccaacatatactatgaaaatggtttttactctgtcacaaacaattgtgtaaataggaaatgtaatattctcataacagatggttcaatcatcatgtattccaatttacaggggcaaaatgtgcagggaagccaggatttatgtaaatctagagttcaaagatacagatttttaatctgtaattaggaactaataagggcagcacaatgttgttcttaattccctggagaaagaaaacagactttattacatttagaaaacttatttgtataaaattgatcttttagaaagagaactagttgagaagctaatcagtgtctttagatcattaaaagcacaatgcagctcatgcctgtaatcc

SEQ ID NO: 79695 - DNA, 268 bp, Homo Sapiens
cccccttacagtgacatggaagagaagcattcttgcttgcagtattttaccctcaaaaatgcatcctcattcaaaacatttatttttcaaaacattttaaataaataaatgcatgataccagtctgctaatgttcagtgactatttaaatgaaattagctttaaaataagttgtatcttcactttagtagctttttaaaaatattataatgttttgaaaagatagcaattaatggtataaaaatagtatatataacaaatagaagatg

SEQ ID NO: 79696 - DNA, 646 bp, Homo Sapiens
ctcaaaacctactgataagcagaaagaatatagggctgttatacttggttggcatcactttgttcagaaagcaagaaggcagctgcattccacactgaccaaaactattatatcaggttgtgcttctcttagtcttaggtgtcttctcgtaggactgttttaaaattcaacacgaggggagagggaacaagctagacacagagaaaatagttatatatttagaggactgtgagatcttaataaaatttaaccgtatgggggctctattgcatttaccattcattcaacaaaagttactgattgcccattatgtactaggccctggtctaggcacatggaatacacagatgaataaatatgttcactgtccattactttctcaaaagttgaggggccagaaaactaaaatgaaatgagacagacactactggggctcaggctgggttgaggggagggccttcaaccctgccttgctatattagcaaaggcttctaggagaggagttgaggccttttcacgctttttgaaggaaagatcgtgttaatcaagtaaattagagaaaagacattcctagtggaagaaacaaccatgtcaaacttcaaagaatgatcaggaaactataataaatgtattctttctctagtgc

SEQ ID NO: 79697 - DNA, 1321 bp, Homo Sapiens
  misc_feature (93)..(118): n is a, c, g, or t
  misc_feature (1124)..(1139): n is a, c, g, or t
  misc_feature (1141)..(1187): n is a, c, g, or t
gcggccgcggctgtaggctttttttcatctcttagtgatcttctgtttatcggttgaatgccacagattcccttttaaacttattttgctttnnnnnnnnnnnnnnnnnnnnnnnnnntttaacttaaaatattttagcattagttgcacaaaatgttgggataaaattctagtttttataagtctttttatatatttagcctgtcacaacagtgctcaagattggtattgaagtttttctgcattatacaaccctaaaacacagagatctcactgacccgttgccctgtaaccactttctttccttctttgtgcctaatacagctcagctaagtccttccataaagatgctaaataactttcatcatcacataaatgtcttcataaaccaaggactattaagtgtattaaaatgaaacagtggggtttagtactccaaatgaactcttaaagaaaaaaactaatcttggcatcctatcactatgtgatattttgtacatcttactgtatttacaagtttatttatcaaggattatccatcttgctaatggcctattatttatttcactttttgttggtctttatatccttttattaatgtgctaaaggaacctgtatatctattttggaactctttgaatagtctaaaatagactaaaaatggagtattttatagtttaaattacaaaccaaggtggttccccctaagatatatatcttggtttaccatgattccaaacaaaactaacttgtttaaaaatatttggagtaaagttttatttgcattacaaataggatacaaaaatagttgaatcaggatacagaaatctgctgtgttttgactagttatccctgttttatttttttagatgtgcttaattttatggtgtaactaaagattttgtttgtgtaatgcatgattaagacaataaagtattttttctagtcttccgagaaacttttctgatcagtttgcgagttttgatgagttttgtaaggtttttgttttacaaactatgaatcagcaaatttttaagattgtaccacatagcaaacatacagctgttgaaaaataatgtatataaaatgcatataataaatattaaattgtgtacctgtaaaannnnnnnnnnnnnnnncnnnnnnnnnnnnnnnnnnnnnnnnnnnnnnnnnnnnnnnnnnnnnnncttgtcgggccgcctcgggcccttggaaaaatttttctaaaaccatttcctttttggccgccgcggcccccccaaagggtaaaagggaaacagtgggcccataaccctggttttccctaagagaaaattcccgg

SEQ ID NO: 79698 - DNA, 605 bp, Homo Sapiens
aagaacttcctagtaatggtcacagatgggcagtcctatgatgatgtccaaggccctgcagctgctgcacatgatgcaggaatcactatcttctctgttggtgtggcttgggcacctctggatgacctgaaagatatggcttctaaaccgaaggagtctcatgctttcttcacaagagagttcacaggattagaaccaattgtttctgatgtcatcagaggcatttgtagagatttcttagaatcccagcaataatggtaacattttgacaactgaaagaaaaagtacaaggggatccagtgtgtaaattgtattctcataatactgaaatgctttagcatactagaatcagatacaaaactattaagtatgtcaacagccatttaggcaaataagcactcctttaaagccgctgccttctggttacaatttacagtgtactttgttaaaaacactgctgaggcttcataatcatggctcttagaaactcaggaaagaggagataatgtggattaaaaccttaagagttctaaccatgcctactaaatgtacaaaaatgcaaattccatagctcaataaaagaatctgatacttagaccaaaagc

SEQ ID NO: 79699 - DNA, 1103 bp, Homo Sapiens
accgtgcagtaactctaacggtttaaggtagcgaggcctgggtggcgaattcggcacgaggtgggaattggaacagaaggaccacatgtgggccttgttcaagccagtgaacatcccaaaatagaattttacttgaaaaactttacatcagccaaagatgttttgtttgccataaaggaagtaggtttcagagggggtaattccaatacaggaaaagccttgaagcatactgctcagaaattcttcacggtagatgctggagtaagaaaagggatccccaaagtggtggtggtatttattgatggttggccttctgatgacatcgaggaagcaggcatcgtggccagagagttcggtgtcaatgtatttatagtttctgtggccaagcctatccctgaagaactggggatggttcaggatgtcacatttgttgacaaggctgtctgtcggaataatggcttcttctcttaccacatgcccaactggtttggcaccacaaaatacgtaaagcctctggtacagaagctgtgcactcatgaaccaaatgatgtgcagcaagacctgttataactcagctgaacattgcctttataattgatggctccagcagtgttggagatagcaatttccgcctcatgcttgaatttgtttccaacatagccaagacttttgaaatctcggacattggtgccaagatagctgctgtacagtttacttatgatcagcgcacggagttcagtttcactgactatagcaccaaagagaatgtcctagctgtcatcagaaacatccgctatatgagtggtggaacagctactggtgatgccatttccttcactgttagaaatgtgtttggccctataagggagagccccaacaagaacttcctagtaattgtcacagatgggcagtcctatgatgatgtccaaggccctgcagctgctgcacatgatgcagcaaaataagtttaaaagggaatctgtggcattcaaccgataaacagaagatcactaagagatgaaaaaaagctactcttggagctcacttcccccaacaagagcaccacattcctaacccctaaggcagcacacagagtccaaaaa

SEQ ID NO: 79700 - DNA, 334 bp, Homo Sapiens
tttaattgaaactgtgtgcatgcagtgagcgcaggattctagtaatccgacgggaggatccacttaaaagactaaaatccagaaaccccaggaaaaaagaataggaccggcgcaggcattctccaaatctgtacccttctagagtcaccagcttatatgtacttaaaaagtgctaaaccccctcgtcatgtttactgagaaacagagcgatcctgcgcaggggagaggaacgctttcctctgaacaaaaaccaaaggcgaggattcaagtccagagtaaaagccttcaatactgggagacaaaacaaagtcgtccaaaccagacctgccttaag

SEQ ID NO: 79701 - DNA, 1011 bp, Homo Sapiens
  misc_feature (102)..(102): n is a, c, g, or t
  misc_feature (200)..(200): n is a, c, g, or t
  misc_feature (203)..(204): n is a, c, g, or t
  misc_feature (291)..(291): n is a, c, g, or t
  misc_feature (330)..(330): n is a, c, g, or t
  misc_feature (335)..(335): n is a, c, g, or t
  misc_feature (406)..(406): n is a, c, g, or t
  misc_feature (435)..(435): n is a, c, g, or t
  misc_feature (443)..(443): n is a, c, g, or t
agatcggcagagattactggaccatacgaaaacctcctacttggagctgccccttgatccagtatcctttcacctccagttctcccaaaagatcagatcccntggacctagatcccttcggaagtggtccctcaatagtggtgaagctatgcggaattcagccagatgtccaagcccccacctagtgcccattcacatcntcnntgggaggggcaggattctcagatgaccccttaaaagtaaacaggacactcctgctctgcctccgaagaaacatgctcctccacggcntaaaccgcccagcggtaaaagtacacctgtaagccagcntggtnccgcagactttcccgaggcccccgatccattccagccactcggggctgacagcggcgacccgttccaaatntggcaatgaggagcagcagctggcgtggnccaagcgngagagcgagaaggcggaacaggagaggctggcgcggctgcggcggcaggagcaggaggacctggaactggccatcgcgctcagcaaggctgacatgcctgccgcctaggcgagggccgtgtgtaggcgggacagggcacgggcgggttccagagagggggcagtgcagatgtctatatatacacacacacaccgtcgccaccgtactccaaggaccgggactcgggggcttgttcagggtgagcagactcggctgcaagacctggaaaggtcacatctcctggggaagcccttacagaggccttggccaccacttctgcaggtccgtctctccactgtgccatcccccccggggctgactgcctcccgctcttcctctggggacgaacacacagcggtcagtcgaggagaggaagcacccagggcttccccgcctcctccctactcatagctgcagacatccccgcccgccctcccacgcatcagtcagacactccccccagtggtgtatgcactcgttgtataaaatgaagtttgaatgattaatataaaatattttaatacaaaac

SEQ ID NO: 79702 - DNA, 1123 bp, Homo Sapiens
  misc_feature (13)..(13): n is a, c, g, or t
  misc_feature (723)..(1059): n is a, c, g, or t
  misc_feature (1123)..(1123): n is a, c, g, or t
aagagttggctgntacttgctgatatttacattcaatcagcaaaatatgacatgccagaagacctgttaaaacggtgcctgcgtcataatagatcttgctgcaaagcttatgaatatatgggatacattatggaaaaagagcaagcatatacagatgctgccttgaactatgagatggcatggaaatatagcaatcggacaaatccggcagtaggatacaaactggcatttaattacttaaaagcaaaaagatatgtggattcaattgacatatgtcaccaggttcttgaagcacatccaacttatccaaaaatcagaaaggatatacttgataaggcccgtgcgtctttaagaccttgaaaataattttaacttaggtgttggtttaacaggaaatgaaagaaatctaactttcagttcttcctgttcaaaacaggtttgagctcagtgctttgttattagaagtatacccttttttctccagcagaggttgctgctgtacatcaagagaagtactatgtgaaattggtgtttcctaatgaagttgaatgagagctggtctatttgactctgttttgattgggtacagatttggtgactctgtggtaaagactataattatttctataaagaatattttgttaaaatctaggtaattaaataccctgtatcttttctaaggaatattatttcaggaaatatatttaaaatgcattgttctcnnnnnnnnnnnnnnnnnnnnnnnnnnnnnnnnnnnnnnnnnnnnnnnnnnnnnnnnnnnnnnnnnnnnnnnnnnnnnnnnnnnnnnnnnnnnnnnnnnnnnnnnnnnnnnnnnnnnnnnnnnnnnnnnnnnnnnnnnnnnnnnnnnnnnnnnnnnnnnnnnnnnnnnnnnnnnnnnnnnnnnnnnnnnnnnnnnnnnnnnnnnnnnnnnnnnnnnnnnnnnnnnnnnnnnnnnnnnnnnnnnnnnnnnnnnnnnnnnnnnnnnnnnnnnnnnnnnnnnnnnnnnnnnnnnnnnnnnnnnnnnnnnnnnnnnnnnnnnnnnnnnnnnnnnnnnnnnnntgtattctgtgttgtttcaaaaattggaataaatctccctgtaaataactcatgaaaaagacan

SEQ ID NO: 79703 - DNA, 582 bp, Homo Sapiens
  misc_feature (353)..(411): n is a, c, g, or t
tccgcggcggccgggctcgtggggcgcctggagtgagggttctggttcccgccggcgaggattgttaaaatgagtcttcggaagcaaacccctagtgacttcttaaagcaaatcatcggacgaccagttgtggtaaaattaaattctggagtggattatcgaggggtcctggcttgcctggatggctacatgaatatagccctggagcagacagaagaatatgtaaatggacaactgaagaataagtatggggatgcatttatccgaggaaacaatgtgttgtacatcagtacacaaaagagacgggatgtgaagacacccaagagagcaacgcttttcatagttggatatannnnnnnnnnnnnnnnnnnnnnnnnnnnnnnnnnnnnnnnnnnnnnnnnnnnnnnnnnnataatagttggtgatttttcactgacatgtgagtaagataaatgtatacaattgtggatttaattgtgaaatgttctttcacttgtaagtttcagtcattttcttttacctcgttgtcagtgtacagaatgctaaaataattaaaaaaagacaaaatatacctcttcctac

SEQ ID NO: 79704 - DNA, 732 bp, Homo Sapiens; identical to SEQ ID NO: 6485
  misc_feature (377)..(403): n is a, c, g, or t

SEQ ID NO: 79705 - DNA, 508 bp, Homo Sapiens
ggcacgaggacaacgcatatgcctcatcctctccacagccgtatctgataagaggatgaggcatatgcgttgtcagttggaatcccctccaaatggattgcaagagaaatactaaaatgattctaaatctgttccattatcttctctgtaggatgcaaaacatccagttgtaatgtataagcatgcacttcatactagcaatcacagcacaggaggacagcattaaattttatatagccaatttgggcactgggcatctttgtatttgaacttaacgacacatttactcttttagtcaggatttcggtcttttctgcgggaaggaattaagctatgtattaggtccaccatacgatctgtgtaagtaagattatcccacttgccctttctctttagtctttgtcccttccttttcactaagtgcccctcatccttttcaatctcattgtcactggatagtgctgtatcacttaggtgtgcattcggccccaaataatcaaaacccacc

SEQ ID NO: 79706 - DNA, 604 bp, Homo Sapiens
cttggaatagtaactcttctcatttgtttgggatctggccaccaagttccagaatgatacacggatcagtgcagaagttcatcaggctctcggaccttagggctgttggagaaggcttcagcagcagaactgatggtgaaggctcgtgttctccatcctcaactttctttgcttcgatcatacacaagaatacatttggaagggcaaaaaatgaacactgttgttcattgcagccgtgttttgtgacacagatgcacagtctgctgtgaagaccttctctcaagtggcatttgggagtccatgccagatcatggtgcttcatgagagactgacagctatcaggggttgtggcacttagtgaggactctcctcccccagtgtgtgctgatgacacatacacacctgacaatagcttgagtcttctctgttccttttactctgtagccaacatacacatgatttaaaaccctttctaaatatctatcatggttcatccttgtccaaatgcagagtcagagctatttgtacttcattattatttccaaggcgaatagttggctttctttttgcaaaaataattaaaatttttgtatgttgcagttgc

SEQ ID NO: 79707 - DNA, 882 bp, Homo Sapiens
ctccagtttctgaatcatctccaagtaggactcccacttgtaaaaagtcaccaataatcacaacatgtaattcagcaaaacttcagccaacatctagtcaaacaaatcttgcaaataatcagaatctgaaagcatataagctccgccccccctcaggctctttcaaacaaaaacaaacaaacagcccccaactagagcctcaaagcttccaggccaagacaagcatcccaaggccactaacacaacgaaaagaaatcatgcagaatccaaatggcaatttgcattctggggattgtttggcctctaatcgatattctcgtcttcctaaaccaaagatacattaagtacatagccatcacctgccaatttgtttcttaaaaacaatctcttctgtaatagctttatgtgcagcttgcagcttgctactgtggtggaggttccattgaaagcctgcaaatcttaaattaaaatgtggaagcttctactagtttggctccttcattttatatcctggttgaagtacatgccatttgagcataattatctcaggtaaacacgaaagtttgcttacccatttcagaggcctgccaaaggcccaaatcatgttatccatccctctccaggtcagaaaattcataatattttactgagcaggcaagaagtgtgctttgctggtttagtcctattaaggtctgtatttattgtggttgtcagaacctcaccccttttcacttgtctctcctgtgaatatggctactattttaactaaagatatggtgataatggaagatggtagtctgtaagcagagttctggccagtgttttgtatatttaaaaggtctatgcaaaagctttgtgatgaataaaggagattaggctttt

SEQ ID NO: 79708 - DNA, 755 bp, Homo Sapiens
  misc_feature (177)..(301): n is a, c, g, or t
aagtgaagtatggagaaagatttgcatacaaatgaagccaaaaaagagcagaaataactatacttacatgagataaaatagactttaagtcaaaaactgtaaaaagaaaagtcattatgtaatgatacaaggatcaattcatgcaagatataatcatatttttttattaagaaaatnnnnnnnnnnnnnnnnnnnnnnnnnnnnnnnnnnnnnnnnnnnnnnnnnnnnnnnnnnnnnnnnnnnnnnnnnnnnnnnnnnnnnnnnnnnnnnnnnnnnnnnnnnnnnnnnnnnnnnnnnnnnntgaggatattatcattataaatatatatgtaccccacactggatgacccagatataaagcaaatattattagatttaaagggagaaatagactctaatacaatagtagttgaggacttcactctactctcagcattggacagattttctagacataaaaccaataaatattggatttaaattgcactttacaccaaatggacctgacatttacagaacattctaataggtgcagaacactctaatagctgcagaacacacgttcttttcatcagcacatggaacattcaccagactagttctggaacccacttcctgccttagtgttctttccaccacagtgcatgataattccgatagaacgccttttatttgtaccttattagttgtagggggaaagctttttcatgtacaaaaatgctgtaattttctgatttaataaagtaattccactg

SEQ ID NO: 79709 - DNA, 577 bp, Homo Sapiens
agacggtggcgggcggcgcgggcgcgggtcccagctggcacgggcgcagcggtgtgcacagccacatgaccaacacacgcatcaccgaccctgagatcctggagagccggtacccggtcatcctgcgccgcttcgagctgcggcggggctcggggggcagaggccgcttccgaggcggcgacggcgtcacccgcgagctgctctttcgtgaggaggcgctgctgtcagtgctgaccgagcgccgcgccttccggccatacgggctccacgggggcgagcctggcgcccgcggcctaaacctgctgatccgcaaaaacggccggacggtgaatctgggcggcaagacgtcggtgaccgtgtaccccggggatgtgttctgtctccacacgcccggcggcggtggctatggggacccggaggaccccgccccaccgccggggtcgcccccgcaagcactggcctttcccgagcacggcagcgtctatgagtatcgccgggcccaggaggccgtgtgaggatcccgcaataaagatgccttaagtctcccggttctggggacgcagctacggcgcctaaa

SEQ ID NO: 79710 - DNA, 1076 bp, Homo Sapiens
  misc_feature (983)..(1004): n is a, c, g, or t
aataaaatttttaaaatattcccaaaccagtggaacacagacactggctgcacttagtactgccaaaagccaaggtcatttgcacatattccatcaacctgtcgagaattaggcctcactttataacccaaggcatggaagtgcatgcattctcttagctgggcaaacaattatactgtagttgtgatacaacacatgtggcttttatttgtactgcacatatccactgtacagccacttgggagtatcgtggttagcttgcagcaactgctgtctgcatttatactgtttattgcatattcttttccctggaagtgaaagagaaatgtttttcttgttgcattgattacattttataaatttgcttagctggaaagtttgggaaaagaggcctgtttgtcaattgtacaaccgattgtgaagctctagtgtgaatatttttacgtctgtattagacattttctttgcaaatctattgttcgattgaaatgtaaatgaaattaaagatggtgtacacccatcatgtaaaaagcaggcaccatctctaagatggatttaatgctcatttttaaggcatatactcagcttctatttaaaactataatttaaaataattctgtacaatgaaatggggaatatatatgggaataaattctattccatttatttcaatttgaatttccaaattgtaatgtttccctttgtgctataggaataggattaaatgggggaagactaggatttataaggcctgtatatggggggagggcagagatggaacaatgagggttgtgatgatagtgaatagcaaagagtgaattctgtgtgtttttgctgtagcactgaagtgaagagatattagctttggctgttcacaaaatagagcatcatgattttcagtgtttgagagaaaattgatggaaaaagtttgcagtacttgacatgtatttgcatgcacaaaataaaattatttgtccaccttnnnnnnnnnnnnnnnnnnnnnncatgagcaggcggccgcaagcgtattccctttagtgagggttaattcgagcatggcactggccgtcgttacc

SEQ ID NO: 79711 - DNA, 640 bp, Homo Sapiens
  misc_feature (492)..(544): n is a, c, g, or t
tgtgcatcggaaaggaaagaccaaagttgccctcatcctggctgtggcaagaagttctattatccaaaaccacctgcggcggcacatgatcatccattcaggtgtccgtgaattcacctgcgagacctgcggcaagtccttcaagaggaagaaccacctgaaggtacataggcgcacccacaccaggcgagacccccctcaagtgcgagatctgtggctaccagtgccggcagcgcgcgtcgctcaactggcacatgaagaagcacactgcggaggtgcagtacaacttcacgtgcgatcgctgcgggaagcgcttcgagaagctggacagcgtcaagttccacacgctcaaaagccacccggatcacaagcccacctgacccacctgaccactgaccgcccctatttattcgtccgctcggacaccacgcccgggcttgccggggcctggacagctgcgaggcccgcccggaccgcgggccggaaggaggnnnnnnnnnnnnnnnnnnnnnnnnnnnnnnnnnnnnnnnnnnnnnnnnnnnnnccaccgcatccttttcggagctggtgcctggggctgcattgctggaactgtgtcaagagagcagagtgagattaaagagcgagaaaggaaaaaaaa

SEQ ID NO: 79712 - DNA, 725 bp, Homo Sapiens
aagttattcaaattgcatctggaagaggctggactttgggttgttctacactcccttctaaggtttagccatggctaaacagggctgactgtgtctgctcattatttatgcagcttttaaataacaaactcctgcaactgtccaaaatgaaatgaaagagcccaggtgcttcggtgaagcatatctttccctgatgtaggataggagggcacagacaaaaagcaatgatgattggacctaacctgggcttctcaggttgcaattgcagagaagggaaggaagtccagttcaagatgcaaatacatggcactaggagtcaggaggcccagattctggtcctgattttgatgctaagctggatcaccccaagcaaatcactttacttttctggttctcatttatctcacctgtgcaatcaagagtttggagtaaatcagtggttgtcaaacttaagtgtggactgagatctcccaacgaaagggcttgttaaagcaccaattgttggactccatctctaaggtctgattcagcaggtggggcctgagaattcgcgatctccaactgttaattggaaattaacaatttcccaggtgatgctgacgctgtgggtcagggagtcactcattgagaactgttgaattagatgatttccaagagatcttcaagttctaaagtgctacagatcatttcatgtcagttctagatggttgcatattgtttacgcc

SEQ ID NO: 79713 - DNA, 585 bp, Homo Sapiens
agcaggacctaggtggcggcggtggtaccggctgcaatggtgtccaatcccgtgcatggcttgccctttcttccgggcacgtcctttaaggactctacgaaaacagccttccacagaagtcagacgctgagctacaggaacggctatgcaattgttcgacgtccaacagttgggataggcggagaccggctccagttcaaccagctgtcccaggctgagctggatgagttggccagtaaggcaccagtcttaacttatggccaacctaaacaagccccacctgcggattttattcctgcgcatgtggcctttgacaaaaaggtactgaaatttgatgcctatttccaagaagatgttcctatgtcaactgaggaacagtataggatccgtcaggtgaacatttactattatctagaagatgacagcatgtctgtcatagagcctgttgtagaaaattctggaatccttcaaggcaagttaataaaacgccagcggctagccaagaatgaccggggtgaccattaccattggaaagacctaaatcgaggaataaacatcacaatttatggcaaaactttccgcgtt

SEQ ID NO: 79714 - DNA, 896 bp, Homo Sapiens
cctggttgtgatgtttgtccgtctgttgtggtcgtttgcttggtgtgtggtcgcgccggtcgtgcttggttggcccgctggcgttttagtgcgttgccttggagggtgtccagggtgttgttcgtcaggcttctgtggcaggctgtgctgtcatcgttcgtagatagtagtgatgttcacctggcggatcctatgctgttcctcagttgacataggacatcttcttggaaataggcatcaatttcagtacctcaatgtgattaagccatctatgacagagccccacaggccgacataatgctgaatggggaaaagttgaaagcattccctctgagaactgggacgacataaggatgcccactctctccactcctcttcagcacagtactagaagaagtcctggaaaatcctaaagactcctccagaaagctcctagaactgataaaagaattcagcgaagtttctggatacgaaattaatatacacatatcagtagctcttctttacaccaacagcgaccaagctgagaatcaaatcaagaactcaaccccttttacaatagctttttgtcaaaggccacatgcgcaggaataaaatccgcaggtggggcttgtttaggttggccataagttaagactggtgccttactggccaactcatccagctcagcctgggacagctggttgaactggagccggtctccgcctatcccaactgttggacgtcgaacaattgcatagccgttcctgtagctcagcgtctgacttctgtggaaggctgttttcgtagagtccttaaaggacgtgcccggaagaaagggcaagccatgcacgggattggacaccattgcagccggtaccaccgccgccacctaggtcctgcttcgtcctctccgg

SEQ ID NO: 79715 - DNA, 1096 bp, Homo Sapiens
  misc_feature (983)..(1051): n is a, c, g, or t
gtcaggccggaaccatggtagtcaccaaggagctcttacagatggacctgtacgcgctgctaggcattgaggagaaggcagcggacaaagaggtaaagaaggcgtataggcagaaggccctctcctgccacccagacaaaaatccagataatcccagagcagctgaactcttccaccagctttctcaggccttggaggtgctgaccgatgctgcagccagggctgcatatgacaaggtcaggaaagccaagaagcaagcagcagagaggacccagaaacttgatgagaaaaggaagaaagtgaagcttgacctggaggcccgggagcggcaggcccaggcccaggagagtgaggaggaagaggagacccggagcaccaggacactagagcaagagatcgaacgcctgagagaagagggttcccggcagctggaggaacagcagaggctcatccgggagcagatacgccaggagcgtgaccagaggttgagaggaaaggcagaaaatactgaaggccaaggaacccccaaactaaagctaaaatggaagtgcaagaaggaggatgagtcaaaaggtggctactccaaagacgtcctcctacggcttttgcagaagtatggtgaggttctcaacctggtgctttccagtaagaagccaggcactgctgtggtggagtttgcaaccgtcaaggcagcggagctggctgtccagaatgaagttggcctggtggataaccctctgaagatttcctggttggagggacagccccaggatgccgtgggccgcagccactcaggactgtcaaagggctcagtgctgtcagagagggactacgagagcctcgtcatgatgcgcatgcgccaggcggccgagcggcaacagctgatcgcacggatgcagcaggaagaccaggaggggccgcctacgtagccccagctccagccatccacccctcagcccttttcttcaacgtcaccaataaannnnnnnnnnnnnnnnnnnnnnnnnnnnnnnnnnnnnnnnnnnnnnnnnnnnnnnnnnnnnnnnnnnnnataaaaaactgggcaccgcgggaattaaacacattaggacacaaa

SEQ ID NO: 79716 - DNA, 789 bp, Homo Sapiens
  misc_feature (29)..(29): n is a, c, g, or t
  misc_feature (148)..(148): n is a, c, g, or t
aacaatgtaaagtaagacatctcaggatntcaccagaagttacagatgaggcactggaagccaccaaattagcaggtgcaccttctgtggctgtcttgtttctgaagtacttaaacttccacaagagtgaatgtgacctaggcaagtntgttcaaaaggtagatcctgagatgatttggtcagattgggataaggcccagcaatctgcattttaacaagcaccccagtcactaggatgcagatggaccacactttgagaaacaccacccatttctactttttgcaccttattttctctgttcctgagcccccacattctctaggagaaacttagaggaaaagggcacagacactacatatctaaagctttggacaagtccttgacctctataaacttcagagtcctcattataaaatgggaagactgagctggagttcagcagtgatgcttttagttttaaaagtctatgatctggacttcctataatacaaatacacaatcctccaagaatttgacttggaaaaaaatgtcaaaggaaaacaggttatctgcccatgtgcatatggacaaccttgactaccctggcctggcccgtggtggcagtccagggctatctgtactgtttacagaattactttgtagttgacaacacaaaacaaacaaaaaaggcataaaatgccagcggtttatagaaaaaacagcatggtattctccagttaggtatgccagagtccaattcttttaacagctgtgagaatttgctgcttcattccaacaaaattttattt

SEQ ID NO: 79717 - DNA, 692 bp, Homo Sapiens
actgaatggtggagtgaaaaaactgatgcatactgggaaatatctaccattttttaaagataatgttaattaggaaaagaacactttaaaggaatttatagcagtgatgaaatgaattcagttatatcagatacaccaaactgttgatggtatttaaatgtgacttcaagttagtatttctgtatatattattgattactggtttgtttttagatatgtaagtctgttctaatctacagttcacatatcgacagttactctggtaataatagaatgttagtgatgatcacttggtggatgttgattaagtgcctgtgttttgtttcctcctctggataccaaataggtgtatgctacttttttggtgaacttatttcttggaagatttggctatgctattcagggtttttattcttatgtttttcttctaaatttaagtagcatcctgctgctaccatattaaagctaaaatttaacttttgctgaagaatcagctaattcaggtaatccaaatatttgtggaaaaacatctggataatttattgaacacattagtattgtgttagacagctttgatcattcccatttcataggtttttattgtggaatagtcaacttaatatagattcactttcaatttgcatgtataaagtaatactcaataaaatttttttcatttatttttcaaaaaa

SEQ ID NO: 79718 - DNA, 1416 bp, Homo Sapiens
tctttctgtatttcccaaattacagggagctatgcccttggtattgcacacagtacactgcaaaagattcacaaggttagttgaaagtcatttttgccctggtgattcaaagctcaaagaattttctagcataaagtcttattaaaaattttaatcaaaatattatttgagtttaagtttaataaaacaataccactatatatactctcaacaacttcattatataatcagtcctatgaggttgtacttgcttttcatatcacactgattaaggacaaaaataattttgatgtacatgtaccatacactgatatgcaatctacacactgatgcatttacatacatacaactataaatacccacaaatacaacaatggcaggtgacagcattttctttgatgactgacatactgcctgtaagaatagtctccaaaagcctgcaatactacagatacacacacaaattacaaaggatgaaccgaagagacttaagaaaacctactggtatatacaattatggtaacttgcaaaattttcctgctgttgcattcaagtcaaactgtcatgcagattcaaggtatttaatggacattctctctatgaagacattctctctgcatgcaatgggccaattattgtcataagcagaaggctgcccacgtgggttctggatactgtaggtacaaaaggagaatgcctttggatttcagtccttcctttatggatgagagatggaaaaggaatctgagagaaaaatcagtgacaagccgcccctcttctattgctatcaataatctatcacggggttattctgtgatgatttgatcatgtaagatgctataagactggtggaaagaaatttgctgacatgtggcagagcagtggcatggcctgggagacaagatggccagaaagctgtggagcaaggtaggaggcccagaggcgcatctgcctgcaaagctgacttaccattttctgtcagaataacttagatgctttgagacaaaagcagatactatttaaactccaacttggacaattcctcagtaaactagacttcaggtttaacaactcttaggatgccactttggttctttgttttacagtgctaattttacaattggaaaaaattctgtcatttgaaaagtcaagggatgactcactgctgaaatgaagagaggtggctcccaacctgctgaaaactcgaccaagtccacgggagttaaattacagagattcaaacctgcaaagctaaacttctgtgaattcaggatgcacatgcttaactgatgactgcaaggcaaaatgccaaggaactcaatttcaaggacaatcgacgcgtgggtcgacgatatcccgggattccggaccggaccagcctgctttttttaacaaactggttctataggtcacatg

SEQ ID NO: 79719 - DNA, 738 bp, Homo Sapiens
  misc_feature (200)..(200): n is a, c, g, or t
tgactttttagttactggcccagctgggattagaacccagctctatcctgtattattatttccaagacttttatttttgttggggttaattgctaatattctgtacaacttcgttttagcccagtcttgcatataatcatattttctgcataaataagataagctagagtttgagtgagcacacattgtgagagaatatngactatttgtttttttctttccaattagttagggtaaagcaagtgtaaagggaagtggatggtaaggcattttgaggaggcaatcaaatatgtttttttctaattatatatttccaagccaataatttctttgaagaagaatgtttttaagcgtgtttctttaccatgttaggccagtaggtacagagaaaataatattagctctttatgtcagcataggtaacaaagccttaaaaaattcacagctgaatgcaacagtgaaggccgttgacaagagaggttgcattacttcaaccagggctactgcagtgaaccaaaaaaagaactgagttctaggcttccatctccaggctacatcttaactgactaagagggcagtttagctgtccaggaagaactcgattgctaactctcactgataattttgcaacagtgacaataaagaatgaattttaaaaagaaaaacttgtctccctgaactattgaactccagaaaaagtagtacttacagtctttgctttaagagaaaccagttaaa

SEQ ID NO: 79720 - DNA, 211 bp, Homo Sapiens
ggggcggagccctgctctcgcaactcaagatggcggacgagagtgagacagcagtgaagccgccggcacctccgctgccgcagatgatggaagggaacgggaacggccatgagcactgcagcgattgcgagaatgaggaggacaacagctacaaccggggtggtttgagtccagccaatgacactggagccaaaaagaagaaaaagaaacc

SEQ ID NO: 79721 - DNA, 876 bp, Homo Sapiens
aatagaccaggcttgggccagaatgagaatctgagtgccattgaggggaaaggcaaggtggggggactgaagacacgctgctctagctgcaacgttaagtttgagtctgaaagtgaactccagaaccacatccaaaccatccaccgagagctcgtgccagacagcaacagcacacagttgaaaacgccccaagtatcaccaatgcccagaatcagtccctcccagtcggatgagaagaagacctatcaatgcatcaagtgtcagatggttttctacaatgaatgggatattcaggttcatgttgcaaatcacatgattgatgaaggactgaaccatgaatgcaaactctgcagccagacctttggactctcctgccaaactccagtgccacctgatagagcacagcttcgaaggggatgggaggcaccttcaagtgtccagtctgctttacagtatttgttcaagcaaacaagttgcagcagcatattttctctgcccatggacaagaagacaagatctatgactgtacacaatgtccacagaagtttttcttccaaacagagctgcagaatcatacaatgacccaacacagcagttagtgcaagtacagtctctcaaggagaattgattttgtggcacaaaaagggaacatgttttactctttgcacgaaactttcattgttaatgtatattattcagaaacattgtattgtaccataaaacttgtattatcaaactgttggatgttcatgtgtttgaacttttgcgcaccggatagaccccttgtatataaagtgttgcacatgtattatgtcgtctgatactaaaatggtcttataaagacaagtggacttgggccctattcaggcaagatta

SEQ ID NO: 79722 - DNA, 871 bp, Homo Sapiens
  misc_feature (396)..(411): n is a, c, g, or t
gcatttaaaatactctgtcttcattttaacatgttgaatggaataactgcatatcaccatgagtttgttttgcttttcatacagacttgtatgtgtcatttgagtggtttccagattggagcgaggttattctgatctaaatgaacagcatttttttccttagcctctgtttgccactctgggtatctctcctatgggcaaagccattagaaatgcataaaacctcgagacatggtttttggcaaaaactccatgactttaaactagctcttttactactgacctttcacagagaaaaaatatttcccttgaaaaaaactgggcttgtcattttttcccttgtagctttaagcagagacataagtgccttgcattacacatagtaaactttctttnnnnnnnnnnnnnnnngattttggagactaccagggtaagattccaacttgtccaaaagctttctggccttacatattttattataaaaattctcaagtctggtaatcttctatgtcagagctagtgatttcaaaaggtttcacaattccccaagacaaaagtgattttcgttcattataataaggttaagtgatatgtgattcataacaattttgatgtgaagaagggaaggacatcattgacttaataatagtatcagtcggtgcaacagttggcaacatgtgccttcacactttaccataaagagacgggtttgagggtttgccttctaaagtctgcaacttcaagaaaaaaaatcgacactgtggattgactttcccggtcactatataaagcaaataaacttaaaacactttgtaaccatgtatttactctgccaggtgcctatattccaataaaatgttcatccttgaag

SEQ ID NO: 79723 - DNA, 403 bp, Homo Sapiens
ggcacgaggtctgagtctgtttctgaggaaacccaacctgagtcatcgtccctcttctcccctcctcacattctcttcactgggggaggatggattgagttgactggcaaattcgggagaaggagtttgcatcggagtgcgtgactcagctgaggctgggctctgtttcttcagaatgaagtgcattcagatttgatgtgtatcctgtctctgggaagccccatgctctgctcatcttagcatgattactaaggtacactctgcccttgcaaggggaaggcccgagatttgctgctggcaggctcagtgggagttggatgttttatgtaacctgattgtggatatagatcaattcatgcttttcaattcagtcctctctctaataaactgctgtcataagccc

SEQ ID NO: 79724 - DNA, 349 bp, Homo Sapiens
ggcacgaggagaaaacaaggctttagtgccagtaccttggtaaagaagagagaacattgtatgaaattgtgtgaagttctaaggaaacctcaagaattttctctgatgattagaatccgggaatttcccagggaaagcaattgatggtttattgtaatgtgtagcatttataacagcaccatgtgccatcagtaacatctggagtgaaaaccttttactgatttaccaaccatacctacatctccaggatcttgcttgaagttaagggaaatagtaacacataatgaggttagaataagatgtctatctcctttcctttaaaaataaaatagccaggtgcagtggctca

SEQ ID NO: 79725 - DNA, 766 bp, Homo Sapiens
catttccaaattcacaagtgctcttggctggcttttcatgaatgatgcaatttctagttgaggtatgctggtatctacagctggcacattcctatcagagccttttccaggagttgtactgatgatgatctataaaagctgggtaagaactacattttaaaaaactgcagtcagtgaaaggcataaatgatatccctgtgctataatgaagggtaaatacagtaaaacttaacttgaaacaagtttggcagtgcaggttgtgataaacagagacaggcttaaaatgcttaaataaaggaacacttttaattatataggaaagtttttatttgataaatataacttcataaactttaaaaaattatgagtagctgtacaataatatactacatttactgacaatgcagagaatttttaaaggattacattagacagccacagtgtctcaggtccaaaattttaaaccaagtattgctacaatatttccagatactcattcctcataaaaatctaaattaccatgattacaaacatatcatgagttatgatctattttttataggaacaacattcaagttatttcacataaaacagcactttaatagtgttttacttttatgaaaatagataactcatttcaaaatagaaataaaatgtctgtacgtggggaccaaaattaataaaacatgttttacgtaactctttggtgtgttatttttattaatacctgcttatatcataccccaaactgatctttacaggaaaa

SEQ ID NO: 79726 - DNA, 1320 bp, Homo Sapiens
  misc_feature (1045)..(1045): n is a, c, g, or t
  misc_feature (1058)..(1058): n is a, c, g, or t
  misc_feature (1069)..(1069): n is a, c, g, or t
  misc_feature (1078)..(1216): n is a, c, g, or t
  misc_feature (1245)..(1245): n is a, c, g, or t
  misc_feature (1250)..(1250): n is a, c, g, or t
  misc_feature (1253)..(1253): n is a, c, g, or t
ggctgtgtgctgtgttaattgatattagagccccctccagatttgaactgggaccatttctccccatcccctacctgcacagggattgttaaacaagtctgggcctgtccttgtgtcccaggcaatgtaagcgttgtccccacctctcactccagcaggaagaaccggacccggcgaacctgaaagtggaccatgatttcttccaggacaaggtgtggccccatttggccctgagggtcccagcttttgagactctgaaggtaactggcaagggctggttttcctttttatttttggacattggatgggacagatgacagtggagcacattggtcccctcggacccgtgactgccgtagtccctccatgtcacaactgctaaggaatttcttggacacatcccatcccatagacccctcagcagcaggtagagggtactctgtgctgagccctgaggggagtgaggatggagtgtggctacagccttcccgagaaccccagtgttttgtgcacccgcaggttcagagcgcctgggccggctattacgactacaacacctttgaccagaatggcgtggtgggcccccacccgctagttgtcaacatgtactttgctactggcttcagtggtcacgggctccagcaggcccctggcattgggcgagctgtagcagagatggtactgaagggcaggttccagaccatcgacctgagccccttcctctttacccgcttttacttgggagagaagatccaggagaacaacatcatctgagcatgtgtgctctgcactggctccactggcttgcatcctggctgtgttcacagccttgtttgctgcttccatcttccccagtactgtgccaggccttctccccctccccagtatcctctcctctcaggcaggccattgcacccatatggctgggcaggcacaggcagtgaggccgaggccaatagcgagtgatgagcgggatcctaggactgatctgtagcccatgctgatgtcaccaccagggcatccatctggaggcctgagcacctgntctcgtgccgaantcttggctcgnagggcaaannnnnnnnnnnnnnnnnnnnnnnnnnnnnnnnnnnnnnnnnnnnnnnnnnnnnnnnnnnnnnnnnnnnnnnnnnnnnnnnnnnnnnnnnnnnnnnnnnnnnnnnnnnnnnnnnnnnnnnnnnnnnnnnnnnnnnnnnnntaattgcgtggcgccactgcccgcttcantcggnaanctgtcgtgcagctgcattatgatccggcacgctcggggagaagggtttgctattgggcgtcttcgct

SEQ ID NO: 79727 - DNA, 2115 bp, Homo Sapiens
  misc_feature (1741)..(1835): n is a, c, g, or t
  misc_feature (1865)..(1873): n is a, c, g, or t
  misc_feature (1927)..(1935): n is a, c, g, or t
  misc_feature (2048)..(2059): n is a, c, g, or t
actgtatagcgccaggtacgaggcccctgtggttaattcggcacgagggggctcagaggggctatgattcggagggttctgccgcacggcatgggccggggcctcttgacccggaggccaggcacgcgcagaggaggcttttctctggtattcacaggcctccactgggctctcagtaggtgggatttgtcagcagttctcattgcctgagaatcatccagctctccctcttttcagccagctttctacggaacatcaatgagtacctggccgtagtcgatgctcctcccctggacctccggttcaacccctcgggctacctcttgctggcttcagaaaaggatgctgcagccatggagagcaacgtgaaagtgcagaggcaggagggagccaaagtttctctgatgtctcctgatcagcttcggaacaagtttccctggataaacacagagggagtggctttggcgtcttatgggatggaggacgaaggttggtttgacccctggtgtctgctccaggggcttcggcgaaaggtccagtccttgggagtccttttctgccagggagaggtgacacgttttgtctcttcatctcaacgcatgttgaccacagatgacaaagcggtggtcttgaaaaggatccatgaagtccatgtgaagatggaccgcagcctggagtaccagcctgtggaatgcgccattgtgatcaacgcagccggagcctggtctgcgcaaatcgcagcactggctggtgttggagaggggccgcctggcaccctgcagggcaccaagctacctgtggagccgaggaaaaggtatgtgtatgtgtggcactgcccccagggaccaggcctagagactccgcttgttgcagacaccagtggagcctattttcgccgggaaggattaggtagcaactacctaggtggtcgtagccccactgagcaggaagaaccggacccggcgaacctggaagtggaccatgatttcttccaggacaaggtgtggccccatttggccctgagggtcccagcttttgagactctgaaggttcagagcgcctgggccggctattacgactacaacacctttgaccagaatggcgtggtgggcccccacccgctagttgtcaacatgtactttgctactggcttcagtggtcacgggctccagcaggcccctggcattgggcgagctgtagcagagatggtactgaagggcaggttccagaccatcgacctgagccccttcctctttacccgcttttacttgggagagaagatccaggagaacaacatcatctgagcatgtgtgctctgcactggctccactggcttgcatcctggctgtgttcacagccttgtttgctgcttccatcttccccagtactgtgccaggccttctccccctccccagtgtcctctcctctcaggcaggccattgcacccatatggctgggcaggcacaggcagtgaggccgaggccaatagcgagtgatgagcgggatcctaggactgatctgtagcccatgctgatgtcacccaccagggcaatccatctggaggcctgagcaccctggcccaggactggcttcatcctggcactgaccaggaaagactgcctctgaccctcttagcagacagagcccaggcatgggagcactctggggcagcctggctcaggtttattgattttcgtctgtttaccctatccattaatcaatacatgtaattaactcctannnnnnnnnnnnnnnnnnnnnnnnnnnnnnnnnnnnnnnnnnnnnnnnnnnnnnnnnnnnnnnnnnnnnnnnnnnnnnnnnnnnnnnnnnnnnnnggggggggccccctctaaagaaatcccccnnnnnnnnncccaggttttacggggaccccagttttttttggaaaaaagggggccccctatannnnnnnnncattttttaaaccttgggccctgggcccccccgttttttaaaaccccccgggactggggagaaaatcgccaccctggggggtacttttgggaaagggaacccttacctctttnnnnnnnnnnnnaacaaattgtgggacaaacctctcctccccgaaatttttaaagcgctccaaggggg

SEQ ID NO: 79728 - DNA, 893 bp, Homo Sapiens
aaggtagcgaggcctgggtggcgaattcggcacgaggcgataatagcgaggcagcagtgcagctttcagagggtccgggctcagaggggctatgattcggagggttctgccgcacggcatgggccggggcctcttgacccggaggccaggcacgcgcagaggaggcttttctctggactgggatggaaaggtgtctgagattaagaagaagatcaagtcgatcctgcctggaaggtcctgtgatctactgcaagacaccagccacctgcctcccgagcactcggatgtggtgatcgtgggaggtggggtgcttggcttgtctgtggcctattggctgaagaagctggagagcagacgaggtgctattcgagtgctagtggtggaacgggaccacacgtattcacaggcctccactgggctctcagtaggtgggatttgtcagcagttctcattgcctgagaacatccagctctccctcttttcagccagctttctacggaacatcaatgagtacctggccgtagtcgatgctcctcccctggacctccggttcaacccctcgggctacctcttgctggcttcagaaaaggatgctgcagccatggagagcaacgtgaaagtgcagaggcaggagggagccaaagtttctctgatgtctcctgatcagcttcggaacaagtttccctggataaacacagagggagtggctttggcgtcttatgggatggaggacgaaggtaggtttgacccctggtgtctgctccaggggcttcggcgaaaggtccagtccttgggagtccttttctgccagggagaggtgacaccgtatggctcttcatctcaacgcatgttgaccacagatgaccaagcggtgggtcttgaaaagggatcca

SEQ ID NO: 79729 - DNA, 754 bp, Homo Sapiens
  misc_feature (56)..(56): n is a, c, g, or t
  misc_feature (62)..(62): n is a, c, g, or t
tggaatgagagagtagggtcaaactgtcacagtatctgctccataggtttctgttnttaatntcaatgttaaatacaactacaatatgagcgagaactgcattttcttgggtgttgagaacttgtaccatggacttcagaccgccttgcagccgtatgctgcacaagcgtgtacaccccctgggcagcctcaaaaccccgcttacagcagcaacacaggagatcatctgtccattttagaaccattaatctctttatccattgctgaacgactgtgactattcagtaacgaagtaatagtaattaattagtatggtataatctttaataaatttcgtgccaaaatgcatggttttccacttagcattcaaaatgttgcatagagagtagttttcaatttcttatgtactcttcaaagtaagttgaaaatcagtttctacattttaattcgtttcctgttaaatctgttgcactctcctgggctgtctttttctccagcagacccctgcatgcagttgtgtaaggactttctctaattcttgtgaatcgtctcacccgcagtaaccactgaacgtcaatcagccctccatggggttctttcgatttttggtgaagtattttgttacctcagtcttgtatcaagttgctgtatttttcagcttgttacattgataataattatttcactaattaaatactttaatgtacaaacatctttgtttactttgaaattaaatgtgttttccaatgaaaaa

SEQ ID NO: 79730 - DNA, 1042 bp, Homo Sapiens
  misc_feature (235)..(294): n is a, c, g, or t
  misc_feature (300)..(392): n is a, c, g, or t
ggggcggacgcttgtgccggaagtaaacttgttaacggttctttgccttttggggaggggatacagcccagagaaggctttggagacccttgagtcggccagcgagcagggtttcttacttgagcgcctccacaaataaacgctccttcgctcctccgtcgcgtgcgtttccctgggataataagtgggaaagtggtggcttttatttttttgagacagggtctcaccgccgtcnnnnnnnnnnnnnnnnnnnnnnnnnnnnnnnnnnnnnnnnnnnnnnnnnnnnnnnnnnnngctcannnnnnnnnnnnnnnnnnnnnnnnnnnnnnnnnnnnnnnnnnnnnnnnnnnnnnnnnnnnnnnnnnnnnnnnnnnnnnnnnnnnnnnnnnnnngagtgagccaccgcatctggcccggaaagtgttttggagcgtagaaaaatgcaaattatagggctgccttcaaggatcccgaaggacccacagatttgccgcatcaggctcctatgcacgccggtaatttgatgtgttgagatgcactgcccagtgcgttgtttttactggaggagcttgtgtgcggagctccttgctagtgtatgtgttgggatgggagagaagtgcgggagaactatgagataatgccccctgatcctcagggtcttaggaggtatggtcggagaggctaagctaaagtatgaaagccgtgtgtaggcccttctgtgtagtgcagaaaaggtagaggtatgtgatttgaaagagtagggatgacatgcaggatgcgactcctggttggatctataaactaatgtctttggaacgaaagcacatgcaaccttttgaaaatggatgggtgataatgaaagaccattccagagaagaaacaccatggtgcaaaggctcaagaggcatactggaagtacaatgaagagagcaatctaactgaaatgggaaaaaaagaaacaaagagtaaaaagtaagatttgatgagaaagatggaatcgatttttaaatttttttatctacacaacaaaatttattatctt

SEQ ID NO: 79731 - DNA, 992 bp, Homo Sapiens
  misc_feature (77)..(77): n is a, c, g, or t
gaaacatgaggatcagaggccacatttttaattattgttagtgtatttggaagtctgaattggagatgttcgtaccntctgtctaaacagttcccttgagaacttccaagcctccagcatcttttcctggtgagtgtttctcctgtgcttggttgtgtataatggagctaactcctaagcggtggggtgaatgtggccgccttagttctgaagctactccagttatgttctgtttcttcaagctgtgatccagaaagatttttgtgcccccagatgcctcttgataggagaggcaacatactccaaatagttgggttcttcagggaagctattagaaactcaggtgacttgttagagcactaacttggtcagagccaaatcctggcaaacgctgcctgaccttcactctgtggttggggcagtgagaaccactggaggtccaatgatgagacttggaggtctggatccagtctctctttgttttaatgtgacttaggtgctgtcaacattagcaagataatggaaatcacgacgccagtgggtgcttacctccctgctaggcatgcaggggctggcggttggcaggggaaggaggcccagtgagccgggtcccttaggggagggagagtttgtcctctttgccccacagtctacccttcagggccttgtggcagtgccagtgttcggggggtgtctgggccactgagtacccactcggtcgtggttgtgctggcctcttgggtgagtgaacctgtgaagcccaggaggtggtgttggctgcagggtacacaaatactgagtggtggtcttttgttacaggcttagcaacaaagctgtgccctgggcatggggggctgtagtgtagctacagttgtgcgtttgtgaaatggcttagctttccatgttgctgagaggaacctggacatggtcccgggcatctgaatgatctgtaggggagggagttcaaataaagctttattttgttcattttc

SEQ ID NO: 79732 - DNA, 892 bp, Homo Sapiens
  misc_feature (47)..(47): n is a, c, g, or t
  misc_feature (765)..(842): n is a, c, g, or t
ttccagaagaggaaggtttcaaagtaaaagctggttcatgtcttacntacacatatcaaatttaaaagctaatcagagactaaactctgcaatttgttttcccatattaaagaactgaagagctcagtgtggtaggctggcaagtcacccttcccgagacagcccaccttcaggcccgtgatgtgcgcaatcatgtacgtgagcagggcgtagctggcgatgttgaaaggcacaccgaggcccatgtctcccgatctctggtacagctggcaggacagctcactgttcaccacatagaactggcagagggcatggcatggaggcagcgccatcagaggaagatctgaggaaccagcagaggaagataaggagggatggtggtttgaaagaccacagctaaaggcaaagtaaaacaggagagaaacagaagccaactcatatggtggagaccaggagagagagccactgggctgcagtgatgtccataacagcctctgcagcgatggcacggagctgagggagactatccatcggtgcaaggtttctgcaggtgtccatttacggctgaagcaatgctcttccatcagagctgaagggatctgggctacctcgtggcaccagattacaaatacagcaggaataattctgtttgccacaggaaactggtgcttctggtacaccctcctatattaaaagtctctattacatggccaggcacagtggctcatgcctgaaatcccaacactgggacgccagggtgggcannnnnnnnnnnnnnnnnnnnnnnnnnnnnnnnnnnnnnnnnnnnnnnnnnnnnnnnnnnnnnnnnnnnnnnnnnnnnnttcgcgcgcctgtggtcccagctctggggctgaggaatgggaactcactt

SEQ ID NO: 79733 - DNA, 587 bp, Homo Sapiens
  misc_feature (314)..(326): n is a, c, g, or t
acgatgcgtcccctccctcgcaggattgaggttaggactaaacggggtccgcaaggcccggcagctcccgagcgctctccccagccgcgcctccctccttcccgccacccgttccgcaggggcccgcggcgtcacctctcaggctgtagcgcgcctgcatgcccaataccgacagggtggccggtgccccgtcggtcgtcccttcctgaccccgcagcggaggatgtgttggatctgccccaggatttccaggtcccagatgaagagataattctacttactggatataggatgcattagatcttcttaccttnnnnnnnnnnnnngcggcagcaatgatcaaaatactaataaattactcacagactcagtgtattttttcttggagtaaaagtccaggatgggtaatagaatacctgctgttggcttttggaaaaattggtactgtgtgtagcaaaataatgtgaaacccatatgcatggatattcttaacaatttgaagaaatcgtcacagctttcctgggttgttgagcctctaagatggtcttttcctctgatgtgataataaagtgtttattctgaactct

SEQ ID NO: 79734 - DNA, 884 bp, Homo Sapiens
gtgaacttgaccagaatttgtcaagatgtttcaaatttcaggcatacatgccattaatgtcaggctcacctatctgaagactgtcctgatgtacctgctctgcacacagaatttagacgaggcgatcaggttggtcaatgtatccaatcagcagtatggccagattctccagatgactccggaagcacttggaggactaccgcctatctggtggagaagatgagagggcaatttggctgggtgtctagaactggcaaatccaggccccagaaacagagatcatctttaattcaatacaggtagttccaaggattcatgaaggaaatacttcccaaacaagatcaaacaatgatgacagacttaagcattctgccttcctctaatttcacactcaagatccctcttgaagaaagtgctgagagttctaacttcattggctacgtagtggcaaaagctccacagcattttaaggaacattttagaaacctggtaagaagatctaatgcatcctatatccagtgaagtagaattatctcttcatctgggacctggaaatcctgaaataaaaaaggataatgcaataaacacagttgcaggaaagtatgttagctatatactatgaagtactcttagtttacttatgttgaatggcttagctattaatactcaaattgagttaaaatgaaaattcctccttaaaaaatcaaacgtaatatgtattacatttcatggtacattagtagttctttgtatattgaataaatactaaatcacctaggtgtctatgttctatcacatctacaaacatgtcacttcctaattaacaaaatgttcttcctttagtttgcttttgcacttaaaatatatataattgacttttttgg

SEQ ID NO: 79735 - DNA, 1165 bp, Homo Sapiens
  misc_feature (960)..(1059): n is a, c, g, or t
gccagctgtaccagagatcgggagacatggcaggacagctcactgttcaccacatagaactggcagagggcatggcagctgtaccagagatcgggagacatgggcctcggtgtgcctttcaacatcgccagctacgccctgctcacgtacatgattgcgcacatcacgggcctgaagccaggtgactttatacacactttgggagatgcacatatttacctgaatcacatcgagccactgaaaattcagcttcagcgagaacccagacctttcccaaagctcaggattcttcgaaaagttgagaaaattgatgacttcaaagctgaagactttcagattgaagggtacaatccgcatccaactattaaaatggaaatggctgtttagggtgctttcaaaggagctcgaaggatattgtcagtctttaggggttgggctggatgccgaggtaaaagttctttttgctctaaaagaaaaaggaactaggtcaaaaatctgtccgtgacctatcagttattaatttttaaggatgttgccactggcaaatgtaactgtgccagttctttccataataaaaggctttgagttaactcactgagggtatctgacaatgctgaggttatgaacaaagtgaggagaatgaaatgtatgtgctcttagcaaaaacatgtatgtgcatttcaatcccacgtacttataaagaaggttggtgaatttcacaagctatttttggaatatttttagaatattttaagaatttcacaagctattccctcaaatctgagggagctgagtaacaccatcgatcatgatgtagagtgtggttatgaactttatagttgttttatatgttgctataataaagaagtgttctgcattcgtccacgctttgttcattctgtactgccacttatctgctcagttccttcctaaaatagattaaagaactctccttaagtnnnnnnnnnnnnnnnnnnnnnnnnnnnnnnnnnnnnnnnnnnnnnnnnnnnnnnnnnnnnnnnnnnnnnnnnnnnnnnnnnnnnnnnnnnnnnnnnnnnnaatatgggggcccgccctggcccctcggaaaaacttttctaaaccctttcgtttgggcgcgcgggcccccccaaggaaaagggaacatggcccataactgttttcc

SEQ ID NO: 79736 - DNA, 1514 bp, Homo Sapiens
ctccaacccacccaccccacccccacaaccacaagaggagaagctggtaccggtccgggattcccgggatgaaaagcgcgcggaaggggtcctgccaccgcgccacttggcctgcctccgtcccgccgcgccacttggcctgcctccgtcccgccgcgccacttcgcctgcctccgtcccccgcccgccgcgccatgcctgtggccggctcggagctgccgcgccggcccttgccccccgccgcacaggagcgggacgccgagccgcgtccgccgcacggggagctgcagtacctggggcagatccaacacatcctccgctgcggcgtcaggaaggacgaccgcacgggcaccggcaccctgtcggtattcggcatgcaggcgcgctacagcctgagagatgaattccctctgctgacaaccaaacgtgtgttctggaagggtgttttggaggagttgctgtggtttatcaagggatccacaaatgctaaagagctgtcttccaagggagtgaaaatctgggatgccaatggatcccgagactttttggacagcctgggattctccaccagagaagaaggggacttgggcccagtttatggcttccagtggaggcattttggggcagaatacagagatatggaatcagattattcaggacagggagttgaccaactgcaaagagtgattgacaccatcaaaaccaaccctgacgacagaagaatcatcatgtgcgcttggaatccaagagatcttcctctgatggcgctgcctccatgccatgccctctgccagttctatgtggtgaacagtgagctgtcctgccagctgtaccagagatcgggagacatgggcctcggtgtgcctttcaacatcgccagctacgccctgctcacgtacatgattgcgcacatcacgggcctgaagccaggtgactttatacaccactttgggagatgcacatatttacctgaatcacatcgagccactgaaaattcagcttcagcgagaacccagacctttcccaaagctcaggattcttcgaaaagttgagaaaattgatgacttcaaagctgaagactttcagattgaagggtacaatccgcatccaactattaacaatggaaatggctgtttagggtgctttcaaaggagcttgaaggatattgtcagtctttaagggtttgggctggatgccgaggtaaaagttctttttgctctaaaagaaaaaagaactaaggtcaacaaatctgtccgtgacctatcaggtattaactttcaaggatgttgccactggccaatgtaactgtgccagttcttttcataataaaaggctttgagttaactcactgagggtatctgaacatgctgaggttatgaacaaagtgaggagaaatgaatgtatgtgctcttaccaaaaacttgtatgggcattttaatcccccgaacttaataagaagggttggggaaatttcccaaggttatttttggaatattttttaaaaaaattttagc

SEQ ID NO: 79737 - DNA, 696 bp, Homo Sapiens
tgagttacagattgactgtgttcctgtctttaataaatttgccaagagtggttataagaacttacacctggatgaggcaccaggctcctgatgctgtgtaatgtcacaaaatacccctcactctcgatctgtgcaagagaacagctggttgcgctccaatcatgttacataacctacggcaaggtatcgacaggatcatactcctgtaaaatagaactttgttgatcacatcctgtgtacttgtttcacggacatgaggagcaattacaacaggtcgtacaattatggcaaaataatggccttattttgtttttagcttcagcgagaacccagacctttcccaaagctcaggattcttcgaaaagttgagaaaattgatgacttcaaagctgaagactttcagattgaagggtacaatccgcatccaactattaaaatggaaatggctgtttagggtgctttcaaaggagctcgaaggatattgtcagtctttaggggttgggctggatgccgaggtaaaagttctttttgctcctaaaaaaaaaaggaactaggtcaaaaatctgtccgtgacctatcagttattaatgtttaaggatggtgccactggcagatgtaactgtggcagttcgttcgataataaaaggtttgagttaaccactgagggtactgacatgctgaggtaagacaaagtga

SEQ ID NO: 79738 - DNA, 1733 bp, Homo Sapiens
ggaattcccgggatggctccggggcgcggagaagctgcatcccagaggagcgcgtccaggagcggacccgggagtgtttcaagagccagtgacaaggaccaggggcccaagtcccaccagccatgcagacctgccccctggcattccctggccacgtttcccaggcccttgggaccctcctgtttttggctgcctccttgagtgctcagaatgaaggctgggacagccccatctgcacagagggggtagtctctgtgtcttggggcgagaacaccgtcatgtcctgcaacatctccaacgccttctcccatgtcaacatcaagctgcgtgcccacgggcaggagagcgccatcttcaatgaggtggctccaggctacttctcccgggacggctggcagctccaggttcagggaggcgtggcacagctggtgatcaaaggcgcccgggactcccatgctgggctgtacatgtggcacctcgtgggacaccagagaaataacagacaagtcacgctggaggtttcaggtgcagaaccccagtccgcccccgacactgggttctggcctgtgccagcggtggtcactgctgtcttcatcctcttggtcgctctggtcatgttcgcctggtacaggtgccgctgttcccagcaacgccgggagaagaagttcttcctcctagaaccccagatgaaggtcgcagccctcagagcgggagcccagcagggcctgagcagagcctccgctgaactgtggaccccagactccgagcccaccccaaggccgctggcactggtgttcaaaccctcaccacttggagccctggagctgctgtccccccaacccttgtttccatatgccgcagacccatagccgcctgcaaggcagagaggacacaggagagccagccctgagtgccgaccttgggtggcggggcctgggtctctcgtcccacccggagggcacagacaccggcttgcttggcaggctgggcctctgtgtcacccactcctgggtgcgtgcagacccttcccctccaacccccaggtcttccaagctctgcttcctcagtttccaaaatggaaccacctcacctccgcagcacccgacttaccaggacgcatgcccctccctctgccctcatcaaaacccacagacccggactccctttctgccaccccaggctggtccggccccaggtgtggggtccgctctctccactcccagggctccgcgcccaagtgagggggcccctgccggagcctcagacacactccagttcagggctgtggggggccttggccacatacctgtcccttggctatgagcaggctttgggggcccttccgcggcagccccgggggccgaggtagggtcgggggcttagaggctgggatggctcctggccccaccgccagggggcagcgcaggccgggctgggaggcggcggcggcggctcgggctggggggtcaggtggacgccgccctccggggctggacgcgcatccctcagtccctcggccacccgggggtcgctccctcgtgcccaccgcacctgccgagcctctttggacccagatctgttcatgcttttgtcttcgtcactgcggcggggccctttgatgtcttcatctgtatggggtggaaaaatcaccgggaatcccccttcagttctttgaaaaagttccatgactcgaatatctgaaatgaagaaaacaaaccgactcacaaacctcc

SEQ ID NO: 79739 - DNA, 735 bp, Homo Sapiens
attcggcacgaggaccacataggattggtatgcaaaattgtatcagaaaattagatgaaacgcaattgttaaaacatagtgaagtctgtttcagacgtgctgtattggcacaactaaccaggtaggtaatagcagatgctgctgaggaaatgaaggcaactacacaactactgtgggaaacagatggggaccagggagtaaggtgacgatgtgtgcgccaagtggcctaaaaacccgtgaggaaactcacacggtgcatcaaatatgagagtgttcacagcagcactgggagcagcccagctctccatcaaaagtcatgcattccttcagtggaataaataaatgaattacagctacagaatctcaggaacaaaatggtaagctaaaaaccaagtaactgaagaaaacataatatttcacttatataaagataaaaaagttttaaaactaaacagtgtatttttaagagattcaactgtgtgtgggaaaagcataaagaaaaactagagaatgatgaacaaaaattcaagacagtggttgcctctaaggtggggaagggccattatcagttcaaactggaaaatggtgcaaagggaccttcaaaaatgatgatactctcttaaactgtatgatcagtacctaagtgttttgtgctattgatattctttgtgtcatacccatttttttcatatttattagatatttaataaaaccagttttaaaaaatacaaatcc

SEQ ID NO: 79740 - DNA, 321 bp, Homo Sapiens
atttccacatttatatcacaaggtgtccacttactggaccaaatagcaaagttgctcccttctgcgtcctgagaacacagaagtctaggtactgtacattcactaaggctccttgtttttgcaaatcgcgtttatgacaaataaccataaggcaaacgaatctaaaggaatggttatgagtgtttccagcgtacagacaggtcttccccctcgccccacagtacagcataaaaccagtagcacccacaataacttttgtgttgttttggggggactctagaaaggtgaagttttctagatgtgtacaggaagggaaaaaag

SEQ ID NO: 79741 - DNA, 1322 bp, Homo Sapiens
  misc_feature (44)..(44): n is a, c, g, or t
  misc_feature (87)..(87): n is a, c, g, or t
  misc_feature (102)..(102): n is a, c, g, or t
  misc_feature (117)..(118): n is a, c, g, or t
  misc_feature (142)..(142): n is a, c, g, or t
  misc_feature (172)..(174): n is a, c, g, or t
  misc_feature (185)..(185): n is a, c, g, or t
  misc_feature (189)..(190): n is a, c, g, or t
  misc_feature (214)..(214): n is a, c, g, or t
  misc_feature (247)..(247): n is a, c, g, or t
  misc_feature (305)..(305): n is a, c, g, or t
  misc_feature (313)..(313): n is a, c, g, or t
  misc_feature (349)..(349): n is a, c, g, or t
  misc_feature (422)..(422): n is a, c, g, or t
tcccatcctcacaagtgccatgtcaatctggattctcccacctntcacacatggactcagtatcatgagatatcagaagccttgagntcgaagtgccagtcnacagggacccacccnngtgtggtgtgctgcagcaggtctnccagcttatccagaaggtgctgagcaatgnnntgaatgatgcncagnntgtggaggcggtgtgcgctatctntgagaagtctgttaagacgctgctggatgactntgcccccatggtgccacagctgtgtgagatgctgggtcggatgtacagcaccatcccncaggcctntgctcttgacctcactcgacagctggtccacatctntgctcatgagcctgcccactttcccccaattgaggccctcttcttgctcgtcacctccgtcacactcactctnttccagcaagggcccagggatcatcctgatattgttgattcatttatgcaactcctggcacaggctctgaagcggaagccagatttgttcctgtgtgaacgattggatgtcaaagctgtgttccagtgtgctgtgctggccctcaagttccctgaggcacctactgtcaaggcctcctgtggcttctttacagagctgctgcctcggtgtggggaagtagagtctgtgggaaaggtggtacaggaagacggtcgtatgctgctcatagcagtgctggaggccattgggggccaggcctcccgcagcctcatggactgctttgccgatatcctgttcgccctgaacaagcactgcttcagcctcctgagcatgtggatcaaggaggccctgcagccacctggtttcccctctgcccgcctcagccctgaacagaaggataccttcagccagcagatccttcgcgagcgagtgaacaagaggcgggtgaaggagatggtgaaggagttcacactgctgtgccggggtctccatggcacagattacacagctgactactgaggggtgcccccatcccatccaccccttctcttcatccttccctattcccaaagagtaaacctggaccctcactgctgtctctgcctcctttctgctgtcaccaccacctaactgaaagcctgggtccagaaggcctgggggaaggatgggaggatgcttggacccaggccttgggagggaatggtgggaacatcctctagctcccaggttggaagagatactactgtagccaagccacctaggctggagcccttcagaatactgtcattgtccttggggcggggtggttgcagtagtgtcatcaacccccccatccccattaaattaatcccaacatgcaaa

SEQ ID NO: 79742 - DNA, 195 bp, Homo Sapiens
ctgttgaacctcaacaatgtttacgctgaaagaattacaaagctccagggaaggaaataaaaatgaaccctagtctatgatgaaaacatttgagcttggtggtggtgggagattgcttaattgcctgggtagagtaagctccttttgtcctggtaaggtgtgggcaaaggagaaccacttaccaaaattataact

SEQ ID NO: 79743 - DNA, 1535 bp, Homo Sapiens
  misc_feature (26)..(26): n is a, c, g, or t
  misc_feature (748)..(766): n is a, c, g, or t
  misc_feature (803)..(1378): n is a, c, g, or t
  misc_feature (1506)..(1506): n is a, c, g, or t
tgacctttatgatgatgcagctattntcgaggccaaaaaatcattttactgggcaagaaaaacatctcattcctttgtcgtgaatatccttgctcaggctctttatgaattattttctgccacagataattccctgcatcaactaagaaaaggcctgttttctttatttcaaacttggtgggcgaatgtgttgcgggtcctgttgggctgctttctgtattgtctcctaaccctctagttttaattggacacttctttgccgttgcaatctatgccgtgtatttttgctttaagtcagaaccttggattacaaaacctcgagcccttctcagtagtggtgctgtattgtacaaagcgtgttctgtaatatttcctctaatttactcagaaatgaagtatatggttcattaagcttaaaggggaaccatttgtgaatgaatatttggaacttaccaagtcctaagagacttttggaagaggatatatatagcatagtaccataccacttataaagtggaaactcttggaccaagatttggattaatttgtttttgaagttttttgtatataaatatgtaaatacatgctttaatttgcaatttaaaatgaaggggttaaataagttagacatttaaaagaaatgattgttaccataaattagtgctaatgctgaggagaactacagtttttcttttgaatttagtatttgagatgagttgttgggacatgcaaataaaatgaagaatgnnnnnnnnnnnnnnnnnnngcctacagccgcggccctccctcgttccgaattcttnnnnnnnnnnnnnnnnnnnnnnnnnnnnnnnnnnnnnnnnnnnnnnnnnnnnnnnnnnnnnnnnnnnnnnnnnnnnnnnnnnnnnnnnnnnnnnnnnnnnnnnnnnnnnnnnnnnnnnnnnnnnnnnnnnnnnnnnnnnnnnnnnnnnnnnnnnnnnnnnnnnnnnnnnnnnnnnnnnnnnnnnnnnnnnnnnnnnnnnnnnnnnnnnnnnnnnnnnnnnnnnnnnnnnnnnnnnnnnnnnnnnnnnnnnnnnnnnnnnnnnnnnnnnnnnnnnnnnnnnnnnnnnnnnnnnnnnnnnnnnnnnnnnnnnnnnnnnnnnnnnnnnnnnnnnnnnnnnnnnnnnnnnnnnnnnnnnnnnnnnnnnnnnnnnnnnnnnnnnnnnnnnnnnnnnnnnnnnnnnnnnnnnnnnnnnnnnnnnnnnnnnnnnnnnnnnnnnnnnnnnnnnnnnnnnnnnnnnnnnnnnnnnnnnnnnnnnnnnnnnnnnnnnnnnnnnnnnnnnnnnnnnnnnnnnnnnnnnnnnnnnnnnnnnnnnnnnnnnnnnnnnnnnnnnnnnnnnnnnnnnnnnnnnnnnnnnnntggtccgaccttgcgcttaacggatactgtccgctttctccttcgggaacgtggcgcttctcaagtcacgcgtaggtactcagttcgtgtaagtcgtcgctcaactggctgtttacgaaccccgtcanccgacgtgcgcttatcggtactacgctga

SEQ ID NO: 79744 - DNA, 949 bp, Homo Sapiens
  misc_feature (390)..(390): n is a, c, g, or t
caccccctctgtcagcattctgctcgctccagtgctgatacggcctgcccccccggtattggtatttgtgagatgggttcccatgtggcagatgttgatctgtactggtaccgccaccttgcctgcaagcgtggatacagctgacccatacaccaccgattttccttttgataaagatgtattacatgtaaatattctacacagaaagtcacagcacatgtgcccattgatacaaggctgctgaggcctggtctccagttggaaatataattaagggtggcaaggactggagtcagttggagagtgcatagccagtctgtgaagacaactgccagatactggcaatactccagcctggtgacagagtgagactctgtctcaaaaagaaangtttcaatgtttactcctagagaagccaaaaatccagatttgtatatgaaatcttaccattttaaaagattggcagctaattatttttttaaaaagctgtgcagtgtgatgtgtcccaaacggactggctcatgggtggccacgtcacaacctctgatctcagaccgtgcatgccttgtcctcttaagacaactcctgtggcaccgtttctccctccacagggccaaagccatagtgtccggtcccaaggacaaggctcttccagtgctaggagaggtatgagcagcctctcacctgtgagctgtggggatcacaaggctgcctgcctcagtcttggagtcctgttgggtgaatgaggcagatgggaaagagcctcaccagcagctgcttttggagcaggggtccaaggaagagagggtggcctcgacatcaaactgcctggatttttctaccaccctgttacatcataacaacttctgaaacacacaccagccctgagttctgggctcatttgaagcctggaatagcaataaatctttttaacttgcggacagttaaa

SEQ ID NO: 79745 - DNA, 498 bp, Homo Sapiens
cgcccccgctcatactctccccttcttcccctctctccataccccctccctttctggggcaggcgtttctccgaggcgcactgaggctccggggcgagtccgcgcagcgcgagctggggaaagccgtccggggctcccgatgaccctgcactccgccgggaggccgcccttcggaaaagccgtggaaacacacccggattgaaatgcccctggcccgcctgacccgaccctaggagaagcagccgagttacccgacatcgtggtcagcaggagctgggtcggtggctggatgctgcagcagcagggactcagcgcctgggagggctcctggggcagggagagaagcagagatgcaacatttttaaaatttcacaaagcatccggctgcacccaggtccctggaacaggagacaaacagaattaatgttttataccttcgggtataggtttgagttttttccccctcatgccaagtatttaaaacctctagaaacccat

SEQ ID NO: 79746 - DNA, 1130 bp, Homo Sapiens
ggcgctgccgccccgcgcttaaccgacaccacgagagaaaaaaaaccaaagtagcgaggcctgggtggcgaattcggcacgagggcctacaacctcctgttctttgcgtctggaggaggcaagtttaactaccagggaaccaagcgctggctggaagacaacctggaccacacagactccagcctgcttcaggacaatgtggccttcgtgctgtgcctggacaccgtgggccggggcagcagcctgcacctgcacgtgtccaagccgcctcgggagggcaccctgcagcacgccttcctgcgggagctggagacggtggccgcgcaccagttccctgaggtacggttctccatggtgcacaagcggatcaacctggcggaggacgtgctggcctgggagcacgagcgcttcgccatccgccgactgcccgccttcacgctgtcccacctggagagccaccgtgacggccagcgcagcagcatcatggacgtgcggtcccgggtggattctaagaccctgacccgtaacacgaggatcattgcagaggccctgactcgagtcatctacaacctgacagagaaggggacacccccagacatgccggtgttcacagagcagatgcagatccagcaggagcagctggactcggtgatggactggctcaccaaccagccgcgggccgcgcagctggtggacaaggacagcaccttcctcagcacgctggagcaccacctgagccgctacctgaaggacgtgaagcagcaccacgtcaaggctgacaagcgggacccagagtttgtcttctacgaccagctgaagcaagtgatgaatgcgtacagagtcaagccggccgtctttgacctgctcctggctgttggcattgctgcctacctcggcatggcctacgtggctgtccagcacttcagcctcctctacaagaccgtccagaggctgctcgtgaaggccaagacacagtgacacagccacccccacagccggagcccccgccgctccacagtccctggggccgagcacgagtcgtcatgatggatgcactgactgaccgtctggggctcaggctggtgtgggatgcagccggccgatgagaaaataaagccatattgaatgat

SEQ ID NO: 79747 - DNA, 2246 bp, Homo Sapiens
  misc_feature (65)..(119): n is a, c, g, or t
  misc_feature (1430)..(1430): n is a, c, g, or t
  misc_feature (1445)..(1445): n is a, c, g, or t
gcagtgtccggagcgggctggggggagagagcccgagagcagggttcggtgccttttcctctgtnnnnnnnnnnnnnnnnnnnnnnnnnnnnnnnnnnnnnnnnnnnnnnnnnnnnnnnaacgggacccatcagtttgtcttctacgaccacctgaagcaagtgatgaatgcgtacaaagacaagccggccgtctttgacctgctcctggctgttggcattgctgcctacctcggcatggcctacgtggctgtacagcacttcagcctcctctacaagaccgatccagatgctgctcgtgaaggccaagacacagtgacacagccacccccacagccggagcccccgccgctccacagtccctggggccgagcacgagtgagtggacactgccccgccgcgggcggccctgcagggacaggggccctctccctccccggctggtggttggaacactgaattacagagcttttttcttgttgctctccgagcactggggggggattgtttcttcttttccgtgtctttgaacttccttggaggacagcttgggagacgtccccgagccaagctacggacttgcggacgagccccccaatcctgggagccggccgccctcggtctggtgtaagcacacatgcacgattaaagaggagacgccgggaccccctgcccgatcgcgcgcggcctccgcccaccgcctcctgccgcaaggggcctggactgcaggcctgacctgctccctgctccgtgtctgtcctaggacgtcccctcccgctccccgatggtggcgtggacatggttatttatctctgctccttcttgcctggaggagggcagtgccagccctggggttctagggattccagccctcctggagccttttagtaaccccatgtggtctcagtgacccgaccccctgacagtgggctcggggagctgcatcacccagccttccccttctccgactgcagggtctgatgtcatcattgacagcctttgcttcgtgggggcctggcagggccccggcctccccgacccccgacccactgcaaacccccgttcccccgcactcctcttctcccagcccatccctccggcccctgtgcctctgcggccccagcccagctcccagggccgtcacctgcttggccctggcccagctccctgccctgagtcctgagccagtgcctggtgtttcctgggctcggtactgggcccccaggccatccaggctttgccacggccagttggtcctccctggggaactgggtgcgggtggagtactgggaggcaggaggtggcccggggaggccttgtggctcctcccctcgctcctcgccctgggcctcagcttcctcatcaatagaaaggatgtgttcggggtgggggcgtcaggtgagaacgtttgctgggaaggagaggacttgnggcatggcctctggngccacccttcctggaactcggagaggaaggtccggggccctcgggaagcccttggacagaaccctccaccccgcagaccaggcgccctgtgtgtgtgggaaagaaggaaggcccgtgttgagctcagggagacccgggtgggtccgttctttaacaatataacctacccagtgcgtgcccagcaggcttggtggggaagggacttgagctgggcaagtcctggcctggcacccgcagccgtctcccttccgtggcccagggaggtgtttgctgtccgaaggacctgggccggcccatgggagcctggggttctgtccagataggaccagggggtctcactttggccaccagttcttcggccagcacctctgccctccagaacctgcagcctggaggggtgaggggacaaccacccctctttcctccaggttggcaggggaccctcttctcccgtctgccctgcgggttgcccgcctcctccagagacttgcccaagggcccatcaccactggcctctgggcacttgtgctgagactctgggacccaggcagctgccaccttgtcaccatgagagaatttggggagtgcttgcatgctagccagcaggctcctgtctgggtgccacggggccagcattttggagggagcttccttccttccttcctggacaggtcgtcatgatggatgcactgactgaccgtctggggctcaggctggtgtgggatgcagccggccgatgagaaaataaagccatattgaatgatcgccaccagtgtttggtctgggggctgtgagaattag

SEQ ID NO: 79748 - DNA, 1440 bp, Homo Sapiens
gaacaccggcatgtctgggggtgtccccttctctgtcaggttgtagatgactcgagtcagggcctctgcaatgatcctcgtgttacgggtcagggtcttagaatccaccccggaccgcacgtccatgatgctgctgcgctggccgtcacggtggctctccaggtgggacagcgtgaaggcgggcagtcggcggatggcgaagcgctcgtgctcccaggccagcacgtcctccgccaggttgatccgcttgtgcaccatggagaaccgtacctcagggaactggtgcgcggccaccgtctccagctcccgcaggaaggcgtgctgcagggtgccctcccgaggcggcttggacacgtgcaggtgcaggctgctgccccggcccacggtgtccaggcacagcacgaaggccacattgtcctgaagcaggctggagtctgtgtggtccaggttgtcttccagccagcgcttggttccctggtagttaaacttgcctcctccagacgcaaagaacaggaggttgtaggcggcgtgcgtgcgcttgtaggtgtagagccgggagaagaggcgtgccagctccagcagcacagagacgccgctcccgttggagtccgcgcccagcgacagccagggggccactccaaaggcgtcgtagtgggccacgatgacgatggtgggaaggtcctctccgcccagccccgtcagccgcccctccacgctggcaatcagccagtcactcacggccttgctctgtaccccgctggtgaccatctggaagccgttggcagtggccgtgcgcagcagtacttcagcagcagaggcggagccctgggaggcggaggcagcctgggtctgcttgtagatagacagcagggcctcgtcctccacggcaaagtacacggggacggcggtctccatggccagcatctccggctcgatctccatgaattgccggacgacgtcctggggcacggcggccatggccctgggcaggatgatgaccacggcgcccgccgactgccgcagggccttctggtactgctcgtaggagaagtccagtagccgcatgagcacgcagcggcggctcagcacctccgccgccatcgtgcgcgcctccgtgttcagcactgcattccgtgtgccgtagggctggccctgcaggtcgtactgctgcatgcggtacacggtgaactcgtgcgcggcgtcggcggcaggcagcggcggcgccaccagcagcagcacagcgggcaggaagacgatgaagccgagcggcagacaagacgccttcagcatgttctccagcacctcgcccgcttcctccagcatcctggccggcggcggggccgcgcggggcggcagctgggacgggacggcggcggcggcggctcccgcggactcacctcggcatgggtagccgcccctcgtcggaattcgccacccagg

SEQ ID NO: 79749 - DNA, 739 bp, Homo Sapiens
catcctcaagacagtatatttaccttgactaatacagaactctaccccaaagtgaactgccttctgtctgtgtttacgaactttacttacttgatttagccagggaaataaatatttggaattttcttttaaagcatcttttttggtctactgtaagggaggagaattataaatgaaaagagtcaagaattttattatctgatgtgcttaattgtcacgctaagaacttaaaaaacaactcaaaaagagctaatagctaatctcctaaatctaaaaagggaattctttgaaattattttgctttcataatcaaatatattacttatgaagaataaaaataattcaaaccactacaataagtaaaatgggtatccatcacatactgtcatagagactaactgaagtagatcacttatgaatttccccattcaagtgctttcataaattcctcctcagtgaaagatagcatcttggcagcttcaatatgcatcttgttattttgccttaatttacttaactccagtttatacttttctgcttcttctagagctctattcaagcgaacctctgtggcactttgactacttgcagcctgtttgtgcagtcttcttttattggctaattccctttctactgaagacaactgttgctgtgatccatcatactttttgtttgcctcttcggaaagagttttggtattttctacttgagactggtgcatattaaattgtcgctgctg

SEQ ID NO: 79750 - DNA, 786 bp, Homo Sapiens
  misc_feature (74)..(85): n is a, c, g, or t
  misc_feature (766)..(767): n is a, c, g, or t
gaaactgaagaattcttttatttagtgggaaagaagtaggtaaatgacagacagctcatattctgttaaacagnnnnnnnnnnnngaatacaaacatcacagtgatgaattttcacaaagctaacagatttgaactacagagcaatggaatatttataagcaagatgtcatggtattaatgaccaaattgcatctaactgggttttctaagctcaaaaacatttaaaatctcagacttaaaatttaaatctagacatgacaattgtaagcataccactcagtcatttaaaactattcagtgagtgctactcttcctgcataaatatttttttcctaacattattttttctcccaagatttagaatgtcacatctcatgttcctactagtaatcacacacaggattaaaagcccaaccaagaaagtattctttttataatatgttcttaaaagaagaaagaaaaattaaatgtgaacattttgtacaacagttgctgaagaacagcaacaccaattctgaaatatcatgtggactatacaaaaaggcacggctcatggaaccaagtatgtaacgctacagcatttgaacatcagtctccaaaagttggtgatattacatcctgtacacagctctgtgtctctctacccggctagcgcatgcccaggatctgtctgctttttagttgataatttttctcaaaatctgacagggcttgagccgcagctgggcagcatgaagcatgaagcaaggaccttcaggtctctanncttggacttaggatgtgag

SEQ ID NO: 79751 - DNA, 575 bp, Homo Sapiens
  misc_feature (39)..(39): n is a, c, g, or t
tggtctccctctgctctgcgcctgctgcagaggcctccnggaggaaccggctgcccatgccaactgccacaagagtagcactgaacattctccttccaggagctgggctgggaacggtggatcgtgtaccctcccagtttcatcttccactactgtcatggtggttgtgggctgcacatcccaccaaacctgtcccttccagtccctggggctccccctaccccagcccagccctactccttgctgccaggggcccagccctgctgtgctgctctcccagggaccatgaggcccctacatgtccgcaccacctcggatggaggttactctttcaagtatgagacagtgcccaaccttctcacgcagcactgtgcttgtatctaagggtggggggtcttccttcttaatcccatggctggtggccacgcccccaccatcatcagctgggaggaaaggcagagttgggaaatagatggctcccactcctccctcctttcacttctctgcctatgggctaccctccccaccccacttctatctcaataaagaacacagtgcatatgacttgaaaaaaa

SEQ ID NO: 79752 - DNA, 1101 bp, Homo Sapiens
  misc_feature (56)..(56): n is a, c, g, or t
  misc_feature (60)..(60): n is a, c, g, or t
  misc_feature (117)..(117): n is a, c, g, or t
  misc_feature (182)..(182): n is a, c, g, or t
ttagggccctgccagttcaatagtcatgacagacaatgcattgagatgagtgtccntgtntacgagccatgtactgttttcctgagtcaaagcagtgcttcccatagagttgctgcntctctgtgacaaggaagaaacttcatgaccgatccagagccttggtgcccactgactctcgtgcntattgcagatgctgtggtgccctcacaagcaacccctatgctgatgtgcagagtgccagctgccatttgccaaactctgcatttcatttcatctaagcttaaccccctcttccccttcctggtgtacctgtgtctcctcggaaggaagtcatagtttagatgaaaccattttttgtacaatgtaaagatcatctgagcaagatgagcattttgtaaaaatgaaaatgtgactcacataaaatcaggaacttgacacagtgttgcattaataactttagggtgcagacatgctgtgtgaatctcacaatgcgtcgtagatgtcgcgtgttggaagggagcaggaggaaggactgatactggcaaatcagtagagtgaggtgatccttagcaacgtgccaggacacttcctgtgtgcctgcagttgtcagggaccatttgggatcccgaatctcattctctaaaactgctttcttgaaacatgttacttccttagtataatcaatgtatactcccttactggcctgaaacgttgtatagctacttattcagatactgaagaccaacggactgaaaaaaagaacaaacattagctattttatgctgcaagaaccaggacacacaattcgccaatcatcccaccatataaccttcgattgtgcttctcaactccaccccataatttctcccagagaccatctatcaccttttccccaaagaagaaacaaaaccagttgcaccttaaaccatggatattttttcctcaggggctttaaatagtttcctatgcaacgtgtcttgtagcacaaataaaattctacaaaagttgcagtaaattttatttggatattttaacctgttaagtgtctgtctgctctccgtacccaaccacactttaaataaaacaaacatgaaacctaaa

SEQ ID NO: 79753 - DNA, 1463 bp, Homo Sapiens
tgtacgaggctgggtggtgaatcggcacgaggaggagacggcccacggcgcccgcgggctggggcggtcgcttcttccttctccgtggcctacgagggtccccagcctgggtaaagatggccccatggcccccgaagggcctagtcccagctgtgctctggggcctcagcctcttcctcaacctcccaggacctatctggctccagccctctccacctccccagtcttctcccccgcctcagccccatccgtgtcatacctgccggggactggttgacagctttaacaagggcctggagagaaccatccgggacaactttggaggtggaaacactgcctgggaggaagagaatttgtccaaatacaaagacagtgagacccgcctggtagaggtgctggagggtgtgtgcagcaagtcagacttcgagtgccaccgcctgctggagctgagtgaggagctggtggagagctggtggtttcacaagcagcaggaggccccggacctcttccagtggctgtgctcagattccctgaagctctgctgccccgcaggcaccttcgggccctcctgccttccctgtcctgggggaacagagaggccctgcggtggctacgggcagtgtgaaggagaagggacacgagggggcagcgggcactgtgactgccaagccggctacgggggtgaggcctgtggccagtgtggccttggctactttgaggcagaacgcaacgccagccatctggtatgttcggctatgtttggaccctgttgcccgatgctcaggacctgaggaatcaaactgtttgcaatgcaagaagggctgggccctgcatcatctcaagtgtgtagacattgatgagtgtggcacagagggagccaactgtggagctgaccaattctgcgtgaacactgagggctcctatgagtgccgagactgtgccaaggcctgcctaggctgcatgggggcagggccaggtcgctgtaagaagtgtagccctggctatcagcaggtgggctccaagtgtctcggtgagtctcctgctgatgggacacaggcacctgggagtgcctcacccagcatgaatggtgaagaggctggaatatgggcaggtgggggaaggaagggtggaatgttgccttacagagcagcccaggtacccaggcccgggcagacaaggcccctggggtaaaaagtagccctgaaggtggataccatgagctctgcacctggcggggactggcaggcttcacaatgtgtgaatttcaaaagtttttccttaatggtggctgctagagctttggcccctgcttaggattaggtggtcctcacaggggtggggccatcacagctccctcctgccagctgcatgctgccagttcctgttctgtgttcaccacatccccacaccccattgccacttatttattcatctcaggaaataaagaaaggtcttggaaagtt

SEQ ID NO: 79754 - DNA, 1315 bp, Homo Sapiens
gagggtctggatccttctctgccggctcgtgggccgtgcctttgcccttctgcgaggccctgaatctgatcccttcccttcatatccggatccgggctcctccctccaagcccggggttccggacacctcccccaagacaacccctctggcctcctctccttcagtacttggaatctgatctcttctccctaattctgcggatccggcccctaatattctttatcagaccctcagacaagaggctgacttctgcccccttgtcaaggagcgaggccactttcctctccaccccatgctagcgaggataacttatttctcttctggaattgcatcttatgcgcctttccccacccatccccacagcccctgcaatacccagtttggcctcttttgcttgtaataacgcagatcccagcgccacggcaccttagaacagacctttttctttctcgcgtggggcctgactccttcagtgaaagcctctccacgccctctatctgcaggtccccagcctgggtaaagatggccccatggcccccgaagggcctagtcccagctgtgctctggggcctcagcgctcttcctcaacctcccaggacctatctggctccagccctctccacctccccagtcttctcccccgcctcagtccccatccgtgtcatacctgccggggactggttgacagctttaacaagggcctggagagaaccatccgggacaactttggaggtggaaacactgcctgggaggaagagaatttgtccaaatacaaagacagtgagacccgcctggtagaggtgctggagggtgtgtgcagcaagtcagacttcgagtgccaccgcctgctggagctgagtgaggagctggtggagagctggtggtttcacaagcagcaggaggccccggacctcttccagtggctgtgctcagattccctgaagctctgctgccccgcaggcaccttcgggccctcctgccttccctgtcctgggggaacatgagaggccctgcggtggctacgggcagtgtgacggagcaagggacacgagggggcagcgggcactgttgactgccaagccggctacgggggtgaggcctgtggccagatgtggccttggctactttgagggcagaacgcaacgccagccatctggtatgtacggcttgtttaggaccctgttgcccgatgctcaggagctgaggaatcaaactgtttggcaatgcaagaaagggctggggcctgcatcatcttcaagtgtgtaagacattcgatgagtgtggcacagatggaagcaactgtggacctgacca

SEQ ID NO: 79755 - DNA, 1423 bp, Homo Sapiens
gaggaatcacactgtttgcaagtgcaagaagggctggtcctgcatcacctcaaggctgtgtagacattgatgagtgtgtgctacagagggatgccaactgtggtagctgaccaattctgcgtgaacactgagggctcctatgagtgccgagactgtgccaaggcctgcctaggctgcatgggggcagggccagtggtcgctgtaagaagtgtagccctggctatcagcaggtgggctccaagtgtctcgatgtggatgagtgtgagacagaggtgtgtccgggagagaacaagcagtgtgaaaacaccgagggcggttatcgctgcatctgtgccgagggctacaagcagatggaaggcatctgtgtgaaggagcagatcccagagtcagcaggcttcttctcagagatgacagaagacgagttggtggtgctgcagcagatgttctttggcatcatcatctgtgcactggccacgctggctgctaagggcgacttggtgttcaccgccatcttcattggggctgtggcggccatgactggctactggttgtcagagcgcagtgaccgtgtgctggagggcttcatcaagggcagataatcgcggccaccacctgtaggacctcctcccacccacgctgcccccagagcttgggctgccctcctgctggacactcaggacagcttggtttatttttgagagtggggtaagcacccctacctgccttacagagcagcccaggtacccaggcccgggcagacaaggcccctggggtaaaaagtagccctgaaggtggataccatgagctcttcacctggcggggactggcaggcttcacaatgtgtgaatttcaaaagtttttccttaatggtggctgctagagctttggcccctgcttaggattaggtggtcctcacaggggtggggccatcacagctccctcctgccagctgcatgctgccagttcctgttctgtgttcaccacatccccacaccccattgccacttatttattcatctcaggaaataaagaaaggtcttggaaagttaaaaggcatcagtcttactacctgtcccaccacccccaccttagggaaatgtcctagaatcctgggaaattgagggcttctttgatggtgagtggagaaaagatagaggagaaggttgcccctgaagtgctgttaggagaaggaggatagaggaatcagccttaggagggttccatgccagctgtcatttggcaaaggaccctggacagatgacttttgcctctgaacttcactcttctctttcctcaaatgggcttcataatgctttccactcaggcttaacatgagaattaaatgaggtgacaaatgtgaagacctggacagtacacaacagatattcaataaaagtgtggtcgccattatgaccagagcctc

SEQ ID NO: 79756 - DNA, 632 bp, Homo Sapiens
gaatgggcgaccaaattgtgtctacaggagggggtgggctgagcatgggcacgcatgtccccagcctcctggacgagcaaagtcagtcaaagcgctggtgatccctgctccgcgtgcgtagcagtgtctgtgcctctcctgcccaggggctagagagcagtctccagtgcagggtccccatcctatctgaaaacagtggagtcagtgaccccaggtggagggacttccagttttaacaatgggttggtatgaaggccagaaggagtgaaacatgtgaactttctggcgaggagactccctcttgaatcatccatatgtagccccggggtcacttgcgaagagtctctaacagcttctgcctcactcctaagctctgaccgctaggctttcaccccagccgccggtcctgattcctgagatcccaatattgagcaccaggtttcctggaattgtgtgctgcggctgtgatgtaggtttcggtcgctggaagctgctaaaccatagctgacgccccctcctaagccagccttccttccccgcgcgggcatctgtccagggccttgtcgcgctctcagtctccttcgcagcctggccccaaccgttcaacttcaataaagcaaaactccagccac

SEQ ID NO: 79757 - DNA, 644 bp, Homo Sapiens
gaaaagtaaataaaaagtataatttcaactttcagattactaattatgtagaataaattgctctttaggtagctagaagtgtagacagatttcgcaataagggtatttcttgacattacaccagagttttaagaagctgattgaagagaaggagtttaagcccagtgagaatctagcagattttcatcataattctcccggcataaaggatgatacacagtttggcattctgatttcacttccattgagctgcctcaatgagtaaaaaagggatttaacttattttcatttcaaaatcctaaacaattcataaacaatttaggtaattgtaataaggagggatttaggatgaggaatattgcatctttttcatagattctataaactcttcaaagtgctctaaaaatactataagtttgattagcagcaaagcattagtctaatcaaaacctctctccttccgccctcatatataaacatatacacacactgtacagcaatatattctattagtctaagttaaatctgacagtttgacagttacccccagaggctgtgcaaggttacaaatactgtctacactgtatcacagttcaagaccactagcacccaagtggttaagcgagaaccaacccatccattat

SEQ ID NO: 79758 - DNA, 353 bp, Homo Sapiens
ggcacgaggaacagagagagaaagggacataggcagagaaaataccaggagacagatggcgtttgcacaggtcaggtgttggccatattgactggagaaatttaagggaagggtggaaaatgcagttggaaaataggcagaggaaacattgtggaaacccttaaatgtcagacaaagaaactgaggcttatgggcatggacactaacatttctattgtttcaaaaataattttacaacttttatacctttctcacccaagttaggacttgtgcctttggttatacaactcttaaattagagtcaactgtgctatctctgtgagtttgggttgaggactatggaagggaaaggc

SEQ ID NO: 79759 - DNA, 854 bp, Homo Sapiens
  misc_feature (337)..(356): n is a, c, g, or t
ggaacgaggggatgaaccttgaggacattatgctaagtgaaataagccagtcacaaaaagacaagtcactgtatgattccacttatatgagatactgaggaatagtcaaaaccagagagacagaaagcagaatggtggctgcgggggcctgggaggagtgggaatttacctgtttaatgggtacagtttccacttttacacagctgagaagccctatggagatggaacgcggtgacggccacacagcattatgaatgtattaacagttaacgttactgaactgtgcacttaaaaatggtgaagacagtatgttttatgagtattttacgacactttnnnnnnnnnnnnnnnnnnnnccagaacacactaagggttataggcacaaattctccttatgcccaccaccatctcagctggtagtatgacgggtgtagacaccattagaggcatggtgaatctatggggaaccacccaggaaagtcaccatccaatgtccacatccctgcttggcaattaaaacgaagacacttttcttcagcacctggtgaagatgtttagtttctagtgctttccaagatccacctcaggagaagtcatttgtccacaggaagcgtagtttccaagctgtctaccggtgaacctctgagagatgtgaattgaattcagctttagggagccaagtagaagttctcaacactttaaaatatttcggccatcaatgattctctttccttgaagatatatttgccttccgctgtgtagagacttgtacctgccttcagcattgggtctttcctgaatagtgcgacgcgtgggtcgacgatatcccgggattccggaccgtaccagcctgc

SEQ ID NO: 79760 - DNA, 657 bp, Homo Sapiens
  misc_feature (147)..(147): n is a, c, g, or t
  misc_feature (191)..(191): n is a, c, g, or t
gggatagatgtagcagccagcagctatagatcttgcaccccaaagcctgcacgctctctactgctggtatcagacagcaacagaggaggcagcagagctacaaaagcccaggattaggtgctaggaggtttgcatctggaccctcangaagaaaggaaagccattaattaccctgactggcttgcaaaggngacaccccttaaaaccaagcaaaatgctctgagaatagaacagaagagcaacatggggcatagttctggagggaggcagcagctttgccagtttcccttccctctcaccttctcactgtgtgtacagcctccaaagatactgtgcctagtcttgaagctgaagctgaacaaaactgtcctttagtgtttactgggtacatgctgggagttcatagtgttactttactcagaaactaaaagccagtaagaaggaagtaacatgaacagatgttaacatctcagccagatgtgtttacagtatgcagtattcctgtcctaaaaaacattaggctggtacaaaagtaattgcatgtttgccattacttttaataaaggcctgggttccttccctctctggcctgaaaaatgtccatgacagctattagcagattcactttactttccacccccctccataccctgtgta

SEQ ID NO: 79761 - DNA, 1075 bp, Homo Sapiens
  misc_feature (829)..(837): n is a, c, g, or t
atctggataccttgatttaatgacaccctttcttctgtacaatttcataatgtgggaatagagattagtggggattgtagtggtataccctgactttgcttcatgatatctcaaatgtttaaaacctattattccctagagaaagaaatatgttcatactaattgttgcagaggcagaagccaaatatatctcctcctccatttatgtgactatatagtaatgaaaatcctaggttgatacacttttctcaatcttggaaagattctgctaaagcagcaaatcttctaacaagttcaagagggtggggagagtgaacaagtagaataatttatattaccctggaacaattctgaatcctgtaggtatttatgtcactgtttcaattgtgttctggtttaactgtcaatatttatgcatagcagttaacgtgtgtgcatatttgtaactgtgcagtgctactgccaggtgtgactgtacaaatcatgtgctttgaatgtgcaagttttactttcttttctaacaatttaatacagtgttagaaataaataacgaatgaagacaaccaaagagcagccagacaaatgtgaactggttttgacgtgacgagaaactcatcagtaagtaaataacctcctccctggagaaggccactgaaatgcacccaggaggatgtctctactagaagggtataaaaatatatataatgtagtctttgacctaaaacctcatgattattactttgccatttatttccccctggtatctgatgttcatattagtttaatgtgccttttcagagaattcaagacactttttggaaagtagaannnnnnnnngaaaatttatgattggagaggtactacacaatttagaggttacatttcttgacaaatctgagttgaataaaaaagaactaaaaatataaacatagctaattcaagaatcaagatcgggtgaaactaaattaaaaacagccataaagtcccacattttccctaatttatttacctatgatattggcacatcttgttttacttaacatttgaaaaatacaaatatctcttcatatgcaaa

SEQ ID NO: 79762 - DNA, 1038 bp, Homo Sapiens
  misc_feature (19)..(19): n is a, c, g, or t
  misc_feature (87)..(87): n is a, c, g, or t
  misc_feature (93)..(93): n is a, c, g, or t
  misc_feature (102)..(103): n is a, c, g, or t
  misc_feature (171)..(171): n is a, c, g, or t
  misc_feature (190)..(190): n is a, c, g, or t
  misc_feature (201)..(201): n is a, c, g, or t
gaccacgtgtgatgatctntgtgtccatcacagtgacatcgggcctgactggcttcatttccgaaggagacattgatcgtacatgcnttgacnggctacacnnggcagtgcaagtcatgtgaagtacagtggacgtgcccactttgaacctccgcagcacggtacctcacntcacctcagcggggacaantatgtgccacntgtgataccactgtgatgcggtatgatcgccagggacaccctcccggtctgtcagccagccgccagtgtcagttcaccaccaatcttgctcctatgaagataacgtcaacgtcaactcagctgctggtctcttggatcaattctatgagaaacagcgactcctcatcatctcagctcctgatccttccaaccgatattataaaatgcagatctctatgctacagcaatccacctgtggactggatttgcggcatgtgaccatcattgaactggtgggacagccacctcaggaggtggggcgcatccgggagcaacagctgtcagccaacatcatcgaggagctcaggcaatttcagcgcctcactcgctcctacttcaacatggtgttgattgacaagcagggtattgaccgagaccgctacatggaacctgtcacccccgaggaaatcttcacattcattgatgactacctactgagcaatcaggagttgacccagcgtcgggagcaaagggacatatgcgagtgaacttgagccagggcatggttaaagtcaagggaaaagctcctctagttagctgaaactgggacctaataaaaggaggaaatgttttcccacagttctagggacaggactctgaggtgggtgagtttgacaaatcctgcagtgtttccaggcatccttttaggactgtgtaatagtttccctagaagctaggtagggactgaggacaggccttgggcagtgggttgggggtagaagttcttcctttcctaacccgggcccctgcccagctctccaaagtctttcagaaaagtaaatcctaaattcagtgatt

SEQ ID NO: 79763 - DNA, 1415 bp, Homo Sapiens
  misc_feature (517)..(534): n is a, c, g, or t
  misc_feature (576)..(1301): n is a, c, g, or t
aatcaaaaggcttagtcaggccccataattggtgatgactggcatactatatgcaaacttcccaatgccccttccagtggttgaaaggtcgcataccatgctgggtaaaaactttaagttttctgcaatgagacttaaactcagattcactctactccttattagttatctgatttttggaaacttaatctctttaaacctcagtttcatctctaaaatgggcataatagtttacctcatagagtttggggagaattgagtgaattaatgtgtgtgaggacactaagattcccatatagaaataggctcaatgaatagtagctgtttttatttctatgtaaagtgagtagcggtagttgatgggagctgttgaaacaggtaaacagcattctagcaatccttcgacttttgtgatagcaaaccataaaaacaattttagtggctgttttactaattaaaggacatccacaattcaatgtataacagaaaaagtaatgattaaagcttgtgaatctgnnnnnnnnnnnnnnnnnngcctacagccgcggccgctccaaccctcgtgccgaattcttnnnnnnnnnnnnnnnnnnnnnnnnnnnnnnnnnnnnnnnnnnnnnnnnnnnnnnnnnnnnnnnnnnnnnnnnnnnnnnnnnnnnnnnnnnnnnnnnnnnnnnnnnnnnnnnnnnnnnnnnnnnnnnnnnnnnnnnnnnnnnnnnnnnnnnnnnnnnnnnnnnnnnnnnnnnnnnnnnnnnnnnnnnnnnnnnnnnnnnnnnnnnnnnnnnnnnnnnnnnnnnnnnnnnnnnnnnnnnnnnnnnnnnnnnnnnnnnnnnnnnnnnnnnnnnnnnnnnnnnnnnnnnnnnnnnnnnnnnnnnnnnnnnnnnnnnnnnnnnnnnnnnnnnnnnnnnnnnnnnnnnnnnnnnnnnnnnnnnnnnnnnnnnnnnnnnnnnnnnnnnnnnnnnnnnnnnnnnnnnnnnnnnnnnnnnnnnnnnnnnnnnnnnnnnnnnnnnnnnnnnnnnnnnnnnnnnnnnnnnnnnnnnnnnnnnnnnnnnnnnnnnnnnnnnnnnnnnnnnnnnnnnnnnnnnnnnnnnnnnnnnnnnnnnnnnnnnnnnnnnnnnnnnnnnnnnnnnnnnnnnnnnnnnnnnnnnnnnnnnnnnnnnnnnnnnnnnnnnnnnnnnnnnnnnnnnnnnnnnnnnnnnnnnnnnnnnnnnnnnnnnnnnnnnnnnnnnnnnnnnnnnnnnnnnnnnnnnnnnnnnnnnnnnnnnnnnnnnnnnnnnnnnnnnnnnnnnnnnnnnnnnnnngacgctgggcttatccggtactatcgtctgagtcacccggtagaacacctacgccactggagatcctggtacagattatcaaggaggagtatgcgggcacaaatctgagtgtgg

SEQ ID NO: 79764 - DNA, 752 bp, Homo Sapiens
ggcacgaggactggtcattgaaaggtttttatgtacgcattttaaacttgttcgttaaaaatttggtcctttttccaggtgaggcccagttagaataatgtgtcccggcacttttaggcacagcaaggatgaattcaatatccccttttcacttagcaacaatgtgttacttctaccctaataggaattgggaaagcaaagttgtatgagaaacagactctgctgataaagtactcatagtccagaccagagaaatataaatggaaataggttatatttcaatagtgattggttcatctaaaagtctctgctgtaaaggaaataaagcatagaggtttgagcatggactttggagttggaccaatctgtgactgattcttcgttctgctacttgcttccaatgtgaccttgtacaagtttcttgacattctctgagcctcagtttctctactggttgaataatccttgataggattgcagtggaaaattaaatgaaataatgttagcaaaggtcccaacataatatttgacttggaattgaatgcccatggtaaccagcatcattttccttcatgtgatgtcttcttatgcctttgaaagaaagttactttatcaaatgtataaataaagatctgtttataggtgatctttttaatttagaagaaattttgagacacaaataaaaaaagaaattttttattatgtggttcaatagattgtttaaagcatggcagtaaagttttaattatgcc

SEQ ID NO: 79765 - DNA, 794 bp, Homo Sapiens
acaccgacattatttaagttttgaaggtattggttttgggactccaactcaacgagagaagcattataggcaatttagggcagaccgtgctgctgaacaagtgatggaatatcaaaagcagaaactacaaagccagtattttcctgatagtgtaattgttaaaaatataagacagagcaaacagcaaaagataacgcaagctatagaacgtttagtggaggacctcattcaagaatccatggcaaaaggagactttgacaatctcagtgggaaaggaaaacctctgaaaaagttttctgactgttcttacattgatcccatgactcacaacctgaaccgaatactgatcgataatggataccaaccagaatggatccttaagcaaaaggaaataagcgatactattgagcaactcagagaggcaattttagtgtctaggaaaaaacttgggaatccaatgacaccaactgaaaagaaacagtggaaccatgtttgtgagcagtttcaagaaaacatcagaaaattaaacaagcgaattaatgattttaatttaattgttcccatcctgaccaggcaaaaagtccattttgatgctcagaaagaaattgtcagagcccagaaaatatacgagacccttataaaaacaaaagaagtcacagatagaaacccaaataaccttgatcaaggagaaggagagaaaacacctgaaatcaagaaaggttttttaaactggatgaatctgtggaaatttattaaaatacgatcattttgatgtttactatcataaatcaaaa

SEQ ID NO: 79766 - DNA, 926 bp, Homo Sapiens
  misc_feature (736)..(745): n is a, c, g, or t
ttccccacagtccaaatcttttaattccttctccatttatatcagggtttcccagactcagcactgttggcattttgggtggggtaattctttcctgtggacggctgtcctgtgcattttaggatagttggcagcatccctggcctccaccccctagatgccagcagcatgcccacctcaatcaagacagtcaaaaatgcctccagactttaccaaatgtcccttggggggacaaaaccacccccgttgagaactactgttttatatttaaagtcaagtggctgtttagccatttgctgcctacatgtcagataatcctaaaatggaattgggggctgaataaaacagagggtaccaagttgagtgagcccatcagcctctgtgtgggacactcatcagtgagctccagaaatggaattcttcaatatcgttgatgagtcagcagccagaaactagtcatgaacccactgtctctggaaatggtgaatttttggtgcagtgatgttcacagctccatgaccccttagggcatggttatgaattgtgatgttcactactcttttgagcctcaggggggagtccttgtacagacaaattcaaaaggctcagtgggaattttaaattcttatcagatgcaacattttctaaatgagctctccttataccacaaaacttcacgttttcaaaatcaatctgactttgaggaatcctctagagatttactgttaacataaannnnnnnnnncagatttgtaactctgtcacctctgttgaatgaattctgacttaatataaccataaaagcgggggcccacagggaatgattgaataacctggcgtcttggaattcacactatttagcctgcaatgtcacatagcttgacctctgaatgaaacaggtactgagtaaacaagatatggattgc

SEQ ID NO: 79767 - DNA, 777 bp, Homo Sapiens
gtaattgaggtgaaattcacaaaacataaaatgagtcatttaaaatagacaatccggtggcatttagtacattcccaaagctgtacaaccatcacctctgtctagtttcaaaatgttttcatcttccctaaaggagattccataacttactaggcagtcactccccatttccccttcctcccgcccctggcaatcactaatctgctttgcctcttctggacatttcacataaatgtaaccatatcatatgtgcccttttgtgtctggcctctttcacttggcatactgtttctgtggttccttcacactgtagcatatataagttgtacttcattcccttttctggctgagtgatattacgtagggtggatagaccatattttgtttatccattcatttgttcacggacatgtgggttgtttccaccttttggctaccgtgaacaatgttgccatgagcattcatatacaagtagttgtctgaatacctgttttcagttctaaatacctgttttcagtgtaaatacctaggagaggcattgctgggtcacactgcaattctaggttcagatttttgaggatttgcgtaagttcctccatctgtacctgctgcattttccccagggttatttgtgggcaggaaccacacctcagtcaccgtcatattaaacccaggattcagcatgtgccggccacgtagcaggtaggcatcaccatgaatgataatatagagggcttactgtgtaccaggtgctattctatgcactttacgtgtatg

SEQ ID NO: 79768 - DNA, 696 bp, Homo Sapiens
  misc_feature (420)..(430): n is a, c, g, or t
  misc_feature (628)..(628): n is a, c, g, or t
gcagggggaaccaggagaccctacagtagggataatggggaaaggaacaaaaaattgagtcaggttgcgtttattgatacgggcccactaagcagaggttctggacctcgtgctaccactgctggggtttgactggttggttggtgagctacaacacagaccaaaaagtgacctacacaaagtgaggctgaaatgccaggcctgcctctctgcgtggcagaggatgggactcaaaggcttggggaggttggagtgtcagagtggatttatcttttgagacctactcacccaaccctggagaggagagaggacacacctcttaccacccccacgagaaataaatttgtgaggggaacactcctccttcctgaacaaaaaacccacagaccccgaacacgccaccccacaagatcagccgannnnnnnnnnnttccactaaaccatgaataacaccttacctgatcacccccgtcgcgaaccgcagggtgagcggcggggcacacagactgccggaaagaacacacaaaaaaatagggcgggagcaccccgcggccccgcaaaaaacttttaaaaacacctcttctgggcggccggccgccccccacagagacaaagccacaacaggggntcacacgtgttttccccaaaagaaaaaccgccccacaagacaccaagcggttgggtctctcctccccc

SEQ ID NO: 79769 - DNA, 744 bp, Homo Sapiens
  misc_feature (631)..(646): n is a, c, g, or t
gtatttggctccccatttttgacaaaagggctcagtgcagggaggtggaggcctctgaggtttgaagggctctgtgagttagagttgtcacatgttctcctggttcttgaatttgcagcaggtcctgaaaaggaaggctctgctggccccgtgccttcctgaccttctctctccttccctcccctctcttttcttgccaagtttgctttggtttctgagcagcccagagaggaggagggttcgtccccagggagagcccagggctggagtccccaatccctgtgctatgggcacaaagagacttcagctcttcctgttgccttggctttttcctgagcaaaaacacaacaaacaaaaaggccagagaagagcacagactctgtccctctcacaactctccagaagagaccccctgattcttcacaccaccggatgccactccagccagcaggattgctacacacaccctctgttctcagaagtcatctgcctgggcagccgcctctcagattcctgtcttcgtttcagacacttttctctgaagcatgcccatgtccaccagccaacgtgcccccgtgttcccccccatcagccaagtgattggggctgaaccagactttaaaagagaggnnnnnnnnnnnnnnnnggaaacatgaataaattggaatccaagtggtgttggggcttttgtttttattttgtaaaggtgatgacttcttataaactcaatttttcagatgaaaa

SEQ ID NO: 79770 - DNA, 1052 bp, Homo Sapiens
  misc_feature (49)..(50): n is a, c, g, or t
  misc_feature (75)..(75): n is a, c, g, or t
  misc_feature (111)..(253): n is a, c, g, or t
  misc_feature (255)..(255): n is a, c, g, or t
  misc_feature (261)..(261): n is a, c, g, or t
  misc_feature (270)..(271): n is a, c, g, or t
  misc_feature (796)..(844): n is a, c, g, or t
cggagagcggaagacgcccatacgcaaaccgcctctccccgcgcgtgcnngatcataatgcagctgcacgacagnttccgatggaaagcggcagtgacgcaacgcagtaannnnnnnnnnnnnnnnnnnnnnnnnnnnnnnnnnnnnnnnnnnnnnnnnnnnnnnnnnnnnnnnnnnnnnnnnnnnnnnnnnnnnnnnnnnnnnnnnnnnnnnnnnnnnnnnnnnnnnnnnnnnnnnnnnnnnnnnnnnnnnntntggccntcgagccanngaatcgggcacgaggggcagcaaacagtagtcagtcccttcttggctctgctgacactcgagcccacattccgtcacctgctcagaatcatgcaggtctccactgctgcccttgctgtcctcctctgcaccatggctctctgcaaccagttctctgcatcacttgctgctgacacgccgaccgcctgctgcttcagctacacctcccggcagattccacagaatttcatagctgactactttgagacgagcagccagtgctccaagcccggtgtcatcttcctaaccaagcgaagccggcaggtctgtgctgaccccagtgaggagtgggtccagaaatatgtcagcgacctggagctgagtgcctgaggggtccagaagcttcgaggcccagcgacctcggtgggcccagtggggaggagcaggagcctgagccttgggaacatgcgtgtgacctccacagctacctcttctatggactggttgttgccaaacagccacactgtgggactcttcttaacttaannnnnnnnnnnnnnnnnnnnnnnnnnnnnnnnnnnnnnnnnnnnnnnnnacagtgtgtttgtgattgtttgctctgagagttcccctgtcccctcccccttccctcacaccgcgtctggtgacaaccgagtggctgtcatcagcctgtgtaggcagtcatggcaccaaagccaccagactgacaaatgtgtatcggatgcttttgttcagggctgtgatcggcctggggaaataataaagatgctcttttaaaaggt

SEQ ID NO: 79771 - DNA, 885 bp, Homo Sapiens
gggaggttactggaacagcaggcgtcggcgttcagcagcactgtggagaaaggaagagaatgagcccgagtcacagctcagaagaaaagcccagcagcttctggatccccgaccagttgaggaagcaggcttgctcaagaccaagtgactgcaaggcatttgggcatttttgcagagaaatgtctctttgtttctgtctatatccctcggttcccctggactcttcatagtgggttctctgtttctctatgtgatccagatacctgaatggactgttctcttagctcagttctcttcagggaattttgtctggttcaagaagtcataccccagcccaagagaagccttggacatctctcataagacatccaagggacagagctcctgggagacctagagtgagctggagagtgaacaacagaccccactgggaagtaagcagccctggattctgcctcttgcaaactgattcgtttcgaaccctgtttttctatctgtaaaagggactgtaactcccctgcccctgcctagattctcatacctggagactaggagggctaagaccccttctagagataaaaataaaagtcgtaaagaaaaagaccaagatgtttggcagccctttaagaacttccttcttttctcttcggggctctcaggccacaaaaaaagactgatgtggtctaaccatggccagagagtggtgatacccacaacaacaacacagactcacgtgatgcagagaggacctggttgcagagagccatggtgcagaggaggacagcaagggcagcagtggagacctgcatgattcggagcaggtgacggaatgtgggctcgagtgtcagcagagccaagaaaggactgaccactctctgctgcccg

SEQ ID NO: 79772 - DNA, 546 bp, Homo Sapiens
  misc_feature (85)..(129): n is a, c, g, or t
ccactcggtttcaccagacacactgtgagggaaggtggagggacagggggaactctcagagcaaacaatcacaaacacactgtgnnnnnnnnnnnnnnnnnnnnnnnnnnnnnnnnnnnnnnnnnnnnnaatttaagttaaaaagagtcccaaagtgtggctgtttggcaataaccagtccatagaagaggtagctgtggaggtcacacgcatgttcccaaggctcaggctcctgctcctccccactgggcccactgaggtcgctgggcctcgaagcttctggacccctcaggcactcggctccaggtcactgacgtatttctggacccactcctcactggggtcagcacagacctgccggcctctcttggttaggaagatgacactgggcttggagcactggctgctcgtctcaaagtagtcagctatgaaattctgtggaatctgtcgggaggtgtagctgaagcagcaggcggtcggcgtgtcagcagcaactggagactaggagggctaagaccccttctagagataaaaataaaagttgtg

SEQ ID NO: 79773 - DNA, 654 bp, Homo Sapiens
atgtaggcccttgttcagtcattttctctaaggccttggaagcaaacatcttctggcatatggcttgttaatgttgtgtttacactaactgccaaaatgtgcctgttgtaagtttggttaaaacttttatcttagtattgaaaatatatagcaagttttaagtcattactgagttacttgttacccttacagaattaagaaaaatagcacagtatgacattttaaaattcatgtacaggtgcattctagttacatgaacatgctagttaaataaaagtcacaattaagtcattatgactcagagtactttataataaatcagatgccctgaggctctgttgaggaagtagaatcccaatgggactccagacagtaaatctttttcgctgttttcagctctgtcacatgctcagtttgtgacccagggaaaagactattgctttgccatgcctgttttcctaaataaaacagttgctggcatttgcacatccacaacgtgttgattaacaaagggattggtggagataaacagatgccaaacctgacctatttcttaaactttatggaataaactaaatttaggatttctcatcattcatatatgatgccataagggagaagagtttatttggggaaaataaaagaaatttcccc

SEQ ID NO: 79774 - DNA, 1599 bp, Homo Sapiens
gtgctctgttgcaagctgattcctagattaatggcctcccagcagatttgaaaggaaacctgaagacttcttattttgctgtgcttctgcttcctggtcttgtgtaagtcccaattcactctcaatttgatccagctctgactggtcaagtagttcaaagtcatcaccttcttcagtgtctgtgtcctcttctgggatgggggcagcctgagaaagtgcttgctgcacaccctctaactggtctttgatagctgcagtcactgcagctgtgataacatccccagccaggttgctcatcaggtgaaaggtttggtcactgttcagaggaagggtgagaccagctgctgattgcgtctctttgcttggtctgtgaccactgtccaactgttccttctttctcttgagctcagtgggcaaaccaaggcttaattcatcttcatcatttgttcccatgccattttctagagatggaaaatctgaaagatctctagagaaaacttcctcactgggtcggtcaagatcatcagaagtgtctgtctgtggagtgtatccttctgaaaggttgaaggtcccattatcagtccaggatacctctgagacgtctgtgtcagacacagataactctttggcagcaaccgtgaggctaatcttaggacaaagagctgaaaagtctaattcactgtcatctttgtgacttttttctttatctgcttcagatctctcacgtttcttctgattaatatattctccaattccaaaatccagtttcagcagaactgacttaattttgctgtaaattttttgtccaatatcattacatttaaacaatggacacaaaaatgcacacagtaacagtagatagctgagtataaccccaggaatgtaacttcccaagatcgtaaaaaatgtgcacacactacagaccaggagacaaaacttgccagggctctgctgtttaaaaagagacatttcttgaagaaatatgctgaaattcatccatgattctgcaatacagtggctgagcctgggtctttcatctggtttggaattgataacttcccagctttcactgaggcttctccacaactgtgcacctcttgttctagacaaaaccatatcctttattatttgcataataacacgcccaagtatcatgacggaaatcaggtgatatactctccatggagtcaatgcaaggaaccagaacagcaggttggcagcgacgaagccgagcaggctccgcagcggcctcttccagctcagcagctcgtcggcgcggcagcccagccacagcaccggctccccgagcagccaggttaccgcggccaccgcacggcccgcggcctccatccacctgcaaccccgcagccctccagccgccacacagcttccatgcgcttcctcctcctgctgctgccgctctgcgggggatgcctggggcgatggcggcgacggcggcgccatgcatcctcggcggcaggagccgggcatccctcctacggcgtgctccggaaggcgccgggctcgccatcttcagctgtgcctcgtgccgaattcgccacccaggcctcgctaccttagaaccgtatagttactggc

SEQ ID NO: 79775 - DNA, 1110 bp, Homo Sapiens
  misc_feature (884)..(897): n is a, c, g, or t
tatgctgaagtacaaatttaataaagcctttgatcacatctcaatccataagttagctacaaaaacaaaaaatcctacaactttttagagccatcaagagccatcaaggtgtcagtgaacaccagttacaaaaggagattcagtgtttcagatagtgcaatatttccagctgctgaaaagaatttaaatgaaattacaaactacccctccttgtcaaaaatccacatgaagttgatattggtgcttataaatcactctctcccagtccctcactggttccaaccttcaggtgataaaaattaggatgggatccatcttccctgtgctgacagtctggggtccccgcatgtatgcacgaacccgcccagcgtgcgcacacacgttcagaagaaatcttcaaaggaaccgagcgtttggagaaagtggcaagtccacagaatcagaggttacgaacacaccttcaataatattaatacattcctgtctttaaattccttgccatgtttccatcaaagtagagcacacactcttttccagaagcctgggggctcgacctgggtgggacaccaggatgcagctgaaactctgaaggactgtggagacgggtggcccctgctttgctgccactgtgacagctcttgttggaaaatgttttgcgtctttgaggagagcagaggagggactgggccttcctggcttcgaatccggcatcaaccttggtggtgcaggtgcaggagcatgaggtgggagagggtgggtggctgtcaacacagaccacaaacagggcctctgcctcagttccctggagctaaagttcttacaacaaaggtaaagaatgagggcagaggaacacaatgggttggaagagaaatgaagtttaaagnnnnnnnnnnnnnncccagagggtgtgagcctctgtcagtgcaacgggcttccgggttccctgtgctgaggaaggatgggcagcaagacccaagtttcctgggattttgcagactcaggagtgaagccaccgcccagatgggatgtgtaccttaggttagtgtttgttcctcattagataaccagtgagacaaataagcagggtcaaaggcaaccgcatcacccgtt

SEQ ID NO: 79776 - DNA, 1084 bp, Homo Sapiens
  misc_feature (46)..(80): n is a, c, g, or t
  misc_feature (1039)..(1039): n is a, c, g, or t
actgcactgcactccagccggggtgacagagcgaacctctgtctcnnnnnnnnnnnnnnnnnnnnnnnnnnnnnnnnnnnggcagaagccctggattcaaatccgccacacattcagtttctttatctgtaaaatggagaccaccccccgccacgctgaacggtgattctgtgactggtaagagatgctacatttttggtgcttgttcaggtggaggaaagatgatagttaacactcaggtaataagtattttgaaggcagtataatataccttcttaaagagtatacctactcaaatgttggtaaatgttgacatgattgaatctaaatggcaaagagtattttagaaaaacattaagtccctgcagataaatgacagtgttgatttggatgcttaattacattcagacatgaactgttggatgtatccgaaatgttaaaagctttttctcaacatttccaaaagtctttccaagaaatcaatgttatgttttgttccagaagcaaatttgcatttgtgatctgtttctaaaaatggtacaagttagctctgtttagaaagtaaaaatatctgatgttagattggaagtatctcttcctggggaatccagaaagataagcatagcatattgtcttactgcaatagataagttgcttattgagaagtctggttgttattctatatggtaacaatacagttgatgtatattttatgatagatcctttatattttcctcatgactttagaagggggaagggggagaaaattatgatgaccagactagttaaagagcattgaaagtccacagtactgtagctaaagtagaagttgggttgtgatagactttacattatatcaactaataagcagatactgtacagtattgctcaccattttatcatacttttgcatatgaactactccattgccttttatagatgttttatagctgatcttgccagttttcctggtaactttttttatctctttttctttcgtctttggagagggagtcctcgcctgtgaacccaggtttgnagtgcagtgccgcgatctcggtcaatgaacctttgcctccaggat

SEQ ID NO: 79777 - DNA, 887 bp, Homo Sapiens
ctgattcgccctcgatttaagagggccgcgtagcgagtaccagccgtccgctacctctaggcataggtgtcgattactgctatgcaatccttagccggatgctagtgataaataactccagctaaaagtgtaatggtgtcttatctccaccctcatttcctactttgcttaccctcatcctcagacagatgcctcttgctttaaaagttggatttaacgacgtgttgtagggttcttggtctgtgtgaaggcagagaccagagagaaggaagtgagcccactgctctcctgggagcaatgtgggtgagtccaccagaggccctgctgtgtgtggccaataaattttagtcttccccagccctcgaggcagtgtgtgtggatgtatgcgtgtggatatttatatatgtaccctgcactcatgaatgtatgaactggaggaagttactacagtggaagggttcttaataacaaggtctacctagcatgaagtatttaacattctcccatcccttaaaaaatatacatttttataaaatgaaaaccataataaatgttttgaatattaaaaaaaataataacctacagaggaaaattaatggagacagctatttgccttgtactttttccacaattgttgctgctagttgtacacatctctagttcagctcttgcccacgggacactcatcaattaggttttatttttatgtctttcctctacccccagaaacaagcctgttaattttttttccttctcctctggcgactgtgtgatgaatcctttcttgcgtgatcaggttgcggatagacttgtaagggtgtttgctgcatacagtgtaagcattgtgaccgccaataaacttcaatggtttctactgaaaaaaaaaa

SEQ ID NO: 79778 - DNA, 1249 bp, Homo Sapiens
  misc_feature (369)..(429): n is a, c, g, or t
cgttccccccccgcgggggagggaaccacgggcccaaaaaggggttggaccccacacggcgaggccggtacaacccccgcaagcgccccaacggcacacccaaataggggaaggaaagatcccggggacaaggaacaaaagatgggacaaagaacagcagactggccaagaacgtgtcgcaactgcgaacacggaaagatgttaaattaaaaagtgcctgttcaaatggtacctgaaaacaatatctaaaaaataggtctgtagtcatcttaaaaataaaaggtcacttctcagataagaggagtgacagatattctcagataccaacacttcaggtatctttgatgtaaatttgaaaaatgcctggtnnnnnnnnnnnnnnnnnnnnnnnnnnnnnnnnnnnnnnnnnnnnnnnnnnnnnnnnnnnnncagagtacaacaggaaaggcaagaaaactgggaggaacacattttttaagcccatgcttatctatcccagcagccaaacaaagcagatccacaaaggaaaaaaatgcagttcttttctaagaacattctgaaaatcaacttcaaactcaaaacataagaaactgcaatctaagaacaactaccacaatgctcactggacttaaaaatgacgactgagaccgggtactcaaaatgggtcaacgttcttcagcggtcattcttaggcattatctgacagaatactatgatcaggccttacccaccaagtggaagctaaagtgcctctattacttggtatggacctgctctaggagcagacaaaatcactttgctttcttgaagtacaagaggactctgccagcaacgagatgcaagcagggaggagtggcagaagaagagcaaaactggttaccaagggctctcttctgatgtacagagttaaaaatatctgcacaaatgcactaagtaaaagaatgggaagatgaactataataccaaagacagaagacattcctcccagaggaaagaaaggaagtggacctcaaaacagtgtcacagggtaacgctaccagagttgcacaagctgtgctctgtcccgagggacgaatacctcaaggtaaaagggaaagcagctctctttttatcatttccccctgctggttttaaagaccccaagcccagactcttgcaacactgaaccataggtgggatacagggaggagagacagagggtaaggaatatgaatggtgttaggcccaccaagctctgtatcccttcccc

SEQ ID NO: 79779 - DNA, 1134 bp, Homo Sapiens
  misc_feature (851)..(851): n is a, c, g, or t
ggttagctaagcaatggaattctttattaataactgacaatggaatagtgctccaaaagtcatggctaaaaattctcttaaacctacctgtaactttgggtcaaaatatacaacatatccgggttgtgtaaaatgtcgagcggctaaattagagggggacataacggaagtgattttccttcggctggaaaaaaatccccagagtcagacctagttttcagaagcattaagatcaaaaagggtttgttctaaagcatggcattccacagcaacatttattctacttgtccgttttaacactttttcaaaaacccaggactaaggacatggaggttgatgtgtatgatacacacatacagacttacccacttacagataggcccatatacttacaaacatttacatataaaaaaaaggtgaaaacagtacatttttatgcacgctccattaaaccctgtcatttttttaaaacttgtaagtgaaacacagtttaaatcaatatcagattcatgttgaaaaacaaactgctgtattcctcccactcctttcacatgggcacacagaaccttctcagtatttctgtcattatgtaatgcacattgcacatccctaaaaaacaccaaaaacgaatagtgatttgtaccatgacacactcaatggggagattaaattctacttggaagtcacatcactacacagtctaatagtatggagaatacaactagaagtatgtccagtgtggaaaatagaagcttagagtatgacagtattttttgacctgtttacaaagcattaagaccaaaatgaaataaatgagttgctattagctgctgagatttttcttgagattnacagtcattttcttacataaatataccactagcctctgcgtgataggctgccaaaacaaatatatcctactgatttggcaaatgtgtcatgacaaaaattccaatgtataatccccattcattacatagatggttcagaagattctgaattgtagccttatcatctaaaatccttacagaagatttattaagcacacttaagtgatgttacatagatacacatttcagaaaaagccctaataaccaccacttttccccaaatgaggccatcaagtcaggcacc

SEQ ID NO: 79780 - DNA, 729 bp, Homo Sapiens
  misc_feature (105)..(121): n is a, c, g, or t
cacattatactttctttaattacatcataaagggggagtagaacatacaagaaagagataatagttacataacaatttactttatatatttatatataaaaaacnnnnnnnnnnnnnnnnnagtccaaagatttttaaagcaaaaggaatcctctactgccacctcggattttatttattttaaataatccccctccccccatcctcaagcgccaaaagtactgggtggaaacagtcacttggagagctaatggaacctggtgctaagtcaccccgtaggcaactgtgtcggctccagagattggctaagcatttggagcaggcctagtggagaaacaagcaagcagcagctctcacacactgcagcactccagggtaggccctaaggcttgggaaggagggaatcagacccttcaggtcaaccacctctgcattttaccccctcaggggagtgagtgggggtgcggggtgcagggatgaaacagagcctggtatgaagataaaaatgtctccaacagcaccatttacccatccatctctgtccctgagcagagtctgacaggcatgggtagtcctcacagttctctgagctctgcacaggccacattattcggatctgtactctcagggtcacgggaaggtgggcaaaggtgagcagagcagctgagaagtgcacatggtaggttacctggaaacaattcctaagaggaaaaaggaggaggccagagt

SEQ ID NO: 79781 - DNA, 820 bp, Homo Sapiens
caaagtgctgggattataggtgtgagccaccatgccccacctaggcctgagaatttatttgtagccagtttttacacagaaattggggaaagttagagtttgtaggctttatggctagctttggggaaaaggggttttgatttctataacccgccttgaggaggagggattctcttttctatgtccgtccttgggggaaaacgggcctgagacacaggagggcaggagaaggctagaaggtcacttttgcttctgaggctttcattttcgggtgttattttctgagttccaacaggctgcatttgtggtcactcagctagtaagtagtaaaaacaaaattagaagcctcgtctcttccttccaccgaggggcctggctactttgaagctttctgccatgagtagtaactgtgatcctgtctgccacgccagtgccattggatggcactccgttcctctcttggcctcctgctccgggctccagcaccaagcactttgtcttcatgtgcccagttgcttggctgctccaccaggctctgaaggcacaaacccctgagacggtgtccaagcccagggccctgtagactctgcggatcccgagaccagcgccactcatcctgcagcactggaattccagccctgaagccctgtgatgactccccttagctgtggtcagggccctcagcccagctgggcagcagcaggatgcagatccggttattaagagccgagctggtggttcccctctggcaattcatcaggcagtggcccctcggttgttgctgtaatgctggtctcctgtctgtgtgcggcactgcaga

SEQ ID NO: 79782 - DNA, 893 bp, Homo Sapiens
  misc_feature (302)..(303): n is a, c, g, or t
  misc_feature (312)..(312): n is a, c, g, or t
  misc_feature (314)..(314): n is a, c, g, or t
  misc_feature (320)..(321): n is a, c, g, or t
  misc_feature (325)..(325): n is a, c, g, or t
  misc_feature (327)..(327): n is a, c, g, or t
  misc_feature (330)..(330): n is a, c, g, or t
  misc_feature (334)..(334): n is a, c, g, or t
  misc_feature (338)..(338): n is a, c, g, or t
cggcaagatggcggacgtggcggcgtgggtgaagccgcagctgttggagcgtctcctgcatctgtccctggcctaaacccgacgctaggctggagggagcgactgcgggccgggctggcggggactggggcctcgttgtggttcgtggcggggctggggctgctttacgccctgaggatccctttgaggctgtgtgagaatttggcagcggtgactgtatttttaaattcattgacacccaaattctatgtggcacttacagggacctcttcattgatatcaggactaaataattttatatnnttggaaatntnggtggnntacntntcnccanttanaagcacatggcacatcttttattgagcaagtatctgtaagccatttgcaaccactgatgggaggaacagagagcagcatttcagaaccaggttctccttcgaggaacagcacgaaaatgaaaccagcagacagaatctgtcacgaactgtaaggtatggagaaaccctctaaatcttttcagaggagcagaatataggagatacacttgggtgactggtaaagagccacttacatactatgacatgaacctgtcagctcaggaccatcagacctttttcacctgtgacacagatatcctacgtccttcagacacagttattgcagaaggctgcgagggaaacgaaatcctccagctcgaatcaaagcagcctatcaagctttagaattaaacaatgactgtgccactggcatatgttctactggctgaggaagaaagcaacaactattgtagatgctgaaaggtttttaaacaggcactcaggcggagaaacaatttataggcaggtaacagcagtgccagcccaaagtctcacatgagctcatgaggaaaatac

SEQ ID NO: 79783 - DNA, 616 bp, Homo Sapiens
  misc_feature (27)..(27): n is a, c, g, or t
ttgacacgcagattctatgtggcactnacagggacgtcttcattgatatcaggactaatatatatatgtgaatggtggtacttccataagcatggcacatcttttattgagcaagtatctgtaagccatttgcaaccactgatgggaggaacagagagcagcatttcagaaccaggttctccttcgaggaacagagaaaatgaaaccagcagacagaatttgtcaggtgactacttttctaatgtgttttcagagctgtgtatttaagattgagtttggctctgggagatagaaaactcaaaacagcagagtgctgtggtgtgcatgtttgtgtttcccccaaaattctaatcaccaatgtgatgttacgaggtagggtctttgggaggtgatcaggtcatgagggcagtgccctcagggatgtgatgaatgcccttatgagagaccccagagagctgcttgccacttctaccgtgggaggacaccacgagaaggcgccgtctgtgaaccagaaagcagaccctcaccagacaccaaatttgttggtaccttggtcatagacttcccagcctccagaactgttaaaaataaatttatactgtttataatctaaaaa

SEQ ID NO: 79784 - DNA, 572 bp, Homo Sapiens
tttttccaaataatgagaattaatagatgaaaaatgaaccttaatcaggcctacaaggcctacagaaatctttggacccactttctcaaaaaccagtgggtcttgctcgctgggcaaggcaaatgttaccattaccagtaagcttgtgatatgtataaaacacacacacacaaagaaactagagggggatgtcaaacacatatcatagagagcttccctggattgtgtttgagccatttcccacccaggcaatgccgaccttgggagcacagtatctgctactggacagagcgtatatgtgtgtttaatcgatagtgtgagccagagacaacaatctttcttaatctttctttatagatgcaatttgtaataataggtttagaaggcttcctgattccctgattgctctccgacctaagccaactgcaacatttaagatttagaggaacaaaatccctgcaaaaggtcacagacagtggagcgagcagccctgtaaaaatgggaagaagagaaatccgtaatagcacaggtttacagcgtctaactagaaattactcaatattcctcgttcc

SEQ ID NO: 79785 - DNA, 1090 bp, Homo Sapiens
  misc_feature (138)..(138): n is a, c, g, or t
agcttgtacactatgaaccaggtttgtacaaaaaagcaggctggtacgggtccggaattcccgggatatcgtcgacccacgcgtccggtttgggtcttgggcagaaatcaacataaaggaatatgacaagaccccagntaggtaaccctggagtgctcaggtccgagctgtggtctcttttacggcttcatgaaaggaccgtgccctcacggaggggaccacggcttggcttgtggggtcttaggtgatggctgccttctttcttcatcaccacacccagcttcttgctggcacttaggggaagagagcagcaaatgagagatttaccttttatctcccagcgagcgagatgtttccctgttcagagaggaagtaacatcacttatgcttgactggtgtttcttttgttgttgtttgtttttctttcaattggaattctgtatttaagatgttatgtcagctgacacatgggacactcctgaagaggtgactggccccccaccctgtttggcggtgagtttccgcaccaccggcctcagaagtgtccctcttgcttcgtctcttgttcgcttgctttgtaaatactttggtcccaagctgagacaattgctgtgtaaaacgtgaagagtcaatcccaaagggtgttatttgtcagaagaacttgccgtgtgccttcaccgaaggcagtcaagtctgcagttggatttttctcactggtgaatgacaagaaacagggataattttgcactgcggagatattacgggagttgtctatatgattatatatagtacctgattctttgaacatattattgaactccaaaatgaattcgacctccattcaggcttcctgaaatctctgaagttgctgaaatttgtatattattttccttttccaatgcaagatctgctggtgacgggaaatgactgtctggttttattatggtttataaattaataaatgggctatttaattctgtatataaatttacagcaagtacgtacactgggaatgaatgaagccaatcacgtttacaccaaatcagcagatccaaaagacaaacaccctatttctgaagacttgaagggc

SEQ ID NO: 79786 - DNA, 691 bp, Homo Sapiens
  misc_feature (607)..(607): n is a, c, g, or t
  misc_feature (648)..(648): n is a, c, g, or t
  misc_feature (666)..(666): n is a, c, g, or t
agttgtatgtaggacacattacctgaagtgcccttgctccctcccttccatgcagtgaacaaatatttattgagcacctactattctccaggtaatgtgtcctacatacaactaaatgaaaaattacaactcagataagagcccctaggagaagtacacgtaactactagagtgtgtaatagacagaactgacctgtcagggcggccaggctttcctaaggaagtgtgattaagccgagcaggaggaaactaggcagtggttgtggggcctggggaaggagaacattccagggagcaggaactcttgggcaaaggcctctggaggaagtgagtgttaaaggaattgaaagtaggcctgagtagcctgtgttggcagagctccagagagcaaagggaatgaacttggggtaaggccatttggagaggtgggcagggaccaggtcattcctaatgcacagtattgagtcttgcagggcaggcttgttaaggatttggtttctaaccctcccctctccagggtgaactcaagctgtcataggagtgcatggcatacagtccttgtgtgtgacctgggaatgcagattttgtttcatctgaaatctgtcanaacattgccatagatttcagaagtgaaccaccaagttccanaggttataatttcattanatgctttaaacctcgtgccgaattc

SEQ ID NO: 79787 - DNA, 1016 bp, Homo Sapiens
  misc_feature (171)..(379): n is a, c, g, or t
tcatccttcgtgctttactacagtcttctgcatctccggatctggtaccgtatacgccttgatgagtgtccgctgccgcaccgacgaccgagccagagatcatgagcgagagcgaagagcgccaatacgcaaccgcctctcaccgcgcgtggcagatccataatgcagctnnnnnnnnnnnnnnnnnnnnnnnnnnnnnnnnnnnnnnnnnnnnnnnnnnnnnnnnnnnnnnnnnnnnnnnnnnnnnnnnnnnnnnnnnnnnnnnnnnnnnnnnnnnnnnnnnnnnnnnnnnnnnnnnnnnnnnnnnnnnnnnnnnnnnnnnnnnnnnnnnnnnnnnnnnnnnnnnnnnnnnnnnnnnnnnnnnnnnnnnnnnnnnnnnaagaattcggcacgaggttttaaccacctgggagtagtagtggcttgtagatgccaggaaatggatttgtcctgagcagtcagctgagttcaattcttctgtggaggaaatcaggaaaggggaggggaaactgcctctgtcatccactttagctgccagtcagggtctaggatagggatcagagcaacatttctccaggtggagtcctcagattacctggacagaaatcaccgggaactagttatacattcagattcaggccacttctagccttcctgtagttgtgcgttggggagtgatgaggcccagaaatttcattttaaccaaagttccgcagattattctcaagcacagtgaaatttaagagtccccaggttagaggacggccctcctccgcaggaggcttctactgttcactcagaacttgcctatacccatcagggaggatgccatcgctcctgggatctctgagcacacttgtatgagggctgattctagcaaggggttcctggaaagaccctcgtctgccagcaccgtgacgaccaccaagtccaagctccctatggtcgtgtgacttctcccgatccctgagggcggtgagggggaatatcaataattaaagtctgtgggtaccaaa

SEQ ID NO: 79788 - DNA, 663 bp, Homo Sapiens
accaatgggttggggctaatcaaccttactgtgctggttccccccagtaatcccttatgcagtcagagtggacaaacctctgtgggaggctctactgcactgagatgcagctcttccgagggggctcctaagccagtgtacaactgggtgcgtcttggaacttttcctacaccttctcctggcagcatggttcaagatgaggtgtctggccagctcattctcaccaacctctccctgacctcctcgggcacctaccgctgtgtggccaccaaccagatgggcagtgcatcctgtgagctgaccctctctgtgaccgaaccctcccaaggccgagtggccggagctctgattggggtgctcctgggcgtgctgttgctgtcagttgctgcgttctgcctggtcaggttccagaaagagagggggaagaagcccaaggagacatatgggggtagtgaccttcgggaggatgccatcgctcctgggatctctgagcacacttgtatgagggctgattctagcaaggggttcctggaaagaccctcgtctgccagcaccgtgacgaccaccaagtccaagctccctatggtcgtgtgacttctcccgatccctgagggcggtgagggggaatatcaataattaaagtctgtgggtcccataaaaaaa

SEQ ID NO: 79789 - DNA, 1703 bp, Homo Sapiens
gcccgggcggctgcccttgggtgctcccttccctgcccgacacccagaccgaccttgaccgcccacctggcaggagcaggacaggacggccggacgcggccatggccgagctcccggggccctttctctgcggggccctgctaggcttcctgtgcctgagtggtgaggaggggccgggcgggaccacggcgagggctggggggcataggcctggcttccccggctcctcggacccactctgtccccgccaggccagatgaggctgccgtgggcgccagggccctaaggcgcctgaggtgaggccggagagggggtgtccaaggcccggagggcgtacgagagagacccccaagccggctgagcgagttgggcctctccgcggcacaggcctgaaccaccccaccgcagggctagtgttttcctttctctgctaaacacacacaccctcttacctggcccggttccggctcttttacccacaaagacccggcccctcccggaaacctcaggtcttgggaagggaggggttggattgacggcggagagggttgtgctctggggagggagcccccagcttccaatatagatgcccgggggtgggccctgaccctccagatcactggaatctgggttcccacctccctctggtccccggccccagggctggccgtggaggtgaaggtacccacagagccgctgagcacgcccctggggaagacagccgagctgacctgcacctacagcacgtcggtgggagacagcttcgccctggagtggagctttgtgcagcctgcgaaacccatctctgagtcccatccaatcctgtacttcaccaatggccatctgtatccaactggttctaagtcaaagcgggtcagcctgcttcagaacccccccacagtgggggtggccacactgaaactgactgacgtccacccctcagatactggaacctacctctgccaagtcaacaacccaccagatttctacaccaatgggttggggctaatcaaccttactgtgctggttccccccagtaatcccttatgcagtcagagtggacaaacctctgtgggaggctctactgcactgagatgcagctcttccgagggggctcctaagccagtgtacaactgggtgcgtcttggaacttttcctacaccttctcctggcagcatggttcaagagctgctcactgagttgaatgagtcgtggaacacttcctcttcatcctctagatgaggtgtctggccagctcattctcaccaacctctccctgacctcctcgggcacctaccgctgtgtggccaccaaccagatgggcagtgcatcctgtgagctgaccctctctgtgaccgaaccctcccaaggccgagtggccggagctctgattggggtgctcctgggcgtgctgttgctgtcagttgctgcgttctgcctggtcaggttccagaaagagagggggaagaagcccaaggagacatatgggggtagtgaccttcgggaggatgccatcgctcctgggatctctgagcacacttgtatgagggctgattctagcaaggggttcctggaaagaccctcgtctgccagcaccgtgacgaccaccaagtccaagctccctatggtcgtgtgacttctcccgatccctgagggcggtgagggggaatatcaataattaaagtctgtgggtaccaaaaaaa

SEQ ID NO: 79790 - DNA, 435 bp, Homo Sapiens
tttattttaaggattttatttctaatcaccacgtggaaatagggttaaacaaaaagacaaacatacaaaagtcacaaaggttgcagggtcttgaaaagctattacacttatggccctggaataattcttgactcctttctgagatggtaactggcagcccagttaaacgcctgttttctgtttttatttcagaaagcagaaatcacagaatctcttgcttctttgttccaggctttctggagacccagtcagatcctttcttcccttaagacaatagatgtcactggaatgctaagtgattgtttatctaaaatgcaatttaaaaaaattcttgtctttcccagacacttggcaacatgctgtgtccatggtagaagcccagcagatcctaactgttgatgggtagatagaaaacgacctaagtggacttcactt

SEQ ID NO: 79791 - DNA, 667 bp, Homo Sapiens
tttcagaagaatgaggctttaaggatatttctactgctcagcaaatgttgaagagggcacagaaaatgaaatcgaagaaactaaagaaaaaaatagattccactgtgcgtctagccttattcaaaaacaatgaaaataaagtgtctcttccaaaatcaccaaagatggtacagcccagaagagatggttactttgaaggtatagaagaagaccctatccacaaagataccactgcaaatgaaaaattagaacggaatagagaatatacataccaatggcttcacacacaggttggggttcatgaaacgactagttccagaaatatgaaatgcaatcactttttgcctgagttagatccagatgtacttaatggtggaagagttcagcttgtggtaagaaatgtgcttaaagttacagaaaaatgttgtagacactagtgctcaaataaatggcactttaagatatgtttataattaaactatgaaaatatcacaactgtatctatttgggataatatcaaaatatcatgtgttaaaataataacatgttttcttgacttgtaatacaatttaaaatgtgacattgcttaaaaatgttaattttatgtgacagatgtaaaaatattagcatcctacaactttaaaataaaattactgtggatggaaaa

SEQ ID NO: 79792 - DNA, 783 bp, Homo Sapiens
  misc_feature (62)..(76): n is a, c, g, or t
  misc_feature (548)..(557): n is a, c, g, or t
gcacgaggttcttcctggacacctgaatcaaagaccagtagaaagagtttgctaaaatctgnnnnnnnnnnnnnnntttcagaagaatggggctttaaggatatttctactgctcagcaaatgttgaagagggcacagaaaatgaaatcgaagaaactaaagaaaaaaatagatcccactgtgcgtctagccttattcaaaaacaatgaaaataaagtgtctcttccaaaatcaccaaagatggtacagcccagaagagatggttactttgaaggtatagaagaagaccctatccacaaagataccactgcaaatgaaaaattagaacggaatagagaatatacataccaatggcttcacacacaggttggggttcatgaaacgactagttccagaaatatgaaatgcaatcactttttgcctgagttagatccagatgtacttaatggtggaagagttcagcttgtggcaagacttgtaagcagagaagacacggatttagaccttttttccatgaccaatggaagtgctttgtctgtgaacagagnnnnnnnnnntcaggcacacagacactcagcaggatcttcaagtaagttgtggtttccttcaaaattaatttagaaatcacaaacgaattgatggaacctaatgccaacaagcattctttttcagatagggggtaggatgccagcaacctgaactgcccaaaaatgtgtatttaaattttttctttctttaaatatcctcttttgatataaacaaaattaaattatttctaaaatt

SEQ ID NO: 79793 - DNA, 944 bp, Homo Sapiens
  misc_feature (55)..(55): n is a, c, g, or t
  misc_feature (100)..(100): n is a, c, g, or t
  misc_feature (113)..(113): n is a, c, g, or t
  misc_feature (125)..(125): n is a, c, g, or t
  misc_feature (165)..(165): n is a, c, g, or t
  misc_feature (199)..(200): n is a, c, g, or t
  misc_feature (256)..(256): n is a, c, g, or t
  misc_feature (356)..(356): n is a, c, g, or t
  misc_feature (370)..(370): n is a, c, g, or t
  misc_feature (384)..(384): n is a, c, g, or t
  misc_feature (391)..(391): n is a, c, g, or t
  misc_feature (393)..(393): n is a, c, g, or t
  misc_feature (524)..(524): n is a, c, g, or t
  misc_feature (573)..(573): n is a, c, g, or t
  misc_feature (605)..(632): n is a, c, g, or t
cccaacactatgcggtgtggcattcaaggtgcaaccccattaccaggatgctganccaaatacaccaagataatgacccgcaccgaacaccaagacaagnaaaaaacattaanaaggcgcggaancaaccctaaacaaacccctatccaaaacgttaacggtatntcactggagtaggacgaccctttcaccagggcgnncggcccctaccaacaacccataaacgtgagtcaccgagccaacagcccacacaggnttggcacaaatagatacaggcacgaatggttttcgaaaactagccggtaacaaattcacacaggcagcacaactgacctgaccccgaatttactaaggcnacactatcgggaangcgaccctcgaggnccagaantnggcaaggcgggaaatctgaaccagccactgaggctggctgcctctgagagctgtattcacaaggaaggattttgcccagtgtcaccacaccctgccagccacatcctttgggacagacctcaaaaccttgntaagttagcagaaactctgaggtctgcccagtgagctgggaaggctttntttggcctcttccgagcccggggccggaaagnnnnnnnnnnnnnnnnnnnnnnnnnnnntggggggggtttcacagatcagtctgcagggagatgtgattcagatcagctggtggatcagctccacgctctacctgtgatgtgatccccgccaagttactcaacttccccgagcttcagttgcctaatctgtaaataagactaataaagcctagattggcgagataacgtgtggaagactctcaacacagtgtctggaacatgctgcttttaagggaaatgtgattttgattatggttgaggccatttctcaacatgtagacataaaatgcggaaacatctaagatttcaataaagcaatgttttgttagt

SEQ ID NO: 79794 - DNA, 393 bp, Homo Sapiens
agaggatgtggctggcagggtgtgaagacactgggcaaaatccttccttgtgaatacagctctcagaggcagccagcctcagtggtggattcagatcccaggctctgcagggagatgtgattcagatcagctggtggatcagctccacgctctacctgtgatgtgatccccgccaagttactcaacttccccgagcttcagttgcctaatctgtaaataagactaataaagcctagattggcgagataacgtgtggaagactctcaacacagtgtctggaacatgctgcttttaagggaaatgtgattttgattatggttgaggccatttctcaacatgtagacataaaatgcggaaacatctaagatttcaataaagcaatgttttgttagt

SEQ ID NO: 79795 - DNA, 670 bp, Homo Sapiens
  misc_feature (134)..(134): n is a, c, g, or t
agaattcggcacgaggatcacttgggctccatgttaaaaatgcaggtttctggcccctgtttatcagtctctgggaaagggctaatctgcatcttttagcaacccaccaggtgattctcaaaaagtctaaagtntgagaaccactggtagagataactgagaaaatggagaaggcagacagggaaagaacaaagccaaataaagaatggaagggaaataacttctgttatgatagggtggctgaggaaaagaaggatgcggtacatactaaggtactactttctttttctttaaatctctatgtaacaaaagttaagggcactagagaagcttaataacctaattctagtaaagttagaacattggaaagatacctacctcaaacttcacatcattatttgaaaatactcaagatgtactcccctcagagcaacagtacgagcaacatcccctatcagatgacagcatcaacaccaaattataaatgttctagcctcattcctgggtctactttgtatctcctaacctcattttttcattttactttctcatctacctgttatcctattatatttcatatgtaaccataaaccaccttattgcctttttgtaaaaaggtttatttggaatcaatcactggtacccaaataaataaaattaaaacgttaaa

SEQ ID NO: 79796 - DNA, 573 bp, Homo Sapiens
  misc_feature (512)..(512): n is a, c, g, or t
ttttaaagaacattgatggggattcactgtaaagttggcagaggctgccaaagacgaaacaactgactttaaaaatgctggaacaatgtgataaaaaataaatttgtaacaaatcttctcctttttagcccttgtcattttagccctttagtttcaactctgcattatatttagtttatatagtgtaaacttttgtttgccattaattcatctttttaggtagaagacattaaaatcacaggtttatgaagaatctctgctcattggaatgaaatgcagtcatttgaaatgagaaaggccaggatccttttttgtaccttaccctgtcttcaagagtaaaggtgaacacttacagctctcctccttgatgtcaattgtgtatgttgatcattccaaactgagaagaataaagccacattttagacatatttatagaatcaattaaagctatatgtctaaaatcgtagggcacttctgagaagaaacaccgtcttttcttttttaaaggaagngacatgtgacataaatcatgtgggggcgggacgcgagtaactgggtaatctgactgtgcct

SEQ ID NO: 79797 - DNA, 498 bp, Homo Sapiens
caaaagatattttaaactctttgtaaaacttagataatagagcctagcagttactttgtatctaattgatacattttatgttaatttaccaccatacattttattaatcaaaattgtatagcatgtgactcttttggctttcagagttctcaaaaatattattttgttgcatgtactgtatgtttagaggcaaccaattatatactcaatatggttttactgtgccttacacaaagagaaactctatacagaatgtatgtcatggggtggggtaacagagtctttactgcactgttaggtgatggcacacagagcatgtcccagaacatttctgtgcttaattacccaaccaaagagatctgaagtatgtatgtcgtactgtaatgggggtttatgcctggacaattaagtgttttatttgttttctgaaatgatgtgaacttatttttctaaacactatgctaaataaactttatatttatacataccttgcattga

SEQ ID NO: 79798 - DNA, 985 bp, Homo Sapiens
  misc_feature (66)..(66): n is a, c, g, or t
  misc_feature (86)..(86): n is a, c, g, or t
  misc_feature (171)..(434): n is a, c, g, or t
  misc_feature (727)..(749): n is a, c, g, or t
atgtctaaagtagcatctcttagcttagacatggaatcagtgacactacactccaagatgattatntggtagttactctatctctntgagatgtatagtcatttcacatgctataagactgctgagctggtaatataaaggaaagagttcattgactcagagtctgcatgnnnnnnnnnnnnnnnnnnnnnnnnnnnnnnnnnnnnnnnnnnnnnnnnnnnnnnnnnnnnnnnnnnnnnnnnnnnnnnnnnnnnnnnnnnnnnnnnnnnnnnnnnnnnnnnnnnnnnnnnnnnnnnnnnnnnnnnnnnnnnnnnnnnnnnnnnnnnnnnnnnnnnnnnnnnnnnnnnnnnnnnnnnnnnnnnnnnnnnnnnnnnnnnnnnnnnnnnnnnnnnnnnnnnnnnnnnnnnnnnnnnnnnnnnnnnnnnnnnnnnnnnagtacctacaaaattatggtgactcttcactaatttgcaaactgattatctgcaaatcttaaatagggaataaaacacaaaaatatcattatccctccagaactgaggacgcaaattggatttagaagacttagctttgacacctagatatgttttcattgatttgacctaacttgatctcagtttctcttttatagagttagttctttagatcagaggtccccaaccccaggactgcggactgccactggtctttggcctgtcaggcacccggccacacagctggagtgtgnnnnnnnnnnnnnnnnnnnnnnntctcaagaggattccaggaaatcaaaacaatgaattattgaatcaagaatttgaaagagaaaatagatgcatactgaaaaaagaattttgtttagtgagatagatgtaataatgaaggcatgttgataacgggggagctatgtatatatgaggggagggatatattggaaatctctgtatcttcctctcaatcttgctgtgatcctaaaactgctctaaaaaatattttgagaagg

SEQ ID NO: 79799 - DNA, 1303 bp, Homo Sapiens
  misc_feature (259)..(332): n is a, c, g, or t
  misc_feature (484)..(507): n is a, c, g, or t
  misc_feature (511)..(585): n is a, c, g, or t
  misc_feature (1021)..(1021): n is a, c, g, or t
ttagttcacttcctgagaaatgcaatggatgcaaaggattcttttattccctcagggttttaacctttttctgtgcttgattttctagaaactttaggattactggagcccagtggctgtgtctgtacaaattattgagtaagggaatgaagacggacaggactctgtgtgtgtgtagagggggagggaggcggctatgaaaagtctctctttttaaataacagaacatgtttaccacatcattattccttctcaaaannnnnnnnnnnnnnnnnnnnnnnnnnnnnnnnnnnnnnnnnnnnnnnnnnnnnnnnnnnnnnnnnnnnnnnnnntcatatatacatagctcccccgttatcaacatgccttcattattacatctatctcactaaacaaaattcttttttcagtatgcatctattttctctttcaaattcttgattcaataattcattgttttgatttcctggaatcctcttgagannnnnnnnnnnnnnnnnnnnnnnnatannnnnnnnnnnnnnnnnnnnnnnnnnnnnnnnnnnnnnnnnnnnnnnnnnnnnnnnnnnnnnnnnnnnnnnnnnnatctaaagaactaactccaaaatagatcaatctttggtaatgttaagtgtccatcctggatttctcagtgttctagatgcctaaaagtaagattgtcttacttttaggtaaccaatcaggcattaatttacaatgttggcatactgcaatgtggtttaggaatagtctgtgctcactctacagagaaaagaacgaggctaatattttcagtggccctttcctgaattgccagcccatgtttagaagcatgattatattttgaggaatgcttatgtgacagcatgagggctaatgcctgttgttcatttagtttatggttctcttcctacattattatgatttgcaaacatttgttagctaacatggagcgctttggcctgcttgactgcatcccttttgaaaatggggaggatttcagagccaatcaagaatcagnaactatgaatcaaggccaaaaattgcaaaaggaatgaactggagatcagttagtacatcaggcctggatgtggcctggtgttagcacagaaagactgaacccacaagccttcctgactctttgcactctttttaggtgatcactgggcccaatcaacagggcccaagggggaacagagcaaattggaaggctgctggcagtggaagctctcttagggcttttatttggtcaagagaacaaggccaggggtataaattaaaagcaaattcaaaaggtctaagt

SEQ ID NO: 79800 - DNA, 785 bp, Homo Sapiens
gggacagccgtctttctctttgcctcagccacttccttccttcgcctcaccctccccagtgcactgaagaaggtaaccgggtccagacccacgcggcgccagttctccggcgggaaggaaaaccgcgcagagaggcagcaatgaatgtggatcacgaggttaacctcttagtggaggaaattcatcgtttgggttcaaaaaatgctgatggaaagttaagcgtgaaatttggggtcctcttccgtgatgataaatgtgccaacctctttgaagcattggtaggaactcttaaagctgcaaaacgaaggaagattgtaacatatccaggagagctgcttctgcaaggtgttcatgatgatgttgacattatattactgcaagattaatgtggtttacatatctttatgtactgccattttttgtttctggtaaactggaatataaagtgaaagaacaaacatttgaacatacttaatgtatttttatagaactttgtaaacgaaaggagattcatgttttagaagtctgtccttttttatatcttgaaagaaaatctatgtatgatgctataaaataaatcctattatttttctcaggaatctggttaggaattgcaggcaatgagattttttgcggggcagggatgggaatgtttgttcataaataattagacattttctatagatatttgacattctgcgaaagcaacaagcaaactgaagaccaactcctatgagaaatattatgatgtttatgtaataaagacatgtaactgtcttaaattt

SEQ ID NO: 79801 - DNA, 1031 bp, Homo Sapiens
  misc_feature (225)..(276): n is a, c, g, or t
ctggaccggtccggaattcccgggatatcgccgcgcgctcgccgctcgcccgccagcccgcccgtggtccgtggcggcgcgctccacccggcacggggaggcgcggggcgcaccatggccgcagacacgccggggaaaccgagcgcctcgccgatggcaggagcgccggccagcgccagccggaccccagacaagccccggagcgcggccgagcaccgcaaggtnnnnnnnnnnnnnnnnnnnnnnnnnnnnnnnnnnnnnnnnnnnnnnnnnnnnactcagccggtgcccgacccgcagtcctccaagccggtcatggagaagcggcgccgagcgcgtataaacgagagcctcgctcagctcaaaaccctcatcctggacgccctcagaaaagaggtaagtcgggggcgaaggcccgagacccggagtctgggtcgcagctgacctggacctcccgcctatccccgcccccagagctcccgccactcgaagctggagaaggcggacatcctggagatgaccgtgagacacctgcggagcctgcgtcgcgtgcaggtgacggccgcgctcagcgccgaccccgccgttctgggcaagtaccgcgccggcttccacgagtgtctggcggaggtgaaccgcttcctggccggctgcgagggcgtcccggccgacgtgcgctcccgcctgctgggccacctggcagcctgcctgcgccagctgggaccctcccgccgcccggcctcgctgtccccggctgcccccgcagagggcccagcgcccgaggtctacgcgggccgcccgctgctgccatcgctcggcggccccttccctctgctcgcgccgccgctgctgccgggtctgacccgggcgctgcccgccgcccccagggcggggccgcagggcccgggtgggccctggaggccgtggctgcgctgaggctgtggccctgagactgcatcggaggcggcgccccgttctagggccgtggcctttgccgagactgtagcagagaaaacgtatttattattcca

SEQ ID NO: 79802 - DNA, 1028 bp, Homo Sapiens
  misc_feature (131)..(131): n is a, c, g, or t
  misc_feature (137)..(224): n is a, c, g, or t
  misc_feature (237)..(237): n is a, c, g, or t
  misc_feature (291)..(291): n is a, c, g, or t
  misc_feature (302)..(302): n is a, c, g, or t
  misc_feature (410)..(438): n is a, c, g, or t
cacgcctctcccgcggtgccgaatcataatgcactggccgacagttccggatgaaagcggcatggcgcacgcaataattgagtagctactcatgagcaccccagcttaacacttatgctcccgctcgtatntgtgtnnnnnnnnnnnnnnnnnnnnnnnnnnnnnnnnnnnnnnnnnnnnnnnnnnnnnnnnnnnnnnnnnnnnnnnnnnnnnnnnnnnnnnnnccaagaatccgcnacgagggaaaatcctctcagctctgcctcagatctcctacctctcctaaagtcntgtagggggtnccaaggatgctcttctaaccagaggctggcctgtctttaaaacttaactactttagggtggtgccaccactgcagactattgtggtactttgtgacagaagacatgtnnnnnnnnnnnnnnnnnnnnnnnnnnnnntctctcactctgtctctcttacctttagctgcttgatcattaagccatccaacttcatgccagttcccttctttatagaagagtgaagggaaagacttcctgggtttgacttaaaccttgtccacctcttgatattttaggattgaggaataagtcattaatctaaggactgattacagtggctggagcttgggcacttgtcttatcactggtcactgagtctgaaagtcccagctgaattcttgcccttaagtgcttttgctgctatttttttgcccccagttccacaagatccaaccaagaattctgtatcctgggacagtcagattcttctaaatcaggccaggaaggaggggaaaagagtgagagaatggtattcccagatacttcttcctcctgccccttttcccagcagctctgagaccagatgttggctgctgtacttactccctgaggtagggaatgtgtggtgatcgagtggtctgtgttcctattgctggtggggtgatagggtgggctaaaaaccatgcactctggaatttgttgtattttctcccagtaaagcttttcttctcccgaaaaataaaaaa

SEQ ID NO: 79803 - DNA, 633 bp, Homo Sapiens
gaagaaagtagctttagaccggctaaaagctttaatccagagcctgccctactctgatagtaccagagtggagggcagaataccaaatgtccaggaaccaaaggcagggctgtggggacctgaagagcagcacagtggggcccgtgctgctgtgggggaaactgaggctgggagcctcagcagagaccggtgtcaagagtctctgggaactgcataggcctgaggaacatgcattttcaagttgtccattgatggtttcgtacctgaatttctcaccttttgtgaacatcttgggagggtgggggttttgcaggggtgttaaaagcaaggcttgggagcccctttcctccagctggtggctccttctcagggcctggcctcattcaggccactttgtagagaaatgccctgacctcgcaggaaggatttccccacccccaagtggaaggaagaggacagtgtgggcaccagagggccctggaaacatcttaggggaaggaaaggaaaaggataaatttggagtggggggtctctaaacagattgcctggattccgttctttcctggggttctacagctgcctaagccctcaccttgggggaggatcaaagggaataaagagaactcttggctg

SEQ ID NO: 79804 - DNA, 1452 bp, Homo Sapiens
  misc_feature (1204)..(1220): n is a, c, g, or t
  misc_feature (1392)..(1411): n is a, c, g, or t
gctaggtacaggcctgggtgtttaatcggcacgaggagctgctgcgcgcgtggagaggctcctgggaaactcccacggccaggactttcgaaagcagagcgaggagccctcgcacgcgctagtctgcgagtgagcgctcagcccggcacctgttcctccagcgccgccgccttcccacccctcggacccgcgccgctcgcggcgcccgcccgttcctgcgatgaatccggccctaggcaaccagacggacgtggcgggcctgttcctggccaacagcagcgaggcgctggagcgagccgtgcgctgctgcacccaggcgtccgtggtgaccgacgacggcttcgcggagggaggcccggacgagcgtagcctgtacataatgcgcgtggtgcagatcgcggtcatgtgcgtgctctcactcaccgtggtcttcggcatcttcttcctcggctgcaatctgctcatcaagtccgagggcatgatcaacttcctcgtgaaggaccggaggccgtctaaaaggaggtggaggcggtggtcgtggggccctactgacccgccctctgcccccgcggcaaaccgctcccacgcctgcccactttgctagccccggctgtgcccctcactatcagagactgggcgaagcaaacctgtcggagtcaattatttctctcgacttcggcctttcggaaagaagcgacccggtttctccctcgccctctgaaagtcctcatgcctggcagtcggaggagagcgcccagactctgaactcagcagaaagtggcaagaagagggcgattagggcgcagaactttggaagctgctacttacttggaatgcggggagaccgacggtgcgaaggcccttctccacccgcaggtgggccaagctctgggggcaggtggagagggcgggcaggggagagacccagcggcactgatcgccttgtgaccggaagagtgacctgttaaaagccacgcagcagactcatggggtctcacaaatccgtgtccgggtgcgctcccactcttctcctgctccccccctgccctggaggggaggggcgataaatacctttgattgtaacgtgccgttttaagaggttttgtgtttgtttgcttgaatacaaatgtttgataagtctttttctgccccagtggcctgtttgcctgcctgaggagttacagttttgtcattgtgggagaannnnnnnnnnnnnnnnnagcctgcgaatttgaacggggtgagttgtttcttttagtgcatttcccactgggtcttttgggaggcgtctagcgttcctgctggccctgggacaaagacccagaatagaactcgtagctcgtgactgcacggtttacgccacaaaagtgctcttgacatccgtgacaccgnnnnnnnnnnnnnnnnnnnncttatttaacatttccttaataaatgcaacatttaagcgtt

SEQ ID NO: 79805 - DNA, 439 bp, Homo Sapiens
  misc_feature (264)..(283): n is a, c, g, or t
aaggatgctgcctccaggacggctactgtgcctgaggctgggctccttctcagtcatcccagggcctctccgtctggccccaccctcgcccctccaggggatccacaagttgaatcgcagctctccagggttaattgccctggccgggagccagactcctcaccgccgccccgttcccccctgctggggagcgcagaatgaccaccaggaggccaggaacaaaacgcttaaatgttgcatttattaaggaaatgttaaataagnnnnnnnnnnnnnnnnnnnncggtgtcacggatgtcaagagcacttttgtggcgtaaaccgtgcagtcacgagctacgagttctattctgggtctttgtcccagggccagcaggaacgctagacgcctcccaaaagacccagtgggaaatgcactaaaagaaacaactcaccccaa

SEQ ID NO: 79806 - DNA, 1176 bp, Homo Sapiens
ggcacgagggtaaacagagggcctgcccccgacagcttctgcttccgggtcacgccttgacagcggctttcaacccccacctcagcccagcaattcggcagtttggagcatgtgaacaccttgagccttgatgagttccagtatgtggtatattatgcagagcattcagagcaaatactctctctccgagcgcttaatccgaacaattgctgccatccgttccttcccacatgataatgtagaggacctcatcagagggggagcagatgtgaactgcactcatggcacactgaagcccttgcactgtgcctgtatggtgtcagatgctgactgtgtggagttacttctggaaaaaggagccgaggtgaatgccctggatgggtataaccgaacagccctccactatgcagcagagaaagatgaggcttgtgtggaggtcctattggagtatggtgcaaaccccaatgctttggatggcaacagagataccccacttcactgggcagcctttaagaacaatgctgagtgtgtgcgggctctcctagagagcggggcctctgtcaatgccctggattacaacaatgatacaccgctcagctgggctgccatgaagggaaatcttgagagtgtcagcatccttctggattatggcgcagaggtcagagtcatcaacctaataggccagacacccatctcccgcctggtggctctgctagtcaggggacttggaacagagaaagaggactcttgctttgagctcctccacagagctgttggacactttgaattgaggaaaaatggcaccatgccacgagaggtggccagagacccgcagctatgtgaaaaactgactgttctgtgctcagctccaggaactctaaaaacactcgctcgctatgccgtgcgccgtagcatgggactccagtatctccccgatgcagtgaagggccttccactgccagcttctttgaaggaatacctgttacttttagaatagccggagaagatgtttgcaccatcgtgcaggcagctctgggtgaggttgtccctgcagtactccttgtcacagaaaacagaaaaacagttgttcctgttgtgtggtttatagatttcgaagcaacatgtcacaacaataacctccatagcacctccccttcccaaaccaaacaacccaac

SEQ ID NO: 79807 - DNA, 652 bp, Homo Sapiens
ggctcgaggccgggcgtcgaactcggcacgagggtattcgctctgaatgctctgcataatataccacatgataatgtagaggacctcatcagagggggagcagatgtgaactgcactcatggcacactgaagcccttgcactgtgcctgtatggtgtcagatgctgactgtgtggagttacttctggaaaaaggagccgaggtgaatgccctggatgggtataaccgaacagccctccactatgcagcagagaaagatgaggcttgtgtggaggtcctattggagtatggtgcaaaccccaatgctttggatggcaacagagataccccacttcactgggcagcctttaagaacaatgctgagtgtgtgcgggctctcctagagagcggggcctctgtcaatgccctggattacaacaatgatacaccgctcagctgggctgccatgaagggaaatcttgagagtgtcagcatccttctggattatggcgcagaggtcagagtcatcaacctaataggccagacacccatctcccgcctggtggctctgctagtcaggggacttggaacagagaaagaggactcttgctttgaactcctccacagagctgttggacactttgaattgaggaaaaatggcaccatgccacgag

SEQ ID NO: 79808 - DNA, 903 bp, Homo Sapiens
cggtccggaattctcgggatatcgtcgaccccgcgtccgctggggatgcgaccaggaccctggggaaaggaagccagcccccagggccagtcccggaggggctgatccgcatctacagcatgaggttctgcccctattctcacaggacccgcctcgtcctcaaggccaaagacatcagacatgaagtggtcaacattaacctgagaaacaagcctgaatggtactatacaaagcacccttttggccacattcctgtcctggagaccagccaatgtcaactgatctatgaatctgttattgcttgtgagtacctggatgatgcttatccaggaaggaagctgtttccatatgacccttatgaacgagctcgccaaaagatgttattggagctattttgtaaggtcccacatttgaccaaggagtgcctggtagcgttgagatgtgggagagaatgcactgatctgaaggcagccctgcgtcaggaattcagcaacctggaagagattcttgagtatcagaacaccaccttctttggtggaacctgtatatccatgattgattacctcctctggccctggtttgagcggctggatgtgtatgggatactggactgtgtgagccacacgccagccctgcggctctggatatcagccatgaagtgggaccccacagtctgtgctcttctcatggataagagcattttccagggcttcttgaatctctattttcagaacaaccctaatgcctttgactttgggctgtgctgagtctcactgtccaccccttcgctgtccagaattccccagcttgttgggagtctacgtcacggcttgtcttgggaaccaatccgtctctctttcttttctttgaagttcccaataaaatgaaaacaggaaatgtaaa

SEQ ID NO: 79809 - DNA, 604 bp, Homo Sapiens
agaattcggcacgaggaaaattaccaagaattttttatttctttgtcatagacacaatttctcttctgtatgccactagttacatttctaaattctgagcggtctcagttaggcctgtatgtgtgtacatgtccaagtaaagctggaaaatgtcagtcttgacacagctgtgtcttagtatgagaaacagaagactgaagaataaaaactaaggaacaagaatgagtctctttttggtggctaagtagaatcttcctaaaaccattgtcataaaagcagttaaaggcaataaatttttaaaagggacatatcactgattcattcctaaaaagcatgaacaaaaagtttttgttctgttccagctatatcttgtctaagtgctaacactgtttcagtgaaaatatctagccataagattaaaaaaatatattatttgcaatgcttaagcctgcagatacgtaatgtgaccactgttttgtgttgacaatattgctttatacagttcttgtatttgaaaggaattgatccttttaaagaaacatggtgtatattgttcttacaggactaatttcagtggtgtaaataataaatatcttttcttaaa

SEQ ID NO: 79810 - DNA, 1539 bp, Homo Sapiens
  misc_feature (1246)..(1472): n is a, c, g, or t
taggctaggtacgaggcctgggtgttgaattcggcacgaggaggaggcgcgagaatggaggtggatggccgtctgtggtggcgcgggcgaggtggaggcccaggactctgaccctgcccctgccttcagcaaggcccccggcagcgccggccactacgaactgccgtgggttgaaaaatataggccagtaaagctgaatgaaattgtcgggaatgaagacaccgtgagcaggctagaggtctttgcaagggaaggaaatgtgcccaacatcatcattgcgggccctccaggaaccggcaagaccacaagcattctgtgcttggcccgggccctgctgggcccagcactcaaagatgccatgttggaactcaatgcttcaaatgacaggggcattgacgttgtgaggaataaaattaaaatgtttgctcaacaaaaagtcactcttcccaaaggccgacataagatcatcattctggatgaagcagacagcatgaccgacggagcccagcaagccttgaggagaaccatggaaatctactctaaaaccactcgcttcgcccttgcttgtaatgcttcggataagatcatcgagcccattcagtcccgctgtgcagtcctccggtacacaaagctgaccgacgcccagatcctcaccaggctgatgaatgttatcgagaaggagagggtaccctacactgatgacggcctagaagccatcatcttcacgggccagggagacatgaggcaggcgctgaacaacctgcagtccaccttctcaggatttggcttcattaacagtgagaacgtgttcaaggtctgtgacgagccccacccactgctggtaaaggagatgatccagcactgtgtgaatgccaacattgacgaagcctacaagattcttgctcacttgtggcatctgggctactcaccagaagatatcattgccaacatctttcgagtgtgtaaaactttccaaatgacagaatacctgaaactggagtttatcaaggaaattggatacactcacatgaaaatagcggaaggagtgaactctcttttgcagatggcaggcctcctggcaaggctgtgtcagaagacaatggccccggtggccagttagagcagagacttcactgactgacttacaggtgccctattctgaggtacaggagccgcggctttctgatgggggaaaatgccgccttaggctggagccaacatgactgtcctttaaactccagtggcnnnnnnnnnnnnnnnnnnnnnnnnnnnnnnnnnnnnnnnnnnnnnnnnnnnnnnnnnnnnnnnnnnnnnnnnnnnnnnnnnnnnnnnnnnnnnnnnnnnnnnnnnnnnnnnnnnnnnnnnnnnnnnnnnnnnnnnnnnnnnnnnnnnnnnnnnnnnnnnnnnnnnnnnnnnnnnnnnnnnnnnnnnnnnnnnnnnnnnnnnnnnnnnnnnnnnnnnnnnnnnnnnnnaggatacaccattgcactcaggctgggaagaattcatcttggggaaaattatattagtcggattgat

SEQ ID NO: 79811 - DNA, 1600 bp, Homo Sapiens
  misc_feature (91)..(91): n is a, c, g, or t
  misc_feature (311)..(311): n is a, c, g, or t
  misc_feature (386)..(386): n is a, c, g, or t
ttgggagggggccttccactaaaccttccagtgttttagtttttagttgtgagtcatggctgaagaaagccagagagaaaataggagaaanaaggcggagctgaaaatggaggcaaagtccatgggttggggacctagatggcccccttcaagtagctcaggccctggcagcttgtgctgggctgtgggaagattccctcttaaagaggtgaaatacctcgggaagcaagccccagcacgggtagggcttgtgggtctgcggggctgggccactaatgttacctgaccatgccagctgcccctaccccaanctgcacacaggagcagggcacatggggttttgctgagcacgtcagccaaaccagggcagggaaggtgtcttcgcnctgggcaaggccaagagggacacgtgcagtcttgctggtcccacagccggcggcacgcctcaccccttcccaagggctcatgtcagtgtcgatggccacgcagttgtaggccgcatagcggagcttctcctcgcataccttggcactggcatagtgtggcaggaagagggtgctggagcaagtggaagactcgggcagcgcgtctgtggtctcgtagcccagcttgtctgggtagatgtagatccgtgctggcaggcgactgcggcccgtgacaaagcgcaggaagcggctccggtcctcgttggtgaagttgttcagtgcctcccagaaatactgcacccgcgagtcagatggctcgaagtcctcaaaccgggtgagcttgcgcagagcatccacagtgacctctggatccccacacactttcttctccaactcttgccaggtcagcaagtccagcacagcctgtggtaccaccttcagcagacctgcctgcatagctgccacctgctccttgctctcctctagccgtgccttctggaccagttggatgaaacgagaacggtccccatatcccacgacgatgcctgcacccccagggatcagctccaccacctgttggtcactcagtacagtggtgaatgttagttccttcccaaacttgaactcaaacgtctccttgtccattccttccatcacttccaggagcttcaccagcacagagtccacagctgggaagtccttgctccagctcacctcctcaccagaaagctgcttccacacaaaaccaggcagggccaggacctgtgtgacaaacactcccccactgtcttctcaccctgagctgcccaggtttggctggcctttccttccaagggccagggctgatcggacgggggtgtggataaggctactcaccaggaactccttaccccgaagggcagcccccatcagctgtccgatccattcatacttggcaaagtctcggcaggaggggttgggtacatacatgtcccgagcctcaccagtgccattgccctggttggctgtgcgtacaaagaagggcaggggcacgggggtatccgctgagctagggcacagctcttctgacatatctgccaggctgtcccggaaaccacccccttggtcaatgatgccttctgcaataaatttacactcccaccactggtcatagcgcatgggccacctgtagtcca

SEQ ID NO: 79812 - DNA, 916 bp, Homo Sapiens
  misc_feature (851)..(876): n is a, c, g, or t
gcccgactcttgaggatcccgatcgctactgtgtgcagttggggtaggggcagctggcatggacaggtaacactagtggcccagccccgcagacccacaagccctacccgtgctggggcttgcttcccgaggtatttcacctcttaagagggaatcttccacaagcccagcacaagctgccaggcctgagctacttgaagggggccatctaggtccccaacccatggactttgcctccattttcagctccgccttttttctcctattttctctctggctttcttcagccatgactcacaactaaaaacataaaacactggaggttagtggaggcccctccccaagcagggagcctgggatgggcagggagtgatagccaaactccttggtcacctgctccaagaaggaagcagtagctgagcacctgccctcacatactgctcttttcccctctccctccacaccagagatgtggtgagctctgttcttctaccaacccagtctcaacacacaaagtgccaccaccttccctgactcagaacccacatccactcaatgtgaactctactaccacgacctccccatattcctcacttctccatcacctccagcctgactccctgtctgccctttcacccccaagattttgcacaggttaaggccagttatggcctttttgaaatctgtaatagctcccctttccccaactctaaagcctagaccttaaacctgttcctagagctatgcacacccctgccccagtttaccgttcctccctcagggcctccgtgacactccatgaaaagaagttcttgcataccggaaagttgaataaatggatgaattcattnnnnnnnnnnnnnnnnnnnnnnnnnngaccgcgtatgcggccgcaagcattattcccctttagtga

SEQ ID NO: 79813 - DNA, 1361 bp, Homo Sapiens
  misc_feature (121)..(216): n is a, c, g, or t
cgagttatggatcctgatggctgcggctgtttctggtaacgctttcataatactcgccgcttttctaggtcgcggtggtcttacctgcttcatcgtgaccaccggcctggtattgaggatnnnnnnnnnnnnnnnnnnnnnnnnnnnnnnnnnnnnnnnnnnnnnnnnnnnnnnnnnnnnnnnnnnnnnnnnnnnnnnnnnnnnnnnnnnnnnnnngtttggtatgggatgtaccagtaattctgagacaattcagaagagacccagttcagcacaagagttttcaaaaagcacaatgagacaagtcaagaatccttttggcttagagatcactaaatccagtcttcagcacttcaaattacaacatggcataaccattgacaacacgattgccattgaagatagcctccttacatgctactgggggtgcagtgttcaaaaaatatatgaagctctgcagaagcatgttaattgcttcagaataagcactccccaaccattagaagatgctctgtatagtgaatatctctatcaggaacagtattttattaaaaaggatagcaaagaagaaatatattgccagttaccaagagatactaaaattgaagactttggtacagtacccagatctcgctatccattggtagcgctattgaccttagctgatgaggatgaccgggaaatttatgatattatttccatggtgtcagtgattcatattcctgataggacttataaactatcctgcagaatattgtatcaatatttactcttggctcaaggtcaatttcatgatcttaagcaacttttcatgtctgcaaataataatttcactccctccaacaattcctcttcagaagaaaaaaacacagacagaagtttgttggaaaaggtgggactctctgaaagtgaagttgagccatcggaagagaacagcaaggactgtgttgtttgccagaatgggactgtgaactgggtactcttaccatgcagacacacatgcctgtgtgatggctgtgtgaagtattttcagcagtgcccaatgtgcaggcagtttgttcaggaatcttttgcactttgcagtcaaaaagagcaagataaagacaaaccgaagactctttgaagacatcgtaacactgaaaagtacactttctactaaagatgcagaaattgatgatcttggaattcatcataacatggaatctacagtactgaccatcaatgaaaattatattttaacttcatatttgtatggtacttggatgataaaaattaattattcctttctgcttagtgaatgaatactggaatccatctgtgttgatacataaaaattcattcaactcttgaaaagaaaaaaa

SEQ ID NO: 79814 - DNA, 988 bp, Homo Sapiens
cgttgtctcacttgggcagtattattcccatcaattttttcaacaaatatggcctggctgtctactacaagccgggccctgtgaaaagtcctgtggggatacagacacggtctcttgttttcaaggaccacccagttcggcaagtggaggtaagtcatggacaaacatggtggcaatgctcagtggcgagctatccagcacgtcagaagtccagcccacgtgctgaggaagtcccaaagagagcaagatcacttctgtctgggtgctgctcttggaaggcctcatggtcttccaagacccccatctgacctctgacccttggcagccaaccttccccaggccaccccagagcttgctggcccttcccacttatgcacgccgcctgggcaggagaggtcactcactctgtgtcagggtgaccgtggctgcggctgcggtggccgagggtccgagggccacagggtggatctctgtggtgctgggcaggctgatgatggtggcctcgcccagcaggttgcagatacgttgttgcatgggggtcagcagcactggggctacagctgggccaccgccgccactgccaccgcctgtcccaggccccccagctccgtcctcctcaggtgggccccggcgcctcaccaccctccacggcggcccggacctgggcaaccttgcgacggacctcggtcttgaggtcagaccacttcttcttgacctcaggcagctctctgcggcaggtggccacggcgttgacccttctcaggatgccgtgccaggccgcactcttggcggccaggggtaccccggcgttgaagtggttcaccagcaggtgcttcttcagctccagctcctccacgatgatctccacctcccgctctgagaagttcatcttccttttcttggctgggacggccatggcctctcccctcccctctttttaaagaaattataatccccctcgggccgaatcggcgcgccgcgacttcat

SEQ ID NO: 79815 - DNA, 505 bp, Homo Sapiens
  misc_feature (47)..(96): n is a, c, g, or t
cctggttataaatcctgcaatatattacattttttaaaatcctagtnnnnnnnnnnnnnnnnnnnnnnnnnnnnnnnnnnnnnnnnnnnnnnnnnnagtagcagcagtggttacctgtctgagcacctacattttcttaggaggggatcgtgtctcaccagccaaatagcccataaaccttctcaaaaaaagtgagccaggagaaaagtataacacaagatttgatttcacaatgtctctaagccccacaagccccaaactggggattcactgaatgaaacaaatttgcttctccattgctttcttcttgagaaaaagagatgattttcaaagtcaatgccttcaatatgttctcaaagtctgataatgtgcttgatgaatgccaagtctcttgttgggtttttctactgttccagggtagttttcttattggtaacatatacaggaagatttcaatgttcattggagaaaagccagcagaaatgaccaatcaattataggcacc

SEQ ID NO: 79816 - DNA, 651 bp, Homo Sapiens
  misc_feature (370)..(378): n is a, c, g, or t
tttttgagataataaaaaactagaaacagcataaatgtacagaaatgcagaaattgttgaattagtacataccaatttctgacatataacactctgcagcagataaagacaatagctctctagtgtggacatgaaaatatttctaagacattgacaggacgaagaagttgcacagtaaccacgcactcctgtttacatttgtatagttaaaacttgtttacctatacgtagcatatatgcgtgtgtgcaccctagaaaagagtctgtgataacacatatcaagctattgacagcggttttgtctgctgaaggaggaaaaaaggggggcttctcacattttactccatttaattctaggttgtttggtttnnnnnnnnngtttttatgtacaacagacaatttttaaaattccttttcatcatagaaaatgaaaatgtgtactctgttatcctttacgctctgtccatttttttcttcaaaaatgtgtctgacctattatcaatgtgaatgaaaatgagctttgctacataacctcttttcagagctttgtattcctgaagtgttggagtcgcctacatggcatagtcaaatgtttttaacttaaccacaacccacagtaaaaatgaagctttctgcaaagttaaaagtagt

SEQ ID NO: 79817 - DNA, 678 bp, Homo Sapiens
ctcctattactgcagcagatctcattgccagagctccctggagaatatgtcataacagtaactggggaaagatgtgtgtatcttcagacatccatgaaatacaatattcttccagagaaagaggactccccatttgctttaaaagtgcagactgtgccccagacttgcgatggacacaaagcccacaccagctttcagatctcactgaccatcagttacacaggaaaccgtcctgcttccaatatggtgattgttgatgtaaagatggtatctggttttattcccctgaaaccaacagtaaaaatgcttgaaagatctagctctgtgagccggacagaagtgagcaacaaccatgtcctcatttatgtggaacaggtgacaaatcagacgctaagtttttccttcatggttctgcaagacaacccagtaggagacttgaagccagcaattgttaaagtctatgattactatgagacagatgagtctgtggttgctgagtatatcgccccctgcagcacagatacagagcatggaaatgtttgaggaccatacaggctgtatattttggtggattctctgtcctatacatttacttagaaggaatggagttatttgtctctataaaatagacactaaaaatatttgctgaataaatatgtacttctggtcaaactaaaa

SEQ ID NO: 79818 - DNA, 595 bp, Homo Sapiens
agcccaagaattcgccacgaggagaggctaagtatctagttcagttagcaagtgcatttcagagtttttgtcagaacctaggtctggctgtcttccgggcccatgctctttccctgcccaagcagtgggagtagtggggcatctcacatgctaactcaattgtccccagagatgattgaggagagattttgggacagcaaccagactcagtgggaaggaataaagggatcaattatccatgtctgttgcgggcccaggagtaggaaatgggtgcatgtgccgtgtgtttgccatccccacataggcccatcatctaagactcggtgattccatatcattctattggtcactccctgggggccatgctgggctcggggtacatctggatttgttcagcaaacaagcttctgtgctatttgctttctctgcacataagctgaaaatcaggccttcttcctaaggaagagtttctacagagggcacaaaaggggcatgttcttccattgttttcatagaaaaacaagatatgggcccctatatcacaaccctctgtgaatgcctcaggaactttatttttgataaatgacagtgtgtt

SEQ ID NO: 79819 - DNA, 2416 bp, Homo Sapiens
  misc_feature (1871)..(1889): n is a, c, g, or t
  misc_feature (1904)..(1904): n is a, c, g, or t
  misc_feature (1934)..(2289): n is a, c, g, or t
  misc_feature (2339)..(2339): n is a, c, g, or t
agctaagtatgcattcctcaatagtagacagtacaacatgtttataacaagccaattacattatgttctttgcatgttctaaagttgtgtatgtgtgtgcacatctgagcacgtgcacatgtacacctgagccaaaaacacgagaacccactgatctcaccactggggcaagctaggtcagagcttagtgattcacactgaaattggcaaattggatttaacccaattaatagtgtgtgtgtggcaggagtcatgtccctcacatcctttgtacaaatgaaaattactcttaattccttcagatttataataactctgtactttggtttcagggtgacatttgggaaggattttgtttagaattaatggagtggcacattttgcagcctttttgcttgattgcatgtaatggaaatgccctatattttcctgcaaaataagtactaaattcattatcgttaagcaaatgtacaatatgctcaggcaccgcagagagctgggcacgggcccatgtgagcatcactttggaagtagggctcttcaacagggacccttgaactttaaagaaaggaacttctttttgccttctaattgatcatttagactattctggctaagtctgcccacatgtaattaccggctaattcaagcgaggaaaaatgtaagtcatttagaccaaagccaagcagtttctttgcgtgggttactcaagggcttgtggttacttgtatctcctctatgtgaacttgactttgaaagacagagctctagtgtgccagcctgctaagtcctgtaagaatagggaagggcggaggggggtgggcagtgactaggggacgagaagcatggggaaaatatttgcactctaaacatacagagatagaggtggggcttgtggtacttaacacttgtagccatcaactgactgagaccttgggctaaataatcaattgtgctgatattacatctcgttatggaatgttcctaaatatgccaggtagacaccagcccaagtaccctcctccagaagtctgtgactaccttgtcactactttaggcccattccacaaagcccatctctggtttgagaattcattttgatctgtatctacaccacccaaagttaggcctcctataatgtccaaaacattcctttcagcctttttatttcttactgtactgtctcttactgtactgtctatctgcagtaattgaggacccataaaatttagataactacatgtctttgctcttagaattgtcactcagcataatgagcatttaacatacaaaggcaatgtactgttttgtgttgatctatgtaaaagaatacaattcttttttacataattagtgaaattttattttttattaggaaacactaaatagtgtaatatttcttttgcttttaaaaaaattcctggtagcaaatcaagataaataattgcttcattttcttgagcaatactgaagcaggatgaagtaagaggaatgcattcatttaaacatgctttgctttatgaattttgtctcttttttggtctctttttcttatattcaagttacaaatgtacaagtatccttactaagagtgctccttttgtattttacatatatacagtatgaaaatacattggaacactaggaaagtttttaaataacagttctaatttatcagaaaattgtgttttgggattgagttctttgtctcagcccagaatcccaggtcctgggcctggttttctaatgctgtcatctcagttcgatattttaatttagaacctggaatctcctacttaatatatgaccatgactttgaaaggcaaaagaggaatcaagaataaataaaacaaacttaatcttcatctttnnnnnnnnnnnnnnnnnnngcctacagccgcggncgctccaacatccctcttgccgaattcttnnnnnnnnnnnnnnnnnnnnnnnnnnnnnnnnnnnnnnnnnnnnnnnnnnnnnnnnnnnnnnnnnnnnnnnnnnnnnnnnnnnnnnnnnnnnnnnnnnnnnnnnnnnnnnnnnnnnnnnnnnnnnnnnnnnnnnnnnnnnnnnnnnnnnnnnnnnnnnnnnnnnnnnnnnnnnnnnnnnnnnnnnnnnnnnnnnnnnnnnnnnnnnnnnnnnnnnnnnnnnnnnnnnnnnnnnnnnnnnnnnnnnnnnnnnnnnnnnnnnnnnnnnnnnnnnnnnnnnnnnnnnnnnnnnnnnnnnnnnnnnnnnnnnnnnnnnnnnnnnnnnnnnnnnnnnnnnnnnnnnnnnnnnnnnnnnnnnatcacagatcatggatacgatgaagacatttagcataggcagaaaggcangaccgaaaaagcgcgtgcggcgtttcatagctcgccccgagagacaaaatcgcgtaatcaaggtggagacgaggaaa

SEQ ID NO: 79820 - DNA, 579 bp, Homo Sapiens
  misc_feature (161)..(175): n is a, c, g, or t
caccccagaatcccaggtcctgggcctggttttttaatgctgtcatctcagttcgatattttactttagaacctggaatctcctacttaatatatgaccatgactttgaaaggcaaaagaggaatcaagaataaataaaacaaacttaatcttcatctttnnnnnnnnnnnnnnngaacccaaaatgagaatcaacacttcataggctcactgggttttcttttcttttctgttaatttaaactcagttatttttaatgcttaatacatacatggtgcaaaatttaaaaagcgcaaataggtatctagtggaaaacctaagcctccctctctcctccggcacccattacctctccctggaggccaactgtttggatccatttcttacacacactgcccagagatactctaggcatgtaaagcacaaaacatacatataaaatctgcggggcttcaaaaaatataagtaggatgtcatctatactgtcatacactttgttttttatcacttacttaatgttatatcttggatattgtattaccctgggtattaaaaagaactcctttcacattttaaaat

SEQ ID NO: 79821 - DNA, 144 bp, Homo Sapiens
aaaagattattagtataaaaggggagataggtaggagtagggatagtggtcaagtgggaggggtggaaaggagactaaagactgggagagagggaagcactttttttaaataaagttgaacacacttgggaaaagcttacaggc

SEQ ID NO: 79822 - DNA, 644 bp, Homo Sapiens
  misc_feature (60)..(69): n is a, c, g, or t
aagtgttggcgtgcaggagagacaggagaagagaataactaaacaaagacattaaagacnnnnnnnnnngtaggaaagggagacttagaaaatattaaaagccaccaaaaacacatccaaagacggtttccccttacgttagttgggctaaaagaaagcaaatgggaagaaggttttaaattgattatcccagtgacaaatcccaggaagctttcacatcaaatcaccctattctgggtttttaactccttccatcgagtttaacctctttacctcccacatcctggtaaaccctgccccctccctaccgccccctttgctggtgattaaatcctgaaggtacacgaagtatttcagtgaatgaatggctaacaaaaaagggcctcccctcccccttaccctggcggtgtttttcagttttattccactttccgcccttttcccttaatgaacacagggctaatctcgggccttgtcgaaggaagaggctgcagacgttaatgaggttagctgctggattccagtattcgtcgcataaggatccttctttgtctgcgaaggaaaaacacactgattatcataatgaggcacgtgggccgtggcccggctgggtcggctgaagaactgcggatggaagctgcgga

SEQ ID NO: 79823 - DNA, 711 bp, Homo Sapiens
  misc_feature (25)..(25): n is a, c, g, or t
  misc_feature (191)..(191): n is a, c, g, or t
cgaccaggagtcctcgggagctgtngcgggcgagctgccggctgtgggggccctgatggagcgtctcggtgtgctgtggacgctgctggtgtcccgctggttcatctgcctgtttgtggacatcttgcccgtggagacagtgcttcggatctgggactgtttgtttaacgaaggctcgaagattatcttcncgggtggccctgaccttaattaagcagcaccaggagttgattttggaagccaccagcgttccagacatttgcgataagtttaagcagataacccaaagggagtttcgtgatggagtgtcacacgtttatgcagaaaatattttcagaacctggaagcttatccatggccaccgtcgccaagctccgcgagagctgcagggcccggctgctggcacaggggtgagcgtgcctgtcccctgcgttgctcgtctctacactgacgatgcccctttccagagttgacactggaccaactttcactgctttcctttttagtgttgtaaatacttgacatcactacactttagttgtgaattttttaaaagagcagtttaaaatcaggtcattctaccagcttttgatgattagctatgaagtcatactttttaaagaaaacttatttttacctgagagatcaataatatataaaatgtgagtgtgggtttgtatctaataaagtatgccaacacctgtgtttgtg

SEQ ID NO: 79824 - DNA, 856 bp, Homo Sapiens
  misc_feature (471)..(480): n is a, c, g, or t
ggtcatgacacgtcaactcgatgattaaaatccttcaacacttctcattcacaataagaataaaatctacatcccttaccattcagtatgcaaaacttaaaatacataactttacccttaaatattttttctttctctgacttcataagtataggttatacctctataaggaagaaggtaaaaaactctcaacaatcccttctttcagagagaactactgttaacattttaacagacaacttcattcttttcctattcttttttataatgcttacaggaatgttaaatacttagacagatcttaagtacactagaattatctgtccctgaaataagttaggttgccctgccgcagaatttgtatctatagtttatttggattatttttgaaaaaagtaaaataacaatacccttacgaattttttggtgcatagcatctcagcttcttttatcattaaagatgtatgtatnnnnnnnnnntgagtgtatatcaagttgttcatttcttagtttctggggtcttcttaaccagtacatagaactctttatgaattaactttagcttatgtttgaagtagtagtttgtttatagtgtcatggattttaaaatcaaactcagtttttatttcttcactaaaacctattttcacatgatatacatgttaaatttcccttttattttggtcatgcatcaaaataaatttactaagtactagagccaacattattttataagtgcctggccataggtattcactagttgaatagtttaatttgaaatgaattaattttaaatgggagttgttcaaaactatgccactttatttttcttttgtcctttgtgttattaaaattt

SEQ ID NO: 79825 - DNA, 728 bp, Homo Sapiens
taaaacccttggatataaaagaaatctgtttattgatttttaaatctttcctttccaaaagctggatacacatggagctgtttgggaattttccttgctgctaccgcgctgccaccaaatggaattgaccagcggctgttacactgttctttgccactgtgcctatgctcagaatatgctcactgctaagctacaaactcggacagggtcagaaacagaggtgtcccatcccattgcagcctccaccacctgtaaccccttcctggcattggccactgaagggtacaaaggcaaaaggaccacagcaccacttaggtgtagcatggattttaaactgcagtcagtatcagatcctgtttgataaataagctgactgttctctcttgagaacctgtggcctcaaccagccaccaagctgatgtggcccaagtccatctcttggtcttctcctttgaagcacagcctatttctgagccaagggttggggaagcctgtctagatgtgggactcattgccccaaaccagggagaggaagagctcccacagggagagcccaggctctctttgcagcctttcccagtttggtgtttaagcagtgccatgttccttgtttgacaacaagacagtctgtaaagtattgctcttaaaaacaattaaaaagaacctttcatatgggcaccatggcttagtctctgtgggtggtcttcaacagattctggtgggagtga

SEQ ID NO: 79826 - DNA, 787 bp, Homo Sapiens
aaatatctatataaaaaataatgagcaatttacagatctttctctaatcagaacctcaagtgtatatataaaggtactgtacaatatataaacatttacaaccagtacatccacattttgctcagcattccaaggccacattgctaagtcagtatataatcagtacagagtttacttaggaagaaccacataggacaacatatgacatcaaagttatgtcacagttaacaaaaataggattcgttatcactaattgtggactacagggaaaataataaataatttctgtggtactaaattcttagtatttatcaagcctcctaattttgctctatttgaatagttacaataggtgggtaaatatagttctggatgaaaaggggatttcaaaaatctcactctgggaagcatgtcttatctacaggggctaattgagttgttgggttaaagagtttcacagtcagactcccagagggaaggacctggacctaatgtgcttcacaacaagatgaacccaggtgacagaacaagtgtgttcacacactccataaaatagttttattctcagaaggtgcctttatttatatagatgctactgaatgctgcttcagggaactgaaaaacctggatctattttatggaagttggtaaacagtctccaacttctaagaaacatctttaactagacttttaaaaagaattctgaaaatgtgtacaagttaagcagatgtttagtctccctttcttgtttttaaataagaaagttagttaatgtagctaaaagtta

SEQ ID NO: 79827 - DNA, 1102 bp, Homo Sapiens
  misc_feature (781)..(790): n is a, c, g, or t
  misc_feature (821)..(854): n is a, c, g, or t
  misc_feature (982)..(982): n is a, c, g, or t
gctggtaccggtccggaattcccgggatatcgtcgacccacgcgtccgcccacgcgtccgcatcggggacagccgctgcggcagcactcgagccagctcaagcccgcagctcgcagggagatccagctccgtcctgcctgcagcagcccaaccctgcacacccaccatggatgtcttcaagaagggcttctccatcgccaaggagggcgtggtgggtgcggtggaaaagaccaagcagggggtgacggaagcagctgagaagaccaaggagggggtcatgtatgtgggagccaagaccaaggagaatgttgtacagagcgtgacctcagtggccgagaagaccaaggagcaggccaacgccgtgagcgaggctgtggtgagcagcgtcaacactgtggccaccaagaccgtggaggaggcggagaacatcgcggtcacctccggggtggtgcgcaaggaggacttgaggccatctgccccccaacaggagggtgaggcatccaaagagaaagaggaagtggcagaggaggcccagagtgggggagactagagggctacaggccagcgtggatgacctgaagagcgctcctctgccttggacaccatcccctcctagcacaaggagtgcccgccttgagtgacatgcggctgcccacgctcctgccctcgtctccctggccacccttggcctgtccacctgtgctgctgcaccaacctcactgccctccctcggccccacccaccctctggtccttctgaccccacttatgctgctgtgaannnnnnnnnnaaatgattccaaataaaacttgagcccaccnnnnnnnnnnnnnnnnnnnnnnnnnnnnnnnnnnaaagggcgggccgctctagagtatcccctccagggggccaaagctttacgcggtacccagcttttcttggtacaaagtggtcccctataggggagtcgtatttataagctaaggcactgggccgtccnttttacaaccgtccgtgactggggaaacttgctaaccttgggatccttttgtgaagggaaccttaacttcctggggggtgaacctaattgggaaccaacttaccctaccggagattttaa

SEQ ID NO: 79828 - DNA, 1437 bp, Homo Sapiens
  misc_feature (51)..(51): n is a, c, g, or t
  misc_feature (93)..(93): n is a, c, g, or t
  misc_feature (132)..(132): n is a, c, g, or t
  misc_feature (161)..(161): n is a, c, g, or t
  misc_feature (392)..(439): n is a, c, g, or t
tgcaccccagctcttgtctccttcccagtacgaaaaggagagatgcaaatntgaatctggtagtcgcccagacaatggagacatcctctcctntagcaggtcagcgactgagaggggcctgacttctgctgngacagctggagaggagtctcatgggctgngatgctgttgtggctttgactttggccagtgcttctgacagaggcggagcctggcaagtgtaccatcccacaggcagcaggcacacagcccatgggctggatccttccacactttcctgacagaccagaaccagagcatctcgaggcaactgttagaaatccagggacgagacaaacagagaagcgctggtgaagccaacatagagactgtcaatgtgtacactggagttnnnnnnnnnnnnnnnnnnnnnnnnnnnnnnnnnnnnnnnnnnnnnnnnctcgttgtcttggcttgtgctttctcctctccccatcggggatccgagactctgccaggattcacatgccactgaagcccactcagtgccctctggtgaccacacataccattcccccggactcccacccagcaggcagctgtgaccgcagaagggcaggatgaagtgggccaaggtttgggacaggttgactgtgtaggtgacagggagggaaagatgatggccaggggaaagagcatcgtataggctaggggattgaactgtggactgattcagtgtaaataaaaataaattaacaggtagtagttcctgtcagttctgttggaagcagcccactccctcacttttactccttcctccaaccctcaatcagagctacttacagccaggcaggatggggctttccccaaagcaattggccgtttgtccagtggcagacaatggtggctacagcctttgtgcttttaagagtgggctgggattgtggagactgcccaggggcttggctttgtcagaacttgtacaatcttcttttgatgaaattatctgaactcaacatctagcacatagaatgtgttcaacaaatgcttgttgaatgaataaattatgactgcagactggctctcctgccttaaactaatttcatcccagcctagtctcctgatgtctgtgctcgttatgctatgccatgttgcttcagtcaaacaagaaacacttactgagggcatattgtttgcccatcattgtgcaatatgctgtgggacatgggatgtcgtctcagtcttcaaggaaatggaagggttaagaaatgcatatgagattattaccaatgacacctttaatttatatgatgctttaaaattatcagagcactttcatgtatttttcgtgtgactagtgaaaaagacaatgttgtacaaaattaaaatatatacagatgcaataatgtgaatagttaggatttattaaatgcattatcttcagatctttaaaaaaaa

SEQ ID NO: 79829 - DNA, 686 bp, Homo Sapiens
  misc_feature (31)..(31): n is a, c, g, or t
  misc_feature (272)..(272): n is a, c, g, or t
aaaggaaacaaacaaaaacaggacaaaatgnccaaagatgtcagattcttagactccacaggaccaaaccatagaacaatttcactgcaaacatgcatgattctccaagacaaaagaagagagatcctaaaggcaattcagatatccccaaggctgcctctcccaccacaagcccagagtggatgggctgggggaggggtgctgttttaatttctaaaggtaggaccaaccacccaggggatcagtgaaggaagagaaggccagcagatcanctgagagtgcaacccccaccctccacaggaaattgcctcatgggcagggccacagcagagagacacagcatgggcagtgccttccctgcctgtgggggtcatgctgccacttttaatgggtcctccacccaacggggtcagggaggtggtgctgccccagtgggccatgattatcttaaaggcattattctccagccttaagtaagatcttaggacgtttcctttgctatgatttgtacttgcttgagtcccatgactgtttctcttcctctctttcttccttttggaatagtaatatccatcctatgtttgtcccactattgtattttggaagcacataacttgtttggtttcacaggttcacagttaagaaggaattttgcctcagaataaatagaatcttgagtctcatgc

SEQ ID NO: 79830 - DNA, 910 bp, Homo Sapiens
  misc_feature (1)..(1): n is a, c, g, or t
  misc_feature (832)..(850): n is a, c, g, or t
natgagctaccgtgcctggcctaaaccttacgcttttgaggttgagtgcaggccttgtgataactaagcgctacttttgacgagccttcaacaagctgcccagtcctctcctcagcagacgcatcaggttgtagttgcatctttacagtggtctttccttttattaaatctatagcagtgaatatagatttgattcaacttttagttacgttctctcaagaatcctaatcaactttcagttagcctcttaagaaagggaaaaaaaggtgctgccagtcatccccaaattatgtttttggctgtgcattctattttctacatagcactgaatctgagtaacagtcatcctggatttatagttggaacagaacagtaacagacctaactgggactcagccagcactagcctcatcttagctgccccttttctctgctttgcagtttactgcttccctgggctagccataacggggttctgggcaggtcagactcttcagcaagacagtgtattaatagtgtgaattagatacactgatgacctgctctgcctagttaagaaactgaattaatcagcagttacaaagcacatactttgttacgtgctaggctttgcctcctggcctctagataattaagacggcccagggaataccagcagagaagtgctaattgtatttgggtgttacaaaagcagacctagacgagctgttcacttaactggtacctgttggtcagaaaaagaatttatttagagattatgatcatgtaaaattacagtactcaacccttctagcaaagtatttttttgaaaaataaactaaatgcctttatnnnnnnnnnnnnnnnnnnngaccgcgtatgcggccgcaagcttattcccttgtagtgagggttaattttagcttggcac

SEQ ID NO: 79831 - DNA, 505 bp, Homo Sapiens
agcaccacttcaaacacccttttttattaaacgttaattacaaatatttcattatccctcacttgacttttccaccaaagctcacttatagaatacatgatctataattacatctaccctgggactctgcaaaagaacacaagcaccagaacaaaagaaatgaatcactgataacaaaatgacactctaaaattaagaccacaaggttgtggggcatctgaaaaaggaaaagagcagctttacattcacttcacaaagaatgcagaggatgctgactatgaatattcccaaacagatggacctacaccaacagcaccacgcttctaagcctcccaaaccaagcagccactccgcaggtcataggaggaggagactcaattcatatataaatcaaaattcatgaagcataagtgaaacattaaagccaataacttcaaatcctaaaaatgctattgccaccccacagttggtaacgcccaaaacatgcacaataagccctcgtgcc

SEQ ID NO: 79832 - DNA, 1102 bp, Homo Sapiens
  misc_feature (104)..(104): n is a, c, g, or t
  misc_feature (113)..(113): n is a, c, g, or t
  misc_feature (168)..(168): n is a, c, g, or t
  misc_feature (181)..(181): n is a, c, g, or t
  misc_feature (1020)..(1042): n is a, c, g, or t
gctcttgttccagggtgctggggaaggtccgtgagcggacaagttctcgggagcaggtccaccgggagcgttggagccctgttcacacgggcagccggtctctnccgggtctngctctatgcatcagacgacccgggacgctgtggccccacactcacccacaggctnttgcgacagggcncagaacagcctgaggccaccacccagcaagcccgccttatcacccattccagctcacccagaaccttcaccagcaaacctcctgctgaggtcctggcaggaggccaccgtcttgttaccgtttccttttcgtttgctgagggtcacagaccccaacagggaaatcagtatctgtcttcccagtggttgccctgctcgccgggcactccacggggtcccgcccttgtgtgagatgggccaggatccttcggcaaggggcgcctggggctggggctgattgtgggcggtggagcgccagacagaaaaggattccaatgagaacttcaggttaaagtcagatgccacctaccagggtctacagtcaaaatgttggctttttcttattttttaatgtatgggagaaaaatgtaaaattccagttcttttctaattgtgtttctgaaattaggagtcagctgccagcgtttttgtgtggctgcagtgtgcctgggcccagctcacgggcagtgggtggacctaactgcccaggcaggcgagagctacttccagagccttccagtgcatgggagggcagggctaggtgtagcggtgtctcctctttgaaattaagaactatctttcttgtagcaaagctgcacctgatgatgctgcctctcctctctgtgttgtctgggcccttgtttacaagcacgcgttacccttcctgaggggagccatgctctagcccctggagggcctgttgcaggggcagggcgggcccgttgcctttggcagctcctggagagctgtggacatgcagtccccctcagttcgtgctgcaataaaggccatcttctcttnnnnnnnnnnnnnnnnnnnnnnncctgagcaggcggccgcaagcttattccctttagttgagggttaattttggctatggcac

SEQ ID NO: 79833 - DNA, 439 bp, Homo Sapiens
ccaccacatataagctccattgaagaatctcaaaataattatgcatcatgaatgaaactggaaaaaaagacattttattaataaaatcatatattatagaaaatacaaacaaacctattataaatgaaggtataaatcaatggttgccttgagggccagagaggggagggagagcttagaaaaaggcctgaggtaaatccgaggtgactgatatgttcattggaataactataatgatggtataatgtgtttttgactaggtttggtaaccctacattaactctctttcctgatgaccttggagggacaccttgcctcagtgggcagcaaatactggtaatcaatgaaactgatttgaattcatttaaacacaggatgatggtaggttacaaagtcacattcctggaaggacatcccccgccccttctttctatgcttg

SEQ ID NO: 79834 - DNA, 1187 bp, Homo Sapiens
  misc_feature (43)..(82): n is a, c, g, or t
  misc_feature (86)..(120): n is a, c, g, or t
gacagcaatctatcactcactatagggcgctccgcgtattagnnnnnnnnnnnnnnnnnnnnnnnnnnnnnnnnnnnnnnnnccgnnnnnnnnnnnnnnnnnnnnnnnnnnnnnnnnnnncagtcgacggtaccggacatatgcccgggaattcggccattacggccgggtagttaaataactgtgtggcagttaattggatgttcactgccagttgtcttatgtgaaaaattaacttttttgtggcaattagtgtgacagtttccaaattgccctatgctgtgctccatatttgatttctaattgtaagtgaaattaagcattttgaaacaaagtactctttaacatacaagaaacatgtatccaaggaaacattttatcattaaaaattacctttaattttaactgctgtttctaagaaaatgtagttagctccataaagtacaaatgaagaaagtcaaaaaattatttgctatggcaggataagaaagcctaaaattgagctttgtacgaacttaattaagtaaaatccccttcgctgaaattgcttatttttggtgttggatagaggatagggcagaatatttactaactaaataccattcactactcatgcgtgagatgggtgtacaaactcatcctcttttaatggcatttctctttaaactatgttcctaacaaaatgcagatgataggatagatcctggttaccactcttttactgtgcacatacgggctctgactggttttaaatagtcaccttcatgattatagcaactaatgtttgaacaaagctcaaagtatgcaatgcttcattattcaagaatgaaaaatataatgttgataatatatattaagtgtgccaaatcagtttgactactctctgttttagtgtttatgtttaaaagaaatatattttttgttattattagataatatttttgtatttctctattttcataatcagtaaatagtgtcatataaactcatttatctcctcttcatggcatcttcaatatgaatctataagtagtaaatcagaaagtaacaatctatggcttatttctatgacaaattcaagagctagaaaaataaaatgtttcattatgcacttttagaaatgcatatttgccacaaaacctgtattactgaataatatcaaataaaatatcataaagcattttaaa

SEQ ID NO: 79835 - DNA, 607 bp, Homo Sapiens
  misc_feature (43)..(43): n is a, c, g, or t
atttgatccataagatttaaatgtgccaccattatagtattcntagacatgagcttgatgaatggtattctgtaattataacgtgccacacattattgtgtcttaattgcccttagcctgaattttaatgatcaatttgttattgttgcagatgtgaatattgtgcataaacttactaaatttatgtaaaattgtataaaatagaattagaagtcactaagttctttctgtgtagaagtaataaatttattgtaacacaatgcagttgtgtatatgacattctgtaattccttgaactggatcatatattcataagttctgtagatacttatgcatgaacattttctcatttagttcttgggttcattatttgtattgtgtttactacttgtgatcatgtagttgtgccttactttgtgagaaaggttaactcagtaaatactgcaatttctaaactcagtgattggaaggttattaattataaatgtaactgataaagtacgtgacagcatttaaatctgtataaagaacaatggaaggatccttattgaattgttgcttttttttaatatgtttaaatattatattaaaaacatttctttctaaa

SEQ ID NO: 79836 - DNA, 577 bp, Homo Sapiens
  misc_feature (54)..(54): n is a, c, g, or t
tcaaaagccagggtgcccccagaagaactgagacaaactgagtttctgaacatntgaaaatgaggagcaggctcaggatccacagggtgtaaccatcccgtgaggccctgcctgagcagccagccagtcagtgaggctcttcaccttacttccatttctctgattccacctatgtacaacttacgaaaacttgcattattatagactgggagttcttaaattggaatctgtgaatctaaaggggccagaggatagaaatcaggaaatctgaaaacttcgatggaaaaaagaagtttttatttatttccatcaggaaaataggcaacaaaccacagcagtattagtacctgtgtctctgtcatcactaggaatcacagatatccacgttacagatatcttaaaatatttatgtacagcaccactctgaaattatggtaataattagatccaccccctaggtcttgtaatctttaatatgttaataaagaagcacatctattatgtgacagatttaaatgtttaagaatttgatttcaatgaaattgcatttcaataaaattggcaaacaattgcaaaa

SEQ ID NO: 79837 - DNA, 923 bp, Homo Sapiens
atgaggcaccacacccagcccatataaacatatttttaagcaaagtgactacacgtggaaatcctagtgttttctgcatacattccattggattgttttacacacactggtgtatgactcatgtcagagaccacagagttggggcctgtctatggcagtcctctgagattggcttggcatgcgtgggtcttagggaacccaggccaagtgtcagggatgagcttcctctatgctcgcatcattccagagtcccacagtcactgacatcacattggattcctctttccctcctttaaaatgtttgtcaatagatggcttctcctctgtgagtcttcatgtggcaggccaggtctcactaatgcaggcctccatgacaactgtttcagtactgactgagtggcgaagttaaatattaaaagctgatagagccagtgccctatacaaatgctggaatgtaacaaaagcccaccaagagttctgccctggcctttcctgggccttgaagcatgacaagataatgaggaattttccacaggacccgtttgggattatacaggttttattgggggtctgaagaaactccccaggcctccacaggcaagtttattggggtctgaaggaactccccaaaccatgatttagcaggaaacaagataagggtaatcaccccagcacctggacccatttagattaaataaatttactgaggctccaggggaaggtcttcaggactcagatcttagttagagatcagaaaaagtcgaccacttatgtctgtagatgaatgcacacttacacacagacatatagcttagaaggtatataagctctggaacactgtgattttgagttggtctggggataatttctaggccttctccctgtatccagttacagaaataaactccctcctttcccagttc

SEQ ID NO: 79838 - DNA, 712 bp, Homo Sapiens
  misc_feature (15)..(15): n is a, c, g, or t
  misc_feature (88)..(88): n is a, c, g, or t
acaagagtgagcgcntagtgggcagaaatgtagtgattgtggaacaaccttttccaagaaatcaagcctttgtagttaatcaggaatntgaacagagaataagcctcacaaatgaagtgaatgtggccccatcagtaataaattatatcttgtatcttacagatattgtatcagaataaatcttctgataccagaaaggtgggaaaatctttagtaggaatcctccagccattatatcccagagagctcatttagggctgaaacactgtggaggcagtggttgtggaggacatttctgtgagaagtcaaacctgttaaacaccattgaaatcatgttgggtagaaatgcagctgttatgaggaagtctttacctggagatgatatctcaattggtatcaaaagaattcttacaggaatatttatgaaagattgtgatggtgcttttagcgctaaattgtgcctcgtgtgccaaagaaacatagacaactgtagaggcaatggatatggaaaacatttttcgtaaaatatgggagaatttatagaaaagaaaaactcttgaaagtaagaaatgatggcaactcaccaaattaactcatgtatcatacttttatgtcttgagagtcttggagggacgtgtttaatgaaatcttgaaccccaggaatagtattatgtaatgaaaacctatgaatataacaaatatggaagtaaaa

SEQ ID NO: 79839 - DNA, 917 bp, Homo Sapiens
  misc_feature (349)..(368): n is a, c, g, or t
  misc_feature (387)..(387): n is a, c, g, or t
  misc_feature (394)..(502): n is a, c, g, or t
  misc_feature (512)..(525): n is a, c, g, or t
  misc_feature (601)..(650): n is a, c, g, or t
gggctctcgagtccgggccgcaagtcccagacgctgcccatggaggcgtccagcgagccgccgctggatgctaagtccgatgtcaccaaccagcagtattaaaatgaagatactttatgtaaatatgaccagcgttgaaactaaaagttgagtgtaactgcagtaaaattgaataaatatctgcattccagaatttctacagacagttcaaggaaattgctgcagttattgaaacggtgtgaagacggattctttggttgataaattgctaccattctaaagtcatggacttcactttcggcaacaaaactaaataaggatggaacatttattgaatgaaaaatgcacnnnnnnnnnnnnnnnnnnnnaaataataaaaatcagacnaacaggnnnnnnnnnnnnnnnnnnnnnnnnnnnnnnnnnnnnnnnnnnnnnnnnnnnnnnnnnnnnnnnnnnnnnnnnnnnnnnnnnnnnnnnnnnnnnnnnnnnnnnnnnnnnncctttgcggnnnnnnnnnnnnnnaaaaaattttttaaaacctttctttgggcccggggccccaaagggaaaggaaactgggcaaaactgtttcccaagnnnnnnnnnnnnnnnnnnnnnnnnnnnnnnnnnnnnnnnnnnnnnnnnnngggggaacccaaggtttttaacaaatcccaaaggggttttgggggcttttcggggttttaccacgggggtcccaggggactccaaataaaattaacccccgccctggcatttattggaaaaagggggggaaatcaaaaaccaattcccgccaccgtggaaccccttccaaacggggttggatgaaccttaaatccccccgggggaattcacacccttgggccccctgtggaataaaaattttgcccccggggggaaaaaagcggggg

SEQ ID NO: 79840 - DNA, 1016 bp, Homo Sapiens
  misc_feature (748)..(841): n is a, c, g, or t
ggggctggtctgggggcgttctctcgagtccgggccgcaagtcccagacgctgcccatggaggcgtccagcgagccgccgctggatgctaagtccgatgtcaccaaccagcttgtagattttcagtggaaactgggtatggctgtgagctcagacacttgcagatctcttaagtatccttacgttgcagtgatgctaaaagtggcagatcattcaggccaagtaaagaccaagtgctttgaaatgacgattccacagtttcagaatttctacagacagttcaaggaaattgctgcagttattgaaacggtgtgaagacggattctttggttgataaattgctatcattctaaagtcatggacttcactttcggcaacaaaactaaataaggatggaacatttattgaatgaaaaatgcacttttgcccttccatttttttaaatactccacatcctaccaacgggctaccattctcccggatccctactcaccctgttggccgccctcggccccccaaaaatctttcaaaaccactccgtttgcccccccggggccccttcccgccaattgaacctgcgccatacctgggtcttttagggaaaacccccggtccctgacctacccgtttggactccccccccaataaaaacaccgtttcgcccgccaacccgcatttttctttgaaccaacacccaaaacgggaattctcttaaaggtcctttacccggcatcctctcccaaacggannnnnnnnnnnnnnnnnnnnnnnnnnnnnnnnnnnnnnnnnnnnnnnnnnnnnnnnnnnnnnnnnnnnnnnnnnnnnnnnnnnnnnnnnnnnnntcttgtccgtactttggaaaaccctctttccaccgccttctttacccctccttatttccccccaccgcccccataggttctctttgttgtgccccaccccctataatatttctccgcctaagggtgccaccccgcccgccgcgtatatacgcctcccccgcccccctgtgttttc

SEQ ID NO: 79841 - DNA, 604 bp, Homo Sapiens
agaattcggcacgaggggtagttatggttccaccagattttagctgtgtgagcttggacaagttatataacctctctgtgtctcaccttggtcatctgtaaaatggaaacagtaaaagtactatttacaggaatgttgtactgtttacagtactgtttacagaaatgttgtgagaactaaattaatgtgtgtgcataaatttagcacatatgtatttagtgtatatatatacacaaatgcacacacataatacatgaatttacatacacagagtgctgttcaagtgccatgatatgatgatgaaaattcccctaatcgaccccggtcagcttctttttctgtgtctacactggctgtccaatggtggaactgagacttccacaattattgagctttactgcataaggttgaaaggatcagggggcagtccttagcctggctttatttccgcctgatcaagagagagtgaacaaaaacaatcaatatggaatctgtgagaagatctcacagcaccggcaggaagaaaattgtcccgaaggttcagatgaagagtttattatctcagaaatgattttctgtaagaaagaataaaactctaaaagtc

SEQ ID NO: 79842 - DNA, 449 bp, Homo Sapiens
  misc_feature (335)..(370): n is a, c, g, or t
caaattaaaaacatgaaaattacaccaaaaagatggaactacttttgtagcacaactcagaacttctgttcgtaacaccggactagagaagaggtcgcttttggctgaatctaatgaccttagaagggaaaggccattgctgggcaggatctggtggcaacgcacacggaagtcctagaactctatgaagcctacctcaggccctgcgggtgcgtctggagttccaaggcatttggggaaccaaagcaatttcagctaacagtgaccagtttttagaatggagcttatgatcagaggaccataaaccctcatccaccctagagctcaatgccagnnnnnnnnnnnnnnnnnnnnnnnnnnnnnnnnnnnngctttttgtgctatatcagaatgctggcaggtagacaattcagtaacctgtgccactttctaaacatctgtaagaccac

SEQ ID NO: 79843 - DNA, 1011 bp, Homo Sapiens
  misc_feature (298)..(311): n is a, c, g, or t
  misc_feature (363)..(401): n is a, c, g, or t
  misc_feature (430)..(830): n is a, c, g, or t
aaccatccaggcatttaataacagcatgggctgccaataggtagtgtagtcttgaagaatccccaacacataagtcaactgcttgatccaacagttatcctcacagtagtcccaggaattctgctgaggaagtgtgtataagtcttatgatgctcagagtcctgggccccactgcgtctttgaacgtcaaacggggttaaggcagctcggggcaggggaggcatcttctagaagccatactgctcagtgacttcctgggcaaagaccccttcatccccacaaagttcatggccttggnnnnnnnnnnnnnntcaatgccagcttcctggttcccgaccaattcccaaaccctccacctgaccnnnnnnnnnnnnnnnnnnnnnnnnnnnnnnnnnnnnnnngcctacagccgcctcgtgccgaattcttnnnnnnnnnnnnnnnnnnnnnnnnnnnnnnnnnnnnnnnnnnnnnnnnnnnnnnnnnnnnnnnnnnnnnnnnnnnnnnnnnnnnnnnnnnnnnnnnnnnnnnnnnnnnnnnnnnnnnnnnnnnnnnnnnnnnnnnnnnnnnnnnnnnnnnnnnnnnnnnnnnnnnnnnnnnnnnnnnnnnnnnnnnnnnnnnnnnnnnnnnnnnnnnnnnnnnnnnnnnnnnnnnnnnnnnnnnnnnnnnnnnnnnnnnnnnnnnnnnnnnnnnnnnnnnnnnnnnnnnnnnnnnnnnnnnnnnnnnnnnnnnnnnnnnnnnnnnnnnnnnnnnnnnnnnnnnnnnnnnnnnnnnnnnnnnnnnnnnnnnnnnnnnnnnnnnnnnnnnnnnnnnnnnnnnnnnnnnnnnnntaggtcagcataagggcaggaccgtaaaaagccggttgctggggttttcataggcccgccccctgacgacatcaaaaatcgagctcatgtcagagggggatacggacagactataagatccagggttcccctgagattcttcgtggtctctgttcgacctgcgttacggtactggcgcttc

SEQ ID NO: 79844 - DNA, 1007 bp, Homo Sapiens
  misc_feature (198)..(198): n is a, c, g, or t
  misc_feature (253)..(263): n is a, c, g, or t
  misc_feature (926)..(935): n is a, c, g, or t
cccacgccttcccgccgtgcgatcttatccaatcccgcagttccgatggaagcgccgtggcccaagcaatattggatcgtcatcatggcaccccggtttacatttatcttccgctcgtatttgttggaatgtgcgggtaacaattcacaccagaacagctatgaatgcttcgaatttatacgactcactataggaatnttggccctggagcccaggattccgccacgaggaccacctaaattgaggagtgcgnnnnnnnnnnntaggtgttctgttaatttagagctgagctgagaagataatatatttttattgtcaatgacattaacagatatgcactgattcttttatacctacaatttacttaatgttccttttattaaaacgcgtggttcatgagcaactacagactgaatccagattattacctgttgctttcagtattttcgtgatggcttttaatcttatgaaatcatcttgagatcattcatggtcaagccatgaaaactcccatcttcaagcctgcctgctaaagcttctttgccttcctgattgtgattatggtaacaatttatatcagacagttgtactttttgataacttagggaaaacagaaatgacttgaacaagggattgcctgcctcactgcattgcagagatacaatttctgtaaagaacacaaatagcagttgtgaatattaaggtgtgattatctttccctgtccatgtgcttattgaaagaagatagtgaacaaatgattatattgaggatttttttaatttataagatctaatgtgaaatccacacttggaactttttagatctgtctgttgcttgtttaatatatttcttttatgacattacttaaagtttaaaagggttttctatccactgtcaatttcaattggataacattttgtcaagnnnnnnnnnncctgattatttgatgctagctggaattcaagaaatggcattgaccttattcaaataaagaaatattttagta

SEQ ID NO: 79845 - DNA, 1902 bp, Homo Sapiens
  misc_feature (289)..(369): n is a, c, g, or t
  misc_feature (1820)..(1828): n is a, c, g, or t
gggcgccggcactccggtccctgccgctccccgtccccgctgctcctagcccctgccgcgtccccggcggagcgggcatggcgccacccgcggcgcctggccgggaccgtgtgggccgtgaggatgaggacggctgggagacgcgaggggaccgcaaggcccggaagcccctggtggagaagaagcggcgcgcgcggatcaacgagagcctgcaggagctgcggctgctgctggcgggcgccgaggtgcaggccaagctggagaacgccgaagtgctggagctgacggnnnnnnnnnnnnnnnnnnnnnnnnnnnnnnnnnnnnnnnnnnnnnnnnnnnnnnnnnnnnnnnnnnnnnnnnnnnnnnnnnctgtaacccctgccagacggaggacttccctcccggcgcccctgtcctgtcggcggcgagggctcccaccggagcagggtgcgcccccgcgtctcctgggtgagccgcgtccccgcgggccgggtgggctgggccacgcagtcgccgctcaccgcgcgggacgcggctctctccctcccaccctcgggcccagagcgcgagcagctgcaggcggaagcgagcgagcgcttcgctgccggctacatccagtgcatgcacgaggtgcacacgttcgtgtccacgtgccaggccatcgacgctaccgtcgctgccgagctcctgaaccatctgctcgagtccatgccgctgcgtgagggcagcagcttccaggatctgctgggggacgccctggcggggccacctagagcccctggacggagtggctggcctgcggggggcgctccgggatccccaatacccagccccccgggtcctggggacgacctgtgctccgacctggaggaggcccctgaggctgaactgagtcaggctcctgctgaggggcccgacttggtgcccgcagccctgggcagcctgaccacagcccaaattgcccggagtgtctggaggccttggtgaccaatgccagccagagtcctgcgggggtgggcccggccctccctggatctcctccctcctcccaggggttcagatgtggtggggtagggccctggaagtctcccaggtcttccctccctcctctgatggatggcttgcagggcagcccctggtaaccagcccagtcaggccccagccccgtttcttaagaaacttttagggaccctgcagctctggagtgggtggagggagggagctacgggcaggaggaagaattttgtagagctgccagcgctctcccaggttcacccacccaggcttcaccagccctgtgcgggctctgggggcagaggtggcagaaatggtgctgggcactagtgttccaggcagccctgggctaaacaaaagcttgaacttgccacttcagcggggagatgagaggcaggtgcactgagctgcactgcccagagctgtgatgctctgtacatcttgtttgtagcacacttgagtttgtgtattccattgacatcaaatgtgacaattttactaaataaagaattttggagttagttacccttgaagctgacctcacttctgggggggatgatgtgaccttccttgggggactgcggaagggaccagggttggctgccgtcttaaagtatcccctcaaggggccaaattctttggcgatgcccgacttttttgcccaaggaggccccctataagggagggcctgattaataagctttgggccctggggcggtgcgtttttaaaaccttccggaactggggaaaaacggtcatgtgtggggaatccttttgggggaaaagagaccctttacctcttcttnnnnnnnnntggaccaaaaaatttggggcgacaaactttaccctctaccgaagagaatctttaaaagcgtctctaagggggag

SEQ ID NO: 79846 - DNA, 1040 bp, Homo Sapiens
aaattaggctagtacgaggcctggtttgaatcggcacgaggggagcgcggacggctgggctgctgctgggcggccgcggggcagcggagggcgccggcactccggtccccgccgctccccgtccccgctgctcctagcccctgccgcgtccccggcggagcgggcatggcgccacccgcggcgcctggccgggaccgtgtgggccgtgaggatgaggacggctgggagacgcgaggggaccgcaaggcccggaagcccctggtggagaagaagcggcgcgcgcggatcaacgagagcctgcaggagctgcggctgctgctggcgggcgccgaggtgcaggccaagctggagaacgccgaagtgctggagctgacggtgcggcgggtccagggtgtgctgcggggccgggcgcgcgagcgcgagcagctgcaggcggaagcgagcgagcgcttcgctgccggctacatccagtgcatgcacgaggtgcacacgttcgtgtccacgtgccaggccatcgacgctaccgtcgctgccgagctcctgaaccatctgctcgagtccatgccgctgcgtgagggcagcagcttccaggatctgctgggggacgccctggcggggccacctagagcccctggacggagtggctggcctgcggggggcgctccgggatccccaatacccagccccccgggtcctggggacgacctgtgctccgacctggaggaggccctgaggctgaactgagttcaggctcctgctgaggggcccgacttggtgcccgcagccctgggcagcctgaccacagccaaattgccggagtgtttgagggctttgtgaccattgcagcagagtcctgcggggttggccgggcctcctggatctcgtccttctccagggttccatttgttggggattgggcctgtaagttccgggtttccgtcctcctggatggtggcttcgggccccctgtatcggccgtatggccgggccgttttaggacttttggcctgcatggggtgtgcggggcgcgcgggcacgtc

SEQ ID NO: 79847 - DNA, 1061 bp, Homo Sapiens
  misc_feature (78)..(79): n is a, c, g, or t
  misc_feature (96)..(96): n is a, c, g, or t
  misc_feature (117)..(117): n is a, c, g, or t
  misc_feature (132)..(132): n is a, c, g, or t
  misc_feature (152)..(360): n is a, c, g, or t
ccccatgatcccggaattccctgatggagaccccgttccccctgtgatgatgaacccttcccgcaccgaacgccagannaggatcatttacgaganccgaagacgcccatacgcaancccccttcccggggntggccgttcatatgcagctnnnnnnnnnnnnnnnnnnnnnnnnnnnnnnnnnnnnnnnnnnnnnnnnnnnnnnnnnnnnnnnnnnnnnnnnnnnnnnnnnnnnnnnnnnnnnnnnnnnnnnnnnnnnnnnnnnnnnnnnnnnnnnnnnnnnnnnnnnnnnnnnnnnnnnnnnnnnnnnnnnnnnnnnnnnnnnnnnnnnnnnnnnnnnnnnnnnnnnnnnnnnnnnnnaagaattcggcacgaggactgcagccaggtctgggccgaggctctgagtgactttactcacttgcatgaaaagcaagggagtgaagagctaccaaaggaggccaagggaagaaaggacacagagaaggaccaggtgccagagccggaggggcagctggaggagccgacactggaggtggtggaacaagcttctccctactccatggatgacagggaccctcggaagttcttcatgtcaggcttcactggctatgtgccctgcgcccgcttcctcttcggctccagctttcctgtgctcaccaaccaggcactgcaggaatttgggcagaagcactcaccaggcagtgcccaggaccccaaacatctccccccacttcccagaacataccctcagaacctgggtcttttacctaactatgggggctacgtgccagggtataagttccagtttggccacacatttggccatctcacccatgatgctctgggcctcagcaccttccagaagcagctcttggcttaggccactggacatcaagttcccttcccttttcatcctatcccagccatccttttggaagggagagaggtgggtgggagggtgggagggtgggggaaccacaaagagaaaatggtttggaggctgagcaccttttttattaataggtataataaataaataaataaatacataaacagac

SEQ ID NO: 79848 - DNA, 418 bp, Homo Sapiens
gagtactcagttaagttgtggtttgaccttcctcaacttgacaagaaaagctaatttaagagaagaaaaacataaagtcattatattaattaaaagaaaaaacaccatttaatatgttctgaaaacattactcacctgtatgaccaggttgccagtgtactggtctagcaacatagggaaatgatccatatggaaaatcagaatgcgattcttctgttgtaaaaaaatatatgtactataagctacataaaatattttctatttttttcacaaaactgttaaaatatgagttactctctttattgtaagttttttctttatttatttccttgcatatgttttagagctactctgccagttattatacagaaactatttgtcaatgattatgtaataaacatatgattttataaccaaa

SEQ ID NO: 79849 - DNA, 487 bp, Homo Sapiens
aagatatgttagactgggattgtcttcatcatcatctttatccagtcatacagcaggggtgacagaaaaacattctcaggactcatacaactcactgtcaatggacataataggtgatccttctcaagcttatactggttctgaaggtatgatttagtaatatgccagaattagatttatgcatgttgtttactgagctctagtcagtcctttctggcggggatacataataatttatatactccaacaatatgagttaaattaatcttgaaactttctcccctttcagttactttttgtcttgtgtccatatttgttttgtggtgacccacctaaacagatttttaatgtgacctatgttaagttgaaaactaatgcaccataagcctcagtattttaagagcctgaatcatttttttgaaatgtttattttattcaaaagggtttcaagaagaaaataaatttacttgtaatctcaccttccaaa

SEQ ID NO: 79850 - DNA, 921 bp, Homo Sapiens
  misc_feature (740)..(740): n is a, c, g, or t
  misc_feature (746)..(746): n is a, c, g, or t
  misc_feature (748)..(748): n is a, c, g, or t
  misc_feature (750)..(750): n is a, c, g, or t
  misc_feature (755)..(755): n is a, c, g, or t
cccacatcttaagcatggtggtgtatgtgctgtatatgtagtaaaatggaattcgcacctgtgaacttgctctttcatgtgaaaagataagcgaggtcattgtcagagattggttggtttgccttgcaaaacagaaaaatggaattttagctcaaaaagtagaatctaaaatcaacacagatgtacaactagattctcaagagaaaattggagttaaaggtgagctgtttcaagaggatgaccatgaagaatcgcattctgattttccatatggatcatttccctatgttgctagaccagtacactggcaacctggtcatacagcttttcttgtcaagttgaggaaggtcaaaccacaacttaactgagtactccagatgacagtaactgacttgaagatggaaaaatatcaaaatagaactttatattgaaaatcactgcttccatagattggcatttttagctattactatgacttatataacttatacatataattttgaaaataacaactaaaagatgtataacatagcaaaactgcttaaacatcccattttgacacttgtcttgcagttagtttgacattttgtagttaatgattccaaattggtttagttgggccatctcattcttcacttcctgtaaaccactccatagatttgtctttcttcaagaaattagttttctttcctttatttgattgatggtcattgactactgaaataaaatatgcatttttnggattncncnaccanaccaccacaacaaaaagggcggcccgcctccaaaagtacccctccgagggggcccaaggcttacgcgtaccccaacttttctttggtacaaaggtgtccccctataaatgaagccggtattataaacctagggcccttggcccgtccctttttaaaaccgtcgggg

SEQ ID NO: 79851 - DNA, 1078 bp, Homo Sapiens
aactcacggctaggtacgaggcctgggtgttgaattcggcacgagggattgtgggtgcttcctagaggcctgccttcttctggaactggaagtgggctatcaccatgggcaagcccttgggtgcaggctccccacctgcctgggaactctggcagctctcctcagctccttgggcttgagcagctgcaactgccccagatttgctgtggaagcaggggctagccctggcctcaccagggcctccctggggacctgcattagatgaatcggaattcctgggctgctctagatcctttctgggcatccagcttccagttaagctctgtttgccaaacaaactattctcagctgccctttggcctgcgcctgatgtgttcctgttgcagtcccgcctgcctgagacaggagcaggcaggagagccttcatgcccagattcccacaggacaattggggagctgctggcattgtctttctgggaagattctgctttcttggaccaaatggcagcctgattaccagtgtcgggcctgcatgctgcccccgacacacgcacgcacgcgcacacacgtgtgcacatgggccatagccacaagccagctctcctccagggtcctttcaacctcgctgtccagggaccctgtccttcttgcccgtggggcttccatctggcagagaacgttcagggcttgttgaacttgaaagctcattagacttaagctgtcacctgtgcttggtgccccaggaacagccagagaggacagtgcccactcacttcttgttggcagcctcctgtgcaggaagtgccagccgggcctcgacgcaccagctggctgtgggtcctgaggaggggcgggaggcggccgctcagtgcagatggggactcctctcctctgccctgaccttaccctccattacctccttcactggagtggggctggggggtgggtggaatcagtgttttaatcggatttttaaaaaacattttatttctttgtacaattaccatcctatgtaaagatgaaatttgtgttgagttgaagattgtcatggaataaagatcacaccgtacttgaggcc

SEQ ID NO: 79852 - DNA, 1035 bp, Homo Sapiens
catttgtgcctctttcccattcggtcatgcaggtgcggccagttttagccgatgcctttgccgggtacccggttattggtgggcatccgtagatgtaaaccggtaagtaattggccatgtcaaaatcgcttcaagaactgctgaatgaaataatttatgcttgcggagggttttggttgaagatagtgtcgttatctagtgtaatgttaaaccaatagcaggatctactagagaataattgatacattaatataggggccagccaagatcctgaaaagcctgggagaagagcatccaagcacaggtggagagacataagtttaggctgctggcagctgtgagagaactgtacgtgtaagggggagatataagatgtcctgcataagtattttccctgtagattgcaaagtcatctatggagaggaaaggtacaaaatagtcactggggagagcaggtgaattagatgccagcagggtggatggatcatttgaggtttggggtgacagatcaactgagatccacttacacttctgaaaacgcaagaacactttagaaattaacaacacttaaagctttttacatcatttgtaaataactggtggaacttaacaccacaaaataaagtattataaagaactttatatgaataaaaatatatgcagtctgaaagtgatgcctcagtccttttgcatctgggcactagttgagaaccagcccagccctgggaagacgtcctcccacttgtactattgcacagcaggctagctgcagttcagaattccagaatgttcatcagatgcatctggtcttggttgtggtggacacagacacaagatagaaatgaatgattgctatcctgttccagaaatgaaaatgtggtatcaagtgaatttttacaaaatacttattcttccagttaaaacaaaaggtccttcagcacaactgtgctgtagttaaaccatggcctataatcccagcactttgggaggctaaagattacagatgtgcctcgtccgaaaaccccggcctcacct

SEQ ID NO: 79853 - DNA, 1081 bp, Homo Sapiens
ggctattgacagtaagataattctcacgttcacacctggtggcaggcttcactgtagggacggacattgcagttacaccacgattccttcctcttcactggctcgaggtaaacccttttcaaggaaaaacaactctaggatttcttttttctgtgtacgtagaccagtcccatcagtgtataatctctctctcacacgcctctctccaatagacagcttgtatttgcagtatttcatatttataaatatgcgtttatttaaaaggagaacaaaagcttgactctgattcacagttttgtatgtagctggtttgacgtagtcttttgtattttccctgccgaagtgaattgttggagaatgtaaaccgcctccacgtggcggcagacttcctaaggccccagctcgctggcctcgcgctgggcggctgggaattccacctgagaacaagtcccgcaaaccggggacggaaggacatttgacttttatttttgtatttaattgacatgaatgtaaaggggacagctcagggttgttttggagcctgttgactttgtatctctgcctgtgattttcttttctaaatgaaactccatgtagcaaccaggacgaagttgagaaggaaaacgccaaatgctttggttattagagtttaataggtaagctctgttacactaggtgttagagttccagaatgttcttttgtttgctaaaccttgaagaaacatgtgcctcagcctagatgttttgtcttctcttttctgcacttaatacctgacagtatgaccgatctctgcgcctttctgggggcgggcaagctggcggtagatttgtgatgtcacagtgcaaactgcagtgactgtaaattggcctggcgtgtataaacgttttcagggaatgcagaaggtattaatgaagagacaaaacctttattccatgtgctttgcttcattctgtacatagctctttggctcgtgaacctaattgtaaactttcaggtatttttgtacaaataagggactgatgttctgtttcttgtaattagaaataaacattaatacagtgttcttcattttcaaaaaaa

SEQ ID NO: 79854 - DNA, 732 bp, Homo Sapiens
gacccttggaaccaccaaagcaagctggatttaagacaagtccaggcagaccttgggggacaactaaagctgcgagatacaaagtcagcccaggcagacctcaaggtagcattaaagctctatcccgtcttgccgatcttggttatggctgtggcactgctgcttttccttaccctatgatgcatggcagagcagttcatggggtagaggaaactagcagtgaagtcaaaccacccaatgagtgaatgaggcaggaaaagagggccaggtttagaaggaagattgtgaataatcccaaagcttcttggttttattttgatatacataattttatggcctgggctttccaaatttgttttcctgtttggtttttttcctgcttttgctcaaaaactgccatatgctgacagatgcactcagggcatgagcagcggcattgtatttgtacataggttcaagtgtaacacctaactaaatcatttttccttttcctttagagttatggtcatgtctcatgtttcattactactttggggctgttctaaatagatgctttatgtgataaacaactgaaaccattatacctattagtttgtgaagtaagcctacagtataataaagacactaacgtatttttaactgatggagcaaaaaagcaaactaatgaatcaggattacttgaggtaatggctgtgtgagtttttgtaacatttattttcacaagatggtaac

SEQ ID NO: 79855 - DNA, 1075 bp, Homo Sapiens
ggtctgagctcccagtccaccccatgctccaccttcagagctgcctggccttctggatggagtccctctggggtcctggggattccccaccctgtgtgcctgggctctgcctctccctggtctgcccagttggtactgcccagctgtctgtcttccagctgagccagagaggagatgcccacagataagcagggtcagccgtgtcctctgtggtcctcccgtgagtctagggaggggatgccccagaggagcaaggtcagcagtgtcccctctgtggtccaagatccagggagaagcgtgtgctctgcacgctgtgctgaaccagaagtcacccccttacatttgactctgtcttcaatgtatttttagaaggaaactgtaaccactgctgcttcgaatgtgctgtcaccatcatagccacctcccctacaaagacacaagcaggagccagaggctgggaagcctggcaacctcgagaaatggcacctgggatgtcacttgcacaagaaaaagaagacagagtgtgcccacctggcccaagagctgaagcccggaagtggggttgggtgactgggccaggagcctctgccctcggtcctcccacctcgggaagaatccggggcacagtgttatggggcagttgtaggagtagccgacaaacaaaatcaggagacttctcgtcacattcagacttccagcttgctataggttggatgttcatcccctccaaatctcctgttgaactgtggctaccggtgctggaagtgggcctggctggaggtgtctgggtcctggggacagatccctcgtggcttggtgctgtcctgccatagtgagttctccaagatctgattgtttagaggcgtgtggcaccgccccgcactctttcctgttcctcttctcgccgggtaatgtgcctgctcctgcttccccttctgcctgagtggaagctccctgaggacccccggaagccgagcagctggcgatgccatgcttgtacagcctgcagaaccgtgagccaattaaacttatttctttatattacccagcctcaggtatctctttatagcaatgc

SEQ ID NO: 79856 - DNA, 985 bp, Homo Sapiens
aatgtttccccaacattctgcaagttaggccaaagcccacattcaaagaaatgagattaactcttaagtaatgtattaagtttatgtatattttaaaatattattaaaggaggtttgaaagtattgacatttaaaaagtcaacacttagattaaatttaggtggtagttttaatttgggttttagttaagagtgtgaggacatcaggaaaactgtttactactttggttttagcagctcagttttactattccataatgtgttatttttaaagttctctttttaagatcacagtgatatcctatcttcaaattttttaaatatgttcaaaatatctggagggtgagaagttaccaagtttgtatgttttgtttgactcaccatctttattttctgtatatgtagtagctggcaattgcatatattttcttgattaacatattagagactgcttccatcatcttatgtaaacctggaaacagctgaaactagtcttttctgaagaaccgtgtatcagtgttagatgtgcatcccgttttgtcattccctcagactttgaatacagtcattactctctggaagagaaatgtaagtatattttttgttatctgcagtatggtttaacatgtattaataatacacatatgcagactcactaaagtatccccagtaattagtaaattccaaatttaagtcagtacagttctgtatttgtaaattctgtctttcaaaaagttgttcgtgtttttaaaagttgatgtccaaaggaaaggagcttcttttaagtacttttggtgtatgttgaatatttatttgctatgatattctagaagaaaatatcaaacatgttaaatataagaacatgttaaaatttaaatttgctatttcaaaagttactgaagatgtcttggaataacaattgtcatgctgttaaactagttgcatatacttcattaaaagcaccatggagaaacattttaacaatg

SEQ ID NO: 79857 - DNA, 704 bp, Homo Sapiens
tttaggattttggtagagaatgagtaggcctactcatcaatatcaaacaggacatttagtttctttccttagaacagacataaatttaatttcatggtaatatgataataagaaaatgcttctatttttctttagcacctccatggttctcatatacccatgtctgtaaaaagtgacatgagaattttgttgggttacattttattgtatttattagattcgcttatatagatgacttaggcagaaataaagtcatgtctttagaaggtgaacaagccaacttgtgatggcctgccttttgcttttggcagttgggatgagaacaattgactctcccattggttgttagatagttgaaatggtgcgttggtggtcatacttagtgttctaggctgtgaaatcatggagttcttccacttccaagaatgactcatttgctgttggattctagtacagaatttagcagcctgatgtgtccccaaactgatttaatttctactgaagtgcccttgtgtacatttgttttgtaatttaccaaagtactacctgagtgtataatgactcctgcagtgagttaatgtaattgctgctttgaccattgttttaaatctgtgtactagagtaactgtgagcagaatgaaatcacattatctcagtgttcaaaatatcattctaataaagtacatgcattaaacaattttaaa

SEQ ID NO: 79858 - DNA, 1204 bp, Homo Sapiens
  misc_feature (1013)..(1024): n is a, c, g, or t
  misc_feature (1082)..(1116): n is a, c, g, or t
  misc_feature (1120)..(1164): n is a, c, g, or t
aacatagccaaataagatgactggggagaaaacagattaacacaaaaggtcccacctgtaagggcaacttcctaaagctagatatatagaaccgatggttttaaacataaaacttgattatgtagaagtttgcaaatgaaatatatcacgaaagcaaattcccatgcagctttattcacctcaaccatgtgtaatctacttaaggtgactagtgccactataaggcattactgtcccagggtgacaagaagcaatatttatactcaattcctgaaactgggggtctgatatgctttttaaaaatcctaaactaactaatatcagtagccatggagtcatcggcttgagggtaaactaatcccttataccacttgatttattttattaattagttaataatgcagttaattttcaactgcaaaaagaaaaaattattttgtggagtagaaagaccacagcaataattacttgatgcaaaaataagacaccttaattgtatttgctcaaatctgcttgtcttaatgataccaatatgtatcattataatctattttttaaaaattttcctcattatgccctagaacatcagttatactctaaaaagtcaaatgtccagtgtccgttagattgtccttaatgttgcttgtggactgaatgtagtgatattttacattggagcccacccatgatttgaacaatgagtggttcaaccctagtctaaattgtgcttgaaacagcacctctagccactgagagataacactcaaaggcacccaataacagttatattctagtctacaggtgcaaaaaggaggccttgtagattctaactatagatactggctacttatgcctcataattcccaatacatacatccactgtattttagccagattcaggacccttacacaccaattctgtgcccttaattctatacgcaattttaggaaccatcccaactgcaaaggcactcaaatttttaaatatttgggatgtaataaattattatgcnnnnnnnnnnnngagacggcccggccgtaatggccgaattcccgggcatatgtccggtaccgtcgactgnnnnnnnnnnnnnnnnnnnnnnnnnnnnnnnnnnncggnnnnnnnnnnnnnnnnnnnnnnnnnnnnnnnnnnnnnnnnnnnnnataaccggcgtagcgccctatagtgaagtctatacacttt

SEQ ID NO: 79859 - DNA, 609 bp, Homo Sapiens
  misc_feature (43)..(43): n is a, c, g, or t
  misc_feature (103)..(118): n is a, c, g, or t
  misc_feature (454)..(484): n is a, c, g, or t
aggagttcgttctgtattatttgtattaaatacgagcttgcgnaccaatcattttacatctggtttttaaaccgtaaggcaccatgaatgcagtgccgttacnnnnnnnnnnnnnnnnctgtgtgaaacaactcttattgtgatgttacttgttattgtttaaatgtacagaaacaaagggtaaaaatgtgttaatataccttgttccatggtgttgttcttttggggggaggggacgctactcaacacttaatagaatcacaacgctgttgggccagtagtatttattgctttagagattgcttgtcgtacctgtatgtcgtccctttttaaatatgttttcctttttcttgaaactgtataaagtttttttcccccttagcataagcatcttatatataacaactcatttgtacaaggtttttaagtttatatataaaatgtgtatatatannnnnnnnnnnnnnnnnnnnnnnnnnnnnnnctgtatgaaacccagatgtcaccaaatggacattaatagttgcattaaggatcagtagcattaacaaaagttgctttaaaagccattatgtaaaacaagacttgaaaatgagtgagggaatttta

SEQ ID NO: 79860 - DNA, 983 bp, Homo Sapiens
  misc_feature (102)..(132): n is a, c, g, or t
  misc_feature (647)..(660): n is a, c, g, or t
gaaactgtataaagtttttttcccccttagcataagcatcttatatataacaactcatttgtacaaggtttttaagtttatatataaaatgtgtatatatannnnnnnnnnnnnnnnnnnnnnnnnnnnnnnctgtatgaaacccagatgtcaccaaatggacattaatagttgcattaaggatcagtagcattaacaaaagttgctttaaaagccattatgtaaaacaagacttgaaaatgagtgagggaattttagcgacactgtctgagcagcagtgggaaccatcttcgtttcccctttgaactcccagtgggatgccctaccctgcgcccttaggacccggactgaccgtgtacaaaactttacgtgccaaaattctcagtgaatttagctttctccctctttttgatgctgtaatttttgttcatcatgttttgctgtgatgttacataggtagatttgtatgtagttttaatgtcacctataacaaaatgtgtttggtagcagattgtccagaaagcattttaaatgaagaggtataaacccttaagggccaaaattctgtatattagattactcttaaacgaaaaaccagctgccgcttttatgtacacatattacatacgagtaggcagcagactttnnnnnnnnnnnnnncctaggcatgttgatgttgcaaaatgctgtataaagctgaaacctgttcattcagtgccattgtagttgacatgaagcgattgtaaaactgtctccgatttttctctggtttattaaaatgctaactataacattttttgtgaatactttgaatgtttcctaacagttgtgatgttactgttccgttttatgctcttattccaagttcatttttaatggtttggaagccatttttgtaatgaataaatgttcatgctgtacagtatctgtagcatgccgttctggattaataaaagcaacttagtatgtgcagataaaaaaaa

SEQ ID NO: 79861 - DNA, 342 bp, Homo Sapiens
ggacagaggggaggaaggagcagaaaccaaaaatggcagttagggagaaatctcaggaatgtggcatcccatctccccttgagacctatcactgaattcacaacccttcgagctcatgctggtgcactgagtcccttgggcgctgtaaaggtttaaccccttgactgtaaactcagacttagagacatctgagtcacacagtccccgccattgtcacatattctcactgacactgcagtctgtgactcctccaatgtttcacgtgtattttatatttattgatgtctccttccgcagattcatttctttgtacttaataaactttagtaagtggaaatgctt

SEQ ID NO: 79862 - DNA, 1048 bp, Homo Sapiens
gggagatgacgtgcggctcgtggggcagctcggcagcatggcgtccgtgacgctgagcgaggcggagaaggtgtacatcgtgcatggcgtccaggaagacctccgtgtggatggccgtggctgtgaggactaccgatgtgtcgaagtggaaactgatgtggtgtccaacactagtgggtccgccagggtcaagctgggtcacacagacatcttggtgggagtgaaagcagaaatggggacgccgaagctggagaaaccaaatgaaggctacttggagttctttgttgactgttcagccagtgctacccctgaatttgaaggtagaggaggtgatgaccttggcaccgagatcgctaacaccctctatcggatatttaacaataaaagcagtgtcgacttaaagaccctctgcattagtcctcgggagcactgctgggttctctatgtggatgtgctgcttctggaatgtggtggaaatttgtttgatgccatttccattgctgtaaaggctgctctcttcaatacaaggataccaagggttcgagttttggaggatgaagaggggtcgaaggacattgaattgtcagatgacccttatgactgcatacgactaagtgtggagaatgtcccctgcattgtcactctgtgcaagattggctatcggcatgtggtggatgctactcttcaggaggaggcctgctcgctggccagcttgctggtgtcggtgaccagcaagggagttgtgacgtgcatgaggaaagtggggaagggcagcctggacccagagagcatcttcgagatgatggagactggcaagcgtgtgggcaaggtactgcatgcctccttgcagagtgttctgcacaaggaagaaagcctggggcccaagagacagaaagttggattcctgggatgatttgcacatcaactgctcaactgtggattgttttttacttttccttttaaaccggttcgtatatatttttcttcgctgttacgaatttacagcagcatttgtacatgtaaaattaaaggctattttctggtctga

SEQ ID NO: 79863 - DNA, 899 bp, Homo Sapiens
  misc_feature (630)..(630): n is a, c, g, or t
ggggcgcgcagatgacgtgcggctcgtggggcagctcggcagcatggcgtccgtgacgctgagcgaggcggagaaggtgtacatcgtgcatggcgtccaggaagacctccgtgtggatggccgtggctgtgaggactaccgatgtgtcgaagtggaaactgatgtggtgtccaacactagtgggtccgccagggtcaagctgggtcacacagacatcttggtgggagtgaaagcagaaatggggacgccgaagctggagaaaccaaatgaaggctacttggagttctttgttgactgttcagccagtgctacccctgaatttgaaggtagaggaggtgatgaccttggcaccgagatcgctaacaccctctatcggatatttaacaataaaagcagtgtcgacttaaagaccctctgcattagtcctcgggagcactgctgggttctctatgtggatgtgctgcttctggaatgtggtggaaatttgtttgatgccatttccattgctgtaaaggctgctctcttcaatacaaggataccaagggggttccagttttggaagatgaagaaggggtcgaaaggacattgaaattgtcagatggacccttatgactgcatacgaacttaagntgtgggaaaatgtccccctgcaatggtcactctggtgcaaaaatgggctatccgccatgtgggtgggatgcttactcttccaggaggaaggcccggctcccttggccagctttgctgggggtggtggacccaccagaggaagtttgtggacctggccctgaaggaaagaggggggaagggtccaccctggcacccacaaaaaccatcctttccagaatggatgggaaacctggggcaaacgccggtgggggccaaagggaatcttggct

SEQ ID NO: 79864 - DNA, 1350 bp, Homo Sapiens
  misc_feature (440)..(440): n is a, c, g, or t
  misc_feature (1177)..(1189): n is a, c, g, or t
cagcactcccacacctcccttccagcaggccagtggttatggccagcacggctacagtacaggttatgacgacctgacccaggggacagcagcaggagactactccaaaggtggctatgctggatcatcgcaggcaccaaacaagtctgcaggttctgggcctggcaaaggagtatcagtgtcttcaagcaccactggtctacctgatatgactggttctgtctacaataagacacagacttttgacaagcagggatttcatgcagggacgcctccacccttcagcctgccctcggtcttgggctccactggacccctggccacgggagcgacccctggctatgcaccccccaccattcctacacatcttgccagcccaccagcagccccactcacagctgctgcaccaccaccttccgcaggatgcacagagtggctcngggtcagcgcagccagcccagctccctgcagcccaagtctcaagcctccaaacctgcctacggcaactctccatacttggacaaactaaacccagaagagaggggtggggctggggcaaggcttattcctgggcaggagagaacacacgagcacgtatttgggagcccagtgccctttcctagaattcccgacatgtgtcagccatgcctctgtggagagtctgcctcccagactggctactgtatgtaatgtatttatgtatgtatttgtaaatgtgatagaagtctgggggggagttgggggatggcggcagatgttagccaggtctgccctccccattcaagccccttctccactgtagcaaaataagcacccccaccccatctgccttcaggtcttcttcacagcctgcactgcccagtgggccactaggggcagtctctggaagggctggttcaaggctgtttgggtataggggtcaggtaccaatgaagaatcacgacttgtctcactcctttggaaattgttttctttcctgtgtaattacttcatacctctgtttttgagaaactgttccgtttgtcatctgtcatggtctccttccaccaaatcttcatctgggaatagcagcggtatccctccacccaagtatggccacctgtttgtcttcatatagaacaggggcttctggtctggtcatgtccctagagacttactagagactggctgaccatgnnnnnnnnnnnnntaatctgagttattcagccagtcagctcccctttaaaaatctaaggtatctccaagcaacacatctccattctagttgtcttgaaccacgtgggcaactgtttcaggggttttctcttgcccaatccccacctaataaagttctgagagcatgaaaaaaaa

SEQ ID NO: 79865 - DNA, 649 bp, Homo Sapiens
agaatcggcacgaggcagaggaaagcctagctgagagtaagagatggttgaaaaaatgcaatgttatgattgctgaacagggcacgactgtttttgtaatattggagaaaataattaaagcctggcacctggggaggcttgatccctggaagcctcctcttgctgaaggaaaattcccagtgctgcctttccatgtgctgtgagtgctttgagttcagactgacaacagagtgggtctagcttctatgctttccatgaagatctcccacaaatgtcatccatgctcatgagatggatcaacttgtatcctgaacaagcaaaactgtttgggactcactgccttcaggcagtcccttggaagccaaggactctgggaacttttcagatgggactggaaacacttgggcaggagttcccctggtaggaggtctgttcacctgtacagcctaatggatgtcctgcttgaggtgccctaatattgcaaattctttgtttacaggggtaccacctgtgcccctgggactgtgcttctgtacatgaccacaactctcatgatgtcccctcagccctggaaagcatttgggttagcttccgcttactggtcagagttatactgtgcctgaattgatgcctcaggtcaagttaaaaa

SEQ ID NO: 79866 - DNA, 419 bp, Homo Sapiens
ttttctacctgacctgaggcatcaattcaggcacagtataactctgaccagtaagcggaagctaacccaaatgctttccagggctgaggggacatcatgagagttgtggtcatgtacagaagcacagtcccaggggcacaggtggtacccctgtaaacaaagaatttgcaatattagaagttaggaatgcaattagcctctgtattagagacaaagagcctatcagcagcttgatcttagatggtcccattagagaataagcccttttcagccaggttccaggacgttttcatagtttagcgctccacggagggggtccttaatctccaacggccccaacgtctgagtcctggtcattgagcctgtgcctgctttcagttcagcatagctcgtgttgaggctaaaacagctcaaggcaa

SEQ ID NO: 79867 - DNA, 728 bp, Homo Sapiens
  misc_feature (51)..(52): n is a, c, g, or t
  misc_feature (54)..(54): n is a, c, g, or t
  misc_feature (582)..(618): n is a, c, g, or t
ggggcgggggatttctgctgtgattgggttattatacccctgcattgacanntnttctaggagaaccacataaatttaaaaagagagtggcccagtgtaatgcggtgtgtagcagtctatgttggtataaatcatgccagtgctaaagtggatttcgataacaacatacagttgtctctcacactggctgcactatccattggactgtggtagacttttgatagatctagaagtggttttggccttggagtaggaattgccttcttggcaactgtggtcactcaactgatagtatataatggtgtttaccaatatacatctccagatttcctctatgttccgttcttggttaccatgtatattttttgctggaggcataacaatgggaaacattggtccgacaactggcaatgtacgaatgtaaagttatcgcagaaaaatctcatcaggaatgaagaaggcaaaaaatatcttttgtacagaaaagcaagatgaaaaggatgtgaaatggtagatataccaacaaaacttcagactgtaaaattgccaggatgcagttttccccttgattggcgtgtgtgnnnnnnnnnnnnnnnnnnnnnnnnnnnnnnnnnnnnntactgcaatctgtgattgcttcatctgtaaatcagttgtaaacctttacatatttgacttaaataactgtaagatatatatgtactacattaaaaagtgttgattaatag

SEQ ID NO: 79868 - DNA, 1173 bp, Homo Sapiens
gcggccgcggctgtagtggacttttgatagatctagaagtggttttggccttggagtaggaattgccttcttggcaactgtggtcactcaactgctagtataaatggtgtttaccatacgaatgtaaagttatcgcagaaaaatctcatcaggaatgaagaaggcaaaaaatatcttttgtacagaaaagcaagatgaaaaggatgtgaaatggtagatataccaacaaaacttcagactgtaaaattgccaggatgcagttttccccttgattggcgtgtgtgtatatatggaataaatatatatatacacacacacatattactgcaatctgtgattgcttcatctgtaaatcagttgtaaacctttacatatttgacttaaataactgtaagatatatatgtactacattaaaaagtgttgattaatagatgaaatttttaaattaattttttaaaacatgccatacattgtatcacaatgttaatgtgccaagatattgttcctgtcatgcagagtataagaatgctttgaacaatttgtagacttagtgaaataaaataagaggaaagccaaaaacaaacaaacaaaaagcatatggggagctggtattttctctttagcttactgttgtgcctttttatttttctaatcacagcagtatgagttatgagtgccctaatttgtggttagtttctaatttaatgttgtttcatagagtttggagtgttttgatacagggtgaaaatgaacttctggtttcaaacctgcgttactggagacagcccaaagagtaattttctgttttgacaggttttactggaagtatatgtgatgagccagaagaggttatcagcatttaaattgtttcgggttcttaaattgggaacagtatatataattaaaagtaaggaacattagaggatttaattagaataaatacatgttttggaaatacagtgacctcttgcagtgtcacaaaagtgcaaagtgatatttagctggtccatctgcaaatacagaatctcaatttgctttgtgcccatggagcatatagggaaaactccaaacaagatcaccaatgaggtttcctaaatctgtggggtcctgtcttcaatggggtcctgggaagcaaacccctgttagctttaacctgggttcacgcctatgaa

SEQ ID NO: 79869 - DNA, 1104 bp, Homo Sapiens
  misc_feature (49)..(49): n is a, c, g, or t
  misc_feature (54)..(54): n is a, c, g, or t
  misc_feature (86)..(86): n is a, c, g, or t
  misc_feature (114)..(114): n is a, c, g, or t
  misc_feature (121)..(121): n is a, c, g, or t
  misc_feature (222)..(222): n is a, c, g, or t
  misc_feature (285)..(285): n is a, c, g, or t
  misc_feature (1034)..(1034): n is a, c, g, or t
taattcagtgttgtataagtagatacatactgtaacatagaccttgttntgtcntatgtcgggtaaagaaagcagaaagggaattntatcctcctcccttccgtaaagtgctgngatattntgaatcccccaagttcccttggacctactgatgagagatagttttatgtatggggaaaaatggatactttttaaaccttttttggcagctcagatggtgtnaaatttaaaaattttgtataggtatttcataacaaaaaatatgtatttcttttttgttatttntatcttgaaaacggtacatattttagtatttgtgcagaaaaacaagtcctaaagtatttgtttttatttgtaccatccacttgtgccttactgtatcctgtgtcatgtccaatcagttgtaaacaatggcatctttgaacagtgtgatgagaataggaatgtggtgttttaaagcagtgttgcattttaatcagtaatctacctggtggatttgtttttaaccaaaaagatgaattatcaatgatttgtaattatatcggttgattttttttgaaaagatgaaccaaaggatttgactgctaatattttattccttacactttttttctgaataagtctctcataatgagtgcagtgtcagactgtgcctactctgatggtatgtgccatttgtaaaataaaatagagcagaaaaacacaaaaagagaacactggttcagacattcagtgggcaagtaaattatggactgcaaaataatgatttttattcaagaaagctttaaaagttttatatccagatatacaaccacaataaagcaaaataacctactatcaaaatagaaatgttgctatctttataagtgcaatttaatttgtaaatagagtttgaatcaaagtatcacaaaatactgcttcaagatttaattttaaatctgctaatttaagggatattgggaaaagttttggtgtgtttctgttgatttcttttttgtatgctgtgataaaagagaaatgaaaagtgccagtcnactgtgtggtgtctaggaaaatcatatatatttttttctcccaagaaataaattcatcctggacattggc

SEQ ID NO: 79870 - DNA, 537 bp, Homo Sapiens
gctgttcgtgtgcgcgtcctgggcgcggaggggcttctgcgacgctcgccggcggctcatgaagaggctctgccccagcagctgcgacttctgctacggtgatgcccacggggccgggacagggctgcgtgggagctgggccttggccatggtcggggctgagggggcactgacggggctctttcccccacccggagcagaattccccttccccacggtggccaccaccccaccgccccccaggacaaaaacacaggctggcgcccgagggcaggaacgtgaccttccgctgcggccagaagatcctccacaagaaagggaaagtgtactggtacaaggaccaggagcccctggagttctcctaccccggctacctggccctgggcgaggcgcacctgagcatcatcgccaacgccgtcaatgagggcacctacacctgcgtggtgcgccgccagcagcgcgtgctgaccacctactcctggcgagtccgtgtgcagggctgagcccggctgataaagcactttctctctgaaaaaa

SEQ ID NO: 79871 - DNA, 748 bp, Homo Sapiens
catgtcagaagggtgggcatgcggtatcattcattggacccctggaaaccatgcatctcaatgcagaaggtatgttaagctactgcaacagatacagcgaaggcataaaacatgtcctacagacttttggacccattccagagttttccagggccactgctgagaaggttaaccaggacatgtgcatgaaggtccctgatgacccggagcacttagctgccaggaggcagtggagggacgagtgcctcatgagactcgccaagttgaagagtcaagtgcagccccagtgaatttcttgtaatgcagcttccactcctctcattggaggccctatttgggaacactgcaagcccttaatcagccctctgtgacataggtagcagcccacggagatcctaagctggctgtcttgtgtgcagcctgagtggggtggtgcaggccggtagtctgcccgtcactttggatcatagccctgggcctggcggcacagcagcacttgcgttctcggggctgtcgatttcctgccacctgggcagataacctggagatttccaccttttcttttcagcttgattgcatttgactatattttacagccagtgattgtagtttcatgttaatatgtggcaaaatatttttgtaattattttctaatccctttctgagtactctggggccctgcatttatgaggcacctaccttcattttgctaacgcttattctgaataaaagtttttgattccttaaa

SEQ ID NO: 79872 - DNA, 273 bp, Homo Sapiens
aatgttaaagacaggtcctctggttaaaacggtttctgtagaaagaggatgatcaattttaatttcctttcccaacatgggctttgattttctgttttcaaaaacaggatacacagtgagaaatgctgggcgctccccactttgtgacctcatctacgatgagttatgacgggttaattataactgcagggaattatgcttatatcataggagattgaaatttcctgtgaggaaattagaaacctgtaagaaagccccagaacatgcagaagg

SEQ ID NO: 79873 - DNA, 711 bp, Homo Sapiens
cggggcagcaaactgacatggttgaatgatagcatttcactctgcgttctcctagatctgagcaagctgtcagttctcacccccaccgtgtatatacatgagctaacttttttaaattgtcacaaaagcgcatctccagattccagaccctgccgcatgacttttcctgaaggcttgcttttccctcgcctttcctgaaggtcgcattagagcgagtcacatggagcatcctaactttgcattttagtttttacagtgaactgaagctttaagtctcatccagcattctaatgccaggttgctgtagggtaacttttgaagtagatatattacctggttctgctatccttagtcataactctgcggtacaggtaattgagaatgtactacggtacttccctcccacaccatacgataaagcaagacattttataacgataccagagtcactatgtggtcctccctgaaataacgcattcgaaatccatgcagtgcagtatatttttctaagttttggaaagcaggttttttcctttaaaaaaattatagacacggttcactaaattgatttagtcagaattcctagactgaaagaacctaaacaaaaaaatattttaaagatataaatatatgctgtatatgttatgtaatttattttaggctataatacatttcctattttcgcattttcaataaaatgtctctaataca

SEQ ID NO: 79874 - DNA, 720 bp, Homo Sapiens
tttacatgtggggcctccctggagttctccacatgtaaatatagcgaaaaaagaaaacactacgtactagaataaacacgtcctaaaattctgtgcaaaaacaccttttgaacagcaaagatttcacccaccaaaacaaggaagcaagaagcttccacagtgtgcaggatccgaaacaggaccggcccggcgttgggtgagagtgggggaggggttgtcggcttctccatccagcttgccatgttctgtcgtcggtttcacattttcagagagactttaccagatgcaggaaatgaggatgaaggcaactctggaaggatgcaaagaagggagagcaagcactgtacctactgtctgctgtctaagagggctggtctcataactaaaaggtccagtccctgagatcttgtgtgcaaccgtcagaaatagttcaggacatcaaattgcacagagaagattcagatgaagggaaacaagaactctgtggaaaactgttggggacagtggcacgagttgtcttgcaaggtgatgtctgtcccgtggagggacacaagagcgaggacagcatggttctaatggccagggcatgtcttcttattccatgtgacagtggctggctgagttgctagtacgtttttgaaatataccctttgaaatatgttgattattctggacatctgtaaggtgggagatttgaataaaaagacttctgctgtcaaa

SEQ ID NO: 79875 - DNA, 1050 bp, Homo Sapiens
  misc_feature (11)..(11): n is a, c, g, or t
  misc_feature (34)..(34): n is a, c, g, or t
  misc_feature (65)..(65): n is a, c, g, or t
  misc_feature (78)..(78): n is a, c, g, or t
  misc_feature (82)..(83): n is a, c, g, or t
  misc_feature (86)..(86): n is a, c, g, or t
  misc_feature (109)..(109): n is a, c, g, or t
  misc_feature (135)..(135): n is a, c, g, or t
  misc_feature (138)..(138): n is a, c, g, or t
  misc_feature (207)..(207): n is a, c, g, or t
  misc_feature (252)..(252): n is a, c, g, or t
  misc_feature (364)..(364): n is a, c, g, or t
cgcctccttcngactgagacaaccgactggcgcntgtgctgaggtggcgtcatgggattgtcgtntggtgacgcgcgntctnntcncaagtcacccgatgccgctctgntgctgagcgtgccgtcgcgcccgctntgncgtgatgacgttacggaccactaagccatcgagtgttgatcccacaccagccgctcccaacacccatcncatggacctcagcaacaagcttgtgcttgagcccaaagccacacncaggagagggagtgtccatctgcgtctatcacgctgccaacacccgccttgtgccctgcggccacaacatacttctgcagatactgtgcctggcgggtcttcagcgatacgnccaagtgccctgtgtgccgctggcagatagaggcggtagcccctgcgcagggccctcctgctctgagggttgaggaaggctcatgaaaggaggcttcccagtatgagtggcagcccgggcctagatctgagtctggcccctgcagagaggaaggaggcgcagccctaccttctttctggggaagagtcagaaaggctgattagcaagaggtgcggcagagagaggaaggcagggaggtgctgtctgctgcctccacctgttccccaacaggatagcaaggaaaaacccctctttctgtccatgccagaactatccttctgatggggtgctttgtttagagatggggtggcccaatccccaatcagttttacatctgagggagttcaggtatctgttgtgactggtgaagccctgtacctcctgggtattgaagaacctggacttgaagcaggaggtatctgcaaggaatgtataaagttccacatggaagctgggttgcctcccacaagtccccagtagagtggatctgtagttacccgccctgcctccctttcagggtggtcatgaggtcccagagagaccatgcatctgaagatgatttaaaacatgaaagtgtattgttgtcactgtggtaatttccttgccagtttctgagatatcaaaataaagtttgtgtttcctgaatg

SEQ ID NO: 79876 - DNA, 1254 bp, Homo Sapiens
  misc_feature (87)..(121): n is a, c, g, or t
  misc_feature (1069)..(1083): n is a, c, g, or t
  misc_feature (1178)..(1186): n is a, c, g, or t
actgtatacgactcactatagggcgctagcgcgggtattttcgaatcgaccgagcgcagcgagtcagtagagcgaggaagcggccgnnnnnnnnnnnnnnnnnnnnnnnnnnnnnnnnnnncagtcgacggtaccggacatatgcccgggaattcggccattacggccgggggtttccgggaagcgggactccaaatgggtcgcagtcgcagccgctctccacggagggaacgtaggcgttcccggtccacatcccgggagagagaacgcaggcgccgagaaaggtccaggtctcgggagagagatcggagaaggagccgctcgcgatccccgcaccgaagacgctcccgatctccaagacgacatagatccacatctccttccccttctcgactgaaagaaagaagagatgaggaaaaagaagaaacaaaagaaacaaagagcaaagaacggcagattactgaggaagacttagagggcaaaacagaggaagaaatagaaatgatgaagttaatgggatttgcctcctttgactccacaaaaggtaagaaggtggatggctctgtaaatgcctatgccataaatgtctctcagaagaggaagtacaggcagtacatgaatcgaaaaggtggattcaacagacctttggatttcattgcatgagaattgaagtgttgaaggatgattttttttcccctcatcttggtcagagagtggattttgtattttgtatttaacttgcattcaaaaaacaggatctcagttctcctttcttgtaaagtaagaaaatcttatttatgatatatacagttaacttaccttgcctcaacagaagaaaggttaaatattacatttttttcttttaggaaatatcatttgtggcaggcgtcaaccccattttatttgtccttattcctgtggaagcagtatatgttttcttcctgaatgctcattaggacttcttaaaaaacatgaaagtaatttggaagtaagtttatccaataaagcagtatttctacccttttagatttgataaatatttttattactaaagaatctccccagacannnnnnnnnnnnnnncacacatagatttaagtatcttgattgttagtagtctaaaaatgggaagaatgaaaaagcataactagatttttctatcttctgtggtcgcccgnnnnnnnnnaaaaaaataccatttatggttctctccgcaagtataaaagcattacatgcaaaaaaaagatctcagag

SEQ ID NO: 79877 - DNA, 420 bp, Homo Sapiens
acttgcattcaaaaaacaggatctcagttcttccttcttgtaaagtaagaaaatcttatttatgatatatgcagttgacttatcttgcctcaacagaagaaaagttaaatattacatttttttcttttaggaaatatcatttgtggcaagcgtctttcttgtaacagtcttaaaacattgtgacaaagctaaactcctttcgaacagtactcagaatgatattgcccattctttctgctaatcctttgctttgtatcttttgtccatgcctgtatgtatatagcagagtaggaaattgggaaaatacatagtttgggcctttaaaaagaaaatgctgtaagggttattttacaatctatttactcaacactgtgccttagggatcttttcttgacagtatatataaatctaccttttaaa

SEQ ID NO: 79878 - DNA, 1116 bp, Homo Sapiens
  misc_feature (274)..(384): n is a, c, g, or t
  misc_feature (981)..(1037): n is a, c, g, or t
atttccatgaataactgacagaataatgatactttcagcaagataaaaaaacattaatagcagatttaggagataaagaagatgagtttgacattaaacatgttgagtttatggtgtctcaagacatcctttgaacatagtaaggagctatataggaatttggtctggaacttggaaatggtcagatttagagatacagaattttagagtctcagtttcctccataggtaagagtcgtgtagtgctgtgtttagagcatggcacaggagtgtannnnnnnnnnnnnnnnnnnnnnnnnnnnnnnnnnnnnnnnnnnnnnnnnnnnnnnnnnnnnnnnnnnnnnnnnnnnnnnnnnnnnnnnnnnnnnnnnnnnnnnnnnnnnnnagtttcccttgcaaaaattggttttctgttcttttggggtttgtttgctcgttttagaattaagtataataatccatgtgaagctcctagcatataatgagtactcaataatattaataattgttattgtcatatgattgaagctataggagtaaatgaagttatagaaaattataaacaaagtgctgggactacaggcatgagctactgtgcccagcctatactcttcatatttcttatgcttagggttcattgatcatggatctgcaaaaatataatgtataaggtttataacatctatggaaataaaacctgtgacaatagcacaaaggccaagaggagagaagtggaagtatattgttggattcttaaactttatatgaattgttataatatcatttgaaggtagactgtgataagttaaagttgtatactaataaagcctggcaatccctggtttaatgcaacagttataactaataacttaaaaagcagataaaatggagttataaaaaattcctggcaggcatggtggctctcacctgtggtcccaactaccttggaggctgatgcagagagaggctcgcttgggcacannnnnnnnnnnnnnnnnnnnnnnnnnnnnnnnnnnnnnnnnnnnnnnnnnnnnnnnngaatgagaccttgtgtcttataaaagggtggggagagagagaaaacactttttaaaatgtaaaaaacaatttctaatcc

SEQ ID NO: 79879 - DNA, 1327 bp, Homo Sapiens
tttttcagatttctagaatcctttaattgtctgcacccatagctgaagtaaaatacaatatcttattaaaaggcccgtactgaaagaagaatcagtaaactcttcttaagaagagtcagctgctcctgcgagtcagcgcatcttcttaaatgcgtgctctgcttctggtatccttgagtcattgctttagccaggctgcttccttgaacttggctgtgaggtgggggaatgtggttctcccttgagaaatgggttccagagagctcgaagatgagcagagtttgcctgggttaggtgaggtccaggtcatgctgtgccaacctctgggaacatgtagcagtggcaaagtgcaaccctctgaccagacatgggcagaggcagactctgacattgggtcttgtatatatatgtgaggcaggccctggacttgagtggaagctcagactgcagagtggggcacatgatggggtcccaggctgtgcctggaggagcagactgacctggcccttcagtttaagggccaggaaactgcacttggctatgcacatttgtgctcattctcatctgtgcctcaagtattttctgtctaagtttcttgggtggctcctttttagtaaaaactggtgctgcttaacttttgccaatagagtgggctgccacactaaagaggaatgcgtgtttcttggggtaagagaaccctaaagacgttttggtgaaatccaagtggaggggctatttccctaaaatctccccacttgtaggttcctaatccatcaaaagaacctgacaaaagaaacctgtctgggggcaacacagcatcacctgtacccataatcatgttttcccaatactttgaagtaggtgagcaataaagcagccctaggcaatcttagtgagacatcaaacttcacgtctttgtaccaatgtttagcattaggaaaaagactgatgggcctgatcagatgatctttccatttcttcagtttttaaatgtcatggatcacatcttaaagaccacagatacccggctttcctttgaaggtcactcatggcccacagtcatgtcctgatttcttccaggtgatgttctttccagaaagcccccctccctgttcctctggtctgagatggcagcttagggatgtggctgaaattcaagcactgaagccgaggccggcagagagggagcgccacgtctcaggtctcggccggcgcccccctccggggtgcagccacgtctgaaccgggacagcgggcgggggagccgcagagggacccagtgagacgggggagggagcccccaaaagtcagcgctcgccgcactcgc

SEQ ID NO: 79880 - DNA, 513 bp, Homo Sapiens
  misc_feature (271)..(288): n is a, c, g, or t
tcaattggtgtgtagtcaagtatagcaagtacttaataatgactgaatttcatgttcctacagtcatacatattcattagaagttttatgttgttggtctgatctgattcttctttgtttgtgggtggaacggcactgagagaagtatagttttttaaacttgaacatgttcagtagttacattgccttagaaaacccagacacatagcagtggaaatgaaagaaatggcatcagaagtgacttaatttagcaattgtgattcctcttgtnnnnnnnnnnnnnnnnnnaatgccatattttttggagaaaagttggcaatataggggtttcgttgtctgtttcacaagaagactcatttgttcttttgggggaaccagtgccttacagattttgtatatactgtaattattcaggactagggaacaaacaattgtattgtatttgttacagattgtatatggctttgttttaacattcccctaaataaaatggcttcattctccccttggaaa

SEQ ID NO: 79881 - DNA, 1143 bp, Homo Sapiens
  misc_feature (33)..(33): n is a, c, g, or t
  misc_feature (644)..(1048): n is a, c, g, or t
  misc_feature (1116)..(1116): n is a, c, g, or t
caagtgctaccacttcccaataaaggaatgggnacccagaggctgggtccctggctaccttgttatgaggttttgttatttctctgacaagattgctttggaaagagctgcttttagggattattttttgaataccccgagtggggagcagggttctcctcaaagcctcacaaccataggatcataggaaaggggccctattttcctgctgcttcccagctcagaacatatactgaatggaatgtatttttaagagaataaagtctatttttttgtattttaaagattgagagggctaagaaagtagccctcaaataaactgttattgcattataggcccctttgttgggggcagcctgttggtccacacctacttgctcaggcaggtgctctggtctctctcacccctgccccttagagtctaggtgcagcagctccaagcatgggaccaaggaggccagaacctgtcgctggaaaccagggcaaagcagtggctcagggctccttgggtgcatgtgtatcattggagctgcctgtctgcatgtatcctctggcgcgaatgctctctgttggctctgcagtacaatatgtaaccaataaagctccctcgtttccgtataaaaaaacctcgtgccgaattcttnnnnnnnnnnnnnnnnnnnnnnnnnnnnnnnnnnnnnnnnnnnnnnnnnnnnnnnnnnnnnnnnnnnnnnnnnnnnnnnnnnnnnnnnnnnnnnnnnnnnnnnnnnnnnnnnnnnnnnnnnnnnnnnnnnnnnnnnnnnnnnnnnnnnnnnnnnnnnnnnnnnnnnnnnnnnnnnnnnnnnnnnnnnnnnnnnnnnnnnnnnnnnnnnnnnnnnnnnnnnnnnnnnnnnnnnnnnnnnnnnnnnnnnnnnnnnnnnnnnnnnnnnnnnnnnnnnnnnnnnnnnnnnnnnnnnnnnnnnnnnnnnnnnnnnnnnnnnnnnnnnnnnnnnnnnnnnnnnnnnnnnnnnnnnnnnnnnnnnnnnnnnnnnnnnnnnnnnnnnnnnnnnnnnnnnnnnnnnnnnnnnnnaacacagggcaggaaacgtaaaggcggcgtgctgggtttttcataggtccgcccctgacagcacacanatcgagctagtcgagtggggaaccgca

SEQ ID NO: 79882 - DNA, 2116 bp, Homo Sapiens
gctggaccggtccggaattcccgggatatcgtcgacccacgcgtccgcccacgcgtccgggcacaggtgggattcagaggtaacagagtttaaatgaaagtaggatgaagctataaagaggtttatttatatttatattgaagctcaggcaagtgccttgcacacagtaggtacttataactaactgtggttactgttggatatgtgatgttgttaagggtaagcttgtaatacctcaccagttctccccgagtgatcttctcttctaagtgagcccactaattgctgcaatggatgaaattgggtgtttaatgctggagagcacatgtaggtgacacatgtgccttgaggtatgtgaggacatgtaaattagatccacagtgagctgaggagggctttccccgccagagtgaggttgggaagcagagttaatccacttataggatgaactgcttggtatttttattgtattgtgactgtattacaaagatggacaattcactccttgggagcaagttatgctctagaagtttatttacaaatatgctgggcagctctcttgaaatattttcccaaggaagctattctacacagtggcaaaattgctatctaattaataatgtagctaaactatgatatttatagtagcaaaaaactaaattctataagattgcattaaaggaaagatatattctatttgctcacttgggctgcttggtactcacctgccctccaggtgtactttaggcctgtggagggtgggcatttagtggtgaccccttgcaccagggttttctaacagatgaccctgtgaatcataatttaaacctgcatatattttatagccagtcacatttgccctctcaccctatatggccataaactgcctaagcactcaggcctcccactcatcaacccctttgaccagagaaagaagcactctggttctccatccccttgtcacatagagagtttgtcatggggcctctggctgtgcccttcacataacagaatgacttgccatctgcctgcaccaaacccagggatgtggaagacatctccccacaactgccactgctcaccaggacaagctgcccttcctgtctccacctctcagtccccctagaatggatggctggggagaggtggaggctgacagctgagacgtaatgtcagatatgatctaggagggcggatcaccggaatccgggaccatacaagtaacatggtttccatggcaactgcttgctccgttttgaattaagacagcagtcagttgtcattgccatgacaaggcctctatctccaggcacaatgtccctgctgtctcctaatccaatggacttgctctcaccccagggatgaaacacccagaaactcacttctcagtcacttccacagccgatgactcagaagagccaaacccagaatggggcctctcttttccccatcacagactcccctgacaacctttcctggcgtaactagaggagtcccagtgcaggataggccctaaacgttttgttaaataaacaggtgcatgaaaggagcctaaggccattgttgatatccactctcttctttccacttccttctcatctttttctccatgttttatgcttctctgattccctcttctgcctgcaccagaccagccccagccctttattcctctccattttcactccttccagcctctgtccctgaactgccactggcaacccatgggacctcaggaccagagactgcttgactcatctggggagggtaagttcacgggggacaaaaaaatgattcctaaagaagaggcttcctagaccagcacaggctcgagaaagacatcccctaggcctggacttctgagcagctttagccaggctccggacggcagccagaggaggcctttccccattgctcctttccccattgctcaatggattccatgtttctttttcttggggggagcagggagggagaaaggtagaaaaatggcagccacctttccaagaaaaatataaagggtccaagctgtatagtatttgtcagtatttttttctgtaaaattcgaacacacacaaaagaaaaatttatttaaataaaatactttgaaaatgaa

SEQ ID NO: 79883 - DNA, 902 bp, Homo Sapiens
  misc_feature (823)..(831): n is a, c, g, or t
ctgattcagagcgtcccagcagctggagtttgcagggcggagaaccagagagaagagagctgcacagggaaagaaccctggatatccacagaggctcccgttccagtgtgcagcggactacgactactggtgagcacaggcgtgtgaggaagctacccaagaccagggaaggccatcaccccagcaggagaggatgaacggtaactccagtgtgcaagcaggacagggactagcagctgtccccacccaccaggatagagaagctcatgttcacctaggcagcactggccagggtgcccagaatggtgtttgttgcctccatagagggaaacaagcctacagttaagagctgctctggtcccacacagcacatcttcaaagcaagactcaaaaggatcaaaccatttccttgttttctgagaataaaagcagttgtacctcttccttttcactctcagaaaatctgatagaatctataaaagagccctaaggctggagacactgtattttccagggagccaactccttgccccagacactagtcaattgccccagcactttcttcactgatcgttagaggaaaaaagctcatgttagatttaaaaatcaggaaaaaaatttaacactaaacttgcaaatattatgtggtgtatattacagttacacatttactatgtaagtgcaactgtaaaactgaggaagtattccaaaatgttgacagtagttaatcctgaatgacagaacccaattgattttcattttcttccatttcctaaattgtcttcaatttccttgtactccttgaatatctgaattctagaannnnnnnnnagcaacccaagcacaacaagaatattgggaggtgccccagctgcaaataaactcagacttggaatagtaaa

SEQ ID NO: 79884 - DNA, 301 bp, Homo Sapiens
ggcacgaggctgaaggatgcttctaggtggtgaacctttgaggattttgtaaattgtgtagggtttttttgtaatgtaagttagtttactgtttaatgttctgtaataatttccattccctgtacttttgtttttccaaagaaaatatctaaaactgccccagtataatttacattagacattgtataactatgctataatccagctatcatgttttctagtactcacagtgtggatttcatctgtagtgtctgtgacttgcctatcatggaccttcatgttgtatgcatagacaagtgct

SEQ ID NO: 79885 - DNA, 718 bp, Homo Sapiens
agcccagacttcattcttgcttttttggtatcagggccccaatcccttagtggccagggactcaaagtttggaataatcccagccctgccaagcattaagggtgctggtggagagtgtttgctggctgttcatgaacctctggtgtcctgggcctctctccactagacatggcagcatctctgagttacagattgcaatgtgttgccctgcatggttgaactgcttcggacatctgctaggcatcccatgtgccctgtcccctcttcaatgccagtgagtcacaatggcctatgcttattcacagcaataatacctagggagtccccatgaagcccttttgtcctggtccctcactctgcgtgggtctcctggggaggcagctgctgagtgggtcagttcatgagaacctgcatttatgaagccctgggctgtgtaggcatcaccctgggatgcagacaggttagaggcccagcccttaggggagccatggcagggagagtgccttccaccctgaggccacccagacctggaggagatgcaggccccagctctgctaaagggcctttgaggtgggtgggactgtctcccagttgggcagctcttgagaaggacacacgaccggtttgtgcgcccattgcctgctctgtgtctccgttggtccctctgtctcttccttttcacatttgtgcacataaaatatactggtgtttgtgttcc

SEQ ID NO: 79886 - DNA, 1372 bp, Homo Sapiens
  misc_feature (871)..(871): n is a, c, g, or t
ggtgagggaggctgggtctctccatttctttccataagcaagtccttcctctgcaatgtggctggacctccttgcaggcagtcaggagggcagggaagcagacccagctctgggaggaacggcacagcctacagaatagaaacaaacctaacgactgccattttgagacctcaagagtcattaaacccagactgaagtcagtttatctgaatcctcacctaggtggtgtgttgatgtgggcgggcctccaaggccaccaaagtcagagtgacccaggtttaagtattagccctacaggttagtggtcctgataaacacacttcatttcctttgcctccatttccacatctttaaatgggcatgatatttgcgatgattcaatgcaataatgtttatagaacccttagaatcctgcttggcctgtctattcattctcaattaatgttaattctattcctttctcttaggaggtccacagatgaagaacagctctcatctctatggtccccagcatttatttaaagctaagaattcacaggtcaaccaaatcgctccctgaaaactaaaatcaaccaaaagcagaggaagaatcactgagaccctcctagcatgtctttcttaactctcatacctgaaaggatgggtaattgggtgtttcatattggcatggaccctaacatggtgtgactcaatctcttgcaatgctgtgcattgctagggcactgatttcattgttgagagtctctcactggtaagaaatatttccttattcagtatcaatttcttcagctgattggctctattccacatcccattgttatggctcctcacctaagtacagctgcaatgcttgagaaaaaaatgcccaggnaaaattcttgcctttgagcaggcccaccttatattgaaaccaaaagtctgcaagaaaaatggtagggaatgacctttaagccttggaggaagaatttatgagcacaactatagcttcttcttggcataaagttgtgttctgtattcttcaaaattctcagattttgtgcactgttggttcaaggtcacaacaaaaagcccctatgctctgaggacagaagcatgctgggatttcaagggcatggccagatttgagagaaaggagacctcagagcttacgacttggaaaggcagagtccaacgacaatgggtcattctcctgtttaggataagggcatgcaaatagcatgtgaattgcacattacatttctcagatgtgagtatttggttgaggaatgggggctgttggcaacacttctggaaattgaactatctttatcctgattcacagagttgtagctgagcagggcatagaggagaaaacagggcactgaaataggtt

SEQ ID NO: 79887 - DNA, 1471 bp, Homo Sapiens
  misc_feature (744)..(761): n is a, c, g, or t
  misc_feature (791)..(1388): n is a, c, g, or t
  misc_feature (1440)..(1440): n is a, c, g, or t
caactgtgtgtagtatcctataactgtgttcatacttaagttgtatctctttcctttgtgtacttcatggcaaaattaattttctaaaggattcagagaggcgtttatattttataacatttattagaaataatttttccaccactagattactgtattttatggaatctaagctgtatatgtgtacatttgtatacatgtatgtgtaaatgtaagcctgacgtgggttcagattccagttttgtcatcagcaagaggcctcggacccatgacttactgcctctgagccttggctttctgtgtatctctgccactgggataatggtacacataacagtggagtggggaccaatttctaaaactcatggcacctagtctttggtccataaatggtgtttgttattttagacactgagaaaaatcttattcacagaagttgcagattatttctgctagtcacttttttatttcttgagagctgccactcatttaatatttctcatttatgagaagagacttgactgatttagataaaagacgaattaaggaaaacctttgaacgtgagtagacaagcttcatatatctgtaaagtgaatattgaatggtagcttgagtcattcgtacttatcacagaaaagaattgaactcccagtcatacacctgtaactgaaataccaaactgtcttaatggagatgtaatgaagtaagatggtcacatctttaactaaacttataaaaattgnnnnnnnnnnnnnnnnnngcctacagccgccctcgttccgaattcttnnnnnnnnnnnnnnnnnnnnnnnnnnnnnnnnnnnnnnnnnnnnnnnnnnnnnnnnnnnnnnnnnnnnnnnnnnnnnnnnnnnnnnnnnnnnnnnnnnnnnnnnnnnnnnnnnnnnnnnnnnnnnnnnnnnnnnnnnnnnnnnnnnnnnnnnnnnnnnnnnnnnnnnnnnnnnnnnnnnnnnnnnnnnnnnnnnnnnnnnnnnnnnnnnnnnnnnnnnnnnnnnnnnnnnnnnnnnnnnnnnnnnnnnnnnnnnnnnnnnnnnnnnnnnnnnnnnnnnnnnnnnnnnnnnnnnnnnnnnnnnnnnnnnnnnnnnnnnnnnnnnnnnnnnnnnnnnnnnnnnnnnnnnnnnnnnnnnnnnnnnnnnnnnnnnnnnnnnnnnnnnnnnnnnnnnnnnnnnnnnnnnnnnnnnnnnnnnnnnnnnnnnnnnnnnnnnnnnnnnnnnnnnnnnnnnnnnnnnnnnnnnnnnnnnnnnnnnnnnnnnnnnnnnnnnnnnnnnnnnnnnnnnnnnnnnnnnnnnnnnnnnnnnnnnnnnnnnnnnnnnnnnnnnnnnnnnnnnnnnnnnnnnnnnnnnnnnnnnnnnnnnnnnnnnnnnnnnnntggtcggctttccccttcggggaacggtgggccttcccatagcccagcggtnggggatccagtccggtgtgagcgctcgctca

SEQ ID NO: 79888 - DNA, 688 bp, Homo Sapiens
  misc_feature (675)..(675): n is a, c, g, or t
gaattcggcacgagccgattgagagaaagggaaagttaaggatgctggagcagaacaatggattctctttctctttcatgcaagggatcatgggaaacacaattcagcaaccacctcaactcattgactccgccaacatccgtcaggaggatgcctttgataacaacagtgacattgctgaagatggtggccagacaccatatgaagctactttgcagcaaggctttcagtacccagctacaacagaagatcttcctccactcacaaatgggtatccatcatcaatcagtgtgtatgaaactcaaaccaaataccagtcatataatcagtatcctaatgggtcagccaatggctttggtgcagttagaaactttagccccactgactattatcattcagaaattccaaacacaagaccacatgaaattctggaaaaaccttcccctccacagccaccacctcctccttcggtaccacaaactgtgattccaaagaagactggctcacctgaaattaaactaaaaataaccaaaactatccagaatggcagggaattgtttgagtcttccctttgtggagaccttttaaatgaagtacaggcaagtgagcacacgaaatcaaagcatgaaagcagaaaagaaaagaggaaaaaaagcaacaagcatgactcatcangatctgaagagcg

SEQ ID NO: 79889 - DNA, 624 bp, Homo Sapiens
  misc_feature (26)..(69): n is a, c, g, or t
atgaagtacaggcaagtgagcacacnnnnnnnnnnnnnnnnnnnnnnnnnnnnnnnnnnnnnnnnnnnnacaagcatgactcatcaagatctgaagagcgcaagtcacacaaaatccccaaattagaaccagaggaacaaaatagaccaaatgagagggttgacactgtatcagaaaaaccaagggaagaaccagtactaaaagaggaagccccagttcagccaatactatcttctgttccaacaacggaagtgtccactggtgttaagtttcaggttggcgatctttgtgtggtccaaggtgggaaccaaatccttggtggccttgtatggtttcaagtgatcccccagcttgaggttcatactaaaattaacacaagaggtgcccgagaatatcatgtccagttttttagcaaccagccagagagggcgtgggttcatgaaaaacgggtacgagagtataaaggtcataaacagtatgaagaattactggctgaggcaaccaaacaagccagcaatcactctgagaaacaaaagattcggaaaccccgacctcagagagaacgtgctcagtgggatattggcattgcccatgcagagaaagcattgaaaatgactcgagaac

SEQ ID NO: 79890 - DNA, 1086 bp, Homo Sapiens
  misc_feature (62)..(80): n is a, c, g, or t
gtgccattctcgaaattaaccctcactacaagggaataagcttgcggccgcggctgtaggcnnnnnnnnnnnnnnnnnnnacaaaacaacagcattttaattgaattttctaagtgatcatttccggttgtttaaatgcacctgttcaaatcaaagttcatcattttgtttggaacaacttttgtttgagaatcaaatggtcacgtaaatgacaaaacaaataagcatataatgacagaaaagtaagtggcaaaataactacaaactttgttccactggctactgcagtagaataaacaaaatgacagttaaccaaaaacacctttattttcatctgcaaagaagaagctcttttcttctttttccaggataatcatgattaacttacaaaaatgggtacacatcttcaaagcacttccctttaacgggaaacttagctttatgggatttaaacattagaaagtgggaaaaaaaattccattttcttgtcattataagccaaaacaaaatctagtgtaagtcaaggaaactcattcacacttcaggtccttctcctccaggaatcagcattgttatattatttccatttagcaaaacctgatcgaatttaggaatccgtcttccttccggtgtgatttcacactcattgacatcttccagttacatactgacaaagtacctcgggcggactcctggcctccacggccaatttcctatagtgagtcgtacaaactcggaatcatgtcataactgtctcatgtgtggaaatgttaaccgctcacaattcacatagtatccagtcggtagcataatgggaaaccttgggttttctatgatcgagctactcacttatttgcttgcttccactgacgttttcagtcttgatattgttggcagttcgatactatccgcaacacttgtgtaagggtgttctgtatgcgcttctcgtttctcgtcatgtctcgctcgtttgtattcggtgcgacgactgtttatcttcatgtgttttatgtgtcacagtatccgcggctttctagacttcgctctcgttcacttgtctacctacttgctgttgtggttctcgat

SEQ ID NO: 79891 - DNA, 482 bp, Homo Sapiens
tccaacccgtcgcagctgctgccgttagagcttgtggacaaatgtataggatcaagaattcacatcgtgatgaagagtgataaggaaattgttggtactcttctaggatttgatgactttgtcaatatggtactggaagatgtcactgagtttgaagtcacaccagaaggaagaaggattactaaattagatcagattttgctaaatggaaataatataacaatgctggttcctggaggagaaggacctgaagtgtgaagagtaaccccacaaagccagattgcagttcttgcccctttttgcgtctgacatgagatgttaaagaattattcatagtgctcacattgggttaggggacatctgaacgtgctatttagagccatgatcagtcatcattcttctaagagagtggagctttgctgtttcattaactgtacagtgtagactaatggtgtttaataaaaatcattcaaaatttcgaa

SEQ ID NO: 79892 - DNA, 637 bp, Homo Sapiens
ggggcttttcaaagtcgtcccaccatcaatgaaggcaggccacttccggcgtagccatggcggctaacgctactaccaacccgtcgcagctgctgccgttagagcttgtggacaaatgtataggatcaagaattcacatcgtgatgaagagtgataaggaaattgttggtactcttctaggatttgatgactttgtcaatatggtactggaagatgtcactgagtttgaaatcacaccagaaggaagaaggattactaaattagatcagattttgctaaatggaaataatataacaatgctggttcctggaggagaaggacctgaagtgtgaatgagtttccttgacttacactagattttgttttggcttataatgacaagaaaatggaattttttttcccactttctaatgtttaaatcccataaagctaagtttcccgttaaagggaagtgctttgaagatgtgtacccatttttgtaagttaatcatgattatcctggaaaaagaagaaaagagcttcttctttgcagatgaaaataaaggtgtttttggttaactgtcatttcgtttattctactgcagtagccagtggaacaaagttcgtagttattttgccacttacttttctgtcatta

SEQ ID NO: 79893 - DNA, 674 bp, Homo Sapiens
acagataaaactttttatgcatctctttcatggacagtgattgatcttttcacaatgtatgtagcctctagaattttgtacatatgtttgctctttttttgtacagactatttagttgttgagaaaacaggggcgtttcctaatttggtctttatcctgcgacaacactttcagcagactagcctctccttatctcacagatcacaagcacccctagatagtgtgattctgtcagatagcatttatgcaaaaatctatgaagttaaaagatcgtagaagccaaatgaaatgtacatatctactgactgatgacaagggaatttcattaggaagaaggtaaagaaacatcgttgagtagcctaccttgatttctgtcaagttcataaccagcttcatattttaaaggcttcaggtttgaaattaagtcaactgcatgcagctttgctgataaatgaataattctctttgatgccatttatgagaaaagacttcaatatctgttgcctgtcatatttaagaaaaattactgtttctactctctgtatctgattttaaaagaaaaaactattcatacctggcttccaggtaattgactttgaattcttacaagcaaaggtcattgtgtttttcttgaatagacatctaataaattttgcttggaagtataaaaaaaa

SEQ ID NO: 79894 - DNA, 494 bp, Homo Sapiens
tagtcagagtagctcactatatattgttagtcttaaactttttatattattgaagaatggaaacatacataaagtgtatttgggcttaaaaagttgtcacaaaattatcctcaggtcaaggagggcctatttctggaccccagaaacccctgtgtcctgtcccaggcacccctagatagtgtgattctgtcagatagcatttatgcaaaaatctatgaagttaaaagatcgtagaagccaaatgaaatgtacatatctactgactgatgacaagggaatttcattaggaagaaggtaaagaaacatcgttgagtagcctaccttgatttctgtcaagttcataaccagcttcatattttaaaggcttcaggtttgaaattaagtcaactgcatgcggctttgctgataaatgaataattctctttgatgccatttatgagaaaagacttcaatatctgttgcctgtcatatttaagaaaaattactgtttctac

SEQ ID NO: 79895 - DNA, 732 bp, Homo Sapiens
  misc_feature (15)..(15): n is a, c, g, or t
  misc_feature (61)..(61): n is a, c, g, or t
  misc_feature (64)..(64): n is a, c, g, or t
aatccatgctcaccngataaactttccatctttgttcagtcaaatgtcaagcagccatgtntanaaggtgaggcggggcatatcttggtttactaagcaaggacgtatatgccgtatcttgagagcaacgggcagtgatttgagagcagagcgatgccttgcaactgaaagtcacttctgagcagcccagaattttcgaaggactcctcctttaaagtgtaactgaccgtaagtgacctctgaagcagtttggttcagactttagctcgcccagggtgtaaactgctctaagtggataactaggtcagcaactcacagagatcaatagtccttaagaaacgggaattttgattagggccttgaggaaagatggggtaaccttgggtagcttagaagactgagacttgtgttaacgtatcttgaattctagcgaggagttggggaggtagggtgagattctatcagcgaaggatgttcaagcctgacaaaagcaaatgtttgtggcctggaattttgggccagggccttggtgaccataaggatgccagtaaacatcatgctatatgattgcaagattcgtgtgaaaaagtaggaaaccacttcttcctatttagaccaagtggcttgtttgggtttggtttttgttttcaggctagaaaattcagtctaactgcttcatctccattcattttctgctctcatacttatgggagatagaggagtacaaagaag

SEQ ID NO: 79896 - DNA, 708 bp, Homo Sapiens
gagagagaaagaaggtcagaaaaacacagagatcaaaattcaagaggtccaaagtggagagatcctataacaaagtacacatcagacaaagatgttccttctgaacgaaataactacagtagagttgcaaatgacagagaccaagaaatgcatatagatttggaaaataagcatggtgatcccaaaaagaagagaggagagagaagaaattctttttctgaaaatgagaagcatacacaccgaattaaagacagtgaaaatttcagaagaaaagatagatcaaagtcaaaggaaatgaatagaaagcactcaggctcaagaagtgatgaagatagatatcaaaatggtgccgagagacgatgggaaaaatctagcagatactctgaacaatccagagaatcaaagaaaaatcaggaccggcgaagagaaaagtctccagcaaaacaaaaataattctacaaaatgacataaactggacatgccttatattcagttgaaacaaattattttttactttgacgaactttatagagaattcttgtataaagtattggtttgtatttgtaaatttaaaaaatgttttcattttaacatgttttataattgatacatctcaaggccctacccataaaattatttgaaaactttcaccagaaagggatgtaagtctcgcttatattttgtgaataaaatgatcaaaagctcaaa

SEQ ID NO: 79897 - DNA, 882 bp, Homo Sapiens
ggcaggtttccagaaagcattttacctgagttcccagaattcatgctggggggtgtacggggagagaggtgggagatggtcatgggtggttagatcattgatttgagatcaaatcttttcagtagctaaatgaagacctaagagccagaataacctagattatataaagagattataaaaggaaataggcatttctaaaaatgtattacatttaaaattgaaacccataatgaagaggatgattgttttttacctgtggatagaacacagggttactgatgattacacttggctattgctgtcatttggttcttttgatcttcactttgagtcaatggaactgttcaggcattctgtaaggaggacagacaccagcgtgacactgcctcagcatttctttgttagaagcagtcatgccaggaacacactcataacgtgcagcagctacaggccaggctggctgatgagaggctgaaagcgtctcctctgtgcccttccgggagtggttcccagaaatgtcggtcttagcctctgacccagtgtcagcgtgctgttctcttgctcctccccgatgtcagtggattcatttttatcaaaaatgtcttgatgtttattgttaagcttgaattcccacacaattttagcacttcccccattttcttggtgtctcaagtgatttttcttgggactcagagttcagagaaacatgcatttccagaaaaaagctgggaagggactcttgcatgggaacactgtctaaaagcactttcaccttggtttctggaaacaggcacattgcaagctacagtttaggacctgatgccactttgaaggtgtgtcagctggacacagaaaacgaggttacggaaacaatggtcccag

SEQ ID NO: 79898 - DNA, 464 bp, Homo Sapiens
caagaattcggcacgaggtggacctgccgatcctgaagatcatcccccattgaagcccatcgcctcaagctgcagaatactttccggacccccgtctacaccacctccatgagaaggaacgccatgggagtcggcttggtttttgaagctgatctctttaccacgaggcacatttctcactgggtgctgcaaggagtatgcctcaccctgaattctgattaacctttgggtgaagaaaactgcttaatgaattcggagcctggggttgtcaggaagagtgatcgggtctgctgtcatttcttggggcctctcaagaggcaggagggggactgacactgatttttcatttgaaatcagccacttaaatctctttccatacaaattaacctgaatggttttgtttttaatactactttttaaaaggaatttatataatcaaaaagtaaatattggagagtaaaaaa

SEQ ID NO: 79899 - DNA, 848 bp, Homo Sapiens
cagtcgacggtaccggacatatgcccgggaattcggccattacggccggggaagtcgctaatgacatttcattcatattcataatgtaaccatcttgaatttttttaattgtagcgattttaaaaatgtttgtaaaattaatttccagttttctaattacttgtcagtcacattaataacattagtacctttatggtacccttgcagtacctgaaaagaatatcaacctgaaaagaatatcaactcacccagaaattagttctttgaaaaaaaagaaattaagttgtgaatttctaaagaccttgaaataagtgtttcaaatttaaagaacaaagaatgatgtgaaaatgagattatgattcctactacatgaattaacgtttcgagattgctgtttattacttcccagagtatctttaacagtattctctgaagcagttccaatctagttggagaattaacagcaattgatttaactatctcatttttattaactgtaatttacattaaaaatatttgcaaatcatactcattagttatttgatcattgttctatgcattttaaaattaattttgtgttgttcctctcaatatttgtttttaacatttattcccatttttattttatactattgtctgtcatgctttatgtattccaataagtgtcttgaaatccttgtggggaaaggcaggacaaaaataattagttaattagatttgaaaaatgtaatttttccatttaaatatttcatttgtataagaaaatatttcagagaaccatgatgataatggatatgtgtgactgttttgaatttttttctcaattaaaacattttgtatgtaatggg

SEQ ID NO: 79900 - DNA, 749 bp, Homo Sapiens
cagtggttaacaaatagctataatttattttctttctttttgatgcctagcaagcagaatgacttgcttgccttttcccttagtaggtaactacagagcagagcacccatgtttccacagcggggtggtctcactgtccagactgagaattaagagcaaatctttcccacacattggagtaggtgttgcagtcctagaagttaagtactggtctcagatctcatggcagggtgctctctgccatgcagacatgtgcaattgccatttcaggatcccacactgaaaattcacggcgctccattaacaacaccagggtgtgtcatgctcttgggtggggtcacactagttctccaagtgacaaaacacacccaacacaacacaagatgttggtaagttagagaagagcaaaacacagctacttaaatgaaatctctggtttgttaatgaaccaaaggtggcttgggattattttagtagttaaaattaagagtgcattctattgcagaaaatgcagttattcaacacacagttcctcagccggcctagagccgcattacccttatcatttagtttctttttcatcctctggaggagagcagggcaggaagaggtggggacttctcttggagcatctccatcatctgtaagagggtatgtgttactgctcaccagcaccctcggctgtagttgacgtcatcttttctgtctttttggacttcctctgcatttgctcctgctcctttctcctt

SEQ ID NO: 79901 - DNA, 679 bp, Homo Sapiens
  misc_feature (13)..(13): n is a, c, g, or t
cccatactgtttntctgttagcttaagcgttgttaaatccttcactttcacacctactgtcaagaacccaaatgtggctgaagcagcttaagtgattcagttcacgtcaaacaacatttcacaggattcttacccccaaagcaactctttactatccagtacataagactctagaacattaaaattctttatatagtgccatgtggcatctaaaataactttggctaggaaataaaacatatttgcagaaagtttggggttgaaatcaaagaatggatcaaagtggcccttcatttggctccacgtcatctcacaatagtgaaatacagcagaatgtcactaaactaccataaaactaaggggagagactttgcaaaaacagggagtgacagacacgttttttgctcctgttttaaagtaaattgtactaatgacaacaatagtgatcttttataggcccaagttggatcagtgatcaatttatagcatttctgtttcaaatattcaaaagcaaaaagtaatctgccaattagaaaacaaaaaacttcaaacttaagtgatgtaatgatggagcacctgtatttgactagatgttatatacatgccattgaaagacatagtacctaatctgcctaatgtctataaactggtgcaaataaaagacatttaaaccatgaaa

SEQ ID NO: 79902 - DNA, 1100 bp, Homo Sapiens
  misc_feature (982)..(1003): n is a, c, g, or t
tttgcgagaaggggggaaatgtgaaggcggatgggaaaaatatgcggcgcgctgtgtaacgtttcgtggtaccggaggcgagaaccaggggggcgctcattaaagatattttttggggttgtgagtggggggggaaagtttcggccaaatagtgcggtttagggggggatcggaagtatttgtcggggcggcgggggaaataacaaatttttctttttaaggggtggttagggcgcagatggggggaagaatgcttttggggcgaagcgaatctccctaataagcgggttctttgccggggggattgtgtgttggcggggggtaagatccagtacagtatcccccggagtagggggcctcccccctcgattgtgtgttgcagacgggaggtcggccttagtggcgcccttcctagcaaaaagttatcaaagggtgttgaactaatggtttgcgcaaggaaataattcttttcaagtgtttgtccggcttttaataagaaagtggcaggtcccgttctttatgatacgtccccggctatggggtaccaccctgcttgcaccttaaacctgtagcgagaaggttaggtctcattaagagataatatggcgcgtgccgcccttttttatgtgtttttttccaaagttgacagataacatttattaaaacatgtcatacaaaagggcatgatctcttctataagaagaaaatattaaacattaacattcaattaagtaaaaccatgctgtacactgaagacagcaatatataaagacaaaactattcaacttttgcaacataggcataacatttcacaaaatatcaataagatatgcacctaatgataatctgtttatcatcaaatggttttgtggcctaagagtcacctgacttgcataaataaagtacttttctggacgaaacattgggaacctcacaaaaggaaagaaggcagcagcaactaacatgacacaggcttcaagcnnnnnnnnnnnnnnnnnnnnnngtcacatttgcaaaatgtgttccagcatctccccatagggcactatcagtagagatttgaaataagaaacttgtacctttaaatatgaaagtagcaa

SEQ ID NO: 79903 - DNA, 847 bp, Homo Sapiens
  misc_feature (509)..(559): n is a, c, g, or t
gtagagacatggtctcactatgcttcccaggttggtcttaaactcctaggctcaagagatccccttacctcagccttccaagttctgggattccagatgtgaaccactaaccttgaccatactcctgtatttcttcattgtgtctttcaaaacagaaaagcttaaattttaatgtagtcaaaattacatactttttctctgttcctagtgtttctcttgtcatattatagcctcttcttcctaaacctaagatcatgaatatttttgggtggcacattctgtagcaacaagagggtgaggttctcctttgttcccagaggagaatgagactggtgtattctgcaggctaataaggaaatgaaactcactatactatggaggataaaagtatataaatttacactataacagtataatgccatataggctaataccgtttatatgtggcacttatatatcatatacacgttacatgtaatatttaccaattacctaccataactaaaccnnnnnnnnnnnnnnnnnnnnnnnnnnnnnnnnnnnnnnnnnnnnnnnnnnncacacacactatatcctgtactagataatgctagattctattaaaatactgtacatgaatatctcctttaaatttcaaaagaaaacacctcaccaatatattggaaaagagaatcctataacaatatcatacccgtgatgaagtggcattcaattcaggaaagcaatgctgctctcacctctgaaaatccattcatgcaatacaccataatagtataggatcaacagcaaacaacacaagaacatcataatagatgcagaaaaagcatatgacaaacctcaacatttc

SEQ ID NO: 79904 - DNA, 1661 bp, Homo Sapiens
  misc_feature (47)..(47): n is a, c, g, or t
  misc_feature (52)..(52): n is a, c, g, or t
  misc_feature (74)..(74): n is a, c, g, or t
  misc_feature (110)..(110): n is a, c, g, or t
  misc_feature (1037)..(1181): n is a, c, g, or t
  misc_feature (1232)..(1246): n is a, c, g, or t
  misc_feature (1321)..(1329): n is a, c, g, or t
  misc_feature (1482)..(1490): n is a, c, g, or t
gatgaagcggcatggccaacgaatatgtgatgctcatcatagcaccncagcnttcattatgctccgctcgtatntgttggatgtgacgatacaattcacacaggaacagnttgaatgatacgaattatcgactcacttagggattgccctcgagccaagaatcgcacgagggcccgagccgctcagtctccctgctctccgtggtcccggctcgcgtgtagcggcggcggcggcgtctccgtgaggaggcgcgcggggccatgacgtcagcgtccacaaaggtcggagagatcttctccggcggccggcgccgccttcacgaagctcggggagctgacgatgcagctgcatcccgtggccgactcttctcctgcgggcgcgaagtggacggagacggaaatagagatgctgagggctgctgtgaagcgatttggggacgatcttaatcacatcagctgtgtcatcaaggaacggacagtggcccagataaaggccactgtgaaacgcaaggtatatgaagattctggcatcccccttccagctgagtcacccaagaaagggcccaagaaggtggcatctggtgtcttgtcacctcctccagctgcccctcctcccagcagctccagtgtccctgaggccgggggtccccccataaagaaacagaaggctgatgtgacactcagtgctctgaacgactccgatgccaacagtgacgtggtggatattgaagggctaggagaaactcctccagctaagaaactcaacttcgaccaggcctgaccctggattctggccttctcatgacctctgctgatcctcctctcctctcctgctgagccttccacctctgacctctcactgttcatgccggacctgtggatctcctgggactccgagcaaggcctgcacgagagagggctgaaaggctgctggggctgccacctcgctattcccgcataagcatctgcccccaacccctttgaccttcatctgatggacatttttatacagaaaacaataaagatttccctctcagnnnnnnnnnnnnnnnnnnnnnnnnnnnnnnnnnnnnnnnnnnnnnnnnnnnnnnnnnnnnnnnnnnnnnnnnnnnnnnnnnnnnnnnnnnnnnnnnnnnnnnnnnnnnnnnnnnnnnnnnnnnnnnnnnnnnnnnnnnnnnnnnncgcgggcgcgcccccctcccccgaaaaaatttctaaaacactccttttggnnnnnnnnnnnnnnnaaagaaaagaacacctgcaaaaattttcccccaacgaaacccccgactgtaaaccccgggttcttctcccccccnnnnnnnnncaccccgcggacccccacgttcttcaaacaacatacagggtatcgcacgggctcttttggtttcatcacaccgcacccccaaccaacatttttacaaaattaccccgccccccctgtccctttcgagaggggggcggtaaatcactcccattnnnnnnnnnaagtcaacctctcccccccagtggactgtaaacctttccatcccacccgggctccacacccactcccaccccccaccacaatatcttcccccccggcgcaaaaacacccgccctaaaaaaactttccctctttatcgcccctcaccttacaactcacaagaggtaggcaca

SEQ ID NO: 79905 - DNA, 716 bp, Homo Sapiens
ctgcctggaaggggcacccataccccgccactgccacggcggcccgtaagggaagctcggagctgggctttccccgcgtggccccagaggatgaggtcattgtgaatcagtacgtgattcggcctggcccctcggcctcggcggcttcttcggcggcggcaggcgagcccctggagtgccccacctgtgggcactcctacaatgtcacccagcggaggccccgcgtgctgtcctgcctgcactctgtgtgtgagcagtgcctgcagattctctacgagtcctgccccaagtacaagttcatctcctgccccacctgccgccgtgagactgtgctcttcaccgactacggcctggccgcgctggctgtcaacacgtccatcctgagccgcctgccgcctgaggcgctgacggccccatccgggggtcagtggggggctgagcccgagggcagctgctaccagaccttccggcagtactgtggggccgcgtgcacctgccacgtgcggaacccactgtccgcctgctccatcatgtagtagcgcctgcctgcccgccactgcccgctgagcctcgctcgctgcttcttcagggacccggccctgccctgccgcccgctgacccttccttccccaccatggcttccggccccaccccgagtggcattgtcgctgcagccaactttgccattaaaactctttgccaaagtttgcacctgt

SEQ ID NO: 79906 - DNA, 741 bp, Homo Sapiens
cattgttctgaattaatcccctaagaagggtgaacagagctaactgttctaatgctgggttagaactgcaattctagttttctgtttccattacattaaaagttcaatatgaatactttgttgtgtgatctatacttccctttttgccataaaatccaggtgatcctttgtctcctttggcacccatttcaccctttgatcatggcatgccatgaagcccaggaaaaccaggaagtccacgatcaccctgaaaataaaactgaaattaattacaaagaaaaaccattccagcctaaacaatatcatcatctattcttcaacctcacccttgtcaaaatccacttcaaatctatctgcaaacagttaatttcatatcagcattcaattatctctatgaaaaattatccctacttttcagggtttcatttataatcagagaagataagtattttggagctaagaaaatctcactagcaatcctgactccacccttagttagccaccacctattctgaaaaagtcttaggcttttacaggggcaagacacatgaattaattgaaatgatctaatcccaacacactcaggaaacagttaacctctgaggtccaatccagctcagtaatgaaaggccctaagcataaagtctaatcacagactaggattctgtggaatttttaaaaattgcttatcttactaattactcatagaaggtatctgttcatatgtgtctatgaacatga

SEQ ID NO: 79907 - DNA, 632 bp, Homo Sapiens
agaattcggcacgaggagaataagtatctgaaaagtgagtaaattctatgcaattatagttattaaatgacttataaactgtgtttctcttccacttcttgctacatttaatcttctaggtgttcagatatctttggagattataggcagcaataaagctaaggcagctaacctttcaacattcttgtgtcaggctaatattttggtgaaaggaattcttgtgtttctcaaagaactagagctgaagcagaaataagttccaatgagcaagtgtccaattggaccattgaatgaaatctagtgttttaaacaattctgatgtttcaatgttttgttctgttttcttttgatcttgtgagcagtaagacatattttatgtgggtggtaaaggaagaaatcaagtaacagaatgaggaattgttcccaggaagagttagagttgggacaaatgggttgttaactttgatttttagatcttctctgaagacattaaacatggaatggtcatctttagaaaaataaaagactatgcaactccaccactgaaatggtatcttattacagtgaatgatggataatctgaaattactatagaaaaaaataaacccagaccattttgcctagagcctttc

SEQ ID NO: 79908 - DNA, 720 bp, Homo Sapiens
  misc_feature (39)..(39): n is a, c, g, or t
  misc_feature (127)..(136): n is a, c, g, or t
  misc_feature (503)..(532): n is a, c, g, or t
aaagatagttaacataagtggtcagaacttcgctgaatntgtaataaagcatttgttaagcgtgtaaaagtccaaattaaaagtcttgaagaaaaacagctatggcaatgagcctagacatttttcnnnnnnnnnngctaagccgtcctaccagcaatctctctttctcctaagaatgtcatgccttctcaagacctgatgaaaggaataagatatttgtgcctttttataatagcatctattacgaaagtaaaattcagttgcttacagttttggccgctttgtagcactattataaacagcccaaatttatggccttggacttactgcatgacacatggcctggttacctgtcatggaatgctgcagtggtggtttgccaagcttctgtggatgtttgaagactttatttttgcagtcttaaccttgggctggacctaagtgtatgtaaaccatatgatgtctgtattgtttatagatgctgacaaaagaaaactagaccnnnnnnnnnnnnnnnnnnnnnnnnnnnnnncatgcctatgctcatagtagatagtttgcaaatgaaagttgatttgccatacttttaaataatattgttttagcttgaatattctataatacacttttatagagtataacatgctaaatcactgttttgttgtaagaaaggtggaaacattttgttaataaaatgctatggttacgaatgtccccccc

SEQ ID NO: 79909 - DNA, 829 bp, Homo Sapiens
  misc_feature (49)..(76): n is a, c, g, or t
  misc_feature (415)..(415): n is a, c, g, or t
  misc_feature (750)..(777): n is a, c, g, or t
aaaataaattcttttattgagatgagagacggacacacactggggaggnnnnnnnnnnnnnnnnnnnnnnnnnnnntgactgagtcccagtactcagggaggctcagactggaggcggcggagcaggcaggcggcggcaaggctggtcccctggcgctggggccgcgcatacttgaggaagactgcggcgcgacccggcgcgggacctcggagcgcagcgcgggccatgcacggctcgagggtgcccagttcctcggggctgtaaagttctggctggagcctggagcccgccccgtcgagcaagcggtgcgccaggctcagagccgcagccgcacgacgacccggctcccatcccgccgcctcggcctccagcaaagacagctccaggaagtaggtggcaagtaacatcacctgnggggctgctccctgccagcgcggccagcagcccgaggcacagcagcgggccggggtggtgcagccggaaatccaggcggctcaggatgcgacgctcggcgcgcagcagctccgcccgtgagaaggagtccgcgctcaggaggcagaggaaggcgggctcgggaagcacgcactcttccattttgcacgccacaaacaggcaagccacgcccagcagctgcaggcgatgtagacgcacgcggccagcgctcaggtaggaatcaagcaggtgaaccgccagataaagtgtgtcaccagccagacccaggtactccatgagtactgggactcagtcannnnnnnnnnnnnnnnnnnnnnnnnnnncctcccagtgtgtgtccgtctctcatctcaataaaagaatttattttaaaaa

SEQ ID NO: 79910 - DNA, 883 bp, Homo Sapiens
  misc_feature (502)..(510): n is a, c, g, or t
ggtatagatccaagcaccttggaacaacagatgctggcaaccagtcgctatgcagtgatgaccacccagctaagacacagcaatctctcactggttttccactatgtttttctccagatctgtagggcccatggcattggctatgatcttgagaccctggtgtccatccctggtcaggactcttcacttgctgtcttaattgccttttcttggatgggaggttgaacaatcggcgaggatctccagggggtcctcatgacctttgctcgccatctcttcatcatccatcaagaaatatcagcacctaatatgcaaggcgagaccaattttaagaccaccattgctgatattgaaactattctaagagtaacaaaggaaaacaaaatgagatttgaagaggagcaacagtccaaagatgataaaaacctctctaaacccaagaaatgatcctggaatacagtacataacaatttggatcccagtctggaataaaaagggcaannnnnnnnnctgttagaaataaaagccaggggaaattggtttgctttgtgtgctaggaggtgaatcagaacagattataatgaaatgctcttttcaaaacattgtttattaagtgatcttattttatttattaaaccaaaacttatttgtgttttcatttgagagtgttgaacaatcccttcttcttctcaaactcagaaaaaagtaatctgataaaagaagaaagttaaaagtcttactgatatcacctccgcatttacttcctcataggcctcaggattatgtagcttttattttttatgttttataaagttttctcctatttctaatagtccatcgatcttctgcatttataggtttgaataaaggcttaagaattgct

SEQ ID NO: 79911 - DNA, 602 bp, Homo Sapiens
  misc_feature (57)..(127): n is a, c, g, or t
  misc_feature (322)..(546): n is a, c, g, or t
atgtgactacattaaaactttattcaacaaaataccataaagtaaaaagaaaagtcnnnnnnnnnnnnnnnnnnnnnnnnnnnnnnnnnnnnnnnnnnnnnnnnnnnnnnnnnnnnnnnnnnnnnnnctaaaaattattcagagaaaaagaattcggcacgagggttgttgccagtttctgtattataacactgtagtggaacattcttctgcattgggctcactgcgtgttacctaagacgtatcacagaataaacacatttagccttatagacattgccaaattgctcttcaaagtaaatgtgagtttttgtgaattacnnnnnnnnnnnnnnnnnnnnnnnnnnnnnnnnnnnnnnnnnnnnnnnnnnnnnnnnnnnnnnnnnnnnnnnnnnnnnnnnnnnnnnnnnnnnnnnnnnnnnnnnnnnnnnnnnnnnnnnnnnnnnnnnnnnnnnnnnnnnnnnnnnnnnnnnnnnnnnnnnnnnnnnnnnnnnnnnnnnnnnnnnnnnnnnnnnnnnnnnnnnnnnnnnnnnnnnnnnnnnnnnngacttttctttttactttatggtattttgttgaataaagttttaatgtagtcacat

SEQ ID NO: 79912 - DNA, 1094 bp, Homo Sapiens
  misc_feature (22)..(22): n is a, c, g, or t
  misc_feature (37)..(38): n is a, c, g, or t
cacaggggaagcagggcagtgntgggtgtctgagacnncagaaacataacgttgaacttttaagggtctcagtccccgttgattaaagaacagatcctagccatcagtgacaaagttaatcaggacccaagtctgcttctgtgatattatcttgaagggaggtactgtgccttgttcatacctgtaccccaaattcctaggatggcatctgccttcaggggcactaaaatgtattattgaaacagcattctgggcttaaataggtgtatgtatgtgttggttgtgactgtactatttctagtatagcgaactacatactgaatatccaagttctcagcacctacttttgtcaaaccttaacattttgccacttcgagatcacattgccattcctcccctccagaggtaacaattatccacaatttgatgtttatcattcctgtgttgttgtactttcactgtgtataacctaaaccatctactctttaagtactgttttatatatttttaagcctcatacttgctcattctacagcttttttcactcattattgtataattatatctgaagctctcgttcattaattttagtcctgtgtagcagaattcaattacgggaactaccataatttatctgttctccagttgaaggcatgaagttgttgccagtttctgtattataacactgtagtggaacattcttctgcattgggctcactgcgtgttacctaagacgtatcacagaataaacacatttagccttatagacattgccaaattgctcttcaaagtaaatgtgagtttttgtgaattacatgagtatggaatggtgttttattatgactttagtttgcattttcctcaattctcgttaaatccttcattctaatggacattttattgtgaagaacctgttcatatcctgtgcgcaactttgtattgaattatttttctctgaataaattttaagagttcttttattctagacatcaatcatttgtcagttttatatgttgcaaatatcttctagtctatcttgtgacttttctttttactttatgggattttgttgaataaaggtttaatgtagccaa

SEQ ID NO: 79913 - DNA, 732 bp, Homo Sapiens
  misc_feature (17)..(17): n is a, c, g, or t
  misc_feature (42)..(118): n is a, c, g, or t
  misc_feature (162)..(162): n is a, c, g, or t
  misc_feature (171)..(171): n is a, c, g, or t
ctcagcttcagtcaccntgcaggactttaggcaccagtgatnnnnnnnnnnnnnnnnnnnnnnnnnnnnnnnnnnnnnnnnnnnnnnnnnnnnnnnnnnnnnnnnnnnnnnnnnnnnnaatgtgttaaatgcctactacagtaggtgctcagatatttattnttatttttntattatgcacattgtttttcctgcctttttatggctgtctaaagtctagggaaaagggaagactggttaatgatgagtagaaaaaacttgtaagctaatcattcactgacttattttccttccattttctggtttttaaaattagccacaccacaggaaacccacatttttagatggaaagagcaagaaaattgtgtcagtgctcttagttattttcatcttaatggtatagtgaaaagacattgacttgagatgatactaaggaagctttggctcactctcacttgaagaggggatcttggtgttgtagtacttggactgtacaaatgttttactgacttttcttactgctgtaaaggaatcaggcagttgggtattgatatgttatttggtgctctcattcatggcaaaggatttgataaataaaagttctttaaacactaaagcaaaatcaaatgagcaaaactaaggatgaaatgtaatattcatcagaacaaggatcactgagaaaaaatattcagaaacaactttaataaaacctgaattgaaataactgcaaaa

SEQ ID NO: 79914 - DNA, 773 bp, Homo Sapiens
tggtcacatacctgaaagctgactttacttataaatgagtgtttgaactctctggagaactacttccttggtttttcatgggagcaaatatattgtcctgatagacaatatatgttcaggacaggcatagatattcctgttcagaacaggcatattctctccccattcaggaagttggtgggttttcagcatgtgaatattgactgtgttgtcttttctcattttttacttactacttgtttttcctcttcttccacagcaatcaatcaataagaacaagtcccaggacttcagactaggctcagaatctatgacacattctgaaatgagaaaagaacagagccatgaggaccaaggacacataatggatacacggatgaggaagaacaagcaagcaggcagaaaagtcactctaatagagtaaagaattgaagaaaagttaagagctgccgaaatgcacagaggtgaaaatgacaaaccaaatggaatttctcttcagagttcagaattttcagatactaaggaggaagaaaggatccactacttcttgttcttatgaatgactctagaaaaatcagaatcaagttgtgggtggaaaaatcaacgtggcctttgagttcagttgttataaaccattgtgactattgttggtcaaagtattggtacttatattgttagtaattgcatcataattacattaccagtgttggaaaactaatgaagaaaacactgtaattgctactcagcaaatgtgaataaaaggtgtttgcgtt

SEQ ID NO: 79915 - DNA, 602 bp, Homo Sapiens
  misc_feature (220)..(220): n is a, c, g, or t
  misc_feature (374)..(428): n is a, c, g, or t
ggcacgaggggcaacactaggaggcaaggaatctgcatttctttcagaccttggcagagagcgccctgggaaatgcggatatagaaggtcaggagaacatctctcctggttatacagcattccaggactcctcatctgtttttaagagggaaatctgagttttcaaggaaagccgaatacagttgccaagttgccagtcaaagaaacaatgtcaacaccntgctcatagagatggaattcctaacccggaatattgcccttgaattacaacgagaaaaagcacctcttcaagtgagatggcagaccacctcaggatggaaatgtatttcttcatccccctctctacttccctgtgacctcctgcaaataagggnnnnnnnnnnnnnnnnnnnnnnnnnnnnnnnnnnnnnnnnnnnnnnnnnnnnnnnggagtgactgaacattgacaagactttggttggggatggtcagagaggagattagctgctagacggccacactgcagagaaagatcattttcccactccatcccccttccagctccccatccatctcaccaagagccagctccaccactcaataaaaccttacattcatctttc

SEQ ID NO: 79916 - DNA, 441 bp, Homo Sapiens
  misc_feature (145)..(195): n is a, c, g, or t
gtggtggagctggctcttggtgagatggatggggagctggaagggggatggagtgggaaaatgatctttctctgcagtgtggccgtctagcagctaatctcctctctgaccatccccaaccaaagtcttgtcaatgttcagtcannnnnnnnnnnnnnnnnnnnnnnnnnnnnnnnnnnnnnnnnnnnnnnnnnnttgtctctcccttatttgcaggaggtcacagggaagtagagagagggatgaagaaatacatttccatcctgagggtgggtctgccatctcacttgaagaggtgctggaatgctgtataaccaggagagatgttctcctgaccttctatatccgcatttcccagggcgctctctgccaaggtctgaaagaaatgcagattccttgcctcctagtgttgcctcttgactgacactccacattttcccc

SEQ ID NO: 79917 - DNA, 201 bp, Homo Sapiens
agaagagacgagatggatggggagctggaagggggatggagtgggaaaatgatctttctgccgcagtgtggacgtctagcagctaatctcctctctgaccatccccaaccaaagtcttgtcaatgttcagtcactccttctcttctctttagccactccattcttctgttcatctcgtctcttaatctggtgccgagctcc

SEQ ID NO: 79918 - DNA, 783 bp, Homo Sapiens
  misc_feature (212)..(221): n is a, c, g, or t
tgaaattctagagtttgcttagaatattgcaaagtaaggaaatttaaaatattctcaaagagttcctcaaggaaaggtatgtgtgtatgtccctgatggttccaggctgacttttatcacacagactccatcactgggggaatcttccctcttgatctacaatgcaagtggaattctgatttcagactaatctctagcaatgagctagacannnnnnnnnngtctctacaaaaaagattttgatttgaacagcagttgtttgtgaggccttagcaatacaagaaaaccattcattagcctatgaagagaagcgttgaagccagtgtaatttaagaattgactatttaagatgctattgaggaaagattggccagttttgtctccgttttttatgattgagactgtaattgttctcgttgctcttaccttaaaaaacttgctgaaaaaaactcagtaaagaccaaaggtgatcagaatgaaaggaaaacataaataaagacatttctttgtctttaaatctaggtatgtaaaggtagattgaaactttggaaatgggatggtcaggccggagctagagagcttggtttgcaatcttgtcagcaaaacaacattttaggtcaacgattatgcctctgtagtatctagtattatatccttctattactttgaccatttcgattttgtaatttactctgggaaaaagcatgggaattcttgtattttggtagaattgttagttttccagaatggttttgttttccttcaaataaatgttttcaaaag

SEQ ID NO: 79919 - DNA, 744 bp, Homo Sapiens
gacagcattgagtgtatcagaactacaggctgcctgtagggcccgagggatgagatcactggtctcacggaggaacaactgcgacaacagctcacggagtggcaggacctccacctgaaggagaacgtccctccttcccttttgctcctgtcccgcaccttctacctgatagatgtgaagcccaagccgattgagataccactcagtggggaggctccaaagactgatattcttgtggaattacctactttcactgaatctaaagagaacatggtggatcttgcacctcaactgaagggaactaaggatgaagactttatacagccgccaccagttacatcatcacccataacaccatcaacacctatttcattacctaaaggacccatcacttcttctgaagaacctacactccaggccaaatcacaaatgacggcccagaacagcaaggctagttcaaaaggagcataaaggactacttgaggatggagctcactctcttcagcttccggccctcaacagtggcatctgtaaaggacctcccagataagactgtctggcttcagagagcggatcagctgtttagcccgtggggcagtcctttgaggcctggtaaccattccaggtgatgtgggtagtgagaccaagttcagaccacttagaaaaatataattgcaaagtcccatttcctctgtaccattgtcaccccactcaactttgtataaagcccaccccccatcaaaa

SEQ ID NO: 79920 - DNA, 1004 bp, Homo Sapiens
tgaggattggtagggcaatcctaccaattgatgggggtgaggagactgttgggcccttattctcttatgaaaatctgtttctacaaggactaggcctaagtagatttaggcaacgggtatcatatccatgaaaaatgtcattttaagacactaatatcaacagtatatctcagtgtgtgagatatataaatacacatacaccccatgtgcttttttgttggtttagtgtaaactgagtaccactttatattttctcttccatagtgagatgtatgcagtatgtggccatgtttactaacatactcattcttcacaaaattctgagattataaaatgtatatagttaatatttgtttgagcttgtgacctgacttctaagagctacttctaacacagccttaggtcttcaattaacaaagtaggaagttgagcacaaccttgtccacagccattttaaatatccacttagccctgtgtagttggtaggtggacaccactttcataagtgaacttgagctcactactcaattgtgcagcttaatatgctgactagggacattcccctatggattatctttatatcactgtctttctaagcccagagatgtcataagtgacaagaaaagtgataggatcaagaaatgggtgtcactgcttcatttggaacatgttattaactatggtctctttcaaataaatagtagttttatatttcaacacaagttgctataagcagtccttgatgggtttttgattgcatcagctagaaagcctcaaatctaagagggcttcccatcctagatataaaataggtgttgcctattgctgtgcttataaaatgaaaaaggaaattgaggacacttttgcaaatgccagaatgtaagattcattcagtgtgctccctgggcctttatggcatgggttgacaggatttgtttattttctaaaattagcttcattcaatatttatcatcctcctttccctctctgagaatgaagaaaat

SEQ ID NO: 79921 - DNA, 635 bp, Homo Sapiens
caagaattcggcacgaggcgaattagtgaacagaagtatgatgggaaacacgattttgcatggttttaagatcccttcacaagatactaattacaaagggaaaaacagtcattatagtgaataagcctgacagaaaccaccttaacccagtgatcaagttaacatcaccactaataagacatactgataccatgtaccttccaatatgatgcactgagaagggcacaattgtcacttctgtggtgttgtcagaaatgtgcaatctcagtgcaatcaggagaaaagatcagacaagcccaaactgagagacactctacaaaataactggccagtacgttttgaaagtgccaaggccgtgaacaataaggaaagactgaggaacagtcatggactggaagagagtaaagaaatatgataactaactgcattgtgagataccgatttagatgttggattagaaaaaggaccagaaataagatttcatcaatgtcaattatttggttttgataattgtactgtggttatgtaagatgttaacattagtaagagctgggtgaagggtacatggaaactattatttttgccaccctttgaaagtctaacttttttcaaaataaaaagttttaaaaataaaa

SEQ ID NO: 79922 - DNA, 689 bp, Homo Sapiens
acgtggacggatactgcgacaccatcgtggctgtggccgaagtgatcaagctgacagacccttctctgctctacctggaggtctccactctggtcagcaagtatccagacatcagggatgaccacatcggtgcgctgctggctgtgcgtggggacgcaagccgtgacatgaagcagaccatcatggagaccctggagcagggcccagcacaggccagccccagctacgtgcccctcttcaaggacattgtggtgcccagcctgaacgtggccaagctgctcaagtagcctccgccggcctgccctgctcgcccctccacagcctcggtccctgcctttagaaacgcgggacagctgattgctctccttggccacacgtgctccttttagctgcacggcctgtctttaggtgccagtgtgatgcaccgggtgtgcgtcgagtgagcgtcccgaggccacgtgcggaggcccctcactgtgctgtcaaaggcctgtgggtgcagggctctgccgcacagcctctcttgggtgcttgtttgttgcagtggttgaaagtgtgtggggcacagaggacgtgcacctccctgccctcctcctccctgggccttcaccgcaccccatctgcttaagtgctcggaaccccgtcacctaattaaagtttctcggcttcctcagagaaatgaaaacgcc

SEQ ID NO: 79923 - DNA, 1173 bp, Homo Sapiens
  misc_feature (1043)..(1077): n is a, c, g, or t
  misc_feature (1081)..(1121): n is a, c, g, or t
ttttttgtacatcaaaatgtcttttatttgagacacaaaaatgcaaaattgctgagatatcaaacatttcccgatcagctacaatactgccactatgtacaaaagatctgatgataaatgtgcacacatataaaaatacagtatgcattacttatgtacagtacatgtgcaaaatgtatggcattcaaacatgatatggaattgatttcaggggtgcaaacagcaaatacaaaggcatcatggtttttcttttaaaaaacaacataaaggcaatagatgaatggacccccgattgccataattttttgttgattaaactagtgcttcaacaagcagggctctgtagattggtatctttctcctttttttcataaagtgagatgctaagacataatgtgacaatgaaaataagaagagaaacacctatcacattgcatttctattgcaagcaagaaaagaaaactaatttctacatagaaaaaaaactttgtattactactgaatgttactcttaaaccaacaaaacaactctatactattttacatgaaaacaatgaagagaaatatctacatcttagtgaaaattataaccttaaatggataatacctttttggggctgatttttgagatctcattagtctcaaattttaaataaaaagtgcctccttttggcaaatacttggcaatgcctttggttcctttaaagcaagtttgcattactattggttacttgaggtcaagtacttttggtagatactaaaccctttcctaaatgcttcctcttcctaccaaattagcaagattccttacagcatcacgtagagaggtaattgttacgagtttcagtattctataaactttgttaaagctttgtcttagtagttggcataaagctctgttaaacactatagatgtgatgatatctctgataacatattttatttgattcccgacagcaccttgtagatccgagattgccatcttattgtcacccggccgtaatggccgaattcccgggcatatgtccggtaccgtcgactgnnnnnnnnnnnnnnnnnnnnnnnnnnnnnnnnnnncggnnnnnnnnnnnnnnnnnnnnnnnnnnnnnnnnnnnnnnnnnctgtaaggatgccatatgatgctattacgtttctttctgtgttttgtttttt

SEQ ID NO: 79924 - DNA, 1054 bp, Homo Sapiens
  misc_feature (85)..(85): n is a, c, g, or t
  misc_feature (89)..(89): n is a, c, g, or t
  misc_feature (121)..(137): n is a, c, g, or t
  misc_feature (214)..(214): n is a, c, g, or t
  misc_feature (240)..(241): n is a, c, g, or t
  misc_feature (243)..(243): n is a, c, g, or t
  misc_feature (995)..(1012): n is a, c, g, or t
gatatcgctccatagaatgcctgagccagatcgccgagagagtgacttgctgtccatcctctgagagaggagatagtatatcccntatntgcctttgctgagtccacctgacccagtgttnnnnnnnnnnnnnnnnntctgtctccagagtgcacctcctcgcagagccagcacccactctcggcctccagtggcctgccgcagattctcccanaagttgacctttctagatgctagtgnncnccatgctcagcaggaggggcgggaggcaccagggtctggtgggaccctgcccctgggccatggccaggtgaccatggctacagtgccaaacctctgactgccacagctgcagactgagagggtgggtctgagtccccacaatgtctgaagctgcccctgggattctcaggccaacctgccaacagcaagcggattttcttgcaagatcagggaccccatttctgcagccagtgtctcctgggtgccttctgaggactcccacccccatcccagtatctcatctgtcccctctcctggggcttaagtgggttgcttccaggcagaagcagccaaggaccgattccaggcactttctgtagcaaatgactgtgaattacgacttctcttgcccttcttctagcagtctgtgcctcctctctgaccagtttggagggcactgaagaaaggcaagggccgtgctgctgctgggcggggcaggagaggagcctggccagtgtgccacattaaatacccgtgcaggcgcggagaagcaaccggcacccccttccggcctgaaagccctccctgcaagaaggtgtgcaggagagaagaggccccggcatggggatctgggttctagagggcatgtgatgactgtaaatgttcactgggtgggtagggagtggtatccagtgttcaagtgcagaaatctttggctttgctaccagttccatatgatgagaaataaacgttcgctgaggttttgtttcatnnnnnnnnnnnnnnnnnngcctacagccgcggccgcaagcttattccctttaggtgaggg

SEQ ID NO: 79925 - DNA, 638 bp, Homo Sapiens
  misc_feature (143)..(151): n is a, c, g, or t
gggacaaaaagtatactacagagagatgcattttttctcattttcagcaagactcctctaaccatttactcatttactgtattcctgctctgaagatgtggatacagaattagtcactcttgtcactttatttatttattggnnnnnnnnnaaccatctgtgtacattcctttcatagggtagagttctagttctagaagttcttattttgtttttgttgtaatgtttgaatactatttaatatccggttttaatattgctggatttgctacctttggttacttgtgcagtgttaaaagtaatccactttcttgtttaatataccagatacatagcaaaagcagcttggaataattatagctgtttatttggctgtgctcagttactatattaagatcttgtactgtgtaacagtaactcttttttgcttttcagtaatttaatatgttcacttaacaaaatacgaactttgagatgcactaaagttttgtttcagcagtggctcaaaaaatttcagaaattacttttgtaattatttgcaattaattgttcttttatcttacaattgtttaagcctgtgatctttcttctcccagctaagagttcttcaataaatttaagaaatacctggtaaaaaa

SEQ ID NO: 79926 - DNA, 1048 bp, Homo Sapiens
cccccggttcttggaggtggaaacgtcgtggccggtggactgcaccctagacgggctttttccagcctcagaggcccaggtctacctggcgctgggggaccagatgctgaatgtgacagtcatgaaccacggggacacgctaacggccacagccacagccacggcgcgcgcggatcaggagggtgcccgggagatcgtctgcaacgtgaccctagggggcgagagacgggaggcccgggagaacttgacggtctttagcttcctaggacccattgtgaacctcagcgagcccaccgcccatgaggggtccacagtgaccgtgagttgcatggctggggctcgagtccaggtcacgctggacggagttccggccgcggccccggggcagccagctcaacttcagctaaatgctaccgagagtgacgacggacgcagcttcttctgcagtgccactctcgaggtggacggcgagttcttgcacaggaacagtagcgtccagctgcgagtcctgtatggtcccaaaattgaccgagccacatgcccccagcacttgaaatggaaagataaaacgagacacgtcctgcagtgccaagccaggggcaacccgtaccccgagctgcggtgtttgaaggaaggctccagccgggaggtgccggtggggatcccgttcttcgtcaacgtaacacataatggtacttatcagtgccaagcgtccagctcacgaggcaaatacaccctggtcgtggtgatggacattgaggctgggagctcccactttgtccccgtcttcgtggcggtgttactgaccctgggcgtggtgactatcgtactggccttaatgtacgtcttcagggagcaccaacggagcggcagttaccatgttagggaggagagcacctatctgcccctcacgtctatgcagccgacagaagcaatgggggaagaaccgtccagagctgagtgacgctgggatccgggatcaaagttggcgggggcttggctgtgccctcagattccgcaccaataaagccttcaaactcccaaaaaa

SEQ ID NO: 79927 - DNA, 502 bp, Homo Sapiens
cctccagcgtgtttaattaaatatgttactgtattagcaaaacattttcatttttaaaatctgctaattttaaacttggactgtgttaagtaaaagttaaatcatacactgcaaggtgtaggaagatttgttttaatgaatccagtgatacagatttgattactaagtttgaactgttaattgtttaacaattttagacttgtggctttctttctttggtttatttgtttttgcttttactcctatgctacactagtttgccatgtagcaattgcactgtgcaatattacaataaggactgggaaaattttatggatgtaatgtctattacggtttgcgatagtatttctctctagttctcagtgatttaaatgtgaccaagccttctgtactttgtcacaaaaagcgggttttccaggtgactattttggtgagtgtcaaaataagaatttatggtgtattactgtcgattcactttgaattaaaatatatatattgcaaa

SEQ ID NO: 79928 - DNA, 655 bp, Homo Sapiens
agaattcggcacgagggatttggcaatcaccactattacccccatcccagtgtcaaacatagccagcccaggaataatttttaacacttatggatttagactttaataagctttaccaactagaattaagatactttatttttagttgactctctccttgccctcattcaatccttgttcagaaaagagttaacatcgctggcctgagattcctattctttgaaaggcctgtttacatggttggcctctggctggcaactgggaacttagatttcaggagggttcctaccattccttaaatgataatagtgaatcattgtgcttaaactatgtaaacaatacaatttttatgctgaacatttgcttttttcgggagcttggaattttgatatgtgctaggcagagagggtactttggtgaccagcccccttgggcactgagtctctactaagctttctggattggcaacatttcacacatgttgttacaactcattgctggaggaattaactgcatcctgtgtatcttcactgatagaagaattcttgcaagcttctgcctggtttcttctggactttgccccatcctccttttgcctttgttgagtcagctttgtatcctttcactttaataaaccatgtaagtacaacaacta

SEQ ID NO: 79929 - DNA, 604 bp, Homo Sapiens
  misc_feature (25)..(25): n is a, c, g, or t
  misc_feature (31)..(31): n is a, c, g, or t
  misc_feature (55)..(55): n is a, c, g, or t
  misc_feature (87)..(87): n is a, c, g, or t
  misc_feature (111)..(111): n is a, c, g, or t
  misc_feature (135)..(135): n is a, c, g, or t
  misc_feature (473)..(537): n is a, c, g, or t
cctaagagaagcaattggccttttncccccnctttaaaaaccattttccagtttngccccatacagttaaccacaatgtgaatttcntccctcagccataaccagagttanagaatggaccagggctggaagtgncccttagagagtatcccagttcctttcattttacaggtgaggcaacctgagactcaaaggtgatgtaatttgtgcaaagattatagctaattagtagcagagccctgactgggacatagtttgaaggtgaaaaacttcaccaagctacctttcttgaaaggtccaaatgtttatgttttcaactactctttccactgtaccataactttcactacatattaaatgacactttataactaatataataggacaatcatcaatgcatatatagccagcccttcatatctgtgggttttgcatccatggattcaaccaaggaggaattgaaaacactgagnnnnnnnnnnnnnnnnnnnnnnnnnnnnnnnnnnnnnnnnnnnnnnnnnnnnnnnnnnnnnnnnntgtcatactgttgttaagcaacagtataacaactatttacatagcattaaggttggtgcaaaaatgc

SEQ ID NO: 79930 - DNA, 1148 bp, Homo Sapiens
cagtcgacggtaccggacatatgcccgggaattcggccattacggccggggcctggaagggacagtatcgttgtttatgaaatgccactgggacagctggctgggccttcaccaagcaagtcccttcagactggcccttaagccaaactcaggcccagaattgcagttcagaatggcagtcctggaggcagggggtgaggggcaggtctagtgttcctgcaccaaacctaagtccttccacctgccacccccttccctgggagggaggtggtcctcctatctccctggctcactggcaggtgtgggatctggggagagcggctggagaaagatgcagtcctcaggaagggggccgccaccctcccctatgctggtagatgctgaggcccctaggtgcccaggccagtgggaccctctcagaaccaaatctttcccctttctcggggcttggggctcgggccgtaggggctcctgagtgtcatgaagtgcacaggagccaaatgaccgagccctggagagccccatggtgggtaggtggttcgtgctgtgctctggcaccatcagcctgttccagaaggaggattcgagcatcaggctaagaccctgtgtcctccaccatgcactcacccctagccctggttagctgacagtcagctgtggggaacacagctacaaccctaccctggcagggacctgagagcatctcaggaggggcagcgcatgtgtgcatgtgctgtgtgagtgagcacacccgtgtgcacactcatacacatgtgcacacacacgcactctccccgctcaggggcctggaggtctggctgagcccctggggaaaggtgagttctttcatctccctcctccaggtcggagtgcctggagtcaggtgtcgaggccacattgctggctgccccctctttgtagctcctataaagggcccacacctggtggatacctggttgagcgtgtggtctctgccccagcctgtccttgtcacgatcacaggccttgcttttgtaacaatgatgaccccggcctgtctcatcttctgaagaggaaaagtcaaagtgttgctgtggctccatatttcaactaaaaatatatctgttggagaaagaaattaacaataaagaattttcataggttaaaaa

SEQ ID NO: 79931 - DNA, 693 bp, Homo Sapiens
ggcacgaggagaaacaccagagaatttttactagaatataatttgtaggtgcagtaaatgtgaagaaatatttaggctaaaattaagactatgtaaacatcagaggatttacagtagaaagaactaaggaactaacacttcagactttaaaataaatcagagtattaagtataacaaaagttgaacctgttagaaaatttccttgtatataagttgaaaagtaggtttttgaagagatatattcgaaatatattttttcacttgaaaaaagtaaaaatttttttcaaaagcaaataattcaactctaaaattatactatttcaacattctcatttatgtgaaagcatgtgataaattgttgctgcgtcagagatatgagaaattcctttgcattaggtgggcattattcatagacttctacatgaaagagaagagaaataaaagatgcaccaggaaaatctgagcagagaggcttttagtggttgacttactgagtgatgcctgaagtaggtgttcagagtaatactttgcgttatactgagagagaatctgaattttagtagtaaattgttttgccaactgtatatttatgtaataagtgcaataaaatgcagtaaattttaaaattctcttaagataatgtgtgaacttaatttttgaaataaaaattgttattgtgttaaaattttaaaa

SEQ ID NO: 79932 - DNA, 665 bp, Homo Sapiens
acctaaagaactaatccatggaacaattcattgtaaagctggagtgcctgaaatattgatagaagaggtttacactttattaacacatcgagaaattaaaagtatccaggatgactttgtgaatttcacggactacagctaccagatgcgtttacccctggtttccaggtctacagtttcgaagtctattaaagataacattaggttatcagaattactaagcaatcccaacatgctgaccaatgaacttaaagcggagttcctcatccttttacatatgttgcaaagaaaattaggcagaaaattgaatccagaatggtttgatgtgaaaccaacagtgggagaagttactctcaatcaccttcctgcccaagcctctgggcgcagatataatttaaaagttaaaagaggaagagttgtccctgttttaccaaatataggtagtggtggcagttcacatagagaaatacatgtgaagcaagctggacaacattcttattactctgctatgaaacctatcagaaacatggacaagaaaccttgaaaagcacctgtcaaatggctttgaagaagtgatgccaccatctctagccataataaagaaacagaatcacctagtattggatgtatttcaataataaatagagtggtgtcttttccaaaaa

SEQ ID NO: 79933 - DNA, 1276 bp, Homo Sapiens
  misc_feature (88)..(122): n is a, c, g, or t
aaatgtataagcgatcacctatagggcggctagctcgttcgtcagccgaacgacgagcgcagcgagtagtgagcgaggaagcggccgnnnnnnnnnnnnnnnnnnnnnnnnnnnnnnnnnnncagtcgacggtaccggacatatgcccgggaattcggccattacggccgggggggagttggggaagctgggttggctgggttggtagctcctacctactgtgtggcaagaaggtatgggtcatgaacagaaccaaggagctgcgctgctacagatgttaccacttctgtggctgctaccccactcctgggccgtccctgaagctcctactccaatgtggccagatgacctgcaaaaccacacattcctgcacacagtgtactgccaggatgggagtcccagtgtgggactctctgaggcctacgacgaggaccagcttttcttcttcgacttttcccagaacactcgggtgcctcgcctgcccgaatttgctgactgggctcaggaacagggagatgctcctgccattttatttgacaaagagttctgcgagtggatgatccagcaaatagggccaaaacttgatgggaaaatcccggtgtccagagggtttcctatcgctgaagtgttcacgctgaagcccctggagtttggcaagcccaacactttggtctgttttgtcagtaatctcttcccacccatgctgacagtgaactggcagcatcattccgtccctgtggaaggatttgggcctacttttgtctcagctgtcgatggactcagcttccaggccttttcttacttaaacttcacaccagaaccttctgacattttctcctgcattgtgactcacgaaattgaccgctacacagcaattgcctattgggtaccccggaacgcactgccctcagatctgctggagaatgtgctgtgtggcgtggcctttggcctgggtgtgctgggcatcatcgtgggcattgttctcatcatctacttccggaagccttgctcaggtgactgattcttccagaccagagtttgatgccagcagcttcggccatccaaacagaggatgctcagatttctcacatcctgcccaggatctcctcttagggtagaagaagtctctgggacatccctggggtgtgtgtgtagatttcccacctggggactctgctgtccctgggcttgcatcccagggatcccagagtggcctgcctatcacaaccacatcccttccccccacaaggcaataaatctcatttctttatatcaa

SEQ ID NO: 79934 - DNA, 892 bp, Homo Sapiens
  misc_feature (757)..(791): n is a, c, g, or t
  misc_feature (795)..(837): n is a, c, g, or t
atctgaggcagtgcgttccggggtacccaataggcatttgctgttgtagcggtcaatttcgtgagtcacaatgcaggagaaaatgtcagaaggttctggtgtgaagtttaagtaagaaaaggcctggaaactgagtccatcgacagctgagacaaaagtagcccaaatccttccacagggatggaatgatgctgccagttcactgtcagcatgggtgggaagagattactgacaaaacagaccaaatgttgttgggcattgccaaactccaggggcttcagcgtgaacacttcagcgataggaaacccatctggacaccgggattttcccatcaagttttggccctatttgctggatcatccagctcgcagaactctttgtcaaataaaatggcaggagcatctgccctgttcctgagcccagtcagcaaattcgggcaggcgaggcacccgagtgttctgggaaaagtcgaagaagaaaagctggtcctcgtcgtaggcctcagagagtcccacactgggactcccatcctggcagtacactgtgtgcaggaatgtgtggttttgcaggtcatctggccacattggagtaggagcttcagggacggcccaggagtggggtagcagccacagaagtggtaacatctgtagcagcgcagctccttggttctgttcatgacccataccttcttgccacacagtaggtccccggccgtaatggccgaattcccgggcatatgtccggtaccgtcgactgnnnnnnnnnnnnnnnnnnnnnnnnnnnnnnnnnnncggnnnnnnnnnnnnnnnnnnnnnnnnnnnnnnnnnnnnnnnnnnntcttaaaccggcccgtcttgtgccgctcggagtatgtgtggtgctagtatgtacg

SEQ ID NO: 79935 - DNA, 1525 bp, Homo Sapiens
cagtcgacggtaccggacatatgcccgggaattcggccattacggccgggggatctaaggccaccctctcggggagggagttggggaagctgggttggctgggttggtagctcctacctactgtgtggcaagaaggtatgggtcatgaacagaaccaaggagctgcgctgctacagatgttaccacttctgtggctgctaccccactcctgggccgtccctgaagctcctactccaatgtggccagatgacctgcaaaaccacacattcctgcacacagtgtactgccaggatgggagtcccagtgtgggactctctgaggcctacgacgaggaccagcttttcttcttcgacttttcccagaacactcgggtgcctcgcctgcccgaatttgctgactgggctcaggaacagggagatgctcctgccattttatttgacaaagagttctgcgagtggatgatccagcaaatagggccaaaacttgatgggaaaatcccggtgtccagaggtcaggagttttctggggagtgaagggaggagggctgcattaacctcattgatctgtacactgaataattccccttgataccagctccccatctcaaatactttctggttctcttcatcaccttaatttttccaccagccttggtctgcaccctgtgttctttcggtgggccgaagtacctagcatgtagtaggcattcagaactatgtatcgaatgtgatgaattcaacaggtaccaactgatacctactgaatattaacacttgtgctactatgcccagcaagatggatgggaagagtggaaatatctgatgacgtgactatgtcttagtgagaagacagtgcatggttagacatcaatgtgagctctagacaggaagtgctgaaggaagtcatggtggaggggtccagagtagcctggatctggctctgcttctacgtctagctgcagtccttgcctggaagaagacctcccttcagagcccagctcctcgctcatctctgtctcccaaagcctgacccactgtgttcttctctgccctcccctccatatgccatggcccctccaaacacagagataccatctaaactagtctctttttccccctacacttcaatccccccaccaggtttcctatcgctgaagtgttcacgctgaagcccctggagttggcaagcccaacacattggtcctgtcttgtcagtaatctcttcccacccattgctgacagtgaacctggcagcatcaattccgtccctgtggaaggattgggcctacttttgtctcagctgtcgatggactcagcttccaggcctcttctatacttaaacttcacaccagaaccttctgacatttctcctgcattgtgactcccgaattgaccgctacccaccaatgcctatggcgggaggctactcccgcaattctggtcctttgagggcaaacggataatcaggcaggaagctcttcctcaaggtacctgtctagccatcctacctaagccatcccaattca

SEQ ID NO: 79936 - DNA, 841 bp, Homo Sapiens
  misc_feature (95)..(129): n is a, c, g, or t
tcttgtaataaggaactttcaaacctttaagttaagggctcatcgcgtcgcagcgaacgacgagcgcagcgagcagtgagcgaggaagcggccgnnnnnnnnnnnnnnnnnnnnnnnnnnnnnnnnnnncagtcgacggtaccggacatatgcccgggaattcggccattacggccggggaggtatgggtcatgaaccgaaccaaggagctgcgctgctacagacgttaccacttctgtggctgctaccccactcctgggccgtccctgaagctcctactccaatgtggccagatgacctgcaaaaccacacattcctgcacacagtgtactgccaggatgggagtcccagtgtgggactctctgaggcctacgacgaggaccagcttttcttcttcgacttttcccagaacactcgggtgcctcgcctgcccgaacttgctgactgggctcaggaacagggagatgctcctgccattttatttgacaaagagttctgcgagtggatgatccagcaaatagggccaaaacttgatgggaaaatcccggtgtccagagggtttcctatcgctgaagtgttcacgctgaagcccctggagtttggcaagcccaacactttggtctgtttgtcagtaatctcttcccacccatgctgacagtgaactggcagcatcattccatccctgtggaaggatttgggcctacttttgtctcagctgtcgatggactcagcttccaggccttttcttacttaaacttcacaccagaaccttctgacattttctcctgcattgtgactcacgaaattgaccgctacacagcaatgcctatgggtaacccgg

SEQ ID NO: 79937 - DNA, 1067 bp, Homo Sapiens
  misc_feature (71)..(105): n is a, c, g, or t
ctataagggcgcctacgtcttagtagccgaacgacgagcgcagcgagtcatgtgagcgaggaagcggccgnnnnnnnnnnnnnnnnnnnnnnnnnnnnnnnnnnncagtcgacggtaccggacatatgcccgggaattcggccattacggccgggggtggcaagaaggtatgggtcatgaacagaaccaaggagctgcgctgctgacagatgttaccacttctgtggctgctaccccactcctgggccgtccctgaagctcctactccaatgtggccagatgacctgcaaaaccacacattcctgcacacagtgtactgccaggatgggagtcccagtgtgggactctctgaggcctacgacgaggaccagcttttcttcttcgacttttcccagaacactcgggtgcctcgcctgcccgaatttgctgactgggctcaggaacagggagatgctcctggccattttatttgacaaagagttctgcgagtggatgatccagcaaatagggccaaaacttgatgggaaaatcccggtgtccagagggtttcctatcgctgaagtgttcacgctgaagcccctggagttggcaagcccaacactttggtctgatagtcagtaatctcttcccacccatgctgacagtgaactggcagcatcattccgtccctgtggaaggatttgggcctacttttgtctcaggctgtcgatggactcagcttccaggccttttcttacttaaacttcacaccagaaacccttctgaacatttttctccttgcattggggactccacgacaattgaccgctaacacaggcaattgccttattggggtaccccggaacgccactgcctccagatcttgcggaaatgtgccgggttgcgtgcattggctggtgtggtggcatccaaccgggcatgatgccacaacactccggaaacctggccagggacaaatttccaaacaagttgagccagagttggactacaaagagggaataccaacgcacagacctgggaaacacgagccgcaggagaaaacacaggcacgggaccagcgcgggcac

SEQ ID NO: 79938 - DNA, 1029 bp, Homo Sapiens
  misc_feature (60)..(101): n is a, c, g, or t
  misc_feature (104)..(138): n is a, c, g, or t
agaaagacttggtaattccggacctccaccttaataaggggggcggctaaaggcgtattnnnnnnnnnnnnnnnnnnnnnnnnnnnnnnnnnnnnnnnnnncgnnnnnnnnnnnnnnnnnnnnnnnnnnnnnnnnnnncagtcgacggtaccggacatatgcccgggaattcggccattacggccgggggtgtggggaagctgggttggctgggttggtagctcctacctactgtgtggcaagaaggtatgggtcatgaacagaaccaaggagctgcgctgctacagatgttaccacttctgtggctgctaccccactcctgggccgtccctgaagctcctactccaatgtggccagatgacctgcaaaaccacacattcctgcacacagtgtactgccaggatgggagtcccagtgtgggactctctgaggcctacgacgaggaccagcttttcttcttcgacttttcccagaacactcgggtgcctcgcctgcccgaatttgctgactgggctcaggaacagggagatgctcctgccattttatttgacaaagagttctgcgagtggatgatccagcaaatagggccaaaacttgatgggaaaatcccggtgtccagagggttacctatcgctgaagtgttcacgctgaagcccctggagttggcaagcccaagatttggtctgtatagtcaagtaatctcttcccagccatgctgacagtgaactggacagcatcattccgtccctgtggaaggattgggcctactttagtctcagatgtcgatggagtcaggttacaaggacttatacttatttagacttcaaagcagaagcttatgaaatttatactgcatggtgactcacgaaaattgaccggtacacagcaattggcctataggggaacccgggaacgcaatgagctaagaaatggtggagaatgtgctgtgtggacttgggctatggactgggtgttgaatcgcatcatatgtgggaatagtacacataattaatttcggaagcttgtcag

SEQ ID NO: 79939 - DNA, 751 bp, Homo Sapiens
cagtcgacggtaccggacatatgcccgggaattcggccattacggccgggctactatcaaactcttcatttgatgcggcagttatatcatgaatgtacgcttgtccatgctgacctcagtgagtataacatgctgtggcatgctggaaaggtgaggagcacattttgttaacattcagatttaattactgtaagtaaaatttaaaatgtaaatacatcagttcatgttctgtattgaaataggtctggttgatcgatgtcagtcagtcagtagaacctacccaccctcacggcctggagttcttgttccgggactgcaggaatgtctcgcagtttttccagaaaggaggagtcaaggaagcccttagtgaacgagaactcttcaatgctgtttcaggcttaaacatcacagcagataatgaagctgattttttagctgagatagaagctttggagaaaatgaatgaagatcacgttcagaagaatggaaggaaagctgcttcatttttgaaagatgatggagacccaccactactatatgatgaatagcactaatacccactgcttcagtgttaacacagcagtgattgtcagctgccaatagcaaatgaagttatgggtgacttgaaataccaaaacctgaggagtgggcaatggtgcttctgtgcttttcccccttgtaacccatgtgccagatgtgtggaatttttagctcagcattgagagaataaaatgtcactacctctcatctt

SEQ ID NO: 79940 - DNA, 2436 bp, Homo Sapiens
gggtactttgctttctaccatgccctctatccccgagcctggactgtctatcagcttcctggccagaatgtcaccctcacctgccgtcagatcacacccatcttgccccatgactaccaggacagcagcctgccttaggagtctttgtgtgggatgtggaaaatgaaggggacgaagctctagatgtgtccatcatgttctccatgcggaatggactgggtggtggagacgatgccccagggggtttgtggaatgagcccttctgtctggagcgtagcggggaaactgtccgggggctgctcctgcatcatccaaccctttccaaacccctacacgatggctgtggctgcacgagtcacggcagctaccacggtaacccacatcacagcctttgaccctgacagcacggggcagcaggtgtggcaggatctacttcaggatggacagctggactctcccactggccaaagcacccctacgcagaaaggagtaggcattgctggagctgtgtgtgtttccagcaagttgcgacctcgaggccagtgccgcctggagttttcactggcttgggacatgcccaggatcatgtttggagctaaaggccaagtccactacaggcgggtattacaaggttcctttgggccaagatggagatgcagcacctgccctcagccactatgcactgtgccgatacgcagagtgggaagagaggatctcagcttggcagagcccggtattggatgacagatcactgcctgcctggtacaaatctgcgctgttcaatgaactatacttcctggctgatggaggcacagtgtggctggaagttcttgaggactccctaccagaggagctgggcagaaacatgtgtcacctccgccccaccctacgggactacggtcgatttggctaccttgagggccaggagtaccgcatgtacaacacatatgatgtccacttttatgcttcctttgccctcatcatgctctggcccaaacttgagctcagcctacagtatgacatggctctggccactctcagggaggacctgacacggcgacggtacctgatgagtggggtgatggcacctgtgaaaaggaggaacgtcatcccccatgatattggggacccagatgatgaaccatggctccgcgtcaatgcatatttaatccatgatactgctgattggaaggacctgaacctgaagtttgtgctgcaggtttatcgggactattacctcacgggtgatcaaaacttcctgaaggacatgtggcctgtgtgtctagctgtgatggaatctgaaatgaagtttgacaaggaccatgatggactcagttgagaaatggaggctatgcagaccagacctatgatggatgggtgaccactaggccccagtgcttactgtggagggctgtggctggcagctgtggctgtgatggtccagatggctgctctgtgtggggcacaggggacatccaggataagttttcttctatcctcagccggggccaagaagcctatgagagactgctgtggaatggccgctattacaactatgacagcagctctcggcctcagtctcgtagtgttatgtctgaccagtgtgctggacagtggttcctgaaggcctgtggcctaggagaaggagacactgaggtgtttcctacccaacatgtggtccgtgctctccaaactatctttgagctgaacgtccaggcctttgcaggaggggccatgggggctgtgaatgggatgcagccccatggtgtccctgataaatccagtgtgcagtctgatgaagtctgggtgggtgtggtctacgggctggcagctaccatgatccaagagggcctgacttgggagggcttccagacagctgaaggctgctaccgtaccgtgtgggagcgcctgggtctggccttccagaccccagaggcatactgccagcagcgagtgttccgctcactggcctacatgcggccactgagcatatgggccatgcagctagccctgcaacagcagcagcacaaaaaggcctcctggccaaaagtcaaacagggcacaggactaaggacagggcctatgtttggaccaaaggaagccatggcaaacctgagcccagagtgagccgtctgaactgtgggagggaagtgctaacagcccagcctccagcctggcctttcctccttcccctctgaacctcctgcaaccctgagccatcaggacaatcataccccttcccttctctccacccaattgtgccagtaaatgggggttgagggtgacctaggcagcattagaatcacttatttatttctttcctcacctgttccctgactgcgtgaaatgttcagggaggtcagttgatttccccaggtacattcatggtgtgacagacacatgggtacaaataaaagacccagaaagccaaaaaaa

SEQ ID NO: 79941 - DNA, 710 bp, Homo Sapiens
  misc_feature (44)..(44): n is a, c, g, or t
tccacttcatgcttgccttaagcgtctcaccaaggctcactgtnttgaaattcagcatatacagccaagtcctctccaatgcaacagggcaatgagtggcatcaacaattatacccagcactgtaagcatcaaaatacctttctgcatgactctttccagaatgtggctgctgtctgtgatttgctcagcatggtctgcaaaaatcgtcggcacaactgccaccagagctcaaagcctgtcaacatgactgactgcagactcacttcaggaaagtatccccagtgccgctatagtgctgctgcccagtacaaattcttcattgttgcctgtgacccccctcagaagagcgatcccccctacaagttggttcctgtacacttagatagtattctctaaggcatccactgcatttcctttcatttgacatagcttctgttacaattgcatccacgttttcttttcttttgttgattttcttgttcccgtagaagaaagaagaaaggtgtttggagaattcgagtgcctaggatgccagaccagagttgagacaaaaagaaataagattattttctgctttgtagttctgtacttttcgagagaagggaatagggaagacagcaaagaaagattcagatttctaaccctgcaacttttgccaagctttattgccctgtgttcacagcaataaaaccacttcctgctgcattct

SEQ ID NO: 79942 - DNA, 1000 bp, Homo Sapiens
  misc_feature (57)..(57): n is a, c, g, or t
  misc_feature (71)..(71): n is a, c, g, or t
  misc_feature (85)..(85): n is a, c, g, or t
  misc_feature (206)..(206): n is a, c, g, or t
tgacgtacagacgacgtagaggttgatttaaagtagttaaaatagtttactaacgtntgagaaatacgatnttagcagacgtgcntaaatgttatcatatctgttgttgcactgatcatgttgcttttctgccccaatcacaactatgttcttggggaactaacatatgatgcactaataactacttgatagagccaattaatctntaaaaatatgatatcatcaggtttactcagtgaaatcatattaattatttcccaaaatctaaaagctgtagctggagaagcccatgcccacgaggaagcagcaattaattagatcaacacttttctccagggttcaccatgcaggcaacattaccttgtctttcaaaagacacctgccttatgcaaggggaaacctgtgaaagctgcactcagagggaggagtttttcttacataatttgcaatttcaggaatttaatttataggcagatctttaaatacagtcaacttacggtgcacagtaatatgaaagccacactttgaaggtaataaatacacagcatgcagactgggagttgctagcaaacaaatggcttacttacaaaagcagcttttagttcagacttagtttttataaaatgggaattctgacttacttaaccaggtttgggatggagatggtctgcatcagctttttgtattaacaaagttactggctctttgtgtgtctccaggtaactttgcttgattaaacagcaaagccatattctaaattcactgttgaatgcctgtcccagtccaaattgtctgtctgctcttatttttgtaccatattgctcttaaaaatcttggtttggtacagttcataattcaccaaaagttcatataatttaaaaaaacactaaattagtttaaaatgaagcaatttatatctttatgcaaaaacatatgtctgtctttgcaaaggactgtaagcagattacaataaatcctttactttaatcaataaaaaaaa

SEQ ID NO: 79943 - DNA, 838 bp, Homo Sapiens
cagtcgacggtaccggacatatgcccgggaattcggccattacggccgggggcgcctgcgcgctcggtgacctttccgagttggctgcagatttgtggtgcgttctgagccgtctgtcctgcgccaagatgcttcaaagtattattaaaaacatatggatccccatgaagccctactacaccaaagtttaccaggagatttggataggaatggggctgatgggcttcatcgtttataaaatccgggctgctgataaaagaagtaaggctttgaaagcttcagcgcctgctcctggtcatcactaaccagatttacttggagtacatgtgaaagaaaacgtcagtctgcctgtaaatttcagcaagccgtgttagatggggagcgtggaacgtcactgtacacttgtataagtaccgtttacttcatggcatgaataaatggatctgtgagatgcactgctacctggtactgctttcagtgtgttccccctcagcccctccggcgtgtcaggcatactctgagtagataatttgtcatgcagcgcatgcaatcagaatctcactgagccacccatcattgtgaaataattacctcagttgtacaggacttggtgatcaggatccaggcactcacttgtattctactgctcaataaacgtttattaaacttgatcctgctacttataaccaaccatcaatactatcacatcatacacctttttggcgagcctgcgcgcctcgaaaaagctttctaaacacctcgttgtgcgcgtggcccaattaggcatgtgaccctggccctacacgtttccccaggaaacccgggccgtgaaatagct

SEQ ID NO: 79944 - DNA, 866 bp, Homo Sapiens
  misc_feature (402)..(408): n is a, c, g, or t
  misc_feature (410)..(413): n is a, c, g, or t
  misc_feature (416)..(429): n is a, c, g, or t
ggggcgcgctcggtgacctttccgagttggctgcagatttgtggtgcgttctgagccgtctgtcctgcgccaagatgcttcaaagtattattaaaaacatatggatccccatgaagccctactacaccaaagtttaccaggagatttggataggaatggggctgatgggcttcatcgtttataaaatccgggctgctgataaaagaagtaaggctttgaaagcttcagcgcctgctcctggtcatcactaaccagatttacttggagtacatgtgaaagaaaacgtcagtctgcctgtaaatttcagcaagccgtgttagatggggagcgtggaacgtcactgtacacttgtataagtaccgtttacttcatggcatgaataaatggatctgtgagatgcannnnnnnannnncgnnnnnnnnnnnnnnccatgtcggccgccctcgggccctcgaagaagcttttctagacccattcggtttggcgcggcgggccccaagtaggtaaagtgaaacatggtccataggctgttttcctaggaaaatccttgggccatgaactaggggccttggaattcctcaccaataaaaaaacgccccgggcgggaaaccggagcgtttctggaacaaattccaaaatgggagttctggagggcatttactgggatctttccaaacaggagtcccaagcgagcctcgaatatcaaaattaacgccccggccctgccaacttttcggaagaaacgggtggaaaattcaatttaagcattttctgcccgaattgggaaagccctccccaaacgggccttgattgaaccctgaattcgcccagcgggaattcaccaccctggttccccttgtgcgta

SEQ ID NO: 79945 - DNA, 281 bp, Homo Sapiens
ggggcgctcggtgacctttccgagttggctgcagatttgtggtgcgttctgagccgtctgtcctgcgccaagataaaagaagtaaggctttgaaagcttcagcgcctgctcctggtcatcactaaccagatttacttggagtacatgtgaaagaaaacgtcagtctgcctgtaaatttcagcaagccgtgttagatggggagcgtggaacgtcactgtacacttgtataagtaccgtttacttcatggcatgaataaatggatctgtgagatgcactgccc

SEQ ID NO: 79946 - DNA, 931 bp, Homo Sapiens
  misc_feature (68)..(115): n is a, c, g, or t
  misc_feature (128)..(363): n is a, c, g, or t
aagccaaaggatttgtgcccacttgcaattccaggcttggggcaaacacagccgagacttctgtctcnnnnnnnnnnnnnnnnnnnnnnnnnnnnnnnnnnnnnnnnnnnnnnnncacatcattacgnnnnnnnnnnnnnnnnnnnnnnnnnnnnnnnnnnnnnnnnnnnnnnnnnnnnnnnnnnnnnnnnnnnnnnnnnnnnnnnnnnnnnnnnnnnnnnnnnnnnnnnnnnnnnnnnnnnnnnnnnnnnnnnnnnnnnnnnnnnnnnnnnnnnnnnnnnnnnnnnnnnnnnnnnnnnnnnnnnnnnnnnnnnnnnnnnnnnnnnnnnnnnnnnnnnnnnnnnnnnnnnnnnnnnnnnnnnncaaaaaacaataaacaaaataaaacgacatcattagggaacttctaggacagcatgcttgcacagctcacttgtgcttccctattggtgatgatatcgactacctctaattaatccattcctctattactcctggaagttttacttgatccacttgactataaaaagcagaaattcagaattctctttcccagcaggcatagcaaacttcaagctgtgaagcatttcaactgcaccttacatatatactgaactgtgtttcgatttcaattgagaacaacgatataccttgtcctgaaaagacatgatgctgttttccattcccaaccattttcagaagcaaaaatcttacctttcaaagccttacttcttttatcagcagcccggattttataaacgatgaagcccatcagccccattcctatccaaatctcctggtaaactttggtgtagtagggcttcatggggatccatatgtttttaataatactttgaagcatcttggcgcaggacagacggctcagaacgcaccacaaatcgcatcccgggaatccggaccggtccagcct

SEQ ID NO: 79947 - DNA, 773 bp, Homo Sapiens
acatgatgatgatgaagatgaagaaatgttagagactgcagatggagaaagcatgaatacggaagaatcaaatcaagatctactccaagtgaccaacagcaaaacaaattacgaagttcatagacgagatttgctcaacactgcaattgccttgttagatgtaaacctctgtgactatagtacgttgcttcttgttcttcacaattctatgacttaagtaccaaaatgcataccagttattatatattgccaagaattaaatgataaacttagagactgattagactgaaaatgcctaatcgatatatatattcttgtgcctagtactttaccacaaatacagtgtaatatcatcagtccaaaactgcattacttttgtaaaaacactggttaatttgtataagatattatagagctttttatgctttagaagttaaacaatatctttgggggggaactaatttattttcatcacttgaaatgtggtagctcttacaaagtttattgatttgatttttttaaaaatcaaaagccaattgaacaacaggatatatagactgataaatatttaggctgaatagtattttaacacttgtcttcaacttgatttgtctgtttaattgaaaagaattataagagttactgttgcattttctgacctactatttttaaaattcctgttgagtttctttgtgtttacaaggaaaggactgaactttttctcatcaaaactagcttttttccccacaaataaattatcaggttaaactttc

SEQ ID NO: 79948 - DNA, 1104 bp, Homo Sapiens
  misc_feature (33)..(33): n is a, c, g, or t
atatatacaactgcatataaattacctggaatnttaaggtggtttgaggtcaagtctgttttcatggtggaaatcagccccctggagaatgccattgagaccatgcagctgacgaacgacaagatcaacagcatggtgcagcagcacctggatgaccccagcctgcccatcaacccgctctccatgctcctgaacggcatcgtggacccagctgtcatggggggcttcgcaaactacgaaaaggccttctttacagaccggtacctgcaggagcaccctgaggcccatgaaaagatcgagaagctcaaggacctgattgcttggcagattccttttctggccgaagggatcagaatccatggagacaaagtcacggaggcactgaggccgttccacgagaggatggaggcctgtttcaaacagctgaaggaaaaggtggagaaagagtacggcgtccgaatcatgccctcaagtctggatgatagaagaggcagccgcccccggtccatggtgcggtccttcacgatgccttcctcatcccgccctctgtctgtggcctctgtctcttccctctcatcggacagcaccccttccagaccaggctccgacgggtttgccctggagcctctcctgccaaagaaaatgcactccaggtcccaggacaagctggacaaggatgacctggagaaggagaagaaggacaagaagaaggaaaaaaggaacagcaaacatcaagagatatttgagaaagaatttaaacccaccgacatttccctgcagcagtctgaggctgtgatcctttcggaaacgataagtcccctgcggccccagagaccgaagagccaggtgatgaacgtcattggaagcgaaaggcgcttctcggtgtccccctcgtcaccgtcctcccagcaaacaccccctccagttacacccaaggccaaagctcagcttcagcatgcagtcgaagcttggagctgaacggcatgaccgggggcggaccgtggcccgatgttcccacccccctctggcctctcaaaggccaccgtggcaagatttacggggaattttgtatggaaaacccagggacttgcctggggcctcccc

SEQ ID NO: 79949 - DNA, 281 bp, Homo Sapiens
ggaacgagggaagcagtgagaagactggccttcaaaccagtaatcttcattttctacggaagtgcccaagcctggctttcctctttgcctttatgcagttggaccattgagttcaccagattgcaccccaaactccattattttgctttgagcaaggactgagagttagtgtagactagttagtaactttgccacaacaggtttacttttactttatttgtgtcagaacctctaaaaggatctcgtgaaaatttcctggaatttagagtgaaattttagct

SEQ ID NO: 79950 - DNA, 304 bp, Homo Sapiens
attaaacaatgagctgaggctttattacagctggttttcaagttaaaattgttgaatactgatgtctttctcccacctacaccaaatattttagtctatttaaagtacaaaaaaagttctgcttaagaaaacattgcttacatgtcctgtgatttctggtcaatttttatatatatttgtgtgcatcatctgtatgtgctttcactttttaccttgtttgctcttacctgtgttaacagccctgtcaccgttgaaaggtggacagttttcctagcattaaaagaaagccatttgagttgtttaa

SEQ ID NO: 79951 - DNA, 643 bp, Homo Sapiens
  misc_feature (45)..(71): n is a, c, g, or t
aaaagcagagtttgtcattggactgcttaacatgctagaaggacnnnnnnnnnnnnnnnnnnnnnnnnnnngctcttctgagctgtttacaactgaccactgtgttccacagatgtatttttcaatagctttttgttacttagttttccatgatgcctgttatttttctcttgtaaatttaaatgagctgactttaaggatcttgggaaaacccatggcataattacaattttctttttaatcgacttttcattacttttgggagtctgttggtaactaaagatgtcaacaaagaataaattggagaagttacctgtccccactatagcagtaaacaaaacagatgaaaaacaccttgctgttaactcaatggttgatctaattgtgaaatcgttcaccttgttaaacatctaagtaagtctgtagtcgctctgcaaacagccattatatttatttactctagaagaaactgtagagtagtaattcgtgctaatgagaaaaacaaaataccatgttcaaaacagatgtatttgaaaacttaatgacattgttccaaaaactagagcatgtatgtatgctgtgcatcatctcagcagacctaaaatatcccctttacagccatcaatatattttaccctctgcg

SEQ ID NO: 79952 - DNA, 983 bp, Homo Sapiens
  misc_feature (551)..(551): n is a, c, g, or t
  misc_feature (738)..(738): n is a, c, g, or t
  misc_feature (741)..(741): n is a, c, g, or t
  misc_feature (794)..(794): n is a, c, g, or t
agtttgaacaatatttaatctctgatgcttcagaaggcactttgagatcttgaagggccttagggttgagtctttgatggtgactatggctccttagggtgctgtgtggatgtacaagagcactggctaaggagaggtggcagcatgcaacaagggtaagaacctcagctctttccctaaatggcaggctgacccggggttagtcacttcccttccccagcagcactgcgtcagagcttctctgaggcccctcttacctctgatattctattaagactggcagaggatgtattgtgtgggttttctatcactggaactgagaaaaattaaaaactacctgcatcagcacagagaagatctgaaacggttcttgggtgtttataaacggtggggggctgggggctcccatcttgatgtcagccaaaccctggggtcagtgcagactgagatacggagcaagaaagcaggaagaacgggagtagcaaagtcagggacgacagcacagttggtgattgaatttatcaagcctgtggagaaggactctccctggntggaggtagtggcataaatatgtggtcacttatcctgccttctcagaccaacaagagctgttctgctatcaatcaaccgagagattgggttacagggacgtatcctgtctttgggactggtgatactgagaaggcagtgggtgaagagataacgaatcagctcctcctaacccaagcctttgtccanaanggctggactgaaaaggggatctggcaaggtatgagccatctccatcactgtanggatccaggaggccatattcatgtgacctgcattgcggaagtgacttttttcaagtcatgaacctcaatgcccaatgacttttgcccaagaaggcagccctcatcactccatagggggcctaccatgtagaacattacagacaatctgacatgacatgggttacaaactcatatttacagcggcccccc

SEQ ID NO: 79953 - DNA, 1361 bp, Homo Sapiens
  misc_feature (429)..(429): n is a, c, g, or t
  misc_feature (665)..(665): n is a, c, g, or t
ggcgtagtttgcacctactccatccccattttattctcacagcacgttgtaatctttcttcataacatttaccaaaatgtatatttgtgttcatttgcattatatccatcttccccactaaacaagaagttccatgaagccaataaacatgtttgttttacacacaactatagtacctagcacataggagcccaaaatatatatttgctaaataaatgtatttattttcaaatcagtttcttcacagcctatgaaacatctgtgtctgtataagaaatacaaaagatgagaaacagttaccttaagttcaagttaaccctaaacatataagtctttggttctacctccataattattgctatttctcactcccttatagagaattttgctcttgttagatgttttcttacattgggtagagtccagccntagtgagagctgagtgaaggggctggccatgccttgagacaaaaagtcaaatgagacaatagacgtgtcaatgacttgaaaaaaagtcacatccagcaaatgcagggtcacatgaaatatgggcctcctggaatccctacagtggatggagactggctcataccttgccagatccctctctcagttccagccttctggacaaggcctgggctaagaggagctgattcgttatctcnttcacccactgccctctcagtatcaccagtcccaaagacaggatacgtccctgtaacccaatctctcggttgattgatagcagaacagctcttgttggtctgagaaggcaggataagtgaccacatatttatgccactacctccaccagggagagtccttctccacaggcttgataaattcaatcaccaactgtgctgtcgtccctgactctgctactcccgttcttcctgctttcctgctccgtatctcagtctgcactgaccccagggctgggctgacatcaagatgggagcccagcccacgggctttataaacacccaagaaccgtttcagatcttctctgtgctgatgcaggtagttttaaatttttctcagttccagtgatagaaaacccacacaatacatcctctgccagtcttaatagaatatcagaggtaagaggggcctcagagaagctctgacgcagtgctgctggggaagggaagtgactaaccccgggtcagcctgccatttagggaaagagctgaggttcttacccttgttgcatgctgccacctctccttagccagtgctcttgtacatccacacagcaccctaaggagccatagtcaccatcaaagactcaaccctaaggcccttcaagatctcaaagtgccttctgaagcatcagagattaaatattgttcaaactaata

SEQ ID NO: 79954 - DNA, 1047 bp, Homo Sapiens
  misc_feature (812)..(812): n is a, c, g, or t
  misc_feature (818)..(818): n is a, c, g, or t
  misc_feature (889)..(889): n is a, c, g, or t
  misc_feature (942)..(942): n is a, c, g, or t
  misc_feature (945)..(945): n is a, c, g, or t
  misc_feature (964)..(964): n is a, c, g, or t
cacagaataaatcctgcatttcccacattcatagggaaaagaatctcttaaaaaaaatattagttagcgtttgttcttgtgtgggttgaacagtccaaagctctgagcaggcacagccttacaaacaggattgcaagcagccctctgcaccccaagtcaggactagagtacagtgagaggccttcatgcacttttgacagctcagtacctgtgagaacagaagtgatgcagggactttttaacccacaatgcatgaggtatatggaaatgtctgtgaaagaaccaccagcagctagagggaccaggcaaagttttctcacagcaactgctgatgaaggatttcccacaccatcttcttccggaagagaggcatctggtgctgagtaaatgtgataggtttgtccctagaaatataatctgcatatttacaagtaaacattccacaatcactcccattcagctgttgaggaatctcgtgtggtttcatgctgtgatgggtccactctaaaagattcagatcactatttcttttggtcttactttcatcctgtaaatactgaaggagaatctcacagatcctgtggcccttttgtcccatagaatccagatatttaagacacttttttcttaggtcaatcaccaccaggctccaatgtaccttccgatgaataggcaccagaataatttcttgttcaaagagatttacccctttggtccatcgtttcactgcttggtaacccccagactttaatttaggatagaagaaagtactgaatacatgaagtgctggatagcttgctttttattctttncacagnagatcatgtaaaattatgactcatcatgagcagtgatagtctttatgtctgatatctctcgagtattcgcntttgaagcatactaggattcatctgtgggcatggctaggcatatgattctttncangtctcgtagtaagggatgncgttctcgtccctcttgctgacatctttcttgtccctcggcgatttggcccaggcattctaaggagcggtaatctatcgtcaa

SEQ ID NO: 79955 - DNA, 734 bp, Homo Sapiens
  misc_feature (59)..(59): n is a, c, g, or t
  misc_feature (73)..(73): n is a, c, g, or t
caaatatctgtggaacatgtaaatactgtcaaatggaaactaaaataagttataatttntgtgaatttcatgngatgtcctatgattggaaaaattataactcttctgattctaatgtggaaattgttgtatttaatctgaaaatgactttacctacaacagttccattgtcagcacagcctaggagggtcagattcctgtattaattactcttagtggagatgccagatatcccatacagaattagcagagaaaatacacacaggcttctattcaaattttctttagtgcttaaaattaagttttaaaatgaaatcagacactgcaggtttgtatataaaatgaaaagctatactactttttataaaagggcaaactgggctgatgtaaatgttttactttcaactgtgttctttaaaataaatcctacctggtttttaaattttatttttcatgaaaatgctcctttctctacatttattcatcctatatacatcaggctgtaagaccccccccagtcatcattaatacaatgtgttgggattctgtgactggaaaaggtgacaagttggtgactttgacactgcaggtattccattttcatggtttactatgaaaagtcatttttcatattatgtaatatattgttagattaaaaccattgtattaagactttaaaatgtaagcattgtaattctgaaaatacacattttaagaaaagaacccaaaaaaaa

SEQ ID NO: 79956 - DNA, 1107 bp, Homo Sapiens
  misc_feature (837)..(901): n is a, c, g, or t
gggtggatcggcgaggagctgagattactctagaactggtagcaaatggggcatctctcctctgatgttagcagctatgaatgggcatacgagctggctgttaagctcctgttagacatgggctctgacataaatgctcagatagaaaccaatcggaacactgcccttactttagcctgcttccaaggaagaactgaagtggttagtcttctgcttgatagaaaagcaaatgttgaacacagagctaagactggtctcacaccactaatggaagctgcctctggtggatatgcggaggtgggccgagttcttttggataaaggtgctgatgttaatgcccctccagttccctcctcaagagatacagctttaaccatagcagcagataaagggcattacaaattctgtgagcttcttattggcaggggagctcatattgatgtacgtaacaagaaggggaacactccattgtggctagcagcaaatggtggacacctcgatgtggttcagttactggtgcaagcaggtgcagatgtggatgcagcagataaccgcaagataactcctcttatggcagcatttagaaagggtcatgtgaaggtggtgcgctacttagtcaaagaagtcaatcagtttccatcagattctgaatgtatgagatacatagcaaccatcactgataaggagatgctgaagaagtgtcatctttgtatggagtcaatagtacaagccaaagatagacaggctgctgaagcaaacaaaaacgccagcattttgttagaggagttagacttggaaaagttaagggaagaaagtcggaggctggctttggctgcnnnnnnnnnnnnnnnnnnnnnnnnnnnnnnnnnnnnnnnnnnnnnnnnnnnnnnnnnnnnnnnnnaaattgaagccaaaaataaagagaactttgaactccaagctgctcaagaaaaagaaaagcttaaagttgaagatgagcctgaagtcttgacagaacctccaagtgccacaaccactactaccataggtatatctgcaacctggacaactttggcaggttctcatggtaaaagaaataataccataactacaaccagttcaaagagg

SEQ ID NO: 79957 - DNA, 1189 bp, Homo Sapiens
  misc_feature (827)..(899): n is a, c, g, or t
  misc_feature (1073)..(1107): n is a, c, g, or t
  misc_feature (1111)..(1149): n is a, c, g, or t
accatcacttttttatttggcagtaatagtaatacatccatgttacagtgcttattttggctaaagagccagtgcaattttttctgctactgtagtgttttacttttacacaaattaatgagtacagtccttacatttaggagacagaaacatttactgacatcagctaagtaaagctaatacatggttgttcacaaactaaacaaaacaataacataatatactcattaggaacaaagtagggatgttcttatttccactaatcacagattatataaattcttaaatttcacatacatatttctaaatctaagcaaaaaaattagaattcagcttaattcctataatcattttgaaatttacatcaaataatttctgaatatatattcacattaaaatacaaagttaaatgggttatataaacatgaatgtaaaatgtctgattgatgaaaagttatagagaagtacattgaaatgttacttttggcattccgtgatttcctaggcttacaggaattattaagaattcctttgtaatgcaaataatcactctcttggaaattaaatttaagtagaaaatgttacaattgttaaggcaagaaaacatttgtaaatatttttataaaggcatttaattcgacgaattaacggaatcatagtaaatggatgcaaataaagaatattactttatgagaaagacaaagttctttggagcttactgtgacagtatggaaaacttgtcttcttttttaaaagataattccattttgatacttaataaacataatgttaaccttcaagaagaaataagcactcttagttgaacnnnnnnnnnnnnnnnnnnnnnnnnnnnnnnnnnnnnnnnnnnnnnnnnnnnnnnnnnnnnnnnnnnnnnnnnntcttctttcttctagaaaaaaggatattttctcaggagtgacttaattgaagtccctcttataatttacatatggaagtggatggtagagctcatggtggcaagggcaattccatgattaagtcccggccgtaatggccgaattcccgggcatatgtccggtaccgtcgactgnnnnnnnnnnnnnnnnnnnnnnnnnnnnnnnnnnncggnnnnnnnnnnnnnnnnnnnnnnnnnnnnnnnnnnnnnnnctttaacggagtagcccctatatgatttgttcaagttgta

SEQ ID NO: 79958 - DNA, 550 bp, Homo Sapiens
gggcacaattcagttgctgaggataagctggccaacttagagagaaagctatagagcctgagatcagaactggaccacacgaagaagctgtaacccttctccttggggaaaatgtctgggaagaagcttttcgtgaccaatggtgagcggatgcctatctccaaagtgaaggctctgtgtgctgggctccaggccacagtggctgcccccaagaatgccgaggagaataaggccatccaggatgtggccaaagacactgccttcctgggcatcacagatgaggcaactgaaggccagttcatgtacttgacgggcgggaggctgacctacagcaactggaagaaggatgagccaaatgaccacggctcaggggaggactgcgttattctcctgaacaacgggctctggaatggcatctcctgcacctcctccttcattgccatctgtgagtttcctgcctgaagaggcacgttcctcagccccctccttgcctccctgctgaactctctgctgctttggaagagaattcaatgttggttttcttcaaaaa

SEQ ID NO: 79959 - DNA, 708 bp, Homo Sapiens
  misc_feature (12)..(12): n is a, c, g, or t
  misc_feature (45)..(45): n is a, c, g, or t
tttgcatgtatntggtcattacaggctaaaactgaagaataagtntggaaattggttctatttagaaaacactgtttgcacatccaaatgttcccagtcaagatttcccaatagtggcagtgagaaagagaggcagagagaattaggatacttgggttcaaattttagcttagtcactgatgggctgattgagtgagaagaacttaatcacctgcaaaatgaattgcttacagtattttgatctctaaatacacttttgattctgatatttaatgattttgtattacaaaattgggcagaaaacgcatagcttcataacaagcaaaaaattttactgttaacacatcatacttattttagagtaaatttgaaggaggttgatgttttggaatttggttggagagttatccaaaagcaatgtttccctgactcaactacaaccaattacacacagtggccagtaggaaaaggattaagttgtccagacaaaatataatggtaacaaaaaataatcttgtgcttttgacatctttctgtttacttgtttttgtcttgttctaatgccccctgaattactattttctaaaaaacagtctcatctaaaataaaacatagtaatgtgttttcaaatgagacattttattgtagttacgatttcttttgtatattttcctaatgcagactacaataaatacactaaaatatttc

SEQ ID NO: 79960 - DNA, 552 bp, Homo Sapiens
  misc_feature (321)..(355): n is a, c, g, or t
gatgatgatgaaccatgcaaaaaatgtggcccttccaaaccatcctgagctaattcttctgtgtgactcttgcgatagtggataccatactgcctgccttcgccctcctctgatgatcatcccagatggagaatggttctgcccaccttgccaacataaactgctctgtgaaaaattagaggaacagttgcaggatttggatgttgccttaaagaagaaagagcgtgccgaacgaagaaaagaacgcttggtgtatgttggtatcagtattgaaaacatcattcctccacaagagccagacttttctgaagatcaagaagnnnnnnnnnnnnnnnnnnnnnnnnnnnnnnnnnnnttgcttgaaaggaggtcaacaagaacaaggaaatgtataagctacagatttgatgagtttgatgaagcaattgatgaagctattgaagatgacatcaaagaagccgatggaggaggagttggccgaggaaaagatatctccaccatcacaggtcatcgtgggaaagacatctctactattttggatgaagaaagaaa

SEQ ID NO: 79961 - DNA, 1538 bp, Homo Sapiens
  misc_feature (623)..(623): n is a, c, g, or t
cctacctcaggacagcctttgtcactgaggatttctagggttagggcttcacaggaagcgtctccttgaacccagagtggttgggttgggcttctggcagtgccaccgagtactcagttgtggcaaaaagcagggtgtccagggtggtctcagtacacttggcgatgaagcgaatgaaaggcctcacgtcgccctcgttggcagcttccaacacgtggtagtagtcggaccgctgctccttgcggatggtgatgggcgggtagcccgcctgcatgaggatgaggttcatgagcagacgggaggtcctcccgttgccatcaatgaaagggtggatgtaaacgagtttataatgggctaaggctgcaaactccactgggtgcaggttcatggcttcctcggagttgagccactgtacaaactcctgcatctgcttttccacatcctgcggatggggagggatgtggtgtccgaccaggacctgtgttgtccgaaacctgccggcttccacggggtccacgtagcccagcacccgcctgtggatctccagcacgtcgctgatggtgacggagccgatgcgcgaaaccagagtcgtgttgatgtacttcatggctgcatgcatgccntatgacctcgtttctgctccttccaggctctttcccgggcacgcgcgtagcgggtctccaggatgtgcctgatttccgagaggggtgagggtgttgcccctcgatggcccactgtgtggtagatgtgatggtagtaggtctcctccatgaccctgcgcagagctgagttccccttggggatggacatgaccttcttcactttgctgtcgatgatgctgaaatacctctggtcgatctcttccacaagaggcagtgtccgatcgcggttgaccagtgctttctcatggtagggtgagatggtcaatgctctggtgtacaagtagtccgcctggatgatgtccttgtcttcttccgagaagatgccaaactcggtgagcgcgtccacgaagtccgggtccatcttgagggcgtgcatgaagagcttttgggctttttcccgcttgccctggcgcttcatctccagggcctggttcagggcagctctggcttccaacttacccgctggagaggccttggtcttggccaccagcagcgtcgcgcccctggaggtgatgctgagctccgtggacgggctggtgcacttggtggcggcatgctgcgccctgtccggtttgctcctgagcaggtagaggcctttgagcacagccaagcactgctcctccacagcccccagcggcagcagcagggccagcagggaccccagcaccatgctcagcagcgtcacccagaggaagcggctccagaccgagacccatttcggttcagtcaccgccatcactgaagccattggtatgagcatcatctggactcaggagagggccctttgcgcatgtccacaggcggctgagagagagcaggatcgcgcgcagctgtcagaaccccaaccgccttccccatcccgggaattccggaccg

SEQ ID NO: 79962 - DNA, 282 bp, Homo Sapiens
ggcacgagggggaactttaggatgtgattaagtcgtgagggcacagctcttatagatggggtcacggtccttctaaaagggcttgagggagtggttttgtttccttccatcccttccgccacatgaggacacagtcttcgttccctctggaggactcagcaacaacacaccatcttggaagcagagagcagtcctcaccagacacggaatctgccagtgccttgatcttggacttaccagcctccatacctgtgagaaataaatttctattgtctataagtt

SEQ ID NO: 79963 - DNA, 761 bp, Homo Sapiens
gtttcccaattcaactgtattaggtttggcagcaaacacaaggtcaaacagaaagcacatatgtttgctagaaggcaaatttcaacagcaagcagaccaatttacctgaccttaataaggtctttacaacacaaaacacctagagagtataaaaacagcccattttaaaagtctggtagactttcatttgcctgattcctattagaagagtgagattagaacaaatatcttcctctttacagcttcgtaaattgagattgtatgaaaatcaggccaagaagcccaaatgttgaactaaaacacaggagaagcaggtaataaaacattaaaaaagaaatatttgcctaaatttatttccccagatattaattccttattggctaaatgtataaaatacaaagtttgaggattctaagcctcaataatatatctaatttatttctaaatctcaaatcacagtccaaagcattgtgcttccctcgtatcatcttggatgctgatattacaaacagttggaacccagaagacttaaggaagcagtctactctggtcagttttccttctactcaagtttctaaaggaggacacttaacagagatgaaagggcatcttctatcttgaaggctattaacccacactttctttctctccctaaacactaaagcctgcaaaatagctctagttagacttttctttcctttacctaactttcttatttttcataataaaaatgtaatatgttaagaactcttgctctaaaa

SEQ ID NO: 79964 - DNA, 1905 bp, Homo Sapiens
  misc_feature (1655)..(1805): n is a, c, g, or t
  misc_feature (1810)..(1810): n is a, c, g, or t
  misc_feature (1813)..(1813): n is a, c, g, or t
  misc_feature (1816)..(1833): n is a, c, g, or t
  misc_feature (1841)..(1859): n is a, c, g, or t
ggggtgggaaggcagctgaactcggcgcctggaaagatggaggcagcggagacagaggcggaagctgcagccctagaggtcctggctgaggtggcaggcatcttggaacctgtaggcctgcaggaggaggcagaactgccagccaagatcctggttgagtttgtggtggactctcagaagaaagacaagctgctctgcagccagcttcaggtagcggatttcctgcagaacatcctggctcaggaggacactgctaagggtctcgaccccttggcttctgaagacacgagccgacagaaggcaattgcagctaaggaacaatggaaagagctgaaggccacctacagggagcacgtagaggccatcaaaattggcctcaccaaggccctgactcagatggaggaagcccagaggaaacggacacaactccgggaagcctttgagcagctccaggccaagaaacaaatggccatggagaaacgcagagcagtccagaaccagtggcagctacaacaggagaagcatctgcagcatctggcggaggtttctgcagaggtgagggagcgtaagacagggactcagcaggagcttgacggggtgtttcagaaacttggaaacctgaagcagcaggcagaacaggagcgggacaagctgcagaggtatcagaccttcctccagcttctgtataccctgcagggtaagctgttgttccctgaggctgaggctgaggcagagaatcttccagatgataaaccccagcagccgactcgaccccaggagcagagtacaggagacaccatggggagagaccctggtgtgtccttcaaggctgttggtctacaacctgctggagatgtaaatttgccatgacttcctggaggacagcagcatggagaaagatcctagaaaaggcctctgacttccctcacctcccaaccatcattacaggaaagactgtgaactcctgagttcagcttgatttctgactacatcccagcaagctctggcatctgtggattaaaatccctggatctctctcagttgtgtatttgttcatcttcatatgctggcaggaacaactattaatacagatactcagaaagccaataacatgacaggagctgggactggtttgaacacagggtgtgcagatgggggagggggtactggcccttgggcctcctatgatgcagacatggtgaatttaattcaaggaggaggagaatgttttaggcaggtggttatatgtgggaagataattttattcatggatccaaatgtttgttgagtcctttctttgtgctaaggttcttgcggtgaaccagaattataacagtgagctcatctgactgttttaggatgtacagcctagtgttaacattcttggtatctttttgtgccttatctaaaacatttctcgatcactggtttcagatgttcatttattatattcttttcaaagattcagagattggcttttgtcatccactattgtatgttttgtttcattgacctctagtgataccttgatctttcccactttctgttttcggattggagaagatgtaccttttttgtcaactcttacttttatcagatgatcaactcacgtatttggatctttatttgttttctcaaataaatatttaaggttnnnnnnnnnnnnnnnnnnnnnnnnnnnnnnnnnnnnnnnnnnnnnnnnnnnnnnnnnnnnnnnnnnnnnnnnnnnnnnnnnnnnnnnnnnnnnnnnnnnnnnnnnnnnnnnnnnnnnnnnnnnnnnnnnnnnnnnnnnnnnnnnnnnnnnnaaaanttnttnnnnnnnnnnnnnnnnnnaaaaaaannnnnnnnnnnnnnnnnnngggggcgggccccaaaaggaaagggaaaaggggcaaatttttttcc

SEQ ID NO: 79965 - DNA, 469 bp, Homo Sapiens
ggcacgaggggtaaactgctttagaaggggaacttgattggaaagttcccgttgtagagcaattgtttgggtgccttcagctcatattggaccatgttggactgaggtccattggcagtgaggaaattctgcaacatctctgaagcccaaatctcctttgacaccatccttagaagggatggaacatacaagtcactatcatggttcttattcccatggcctgctaattttcagatgccagtaaaattaacatgcatgtatcacattctgtctaagctcaaactgaaaagtgatttaagctttattttacaaatgttatctggttgtaattttatactcatgaagcaattgcttgaaaactccttcttaagggtgttccatgccttagattatgaaaaatctaaatttctagccctttgtcactgcatgtttgtattgttgctcagaaacaaaattagactcatttttt

SEQ ID NO: 79966 - DNA, 479 bp, Homo Sapiens
  misc_feature (141)..(163): n is a, c, g, or t
  misc_feature (169)..(192): n is a, c, g, or t
  misc_feature (307)..(364): n is a, c, g, or t
ccttaactatatctgtctacaggcagatacagatagttgtatgaaaatctgcttgcctgtaaaatttgcatttataaatgtgttgccgatggatcacttgggcctgtacacataccaattagcgtgaccacttccatcttnnnnnnnnnnnnnnnnnnnnnnntttatnnnnnnnnnnnnnnnnnnnnnnnnaaggactgtgggttgtatacaaactattgcaaacacttgtgcaaatctgtcttgatataaaggaaaagcaaaatctgtataacattattactacttgaatgcctctgtgactgannnnnnnnnnnnnnnnnnnnnnnnnnnnnnnnnnnnnnnnnnnnnnnnnnnnnnnnnnccctttccccattcccttgtaaatacattttgttctatgtgacttggtttggaaatagttaactggtactgtaatttgcattaaataaaaagtaggttagcctggaaatgaaatt

SEQ ID NO: 79967 - DNA, 580 bp, Homo Sapiens
ggcacgaggcttaatgatgataaacaaggataaaagataatgatgaggactttcagtttcctttcaaacatgtaaaaagctgcaagtcatcagtcccatcctcacaataagaaataagatgaacaaactgaaaatttacaactcctcctggatctgtcagagaactgaggtcacagggcaaactaccactctgaaagctggagagacccttgaatacagagaatcagcccttatagctggagcccgtaacttgcaggaacccttaaacagcaactgacaaactgctaatcttcacaattaaaaacccttggggcgggaggtcagtttctgtggagaacccatacttttgtgtgaattaccttcagagtccaggatctcacagtgaagactgaagaaaaatttctccctgcttccaggaatggaagggggtgagtaaacatttctaatatgcccagactgttctcttcaccttacaaaggtctgtctcatgaaaaacgactttaccagagccttatctgacttacaggaaaagcaattagaaaacacgggccctctctagacttttcgtcttacacaggag

SEQ ID NO: 79968 - DNA, 476 bp, Homo Sapiens
  misc_feature (395)..(433): n is a, c, g, or t
tatctcatgctgcatagggcaggaggctgaaaagctaatttgagaagaaaacaagtaggatttttgttttgttttgcattttgcaatatggaggagaaatgattagaccttaggaagtgccagtgggttggtcctttcatgaacatgccatcagtaaaagccctggaaacaaggtcataccagagattcattgtaccttgtcacaactgcaaacaatacctgagtggaatattcaaaaacttgcttagaaagaaaactctaggaacagatggctccactgaagttattccaaatatttaagaaataaagcataccaggcttttataaactcttctagaagaaaaaagttggaacttttccaattcagtttttcaggccagtgcaaccttgatacnnnnnnnnnnnnnnnnnnnnnnnnnnnnnnnnnnnnnnngctatagaccaaagtctcatagatttagatgcaaaatcctaaa

SEQ ID NO: 79969 - DNA, 639 bp, Homo Sapiens
  misc_feature (25)..(25): n is a, c, g, or t
gaacccaaaaatagaaaagcattanccaagaaacaaaaagcacagcaactcttaacagtatcagggcttagccattccattgagggctgaggtttttataactaattaggctaaaaaaaagatttaagaccagaaattgctaaagccataaaagccagtccaatgtgaagccagatctgtcgttcaccaagagaaggacaagccagggctgaggggattccggcaggcgctgtggcccattcacagcttgaatgtaaacattatgttgtgtgtctggcatgagactgtgaagaaaacagccaacaccacacacacatcagctttatgactctggaaaaatcaggaagcacatttagaaacataaagtatttccagggttggtcagagaacctgctgtgccatcactcctttgtctttgctgctgtgattaaaaaatgttgacaagcgtcagtgggttgcccttatcgcaaatgttagtacaaggtcaagtgagactctattaagacatttcctccatccagccattcagttacaggccgcgggaacgtcctctttacaagaccagaggagctctgaaaagatccaccaaagtttatttcatcagtcctgaaacaaatttgatctttcagaaatattagt

SEQ ID NO: 79970 - DNA, 1894 bp, Homo Sapiens
tttgctgcatgctgtacaggacagctgctgctgcaaactcagcctctgatgggcccatagtcgatctgcccactgcatgccttgaactcagggaattcagacgaaatcatcacacactccagccagaagctagagggctgccggccttgacattttaatgcatttttggtgtcagctgcccttcactgattcactcaattctagaggtctgaatgagaatccctacacgcttctcaggggttctgaagaagccagtgtagcccaaggtcatcaacccaagtgaacccacatttatccaggaagcaagaggtgtggcaagggcagaattctaacagacatccattccacatgtgtcagagacaaaactaagtccaagataaaatcgacaaaggctatttattcataaacgtgcagcaggggaacccttctgctgaaacctttgttttggtaagtgttcagaggtgttaagacgttatagagtaaaaaggagaaatactgacagtgttgacttggcaaatgtcatataagggtaggatttgtggaagcaagccaagagacaaagtgtcttcaagtacatttgacttgattagcttcaaggaggcaggtgagcagtctgggaacatttcaaaagaggaaaggggcggagagttttctgtggccagccatttcctggaaaaagtgatggttgatgggatgcttttttgcagtctatcatcatggtttttaggggtgtaaaaagtaaagtgaggttcctcttcaaagactttcctccccgtctaattaagaataaatagtaacttctcttagaagcaaaatttattcaaagacctgtgctaacattcttaaatatctgctagccataataaagaaatcaatgtactttatgttcttagctcccacaatttagcctaaatatttgccctggcatgcttatactggtccaagcaagcattaggtcatagcctgttcctcttccttatttgaaggtgtttttacctttctcagcattccacaagttacttcctccttcctttgttcccctctgcctttgcctcttttaaaaagttctaagttgctagccaatcaggacaaatacagaatgtgaggtcccgttccagccaatggaaaccggacacagcagtaaggtggacgcgtcaggttataaatgaccctgtctcctttgttcggtgtactctcgtggcaaaactgctggcgagtgtaccctttctgcagaaagtaaaaatggccttactaaggaaattaaatttatgttcaagtgctatttctttattgcaccgaggaacaagcatttctaacagtaggttttagtatatagtttagatgttccttatgttgattgacatttgatggctcttcagtggttcgaagatgccagaaaagaacaatgaacgatgagaatggccagaaaaatctagaaactatggtgaaagtacttacaagttgaatatagccataatagaactggattgtgctagaagtgactaaggttggcagtggaattgggagcttagtaggcccaatcaactgtgtggctttcttcagcttaggcagggcaaaatgtggtatcttaggatcctcttgcagtaatttccaaacataagagctgcgaaataagttataattggcaccaacaatcttcaatgatgttgaacacatatttttccctctggattaggcttctcttttattctcagtcataatcttagtaaggagtttcttgtcactttaagggtattcattccatatcgacttgttcaccagaatttcttcgaggatgacaagaaacggcagtagtggtggcttgtggctctctgtgctgttgctggtggagccaacagaaaggatgtcggagttctatggaacatcagaatcg

SEQ ID NO: 79971 - DNA, 853 bp, Homo Sapiens
  misc_feature (93)..(93): n is a, c, g, or t
  misc_feature (114)..(114): n is a, c, g, or t
  misc_feature (118)..(121): n is a, c, g, or t
  misc_feature (126)..(126): n is a, c, g, or t
  misc_feature (131)..(132): n is a, c, g, or t
  misc_feature (139)..(140): n is a, c, g, or t
  misc_feature (145)..(146): n is a, c, g, or t
gggaaaggtttttgagtaaaaaactcacacaggcacatacaagccaccctttaccctttccggggcccagggaaacgtccaggggccccagancccctgagggaggaagcgggnccgnnnnccttntttcnnccacccnnccccnntttccatgcctcagcctttgcctaccccaggaatgagcttggcctccaacatcccttgcctgctgccattagtagagggggcccctctgcatctgagccccccatccctgtgccacctgggtgtggagcccatggaacactctggtccgcctcattttaaaccaaaaaactgctccttcaccctcaccctgaggccccaggggagaggacccgtgggatggtgcccaggggttgccttgggacctcggatctcctctggggggcttggctgctgctgttgctgctctgtatttgcctctcgtgattctgtttgttacccatgttcacttcccccaggagaggccttggtaccccctctcccctggggcatccctttgccttggcatccctgtagcccagcaaccctgcccctccccagcatcccagctgggccagagagagccgagtgtgccaacaaggactggggcctgcccggctgcccgcctcagggatgggcacctcatgcctgtctcgccacctcctgtgccaatgtcccaccctccacctgggggtggggtgcagcttccacttactgattagaagacaccactgccctcccttcccccctccctgtctggtgtcctgtgcccccatctgtctgtctatatttgtctgtactcccctaggagaagtattttgccatatataaaaccactgtcctgtccttg

SEQ ID NO: 79972 - DNA, 324 bp, Homo Sapiens
ctttcaacattttcattgaaagatcgcttaatgcatccagaatcagagccagaagtattaactagccggtgtcccacgtccttttccaataaaacccttttctctcatggttatagggttatgctcataagagtgaaggttttcaaactaagtttctgggaaccctatggtttttcaaagttgcatcaggtcagctgaggggcaaggcactttgtgctgggtctaggaagccaggtactttgtgctgtttcaacaagagctcttctgctttaactagttttatctcaaagtttgataatacatacaaaaaaagtctggctcttt

SEQ ID NO: 79973 - DNA, 1506 bp, Homo Sapiens
  misc_feature (131)..(142): n is a, c, g, or t
  misc_feature (162)..(253): n is a, c, g, or t
  misc_feature (1463)..(1463): n is a, c, g, or t
  misc_feature (1472)..(1472): n is a, c, g, or t
aagcagcttttaggagctttcttttcgtgccttgttggaaagaagcagccgtactgagagcccaggtcgttgttttttccagcttagaagccatggcgcacctccatttttgtgcgctctcctaatgaggnnnnnnnnnnnncggacctgttttagtattannnnnnnnnnnnnnnnnnnnnnnnnnnnnnnnnnnnnnnnnnnnnnnnnnnnnnnnnnnnnnnnnnnnnnnnnnnnnnnnnnnnnnnnnnnnattatttgggatctgatatttttctactagtagataggactcttggtttggacatactacatggatcagtaaatacctgggcacaggacttcaaagcaaacacagattccccctcccccttaatatttaagaattaaaagatgatgagaaataaggacaaaagccaagaggaggacagttcgctacacagcaatgcatcgagtcactcagcctctgaagaagcttcgggttcagactcaggcagtcagtcggaaagtgagcagggaagtgatccaggaagtggacatggcagcgagtcgaacagcagctctgaatcttctgagagtcagtcggaatctgagagcgaatcagcaggttccaaatcccagccagtcctcccagaagccaaagagaagccagcctctaagaaggaacggatagctgatgtgaagaagatgtgggaagaatatcctgatgtctatggggtcaggcggtcaaaccgaagcagacaagaaccatcgcgatttaatattaaggaagaggcaagtagcgggtctgagagtgggagcccaaaaagaagaggccagaggcagctgaaaaaacaagaaaaatggaaacaggaaccctcagaagatgaacaggaacaaggcaccagtgcagagagtgagccagaacaaaaaaaagtaaaagccagaagacctgtccccagaagaacagtgcccaaacctcgtgttaaaaagcagccgaagactcagcgtggaaagagaaaaaagcaagattcttctgatgaggatgatgatgatgacgaagctcccaaaaggcagactcgtcgaagagcggctaaaaacgttagttacaaagaagatgatgactttgagactgactcagatgatctcattgaaatgactggagaaggagttgatgaacagcaagataatagtgaaactattgaaaaggtcttagattcaagactgggaaagaaaggagccactggagcatctactactgtatatgcgattgaagctaatggcgaccctagtggtgactttgacactgaaaaggatgaaggtgaaatccagtacctcatcaagtggaagggttggtcttacatccacagcacatgggagagtgaagaatccttacagcaacagaaagtgaagggcctaaaaaaactagagaacttcaagaaaaaagaggacgaaatcaaacaatggttagggaaagttctccnctgaagatngtagaatatttcaatgccatcagagagagctcac

SEQ ID NO: 79974 - DNA, 1347 bp, Homo Sapiens
  misc_feature (730)..(805): n is a, c, g, or t
  misc_feature (807)..(1008): n is a, c, g, or t
  misc_feature (1126)..(1140): n is a, c, g, or t
tgtcttattgttcataccacagattccagaacggaaacagcttgccatcccaaagacggagtctccagagggctactatgaagaggctggagcagaccaggaagaaggcagaagccgtggtgaacacagtggacatctcagaacgagagaaagtggcacagctgcgaagtctctacaagaaggctgggcttggcaaggagaaacgccatgtcacctacgttgtagccaaaaaaggtgtgggccgcaaagtgcgccggccagctggagtcagaggtcatttcaaggtggtggactcaaggatgaagaaggaccaaagagcacagcaacgtaaggaacaaaagaaaaaacacaaacggaagtaagcagagctgccaggctcccaggagagcatggggactaggaggaagggtgtggcatggctcagtctggcccccttgattaccggcctagcccctgctcacatcacagctgtctgaagaacagtgaggtggagtgcctagaactcccgtggtggtcctgagcagagaggaggatgtcctcctgcctgcctgaaggtctcccatgaaaacactgctgaactgtgttgacactcatgaccctttttttaaaccgttaaagggaagttcggtgttggagcgatactcaatgtagtcagtctacacctggacgtgtgggccacttaagccctccccacccccatcctattcctgaataaaaccaggataatggnnnnnnnnnnnnnnnnnnnnnnnnnnnnnnnnnnnnnnnnnnnnnnnnnnnnnnnnnnnnnnnnnnnnnnnnnnnnannnnnnnnnnnnnnnnnnnnnnnnnnnnnnnnnnnnnnnnnnnnnnnnnnnnnnnnnnnnnnnnnnnnnnnnnnnnnnnnnnnnnnnnnnnnnnnnnnnnnnnnnnnnnnnnnnnnnnnnnnnnnnnnnnnnnnnnnnnnnnnnnnnnnnnnnnnnnnnnnnnnnnnnnnnnnnnnnnnnnnnnnnnnnnnnnnnnnnnnnntcttattttttttatttccggagacgcccacaagcttcgctttctccgtcaccccgttttttcccctcgtccccctctgaaccgccccaccccacagttgtcccccgctgctggccgnnnnnnnnnnnnnnnggcgcgtcctattcttctctttaagccgcctccatccccccgatttccctcaattttaccccccctatatcctatatacgccttttcccccgccttttcgttattccgccctctccatccaccctcttttataccacgtccggctattttccgcccatgattttccctcatcccctccccggatatcccccttcttttctttttccc

SEQ ID NO: 79975 - DNA, 705 bp, Homo Sapiens
  misc_feature (11)..(11): n is a, c, g, or t
  misc_feature (27)..(27): n is a, c, g, or t
ggaataacatntggaagtagtagactntgcattaaaaaatggttttctttaggaaagtataatcaattattttaatgaccatagcattcatggactcaaatgctgctgccacacacaactcaagtgctggaatatttttctacagtctctctgttctacggattatcttgtaaaccagtgttcaactagttttataactgaaaagctgcacatttttcacagtacaagccgtagtttttacctgtagtttggacttctctgttagaatgtaactgcattaccagcccttttaaaggcatctatctatcaaaggaaaatttgggtgttagattttcttgggaccgtttctgtaacctttgcccttcacaatatagaaaatattggttttgccattacattttaatgccaggtttaaaacctgttgaaagctgcagctttatacagctttcttctccctgtgaaatcactttgtttatgtgatggcatttaaaaaatagcatgttctttttaaactgaattttatatctaatcaatgtcttcagtcttgaagaagaatttgcattgttgtgtttgtatatagagtattgcagtgcatgaattagctttatgcattttattaaatgctgtttcaatgtggcattattgttgtggcttaatactactacctaaatgaggtttatactattaaaagtgaattaaagactc

SEQ ID NO: 79976 - DNA, 1131 bp, Homo Sapiens
  misc_feature (548)..(634): n is a, c, g, or t
gcttgggctccgctttggggaggggcagcaggtttattcactggatctctgaatacccaggccccctccaccatggccagccggggtgggggccggggtcgtggccggggccagttgaccttcaacgtggaggccgtgggcattgggaaaggggatgcttgcccccacccaccctgcagccttctccactcttccctcccttggagttccgcccagtacctttgccctcaggcgaggaaggggaatatgtcctggcactgaagcaagagctacgaggagccatgaggcagctcccctacttcatccggccagctgtccccaagagagatgtggagcgttattcagacaaatatcagatgtcaggtccgattgacaatgccatcgattggaaccctgattggcggcgtctaccccgggagctaaatgatccgagtgcggaagctacagaaggaacggattacaattctgctccccaagaggccccctaagaccacagaagataaggaggaaacaatacagaaactagagaccctggagaagaaggaacnnnnnnnnnnnnnnnnnnnnnnnnnnnnnnnnnnnnnnnnnnnnnnnnnnnnnnnnnnnnnnnnnnnnnnnnnnnnnnnnnnnnnnncatgaagaggaaactgattacatcatgtcatattttgacaatggagaggactttggtggtgacagtgatgacaatatggacgaggctatatactgaagaaggactctggaccctcgtgtctttctttaggatacagagagtaactgtacctattatttgtttcttcagacaagcaaatcatttggtcagagttcatataatctgtctgttccctggagatgggaatagaggatgatgacagtttattttctacacttcccctccttccacatttgtatcacctttgctatcttggggaaagtgcaaaggacaaacatctcaattgtatgaagggagaaaggagaattgaaagaagaactggggttgttagagctgagatgactgtacacatacccctgcccaatttatatagctctttgtggagataattaggggtgggagcagtttgaaggagtaagcctggttttatacttttaaataaagtgtttttatctgtc

SEQ ID NO: 79977 - DNA, 972 bp, Homo Sapiens
  misc_feature (585)..(670): n is a, c, g, or t
  misc_feature (714)..(714): n is a, c, g, or t
ggaccggtccggaattcccgggatatcgtcgaccacgcgtccgggaggggcagcaggtttattcactggatctctgaatacccaggccccctccaccatggccagccggggtgggggccggggtcgtggccggggccagttgaccttcaacgtggaggccgtgggcattgggaaaggggatgctttgcccccacccaccctgcagccttctccactcttccctcccttggagttccgcccagtacctttgccctcaggcgaggaaggggaatatgtcctggcactgaagcaagagctacgaggagccatgaggcagctcccctacttcatccggccagctgtccccaagagagatgtggagcgttattcagacaaatatcagatgtcaggtccgattgacaatgccatcgattggaaccctgattggcggcgtctaccccgggagctaaagatccgagtgcggaagctacagaaggaacggattacaattctgctccccaagaggccccctaagaccacagaagataaggaggaaacaatacagaaactagagaccctggagaagaaggaagaagaagtaacttnnnnnnnnnnnnnnnnnnnnnnnnnnnnnnnnnnnnnnnnnnnnnnnnnnnnnnnnnnnnnnnnnnnnnnnnnnnnnnnnnnnnnnactgattacatcatgtcatattttgacaatggagagggactttnggtggtgacagtgatgacaatatggacgaggctatatactgaagaaggactctgggaccctcgtgtctttctttaggatacagagagtactgtaccctattatttgtttcttcagacagcaaatcattttggtcagagttcataataatctgctggttccctggaaatggggaattaaaggatgattgacccgtttattttctacacttcccctcccttccacatttgtatcacccttgcccaatcctggggggaaag

SEQ ID NO: 79978 - DNA, 787 bp, Homo Sapiens
  misc_feature (120)..(204): n is a, c, g, or t
cagagtcttcttcagaaatacctcgtcctattgtcatcactgtaccaccaaagtcctctccattgtcaaaatatgacatgatgtaatcagtttcctcttcatgttcttcttcatcatacnnnnnnnnnnnnnnnnnnnnnnnnnnnnnnnnnnnnnnnnnnnnnnnnnnnnnnnnnnnnnnnnnnnnnnnnnnnnnnnnnnnnnagggtctctagtttctgtattgtttcctccttatcttctgtggtcttagggggcctcttggggagcagaattgtaatccgttccttctgtagcttccgcactcggatctttagctcccggggtagacgccgccaatcagggttccaatcgatggcattgtcaatcggacctgacatctgatatttgtctgaataacgctccacatctctcttggggacagctggccggatgaagtaggggagctgcctcatggctcctcgtagctcttgcttcagtgccaggacatattccccttcctcgcctgagggcaaaggtactgggcggaactccaagggagggaagagtggagaaggctgcagggtgggtgggggcaaagcatcccctttcccaatgcccacggcctccacgttgaaggtcaactggccccggccacgaccccggcccccaccccggctggccatggtggagggggcctgggtattcagagatccagtgaataaacctgctgcccctccccaaagcggagcccaagccgcgaccaacttgaaatgtactgggcttcctcaagtcggtggcgttcccc

SEQ ID NO: 79979 - DNA, 918 bp, Homo Sapiens
  misc_feature (73)..(107): n is a, c, g, or t
atcatcatataggggtactcgtcgcaccgaacgaacgagcgcagcgagtcagtgagcgaaggaagcggccggnnnnnnnnnnnnnnnnnnnnnnnnnnnnnnnnnnncagtcgacggtaccggacatatgcccgggaattcggccattacggccggggccttctaattagtataacttaaatggacgggattcacttaaaagcaagaagaaaagcacatgaacaggtgtcttaatgcatttggatactttggggtgtgtgcctgtctgtgtgtgtgtcttggtgaaggtgggctgtattttcaccaagccttttcataatcaagtttgctttgcaaaccatctggccttgcccccagcagtacagtccttcctaataacggggatgctctgtcatggttttctgtaaattatcgtgtgttgggaagttctgttgaggcttagtttgatcttccatggtggacacgtctgttctgtatgtaaaaggcattacaattgtgttttagcagatgagacttgaagcctttccacagtccttgtgctctgagatggctgttgagctctgctcaactgtcgtagctgaattctttctttgcgctgaacactgggcagcctcaccatgttgccaacgtgcttctggggcccctgtcactgccgccggatgccgcgcacacaggcagagtgccttggcaggtttgtgcaccccttggcgagccagaactgggaaccccgcggggtgaccccttctcatggggggtcggggaggggagtgcctatttttaatcctgtctgtttgttgcacaatggaaatcactgtgatttgtacatatgccctaggaaaattttactgctgtctaatttatgtaataatactgttgattccaggtttgtttaataaaactttgtatcttttcagaaaa

SEQ ID NO: 79980 - DNA, 1275 bp, Homo Sapiens
aattaggctaggtcgaggctgggtgtttgaatcggcacgaggctgccgtcccgggatgctgagcgcccaccgtctccccgcagccccctcatgcccggctgcgagctgcccgtgggcacctgcccggacatgtgcccggccgccgagcgcgcccagcgcgaaagggagcaccgcctgcaccgcttggaggtggtgccgggttgccgccaggacccgccccgcgcggatccgcagcgcgcggtgaaggagtacagccgacccgccgccggcaagccccggcccccgcccagccagttgcgtccgccctccgtgctgctggccaccgtgcgctacctggccggtgaggtggcggagagcgccgacatcgcccgcgccgaggtggccagcttcgtggcagaccgcttgcgagctgtgcgcctggacctggcgctgcagggagcgggcgacgccgaggcagctgtggtgctggaggcggcgctggccacgctgctgaccgtagtggcgcggctcgggcccgacgcggcgcggggacccgcggacccggtgctgctgcaggcccaggtgcaggagggcttcggctcgctgcggcgctgctacgcgcggggccgccgggccgaacccccgccaacccgccttccagggcctctttctgctctataacctgggctcggtggaagccctgcatgaggttctacagctgcctgctgccctgcgcgcctgcccgcccctccgcaaggccttggcggtagatgctgccttccgagagggcaatgctgcccgcctgttccgtctgctccagaccctgccctacctgccaagttgcgctgtgcagtgccatgtgggccatgcccgccgggaagccctggcccgcttcgctcgtgcctttagcacccccaagggccagaccttgcctctgggcttcatggtcaacctcttggccctggatggactcagggaagcacgggacctgtgccaggcccacgggctgcccttggacggagaggagagagttgtgttcctgaggggtcgctacgtggaggaagggctaccgcctgccagtacgtgcaaggtgttagtggagagcaaacttcgaggacgtaccctggaggaggtggtcatggcagaggaggaagatgagggcacggacagacctgggtccccagcctgaggagggagcgtgagcctcccagagccccaggactgggccagagcacttaggtttctttttccatggtttccaggtaataaaaggaacttgttttgttggtaccagta

SEQ ID NO: 79981 - DNA, 728 bp, Homo Sapiens
  misc_feature (86)..(86): n is a, c, g, or t
  misc_feature (145)..(145): n is a, c, g, or t
  misc_feature (600)..(628): n is a, c, g, or t
tggagctgctgttcagcccaaacttctagcaagagagttgctggacctagtgcttcacatttcaacctgaaagaaaaggagtattntggaataacattcatagatgacacgtaagtcctttaatagttttagtttctttaccttntgcctgggctacctacttgctgtcttccataattaacaaaaaaggaaataagtcctccagcattcagaacatgtcctgcttagctaaaggttttttaatatgcgatttttctcctaggattatggcaaagggagaagaaaagggatactgaccattttaggaactcaaaatattgttctaaatgttttagaaatgtgtagtaatgagtttgtttttcccgattacagtgtatcttctcatgtctttgaatgtgattgtgcttgctaatttagcttatatggtagaaatattagatatttactcacatcttgaaactgagtggatgtgttggtgttggtggcaagagagcttaaaggcaaatttgtggcccactaaaaaacatgtatatagtttaatatggaatgaacttttaaactaccacttaggtccattttatgttgccttctcaactatcnnnnnnnnnnnnnnnnnnnnnnnnnnnnnatgctaagttgttgaatgttgtatatatttgtcaacaatatatatgctccccaaaacaaggcaggtaaataaaaataaattcatgagaatttaacactct

SEQ ID NO: 79982 - DNA, 1056 bp, Homo Sapiens
  misc_feature (61)..(531): n is a, c, g, or t
cagggaacgctgtatctatagtctgtcggttcccacctctgactgagctcgatttgtgatnnnnnnnnnnnnnnnnnnnnnnnnnnnnnnnnnnnnnnnnnnnnnnnnnnnnnnnnnnnnnnnnnnnnnnnnnnnnnnnnnnnnnnnnnnnnnnnnnnnnnnnnnnnnnnnnnnnnnnnnnnnnnnnnnnnnnnnnnnnnnnnnnnnnnnnnnnnnnnnnnnnnnnnnnnnnnnnnnnnnnnnnnnnnnnnnnnnnnnnnnnnnnnnnnnnnnnnnnnnnnnnnnnnnnnnnnnnnnnnnnnnnnnnnnnnnnnnnnnnnnnnnnnnnnnnnnnnnnnnnnnnnnnnnnnnnnnnnnnnnnnnnnnnnnnnnnnnnnnnnnnnnnnnnnnnnnnnnnnnnnnnnnnnnnnnnnnnnnnnnnnnnnnnnnnnnnnnnnnnnnnnnnnnnnnnnnnnnnnnnnnnnnnnnnnnnnnnnnnnnnnnnnnnnnnnnnnnnnnnnnnnnnnnnnnnnnnnnnnnnnnnnnnnnnnnaagaattcggcacgaggccaagtgtaggaaaaatgacattttctgattacatccagaacaggcatagaaaaggtataataaagcttgaaacaggtggctgacaatgcagaaatcaatcactgaactgaaaaggtaaaatgaacattgttagaggaatttaggattaagatggatgtagagcttgcaaaagaaaacctagctctctaatacttaaagttctctagccctagaaaaaaatacctcagcaagaaattgcaagtaataattgcaccaagagtcagcatctattttaactgtatgtttaattaagtttctaactcaaatgagaaattttgggccatttttgtcaaatttttgcttagatggctacaaatacttagcaattcattttcatagattttgtagcatccacaaagccctccttactgcagagaatgcagaggtatttatccaataaaccttcatgtaattgctgctatacagcaaaactatcattaccggtaattaaagttgtgatacctgaaa

SEQ ID NO: 79983 - DNA, 704 bp, Homo Sapiens
  misc_feature (53)..(53): n is a, c, g, or t
ggaagtttttaggttggcttaaatggaggtatttatttgagtgagccctaatntgaaaattaccagacttgatcctcctggtatgaatcaaggaaatactgtaccttgctcttagcaactctcagtgccctgaaagagaaaatgcacttcttcaaggtgagtgaatcatgctttttccacagttcagatcagaccctttatttttcaaactacaaggcctgcttattggacagtctaaggaatagctttgatacttggtattcagttggttccattattaatgtatattatttttatttaaacatcaaaacttaaaatatcagataatgttgcatgttttaaaaacacatttcatccctttggctacccaggaccagcactatttaagacactgcttatttataaaatgagaataatgattatatgtacatattcagacatcaaaatttaatgacattctattttgagaagggaagacaatgctgaagaaagtaaaactgttgattgaaatgctgacagggtggagaacgaatttgaagacagtggaataaactatgaactatgctaatggtaattagattttttgtttgtttagtatagtggtaaattgtgtagtatcttgctgagaatctaattctatcttgtaaaatcaatccaaatgtgtattgtgaaacacctgtataaaatcatttttgaaataagtg

SEQ ID NO: 79984 - DNA, 502 bp, Homo Sapiens
ttggaaggatcagctaaagcagagttgagaggaatgttaagtacttaaataaaaaaaggagaaattcatagcagcattattcacaataaccaagaaatacgtacaacccagatgttcatcagtggatgaatggataaacaaaatgtggtaatatgatttggatatttgttccctcaaaatctcacacggacatgtgacccccagtgttggaggtggcgcctagtgggaggtgttggattatggggtggatctcatgaatggcttggtgtcctccacatggatatgagttcatcctatagctagttgtttaaaagagcctggcacctcctccctctcccttttgttccctcttgccatgtgatatgctagctctccctttgccttctgccataattgtaagcttcctgaggcctcaccagaagcagatgctggcactatgcttcttgtacagcctatagaaccataagctaaataaaccatttttctttataaattaaaaaaa

SEQ ID NO: 79985 - DNA, 837 bp, Homo Sapiens
  misc_feature (30)..(30): n is a, c, g, or t
  misc_feature (67)..(67): n is a, c, g, or t
tcaccgtaccaaatgcgatccgagcaaaangactggaagagagccgagcgcggcgctccgagagctncaggagaagcaggctctgatggagcagcagagacgagagaaaagggcactgcaggagtggagagagcgagcccagaggatgagggaagaggaaggaagagctcagcaaactcctgcctccgcggaggagcatggtggcatcaaagattccctctgccacagatctgatagataacaggaaagtaccactgaatccgcctggaaaaatgaaaccaagcaaagagaaatcgccacaagcaagtaaagaaatgagtgccctgcaggagagaaatttagaagagaagataaaacagcacgtcctccaaatgcgtgagcaaagaagattccatggccaggccccactggaggagatgaggaaggctgccgaggatctggaaattgccacagagctacaggatgaagtattgaagctaaaattgggattaaccttgaacaaagatcgtcgacgggcggccctcactggaaacctttcgcttggcctgccggcagcacagcctcaaaatacattttttaacacaaaatatggagaatcaggaaatgttcgcagataccagtgacaccaggtggctggactgatggagacgtcttcagacaggagccgctcagtcttctttcccgggcgtcgcctcctgtgtggtgccggaagagcgccaggttcagtgttaccctgagggctgatttcgcacagcctgttgttttccttagacaggtccacgtccctctcctgaggctgtggaagatttcagccgtattaaaagaaagggccctgtg

SEQ ID NO: 79986 - DNA, 1120 bp, Homo Sapiens
gagaaagctgcagcaggagctccagaaaatttgcacgtgcagcccccagcagttcaacagactgcacgtctttggaaaagtctttgaagatatttgtaacagttctttgatatttggtgatctcttgaaaaaagttaaggatgaatatgaactctacatggcaacgctcctggagtcccagcctgcagcacagtacgaggctcttctggctcaactcaaggcgctggggcagaggccggtgaagacggcggacatggatctcgccagggaagagctgaggatgctcgtgacagccacaaaagcagccctggagcagaatgatagactcagaagtgaactggagatggaggtggcattgctgcagtctgcaaaggaacgatcagaatcatctgagaaacatataattgatgaaaaccgacttactcttactgagaaggttgaaaagaagaggtgtgaaatactcagtaagtgggatgagatacaagctctggaaaaagaaattaaaacaactttggttcatactggaatttcagatatcactgagaataggattaaaagcatagagcatgaagctatacaattggaaacagaaaatatgattttaaagaagaaaataaaagttactgaaaaccatgtgaagcagatcataggaaagatcagtgaagagaggcaggagggcctttggaaatttatcaaggaatttgtaaaatcagaggaaacagaagataacgctcaagtggctgaacaaatggccagtggaaattcttaacttccatgtatgtagcatggatatttgcagatgcatatacattcataaagatacatttcatttcatcagctttaatctctagtaaaattaatgtggtatatgtatcctactcaggatactgaaatacacacatgcgtacacatgattagtttctgttgcatacatatttacaacaatactagttcttaacgtatgttttactttcatttaataatgttcaactttggaaaatacttttgattatttgctaagaataaggaattcagcgctgcttgaatacagctcaaatttgtttatttgccaacacaagtttacatatatgcatttaataaaattttatagtgatttaat

SEQ ID NO: 79987 - DNA, 1002 bp, Homo Sapiens
  misc_feature (37)..(37): n is a, c, g, or t
  misc_feature (124)..(124): n is a, c, g, or t
  misc_feature (153)..(153): n is a, c, g, or t
  misc_feature (245)..(245): n is a, c, g, or t
  misc_feature (280)..(280): n is a, c, g, or t
  misc_feature (289)..(289): n is a, c, g, or t
  misc_feature (303)..(303): n is a, c, g, or t
tatgtggagatgggtgtcatattatcattcccacttncatctcaccatgttgagtaaccagactttctaccgcatttgacggcttgcaatacgacagtcaatctccagtagagatagagacccntctgcaaattcagcattacagaggagttnccagaaataaagacattgctcagtctcaaggatgtcagatgtcatgtctacagtatcttgccatgctcagagacagagggctctacaggacntgatgaacatgctggaatggacagctcaggtcatntggatgccnctggtggtccatcntaaagaaacttcaacaggattcaaaccatgcatggtttaacccaaaggaccccatccttagtctccttgaagccataatggtgctgagtgacttccaacacgatttgctggcctgttccatggagaagaggatcctgcttcagcaacaggagctggtaaggagcatcctggagccaaacttcagatacccctggagcattcccttcaccctcaaacctgagctcctcgccccactccagagtgagggtttggccatcacctatggcctgctggaggagtgtggccttaggacggagctggataaccccaggtcaacctgggatgtagaagcaaagatgcccctgtctgccctctatgggactctctcattgctgcagcagctggctgaggcctaagccctccctgatgggcagtcagtccagagatgctggccctcgcccagtctatgctgtgagtgtccttatgggtgcaagagatagggctgtgcctctctgcgtttccaggtggagtagagacagtaatgggtagagactttaggaaatgttttggggtggtggaatactctatatattgacaagagtttatatattgacaagagtttatatatttgtcaaaactcctcaaatagtatgttaaagacgtaagcgtttcactatgtataaattttacttcaaaataataaaaacaaatactgactct

SEQ ID NO: 79988 - DNA, 873 bp, Homo Sapiens
  misc_feature (154)..(166): n is a, c, g, or t
  misc_feature (330)..(348): n is a, c, g, or t
ttttgtttttcatgtactgggcaatatgagtaaaatctgtcccgttttccccctttgaatgaggtcttccatgtttgagggaaagtcttgcactattgcatatattttggggacacagattttcatagtttccatttttggggggcttaaggannnnnnnnnnnnnctgtttgaaacagttttatactttctgatatagtacttgaaattcttaccagaaaattactttggagttttgaagcctttattaatactacttttaaagaagcagttgttttattgtcaatgttttttttcccccaagcatattttcttgtatttctgtttccnnnnnnnnnnnnnnnnnnnaatttccaattcaggatattgccctgccatccatgaaaactgttctggcaccaaaagtaatgacaaatgttaagtgtaataatagaaaagtagagcaaagagccattcagcttcagtctttacataccatgaataaaacattaaaacatcatatggagaagtttacatggtgattgttcacctgcagtactgtggagttttaacattttgtcctcttttcagtgaaacagagtaaaaatattcatctaccattactgttatttgctgattttgttttattttttgatggtaatattctatccttatgacactattgcaaccaaattggctttaccatcttggctttagtaggtatagaagacaatggattaccatctttattgctgtaatgtgttaagcattatatgctagtagaatctagtttaattgtttcaggtggaaagtattctttgagtttccatattgaatgtgtttggactaaacaaacaataaactactgatgtctgcagcattaatatatgtcca

SEQ ID NO: 79989 - DNA, 833 bp, Homo Sapiens
cgactgcgcacggcggctggttataaacaacttgtgaaatgagtgatttggaagatgatgagacaccccagctttctgcccatgccttagcagctctccaggaattttatgctgagcaaaagcaacaaattgagccaggcgaggatgataaatataacattggaataatagaagagaattggcaactgagccagttttggtatagtcaggaaactgctctgcagctggcacaggaggcaattgcagctgtaggagaaggtggcagaatcgcatgtgtgagtgcccctagtgtttaccagaaactcagagagctgtgcagagaaaacttttcgatatacatctttgaatatgacaaaagatttgccatgtatggagaggagtttattttctatgattacaataatccattggacttacccgaaagaattgctgcacatagttttgacatcgtaatagcagatcctccctatctttcggaggaatgtctcagaaaaacatcggaaaccgtcaagtacctgacgcggggcaagattctgctgtgcacaggtgccatcatggaagaacaggcagcagaactccttggagtgaagatgtgcacgtttgttccaagacacacccggaacttggcaaatgagtttcgctgttatgtgaattatgattctgggctggactgtgggatctgattacagacggtgacataacacaggaaggaaccctgtcacattcctctttttgtattttcgtagtagatttaaaagttataatctcttcccctccccccaaactggagctgtccctggcctggttttcaaaataaagtgtgcgatctcccc

SEQ ID NO: 79990 - DNA, 695 bp, Homo Sapiens
  misc_feature (79)..(79): n is a, c, g, or t
  misc_feature (141)..(141): n is a, c, g, or t
gagggaagatgaggtggggagtctgtactgagatggaactgtcagtgctgtgttgtatgtacttgctgttgtaaaagtntgggcatgactttgcatctagcgggtgctgcctgcatctctttgtctgtaagcttgctctgngactcagcctcttaggacctacgatgccagcagctctcattaacagtgaaatgacagaggccaaagatggccaagtgaagacccaagtctcagaaaacccagacttgggacaactgcctgggaactaggatgctagagcagttctgtaatgctttgagacacagcaattttcacattggccattctttcccctcccctaccccttttcttttgagggacttttaatgtttgctgctttaggtggatggagagtccaccagtcccactcaatgctgctctaactctacccacacccacctaattaggggtgctaataaaacatgctgaggttgagataaagacgggacataaggggaaaattcattccatagagctgaaatctggttttcaaggcctctgtggctttcttctgaacttaccaccagccctggctggaatgtagattgtgtttttagtaatgtgtactgtgagctgtcttctgtataatgtattttgtaatgtatttttctcatctaccaaaggatgaaacaaataaaattatttaaatagttaaa

SEQ ID NO: 79991 - DNA, 678 bp, Homo Sapiens
gtcatacactggcaacctctttaagctacagactagatattataaaatcaggactaatttgtccagtatatacacaatatatacagtatagcaaagttaaatgaaatgcatgtaacatatacacaatggattaagctgaaattttctaataaacaatggcaaaacaccatttgcaatttcttccctcccacctcccaggtggttcaacaaatccacttccaaacagcatttcccatcagtttttaaaagctatttacaaaaagtgttattctactaccactactttaaaatacatcaagcacttccaaacatctagaaagactagatatttcatagaacttgtccaccacatacacagcactgttaaataaaactgcacacacataacaatggttatcatctaaggtatcttctaaatgtgaccattttggccttgaatcattccctcctcccttccttctctgccttcaatccagtggacaagtacacgcacgtgtaatgcttagagatggccaaacaaattcctatgcaaaagtcaattacagaagacaagttttcctatgaatttcaacacaaagcatacaaaatatgttaattttactactttgtcatacactggcaacctctagatgttaaaaaattaagactatttgtccattatatacactatatacagag

SEQ ID NO: 79992 - DNA, 975 bp, Homo Sapiens
  misc_feature (53)..(92): n is a, c, g, or t
  misc_feature (96)..(130): n is a, c, g, or t
gagacttgatactacgacctcacctactaaggggccgctacgtcttcgctcgnnnnnnnnnnnnnnnnnnnnnnnnnnnnnnnnnnnnnnnnccgnnnnnnnnnnnnnnnnnnnnnnnnnnnnnnnnnnncagtcgacggtaccggacatatgcccgggaattcggccattacggccgggggattacaggtgtgagccactgagcccagcctgtgtctagttctgacacatagtctttcttgtttttctggggtttcagtaccaagactgatgtgtttgctaagcacttctggcttggtgaagttcaactccaaactgtgtgggtagtacctaaaaatctatcaggcttctaagccttctggtattgctttccactaagctctttgaaatttctcccacatatgctattcagggggtcatccaaggagcttatcatagtgtatacgcaaatttggaattcttgccaccctgtggctgtctcctttctaagatttttcttccttgatttccagcttttggtctacttagaccatgcctcccaagctgagaagtgccctcagaggaaaagccatgtaaaattttctttcaatttctactttatttttgtcactctcaaatacattcacatacttcattctgtacttttctgagggtttataattgttataaatataagagttaacaaagtacacttggtgttagtattattgtcaggtgttactcaaaaagaactccttgtaggtccatgctttatttaaggttgtgaactcatgtggacactcaatgagaatatggttaattcttaccatacaggtcagggcggattaaaaatttacactggaattatattgatagtagtctgtctgatgtttacgtggggttttttaaaagtatttaaggatacaggatgagagtttatgtgaactttgtggcaaaggttgtttctaggagggggacaggaggggtaagacggca

SEQ ID NO: 79993 - DNA, 1129 bp, Homo Sapiens
  misc_feature (810)..(818): n is a, c, g, or t
ggcacgaggtgaatcgctgaaaaccaaaatgtctgaacttcgcctctactgtgacctcttaatgcagcaagttcatacaatacaggaatttgttcaccatgatgagaatcattcatctcctagtgcagagaacatgaatgaagcctcttctctgcttagtgccacgtgtaacacattcatcacaacgcttgaggaatgtgtgaagatagccaatgccaagtttaaacctgagatgtttcaactgcaccatccggatcccttagtttctcctgtgtcaccttctcctgttcaaatgatgaagcgttctgtcagccaccctggttcttgcagttcagagaggagtagccactctataaaagaaccagtatctacacttcaccgactctcccagcgacgccgaagaacctactcagatacagattcttgtagtgatattcctcttgaagacccagatagacctgttcactgttcaaaaaatacacttaatggagatttggcatcagcaaccattcctgaagaaagcagacttatggccaaaaaacaatctgaatcagaagatactcttccatccttctcttcctgaagaaactgaagtgtccaacttcctctaagtattgctatgcaaaagctgctgtaattaaactattgttatagggagtagttttttcccttaggactctgcactttatagaatgttgtaaaacagacaaacaagaaaacaaaccacatacttttgaagtgtattttatctttatatagtttgtttgcaagagtattttcctaataacttcacagtatgaatgtgcatcnnnnnnnnnggaacaaatgatggtgtaacatttggacatccataaggacaaatgtagatatttttcttaaaaactctgaggggactgacagcatggtcagggtgtatgtgtagcttataaacatgaaatcttataaggttctcagttgtgacagaagtgtgatatatgtaacctgggtgccatggaccaaatggtcactttaccacagtaaaaagtgagttacgatagcagcttgatggtgatgcgtatggtattcctttaatcaaaaaggaaacgcaatattctaagtatctttaggccaaattaccatgacatattgc

SEQ ID NO: 79994 - DNA, 727 bp, Homo Sapiens
  misc_feature (47)..(47): n is a, c, g, or t
  misc_feature (53)..(53): n is a, c, g, or t
  misc_feature (108)..(108): n is a, c, g, or t
  misc_feature (211)..(211): n is a, c, g, or t
agtgcccctctcagctgaggaggaaccgagagcggcgctgggcaccntgagcncaggaaggcaacaggccggccgggaccgcgagtgcctggcggagcaggcgcagcncaggactcccggctcccacctccggctgtagtccagggccaaggcttgtgttcaatcgtgtgaatggccggcgggccccctccacgtccccatccttcgaggngacccaggagacctacacagtggcccacgaggagaatgtccgctttgtgtccgaagcctggcagcaggtgcaacagcagctggatggtggcccagccggtgagggcgggccaaggcctgtgcagtacgtggagaggacccccaatccccggctgcagaactttgtgcccattgacctagacgagtggtgggcgcagcagttcctggcgagaatcaccagctgttcctagtggctgctgggagggggcgctgctacacggccgacctgtcgccaggagagaagcatggcgccctgcccacccactgcgcctggctgggtgccggccacacctgaagtgccagcatttggacttttgcacctttttttcccttggcccggctgtcccaaccaagctgccatggccaagggccgaacccgtctgacctcagccctgctcactgtgcccagggaccagcgaccagcccctggggctggcagggaggagctccaggctaataaagtggagaaactgtcaaa

SEQ ID NO: 79995 - DNA, 1244 bp, Homo Sapiens
agtttgtgtgtcgtgccgtctgcgctgcgagcctagctgcgagtgtactcgcctacgcttggttgcggctgctacttgtcagcttagtcactgccgtgtctcggtgtgctgctgtgctgcggctgccgtctctcagctatcctaggggcgttcttctttaaagcggtgcacattatgcctgcgttcatgtttgtcgaccaaaattcgcgccgggtgtttctctgtgtttctggttgaggccacgttccgccagcttttacgcggcggctcctcctgcagccacagggctggtccggtccctggcacagtacccaggctgagttcaaaccggtccgccctggccatgcaacttggttggcacaccggccaagggaaaaaaggtgcaaaagtccaatgctggcacttcagtgtgccggcacccagccaggcgcagtggtgggcaggcgccatgcttctctcctggcgacaggtcggccgtgtagcagcgccccctcccagcagccactaggaacagctggtgattctcgccaggaactgctgcgcccaccactcgtctaggtcaatgggcacaaagttctgcagccggggattgggggtcctctccacgtactgcacaggccttggcccgccctcaccggctgggccaccatccagctgctgttgcacctgctgccaggcttcggacacaaagcggacattctcctcgtgggccactgtgtaggtctcctgggtcccctcgaaggatggggacgtggagggggcccgccggccattcacacgattgaacacaagccttggccctggactcgacaggggccagggtcccggcggctgcgcaaagggctgcgcccgcgggggctgcgaggtcggcggcgcgggctgccggcatttcaggagctcgccgagccggccctccacctgctgctgcgtgggacctgtgcggcgctgcgcgaccagcttgctgggccccttggtgatggtgtacatgacgcgccgctcccacaccgccgccggcccccggccagatccggcccctgcgccggggctcgcacttaacggactgcgggcgccgcggggagggggcgggcccgctacacgcccccggcccttaaagggcccgcacgggctcgggctgaccccggacacgcggcggaggcggcgccctcgtgccgaattcgcacacccaggcctcgctaccttagattatttaagtagatagagatatgggggatagtgtaaaaaga

SEQ ID NO: 79996 - DNA, 405 bp, Homo Sapiens
  misc_feature (122)..(187): n is a, c, g, or t
  misc_feature (312)..(326): n is a, c, g, or t
  misc_feature (329)..(362): n is a, c, g, or t
cttttcctcagaggagcaggcaacagtgtgggataaacagagtcacgatcagaggaaccccagggtctggtgatggcagggatggggggagagagagaaaatccacaaattccaatgtcacnnnnnnnnnnnnnnnnnnnnnnnnnnnnnnnnnnnnnnnnnnnnnnnnnnnnnnnnnnnnnnnnnnggcaaccaaccacattagaagtcttggcactttgtaacggaacgggtactacactttatcttaattcttaatttaaaaacatgtttacaagttacaaccaacttctatgaaaagttgaaaagacnnnnnnnnnnnnnnngcnnnnnnnnnnnnnnnnnnnnnnnnnnnnnnnnnnagaagaaattcctaaaagtcgatttatttttgtacaaaataat

SEQ ID NO: 79997 - DNA, 467 bp, Homo Sapiens
  misc_feature (67)..(99): n is a, c, g, or t
  misc_feature (119)..(153): n is a, c, g, or t
  misc_feature (284)..(340): n is a, c, g, or t
gccaagtgccaacgctaaaattaaccctcaactaaagggaataagcttgcggccgcatacgcggtcnnnnnnnnnnnnnnnnnnnnnnnnnnnnnnnnncctccttaaaaacaaaattnnnnnnnnnnnnnnnnnnnnnnnnnnnnnnnnnnncttttcctcagaggagcaggcaacagtgtgggataaacagagtcacgatcagaggaaccccagggtctggtgatggcagggatggggggagagagagaaaatccacaaattccaatgtcacaaaagcaatnnnnnnnnnnnnnnnnnnnnnnnnnnnnnnnnnnnnnnnnnnnnnnnnnnnnnnnnnggcaaccaaccacattagaagtcttggcactttgtaacggaacgggtactacactttatcttaattcttaatttaaaaacatgtttacaagttacaaccaacttctatgaaaaattgaaaagacaaa

SEQ ID NO: 79998 - DNA, 566 bp, Homo Sapiens
ggcacgaggtgctggcttcagaatcataccagattgtcagtgaagctgatgcctaggaacttttaaagggatcctttcaaaaggatcacttagcaaacacatgttgacttttaactgatgtatgaatattaatactctaaaaatagaaagaccagtaatatataagtcactttacagtgctacttcacacttaaaagtgcatggtatttttcatggtattttgcatgcagccagttaactctcgtagatagagaagtcaggtgatagatgatattaaaaattagcaaacaaaagtgacttgctcagggtcatgcagctgggtgatgatagaagagtgggctttaactggcaggcctgtatgtttacagactaccatactgtaaatatgagctttatggtgtcattctcagaaacttatacatttctgctctcctttctcctaagtttcatgcagatgaatataaggtaatatactattatataattcatttgtgatatccacaataatatgactggcaagaattggtggaaatttgtaattaaaataattattaaacctaaaaaaa

SEQ ID NO: 79999 - DNA, 786 bp, Homo Sapiens
ggaatatcaaaaggaaatgagcaaaatgtaaatagaggggatatgtactttgctgagtattaaattggaactacctggtgtgtacctggactaaatattctgttcactggctcagttgagtacctatacttttcgttttttgattgggtttaggtggttatgtcaaagttaaatggcaaaattaggaatttaacccaggtctggctggttcctttacaatacactgctttcttaagtacaaataatttaattgcaatatttaggaaaagtaggtacctttgaataatgataagaaacagtcttggttaagaatatgagttccctcttcaaaatgtaaggggtggcaaaatgtaaacactgcttcctattactgtgcaagtttttttatgtcaactttactatttcatgtttgttgtggagattacaaaatatagcttagcaaaaggaaacaatctcacttgaaggatatgttaaataatttaatgatattttaaagattttcttttttagttaaactttcctatgattctcttaatgttttttctgaatacaaaagtaataaatatttattgagtaaaacacacacaccccaaataaaaattgcctgtaaggccactatctagagaaaactattcttaacatcttgtggcatagtgactatgtatgtaaatgtattttattttattaaaaaagcgttgtatcatacatactctttgataacctgatttttaaacttatatttggtacaaagagctccacattaataaatacaatattctatcaaaa

SEQ ID NO: 80000 - DNA, 1364 bp, Homo Sapiens
  misc_feature (93)..(128): n is a, c, g, or t
tgcggaagagagcacaagactaatcgatcatataggggctagctcgtcgaaagcgaatgacgagcgcaggagtgagtgagcgaggaagcggannnnnnnnnnnnnnnnnnnnnnnnnnnnnnnnnnnncagtcgacggtaccggacatatgcccgggaattcggccattacggtcgggtacatttagaatccctgaaattagaaagatcaatgacaaaatatctgtcaggcaggccacaaagaggtgtaaaattatgaaaggagtggttggatgtgccaagttggtaaagtggtgactgcatctgagaaagaggctgtgaggctgaactcttggtggcttccttctgtaacttccggagggagtcttcaacacaggccccgtgctcgtaggaatacggtagcacctatgtaggaagtgcgtggagttttctgtcttctttctgtgtgattttgggcctttttatcagcacttctcccctcccaggagcctggggatgccaaacatccagaatgtgatgggacaagatgggggcaggggcctcacctccctgcagaggtccggccaggtctccttgtccctggacaatctcctgagacctctctgcttggtggagcaggcacctgtgtgcagaattcccactgtggccagcacgaggaagtcttttctagtgaaaatgtgtcttgtggtcaggaataattatcctttcccctgtagccaccaaggagggcaaatagagaaaggtaacctaattgaaggattggtcatgtgaaaagggctacatttgggaagctgggaaaggcctccaggcttctagagcagctagcttgggctggattctcacacccaggctgccccttggattgttctacccaagcttttccctggggtctgggctcactccataaggtaaggtgccttttaccttatggtccttctttagcaggtaacaaaggagcatcaggggcaggctgccctggtggcatcacactggctagtgaggccgtgaatatcttgtcccccagcagggccgacagtttctatcacagaaaacagtgtgttcagtggtgaaaatcgttgcatgcatgttttcatctgagcgtgtccttctcccatactccctatcagccagccctgcctgtagctgctgtatggtgattgcacttggacatcagtccaatgactgcaagtcggcctggattttcacttgcagaggctacagctgcattgtcaggtctcccagccctgcagagagctccctccactggttagcagtgtgttgtgttttccattcatttcagaagagatacattgtgtcactggacatttttaaaaactgtgatttttaataaaaatttaaaatttg

SEQ ID NO: 80001 - DNA, 675 bp, Homo Sapiens
ttgccatgcagatatcttgaacagcaggacatttgcaggccttgtctactggacttttctcccaaacaggacaagcccaggcagggctgcatggagaggaatggaacctggagctagaattaattgcccactctcccaccctaccagtgcagcccggcaagggcaggaattgggaggcctagggtgggcatgaaagcttgggaagcactgtcgtctctcagacaggcgtcctaaagacctctaggctggaagcttgggcttgcaagtggatccgggaccgagggtggtctcttggacaaccccaggaacttggaccaaggcagagccaatcttgcaaactggccatggatggggaagtgcccggtagccagcatgagccacactaggaaagaggaggagggtgcagccaaacttaaggcaccggcaagtgttgtcagcactggaggagaccccgccagtggggtgaggccagccaagtccctgtgttacgaatggtgggccaaggggctgtctgctaggtcccagtaggacaggcagagctccaggctggcaccatggtaggcctccagggaaagagctgggaggcaggaatggcacactgggcaggcttgcccattcctggccctgagaatggagctgtagcctcatggacaataaatggatgtgacaccaaaa

SEQ ID NO: 80002 - DNA, 605 bp, Homo Sapiens
caattttaatattatttaattctatagaaaaaacaaattttattacattcctttttaaaacgggcgaaaaactgtacaagtaagcatgatcaaacctctgttatagctggttaatactgatcttttattattgcctcgaagtctctctagtagtgtccaagaaattatgtttaaggtccatctgaaggaaaatagcactggagaggcaagaaagggcttgggtaaaagcttcagaggattcgtagggagatggaaaacttgctgtttaaaaaattacgttgggctctgcagcatctccatttcttaacataccatccaaacccatcaatgggattagttttacccatgttttaaaggctcatattatatgcagtttgggggcttttataaattctgcaagtaaaggaatataaagagtggacagtattgaaggcttaagagtagggctataagagactcaatactactaaataagtccccaaacaaaaacatccaacccacccccaatcccaaatcctatatgtaaaaagagaaaatgcatagccagaagcattaaagaaaagcatgtagccttgaataaactgtacactgaacaggctagaaac

SEQ ID NO: 80003 - DNA, 771 bp, Homo Sapiens
ctgtggccttgccaaatggtttggctcagatgtgctacagcaacccctgccctccatgcccgccaaagttatcagtgtagatgaattggaataccgacagtgagcagggcaggcagactcaactaagcccggacctgtggtggcacactgggcaggaccctgcttcatctcgggttggtttatgggcttttactttggagcactctgtgtgaagctgtttggtggaacccatgcatctggtgtggtccgcattatgatggaaggatcttaaccagtcgagtggagtgtacattgtctgaatacaggatgcacaatgttgtcaatcctggaaatggtctttcttttttgtaagatatgtgaatgaagtgttggtgtcctcaccaagaggtggcacctaagggttctgaggaaataaatgtatagacccttatgtacagacctgtgtataaacaacttttgtatatacatataggatagcttttttgaactatacagctgtacataaaagtagctgatattagttaggcctgtgtcaacagtttggatttttttcacttgtacatttgggattttcttttggttgattaaaattgcatatgctaagtgtgtgaaatcccctcaccccccccttctaccataataccctgtccgcccgcctccgccccttaaaaaagctttctaaaaccatttcttttgggcgcgcgggccccccataggccaagcggaacatgggcccaaacctgttttcctcaaggaataacccggggcccg

SEQ ID NO: 80004 - DNA, 180 bp, Homo Sapiens
aaactgggcatggtggcatgtgactgtagccccagctactagggatactaagggggaataatggcttaagctaggagtttgaggcctgcggcgagctgacggcatcactgcactccaacctgggcgacaatgtgagaccccgtctcaaataaataaataataaagattgctgtgtgtgag

SEQ ID NO: 80005 - DNA, 409 bp, Homo Sapiens
aacagatgcagaagcttacttggaccaagtgacttgtcccagaccacacaaacagtaagtagtagaaccagttctcaaatctaagtctgtccaacaacaaaggtgaaattccttccacctccccacagtgcccctaggaaagggactacaaaaacatcagattagggtccctatttacaacaggagttaggcatgtaagggaggcaggtgtgggatggagagggggagccccatcttaatacagcagctgttacttagctttagtggaggttgtaacaaaggaatcggaactcaatgtttcctgatcatctgattttttaaaatcaggatgtaagaaattttttacatgaaaactccattgtgcaggcctttctggagaaactgaccccaggccagggcctctgatctg

SEQ ID NO: 80006 - DNA, 2108 bp, Homo Sapiens
  misc_feature (45)..(45): n is a, c, g, or t
  misc_feature (113)..(113): n is a, c, g, or t
  misc_feature (377)..(377): n is a, c, g, or t
  misc_feature (523)..(533): n is a, c, g, or t
  misc_feature (595)..(631): n is a, c, g, or t
  misc_feature (816)..(896): n is a, c, g, or t
  misc_feature (1267)..(1281): n is a, c, g, or t
  misc_feature (2019)..(2019): n is a, c, g, or t
  misc_feature (2064)..(2064): n is a, c, g, or t
tatccacataccgtggtgttgcgtggttggattaacgcccccccnttggggttgggggagatttataacacggagtaggtgttcttgtctatcacaatccccgccctgttttntgttagagaaagtgagagtgttgtttttacccagaggaggtgtggggggcggaagaagaaatatagccttttaataaaataggggagggtttttttccccccgcccccacgctgttgctccttgccgcaaagaacagataagatgtggtcaaccgcaggttgggcgcaggcagacgtgccggggataaaaaattgtgcggcagatatatgagtgggaggagcgcgccgcgcgccacctgtgggggcgctctccctccccgcctngtttagagatagaaataaaaaatcccgccccgcgctatgaaagataacccccctctccgaagggagagaaacgccccccccaccttattgatgggagagtatttatttgttcacaacaaaataacaccctcctcgcgtggttgttnnnnnnnnnnngcgcggggggggtttattttatcaattgtgggggcgaggggatattccccacgagcgcctcnnnnnnnnnnnnnnnnnnnnnnnnnnnnnnnnnnnnngtgagaagacccaacacatttttgggcccaatgtttgcccgctttcgcccacagggggggcccccgcggcgccccaaaagcaaagagggtttctaaaaaaaatttttttcaggggggcggaaggcggggccccccacaagctatttttttcataatcgcgggggcgctatggttccccgtagttnnnnnnnnnnnnnnnnnnnnnnnnnnnnnnnnnnnnnnnnnnnnnnnnnnnnnnnnnnnnnnnnnnnnnnnnnnnnnnnnnttgtaatgtaagacatttattttggctaaagttctggtgttttaacactgatttgtgatacaacggacattaaacttccttttaaaatgaaaaaaacaatttggtagctctcccttttctgtccagaaaaattcactctttcataatcaaattaccctaaaatttggtggcgttaagaggcaacaaaagttaagcttccaacgaatctgttctctcaaccggaaatgtcttctatttccaatcaggataaaaccttgacttacttgcaaggactatcacggttagcccttcagtgattcctgacaccagttctgtgaaaaagaaaatttcctgcgagaaaagctcatgtcttcatattgaagatcagtacnnnnnnnnnnnnnnncctttaaaacagtagcatcttaacttgtggcacaaaaggcaccaacattccctttccaaaccatccatcaccatgggtggaaggcagcgccacctgctggccatcatattatggctcacatacccataatttccttgcggtgctgaattccaagtggggattattagagacccctcagagccaaaaggggaccttagaggtcttctagatgagtcccctcatttgtaggtggtggtttctggataactcagagtggcagggacacagacgagcctgtggaaaggtatactgctttaagattgagaagaaaaccatttggcgctctaattttgcctggatggtgctctgtcagtcaaagaaagggaacaggtctggggagggggtaagggcaccctgagttcctgttccatcacttcccaggcagtagaaggctgtccaggaacagctcccatccgcagctgggcatgtgttggctcttacacaagagactttaattttacttgaagaactaagagctaaatcttgttaaagtaaatacggggtttcaggggtgaaggactatcaagaaatcccaagttatcagcataaaagtagtcccaaagtaaaggcagtaattctccaaatggccttttctccctaatgcccccacagagactttcgagaggtcctagttagccagcaacaccaacctgctgtgttcgcgtaagtagctgtgcctgtcccatggggtgaccactncctggtcatgggaggggagccccagccccagctccctagcctttnccaggagcagagcagaaagctctactttggggtgctacatccca

SEQ ID NO: 80007 - DNA, 727 bp, Homo Sapiens
attcggcacgaggatagctaagaaggaagaaattaagactagctcatcatagtgcatataatttaagtatatatactattgtgtgaccaatccaataacttctcaatctctctggaaaatatcttccataaagtctgcagaaataaaatagttacattcatagccccctagttgctagccatggccataggacaaagttttgcccaataaactataagcagaaatctgagagaggtttctggaaaacctttgctgactttgagctgtctatataaaccattcttaaactaacaatattttgagattttcacatccgtatttcctatggcagttgtaaactcttgcaggaaaagaatgtttaaagtgcaacttgcattttagtactgttaacacacagtgctagcagtgaattaaacaaacgaaatacagttttttttattccatcctcagtgttaccttaatacagctaattgatatggagatgttttttaaaaagcaaaacaagttttcacctttacagtacatgctttagaataataggtcttcagaatgatcacacgatgctaaattcagcttgttttctttaatttactttctggaaacctacgaaggtgcatagagaattctttagacatggagactttgtaaagcattgttaatttgccctctcaaatttcacttggagctatgttttaaaaagaggaaataaatatttatgtaatgtgtc

SEQ ID NO: 80008 - DNA, 979 bp, Homo Sapiens
  misc_feature (92)..(92): n is a, c, g, or t
  misc_feature (234)..(234): n is a, c, g, or t
  misc_feature (248)..(248): n is a, c, g, or t
  misc_feature (277)..(277): n is a, c, g, or t
  misc_feature (347)..(347): n is a, c, g, or t
ggtggcgattggcgtgtggcattgggctgggaacatcttagatatcttaggacatagatagcattactttctgaatacgtatgagatcctcntatcctccagggagtgagatgatgaagcacattgaggttgtgaacgcggaccgtcacatcctaaaacaacatgagccatgtgatgtgtgcagctgcctgctggggatcctgcgatggcctgggtgagtgcagagcccagacngctttcaaagactntgccgaccagagtcccacacatgcgtgcncaggcagagggctgatacatgcctttttcaggggggctcctcgcggggtggacttgggagtgtgcagtgngacagggggctgcaggggtcctgccaccaccgagcaccaacttggcccctggggtcctgcctcatgaatgaggccttccccagggctggcctgactgtgctgggggctgggttaacgttttctcagggaaccacaatgcacgaaagaggaactggggttgctaaccaggatgctgggaacaaaggcctcttgaagcccagccacagcccagctgagcatgaggcccagcccatagacggcacaggccacctggcccattccctgggcattccctgctttgcattgctgcttctcttcaccccatggaggctatgtcaccctaactatcctggaatgtgttgagagggattctgaatgatcaatatagcttggtgagacagtgccgagatagatagccatgtctgccttgggcacgggagagggaagtggcagcatgcatgctgtttcttggccttttctgttagaatacttggtgctttccaacacactttcacatgtgttgtaacttgtttgatccacccccttccctgaaaatcctgggaggttttattgctgccatttaacacagagggcaatagaggttctgaaaggtctgtgtcttgtcaaaacaagtaaacggtggaactacgact

SEQ ID NO: 80009 - DNA, 1164 bp, Homo Sapiens
tggtacgcgctcggattcccgggatatcgtcgaccacgcgtcggtgagattacagtagaatgcacattccttgactatataatgggaggatgtcagctgaattttactgtgggagtggacttcactggctccaatggtgacccaaggtctccagactcccttcattacatcagccccaatggcgttaatgagtatttgactgctctctggtctgtgggactggtcattcaagattatgatgctgataagatgtttccagctttggtttggcgctcagatacctcctcagtggcaggtatcacatgaatttccaatgaacttcaacccatccaatccctactgcaatggaatccaagggcattgtagaggcgtatcggtcttgtcttcctcagataaaactctatggaccaactaatttttctccaatcataaatcacgtggccaggtttgctgctgcagccacgcaacagcagacagcttctcaatattttgtgcttttgattattactgatggtgtgatcacagaccttgatgaaaccagacaagctatagttaatgcctccaggctgcctatgtccatcataattgttggagttggaggtgctgacttcagacgccatggagtttctggatggtgatggtggaagtctccgctccccattgggcgaagtggccatcagagatattgtccagtttgtggccttgtcagacaggtccagaaagctccaaaagaagcacttgctcagtgtgtcttggcagagattccccagcaggtggtgggctacttcaatacatacaaactccttcctcccaagaacccagccacgaaacaacagaagcagtgaccacttcaacagaattcttttgtgttatgtggagcaatgccatctctcaccccaaatcgtgtatctgtcattctacgtactttttacccccagcatttatgatgtaaatctctttctctatggattatatctgtttaaagcattctttctaggttattttggggggacagtgccaagtccatctttgcccagtcaattcagtgattgatagcaatttacattaattgcagtaaagctctttggattagaaattagtgtggggaaagcttattctgttgttgtttttgtttactttcaccatgatcagcgatctgaagaa

SEQ ID NO: 80010 - DNA, 478 bp, Homo Sapiens
ccatgtcataccaaggttggtctttgtgataaaattcagggaagtgatggtgtgtgacttgtgacactagatccgaaaagacacggtgatgtctgacttgttctcttggatgtctctccctgagtgaagccagctacttttcatgaggatactcaagcattcctatggagagatccacatggtgagaaactgaagcctcctaccaagagccagcaccaacttgccagctatgtgaatgagccatcttagaagtgggttctctagccctagtcaggccttcatatgactgcagccagggctgatattttgactacaacctcatgagagactgagccacaacaacctagctaagaagctcctgaattccctaccaacagaaactatgtgagataatgtttgttgttttaactaagttttcaagtggtaatttgttatacagaatatgtaactaataaagcatggctcctttaggtctaaa

SEQ ID NO: 80011 - DNA, 467 bp, Homo Sapiens
  misc_feature (28)..(28): n is a, c, g, or t
  misc_feature (87)..(87): n is a, c, g, or t
gctgccttttgtggaggtggacgaaggnctgtggccggcagacgtggaggtccaggccggggtggggacgtgggtgggtccgagggntgtgtggggtcgggtggtttggaaaagttagcccttatccccactgaccaggcgggagccgccaggcctgcagctgggccagtgcccaggagccatcctggcgtggggccaggagcttgtccaaggccacaggcccacagcaccccctgccggcgggctccgtggggccctggagctgatgacgggggaggcccgtccgcctggcccaccaacccgcccaccttgactgcccccagaagtgtgtcttgagacctcctgggcgtgcttagaggggtgagttgtgtttggatttttagttattttctcttcagttttattagacttcttttttataaagcaataaatccattttcctccgggtaagggatgccccttctggc

SEQ ID NO: 80012 - DNA, 2180 bp, Homo Sapiens
  misc_feature (73)..(107): n is a, c, g, or t
ttgtatagatcattaggcgcttagctctcgagcgaacgacgagcgcagcgagtagtgagcgaggaagcggcgnnnnnnnnnnnnnnnnnnnnnnnnnnnnnnnnnnncagtcgacggtaccggacatatgcccgggaattcggccattacggccgggggggttgtggttggtgtgcgggtttcggttggaggactcgttggggaggtggcctgcgcttgtagagactgcatccccgagacgatggcggagggagataatcgcagcaccaacctgctggctgcagagactgcaagtctggaagaacagctgcaaggatggggagaagtgatgctgatggctgataaagtcctccgatgggaaagagcctggtttccacctgccatcatgggtgtggtttctttggtgtttctgattatctactatctagatccatctgttctgtccggcgtttcctgttttgttatgtttttgtgcttggctgactaccttgttcccattctagcgcctagaatttttggctccaataaatggaccactgaacaacagcaaagattccatgaaatttgcagcaatctagtaaaaactcgacgcagagctgtgggttggtggaaacgcctcttcacactaaaggaagaaaaacctaagatgtacttcatgaccatgatcgtttcccttgctgcggttgcttgggtgggacaacaagtccacaacctgcttctcacctacctgatagtgacttccttactattgcttcctggactaaaccaacatggaatcattttgaagtacattggaatggccaagagggagataaacaaacttctcaaaccaaaaagaaaagaaaaacgaatgattcatctgctttaatcagtgtgattaatgcagcacccattgccccgggaaccgtttctgctgtactatctggatactaaaatgttacggaagtagctctttgttctccctcactctgcccttagttaatagaaattcagactcgccaagtaaggcttcgtgcatagtgtcttcatgtcgcgtatagttgagcgcgttcttagcagttggcttcatggacaactcattagtgttttgacttttcttacccagcgttaattgaattcttgcttttagacaacttcctttttgtagtggtgaaccttgccctttagtacagttcaagtgaatctggataattgttcatctttgctttagcttagataccatgtagtggtctgtggctacaggaagctggttctgtctgcttccacagtctgcttaaaaaactgtctgacttcgtgaatatagagaccaagtttaccacttctgatgaagagaccaattaagattcattcctcattctgtttctttccagtgggagaagagtccccatgaaataagatgaaactgattccatgcactagtacatgtaggcttctcccttgtgcaaagcttagcaatttgtaggaaactttgatcttttggtccaagaaaaggaatgtctgacaggcttaagctttcgtcccctttgcacttagactcgaagttagtaaatccttaaaggctttttaatagcagacttccaaaagattgcatttaggatttctagcatgcttttaatttcagattttcagctgacattagctatagtatacagtaggttaagactcatgtctatgactttcactctaagactggcaaaaggacagcagtcttctatgtttagtcaatattcatttcagtagaagataatcttatctaatttttgagaccagaataagccttttaaggtaaacctcaaaattatcattttatggtaatactgaccattttagtcccctaggtttgacatgggagatagtgactacactggtgtctgacttttttcctagagatttctccctgaaaaaatacaagggctgttggtgagagcagacttgaggtgatgatagttggcctctggtctacaaagatttcataactccttggaaagcttcttataatcattcttaacttcttggtagctagaaatttagagttagttgaaatctttaggaatgaacttctgagggccaaaaaaatgtgactgacgggaacaattcttaaactgatttaactagctgtatataggttttgtgaatttattgcctgattgttgtcacccttgtgggatattctgtcccta

SEQ ID NO: 80013 - DNA, 1222 bp, Homo Sapiens
  misc_feature (834)..(842): n is a, c, g, or t
  misc_feature (1004)..(1017): n is a, c, g, or t
  misc_feature (1030)..(1129): n is a, c, g, or t
  misc_feature (1152)..(1176): n is a, c, g, or t
ctgccgtgctttgggacaaagaacagtgtgacaaaacggcgtcccgtcggatcccggatttgtcacccacgcgtccgggaatgtctgacaggcttaagctttcgtccccttgcacttagactcgaagttagtaaatccttaaaggcctcttaatagcagacttccaaaagatgcatctaggatttctaggcatgcttctaatttcagattttcagctgacattagctatagtataccagtaggttaagactcatgtcaatgactttcactctaaagactgggcaaaaggacagcagtcttctatgtttagtcaatattcatttcagtagaagataatcttatctaattttttgagaccagaataagccttttaaggtaaacctcaaaattatcattttatggtaatactgaccattttagtcccctaggtttgacatgggagatagtgactacactggtgtctgacttttttcctagagatttctccctgaaaaatacaagggctgttggtgagagcagacttgaggtgatgatagttggcctctggtctacaaagatttcataactccttggaaagcttcttataatcattcttaacttcttggtagctagaaatttagagtagttgaaatctttaggaatgaacttctgagggccaaaaaatgtgactgacgggaacaattcttaaactgattaactagctgtaatatagttttgtgaatttattgcactgatgttgtaccttgtggtatatctgtccctattaaataagtgttgttttctcctctttaatattgctgtgaacagtggtgcccattgtagcatatgtttgannnnnnnnnattatttcataagaaaactacgttaattttaccttactttcattgtaaataagcctgtcttcctatctggattttttgtgtgcatacatattctactgattaactacttttgcagttttaatcctgtattatttcttctactttgttttgtgtaaaaggggnnnnnnnnnnnnnngctggaatcttcnnnnnnnnnnnnnnnnnnnnnnnnnnnnnnnnnnnnnnnnnnnnnnnnnnnnnnnnnnnnnnnnnnnnnnnnnnnnnnnnnnnnnnnnnnnnnnnnnnnnttttggggccccctcggcccccnnnnnnnnnnnnnnnnnnnnnnnnnggggccggggccccaaagggaagggaaaaggggctaaactttttcc

SEQ ID NO: 80014 - DNA, 742 bp, Homo Sapiens
tcccaaagctgacaggcatgagccatggcatcccactgtaatccaattctttatcaaccaggccagttacacaaactgagggttttattttcctgtctctgattcctcttcattctttctggggctgcacttttatctacttacctaggattgtttaccacctccactactgagaaagagaagggaaactcaaaagtcagttgattctattttgaaatgtgtattttttgaaatgcctcctatttcaaaggaaagcctatacacgtcaacagttgggcataaatgttaatgcttgttaattttgcttagaaacgccatgttttactttgattagtatgatgaataactgcaaaggtggcaaaaacagtatctcaataaactgatttcacaaatgaaggaagattagaccaggaagtcatacaacggttggattttcattgttacccttacttctcactacatggataaaaaattaccaagactagaacacacacatatttcaatattgaaactgttaagtaagagttactaaatctttgatttaacatacgtattttattcacatacaatgaaaggcaaaatgtatggccagtggaaaaacttcaaagccaagtcacctatcaaaatgttcagagcttaaatctgccaagataaaggggttaagctgtcagcttctagatgacggagagaggaatttattcagcaacttcccttcaagatgtgcaaaatgttttcagaaatc

SEQ ID NO: 80015 - DNA, 1041 bp, Homo Sapiens
  misc_feature (152)..(152): n is a, c, g, or t
  misc_feature (157)..(157): n is a, c, g, or t
  misc_feature (159)..(160): n is a, c, g, or t
  misc_feature (203)..(204): n is a, c, g, or t
cagaatggcagggaaatatctgaccaatcaatcgcacatttaatgagctggccaagtactttggagacataagtatcgttaaatggatagtatgtatccaagtcaacaacaatttaagctagtggggcccccaagtaaagggttggagagcntgttntnntaagttagacataaatgatacgtgccataatctgagtcacagnnacatgaactccccaatactcctgcaatcacatcactagtgtagaaccacgatcagcctttcggattctttcaagttttgcttgtctgatgactgatggctccacccagacctgccaaccactcccgcggccccatccagaagtggctcagcgtgcatgaggaccatctccaacatccctgtgattgtacccccaaccaaccagcagcaagaacctattgcctagtcacctcccctctctttccccaactatcattgaaaaagtctggcttccaaattttccgggagactgatttgggtaataataaaactccagtcttctgttcagccagctctgcatgaattaagctctttctctattgcaattttcctgtcttgataaattgtctctacctgggcagggggcaaaatgaacccatagggtggttacagtaccttgctgggtcacttgatattcctggagggtcacgggaagcgctatgtgaatcccacttctgatattgtaagattctctccagggcctgaaagcttaaggggttgagcaactcctcccttctcaggcccagccccagggcgcaaggccgcttgcatcagcagcgtgcgtgagcagatgcgccagcaagatagcaaaagcaggaagagagccagccggaagacaagtacctctgaagatggagaaagaggccatctgggtacaacgttgcagttacgtcagaccaggacacttcctgtttacaggagactataaaacctttgccccatcctcacttggggctgacgccgttttaggcctcagcccgccagcacccaggctctcattaaaacagcatgttgctcca

SEQ ID NO: 80016 - DNA, 540 bp, Homo Sapiens
caatatgtatccgtactgtatgtgatatagtgccattttcagtaactgctgtacacacagcaactcagatgaaactcaaggaaattcttcagagcaaaaacagccaatcttgaaaacatacatgtagcaggattccatttatgtaacattggtgaaataatgtaattatagagatggaaaacagattaaaggttaccaggggtttaggttagggatggtgagggggtggttcatacgagggagtcctgtggtgttgaaaaccatctgtcagcctgactggtggttacacagggctatacatgaagttaaaattgtgtagagttaggtacacaaaggagtacagatgtaactggggaaactgagtatgttctgtagactgtaccaatgtcaatttctgcgtcctgatgctgtgctgtagtgtataaggtgttaacattgggggaggctggggcaagggtacccaggacctccctagacaacctcctatgcaacctcctgtgaatctataattacttcaaaataaaaagttgaaaacaaaaa

SEQ ID NO: 80017 - DNA, 1094 bp, Homo Sapiens
ttttttcactgccgactggccaagcccagcgccggcgtttacttcacctcagggaccctgcagtgggcagcagtgaccctcacagagaagctgggaaagctgctggtgacacacagctgggatcagccctgggctggtgggacccctcacagagaagccgggaaagcttctggtgacacacagctgggatcagcccagggctggtgcgacaccctggactcccggccaggaaggcacggaggagggcatgggtgtggccgggccggggtgggggctcagcctttggtcaccaggggcgtgatcatctgtgggaaggcgtagtagcggcagtcggccggtgggaccagcgccatcacctccgtacggatgttctccctccggaagccggcctccagcagcgcgggcacctgcgtctcctcaaacatgatggtgatgtctgagtacttggacttcatcagctccccccaggaggtgaggttgcagtaggtgaggacgccccccggcttcagcaggcgaaaggcgtggttcttgatgaagttgaactggtgtgtgtgccaggtctcctccgagagtgggtacgtgtcgtacaggatcccatcaaagtgaccgtcaggcagggtgggtgccacatcctcccacaggcctttcaaggggatgaccttgtgtgtctgccgtggggcccagtcccggagccgctggaagacgccgtcattgcactcgatgatccaatgctcatcaatgggcgcctcctgcacctttgacgctgcgatggccatgccaaagcccacctccaggacccggccccctttggaggaggcggcggcggccagcgcgtgcatatagggggtctcccagcgctccatcaccggcttgcccaggatgcgcaggtgcgtgtccgctgcgtcgtaggccgcgggcgccgccccccacgcggggctgcagttctcgccgggcgcgaagatgggggtcgcgctgggggcgctcatgctgcaggctggacggcgacccgacctcgatcgcgcgccgcccgggcccgcctcgtgccgaattcgccacccaggcctcgctaccttagaaccgttatagttactggt

SEQ ID NO: 80018 - DNA, 487 bp, Homo Sapiens
aaaatgataacttttttatttgtcaatggagtttccttgacattgaaaacgtacagttctgacccattttataggctaccagggacaaaatataaagaacccaccagtggtaggaggaggatacacaaaggaacctcaattggtacttttagagtagatttaggaaagtgaatcaggaccatcctgaaagatggcttatctcctcccttaagggcaacggccccatgcctgcttgaccatagtttgatgacttaagccaaacgtgttaagaaagcatgagtttagagatcatttggaaaagactgcttattccccaaaccttataatgttttcttttgtcttgtttttgctgtcttaaaagctttaaatttgtggtttttaatatatggaaagagctcctctagctgtattcttcatttgttcttttaaagaattaatttttaaaagacaagtaattttttaatagaaaaggaaatgtaaggaagtc

SEQ ID NO: 80019 - DNA, 1462 bp, Homo Sapiens
  misc_feature (79)..(113): n is a, c, g, or t
  misc_feature (995)..(1031): n is a, c, g, or t
  misc_feature (1034)..(1294): n is a, c, g, or t
agactgcatatgatcatataggggctagctcgccgagcgaacgacgagcgcaggagtcagtgagcgaggaagcgcgcgnnnnnnnnnnnnnnnnnnnnnnnnnnnnnnnnnnncagtcgacggtaccggacatatgcccgggaattcggccattacggccggggacaggaaaatgcctcaaagccttgcgttcccagcaacctggggctggttcccagtgcctggtcctgccccttcctggttcttatctcaaggcagagcttctgaatttcaggccttcattccagagccctcttgtggccaggccttcctttgctggaggaaggtacacagggtgaagctgatgctgtacttgggggatctccttggcctgttccaccaagtgagagaaggtacttactcttgtacctcctgttcagccaggtgcattaacagacctccctacagctgtaggaactactgtcccagagctgaggcaaggggatttctcaggtcatttggagaacaagtgctttagtagtagtttaaagtagtaactgctactgtatttagtggggtggaattcagaagaaatttgaagaccagatcatgggtggtctgcatgtgaatgaacaggaatgagccagacagcctggctgtcattgctttcttcctccccatttggacccttctctgcccttacatttttgtttctccatctaccaccatccaccagtctatttattaacttagcaagaggacaagtaaagggccctcttggcttgattttgcttctttctttctgtggaggatatactaagtgcgactttgccctatcctatttggaaatccctaacagaattgagttttctattaaggatccaaaaagaaaaacaaaatgctaatgaagccatcagtcaagggtcacatgccaataaacaataaattttccagaagaaatgaaatccaactagacaaataaagtagagcttatgaaatggttcagtaaagatgannnnnnnnnnnnnnnnnnnnnnnnnnnnnnnnnnnnnaannnnnnnnnnnnnnnnnnnnnnnnnnnnnnnnnnnnnnnnnnnnnnnnnnnnnnnnnnnnnnnnnnnnnnnnnnnnnnnnnnnnnnnnnnnnnnnnnnnnnnnnnnnnnnnnnnnnnnnnnnnnnnnnnnnnnnnnnnnnnnnnnnnnnnnnnnnnnnnnnnnnnnnnnnnnnnnnnnnnnnnnnnnnnnnnnnnnnnnnnnnnnnnnnnnnnnnnnnnnnnnnnnnnnnnnnnnnnnnnnnnnnnnnnnnnnnnnnnnnntgagcaccgtgcctagccaaagatgagatttttaaaggatgttttcagttctgtgtcattggttgggaagacagaagtaggaaaggattatggaaaaaggtcatgggggaaaaccagaggtgattccatgggctcctgggaaatttggagggtggaatggggtccctt

SEQ ID NO: 80020 - DNA, 2243 bp, Homo Sapiens
  misc_feature (974)..(974): n is a, c, g, or t
  misc_feature (994)..(994): n is a, c, g, or t
  misc_feature (1047)..(1047): n is a, c, g, or t
  misc_feature (1979)..(2101): n is a, c, g, or t
  misc_feature (2103)..(2109): n is a, c, g, or t
  misc_feature (2117)..(2131): n is a, c, g, or t
  misc_feature (2156)..(2165): n is a, c, g, or t
gttgcccctgatagtcctttgcacagtgatcttcagatcttaaaagaaaaagaaggcatagaatatattttgcttaacttctcttttaaggataactttccatttgatcctccatttgttcgagtggtgttacctgttctctcaggagggtatgtattgggtggaggagcattatgtatggaacttctcacaaaacagggctggagcagtgcctactcaatagaatcggtcatcatgcaaataaatgccaccttagtcaaaggcaaagccagagtgcagtttggagcaaataagaatcaatataatctagcaagagcccaacaatcctataattccattgtacagatacatgagaaaaatggctggtacacccctccaaaggaagatggctaaatatgttgactgttgtatgtttggactaatgttgctttaaagaaaatctttccaacatgcagacaaaagctttgagtgcccctattacagcagtaccgaagatgttagttaatagatattttagtggataatctgtcatctgacatccagtataagttacagccttcgcattttgctcattttagatatcttggactgagcagtggggcctttactggatttttcctgataaatacacatactggccactccttatctctttttcttgaaaagtgaactttttaaagcagccaagtcaacatcaggctactgaagttgaggctttagggtaactttcctatattgagcccatgggttacaaggatttgcaatatattgttccatttacagccaatacaggtttaatcgatgttcaatattggtttaggaaatttaaggccttctaaatcataatagctctttcatgtctaaaaccattttatgatattgccaaaatgtgataggaaacctactcattaaattgttaaactttttaatgactatgtgaagatatgaattgtttcctgaagataatactcttnattgagttgtattgtacttnttaggcaaagcagtgtaaaactgtatcaattaaggcttgtgagtagtgatttncactggggcatcagagtcttggctgggctgaatctgctgcttgttggttcagtgtttcttcatgaacaagagccacagtacagagcttcaagttatttaaaatactaagtcatcttacgtttccattttattaacgggatgttgcaatcgtttgtaaactaataaacttataaagtgattggcacaaagactccttgagcaaaagctgtgcagttaagtacaaaaagatacttaatttggagactcttacagtaatttttgccatgtcaaaacaatggcttttacattgaaagattaatagaaactctacatatgttaatttttttatagaacctgactcaaatcaaggtactctccattttattgccttacctgaatcagtcctttttggttggtaatagatttttttatacacccacgtttgatttaaaagtaaattctagttcttaagcacttttaacaagaaatccagaagcacatttttctgcacaaacaagttacaaagttcaaaagtgtttcttgtgcattagctttgagattcagtttttaactttgtaaaccacatctgagagacttgtcatttctacattgtgtgtgtttaatttcttttgattccattttggttaagagagcagtaaatagattttctggtattcttgttcacttgattacatttgtataaagttctgattgccagttgctcagataacaagtgacaaggcagaattctttaaatcagtaaagttccttaagcctaaggctaaatcttgaatacattgttgaattctttaatatcctgatggcaagcagactgatagctgcacatttggcatgctttgtttaatggattttatttttaattgcagatttatttggcaatgtacagtaaattttgtaaacttgcatcaagtttatgaataaagaaccatttnnnnnnnnnnnnnnnnnnnnnnnnnnnnnnnnnnnnnnnnnnnnnnnnnnnnnnnnnnnnnnnnnnnnnnnnnnnnnnnnnnnnnnnnnnnnnnnnnnnnnnnnnnnnnnnnnnnnnnnnnnnannnnnnngggggggnnnnnnnnnnnnnnnaaaaaactttttaaacccttttttnnnnnnnnnncccccaagggagaaggaacccgggcttaatttttccccaaaaaaaccggggccagaacaagggggttgggtccccccc

SEQ ID NO: 80021 - DNA, 1057 bp, Homo Sapiens
  misc_feature (502)..(888): n is a, c, g, or t
  misc_feature (910)..(910): n is a, c, g, or t
  misc_feature (916)..(916): n is a, c, g, or t
  misc_feature (924)..(924): n is a, c, g, or t
  misc_feature (1004)..(1004): n is a, c, g, or t
acccataaagctaaactgcaaatattaccctagaattaacctcttgtcctgtgtcaaaagtcttgttttgcatctggattgttaaactgtcagcttctctctgacagtctcgaactgtcaagacagtctcagttcacagccaaggtgatctgttaaccctccccatttccagggccaaatctcagttcttaagcacgtcgtttcttagcacggctttattttcatgctctttatttctctattttgtgcagccttacccctttaaagtccactgtgagtcctaccctgcagggcctcttaacacagtagagttcatgtgctactgatttggtgcctgccttcaaacacatgtgcaagttttgtggggttaaagatagccacttggtggcacaccacattggaagtgctgttcacccggtcatttgaaacggtgtttgaccacttggtgcgcaaatggcctatcggattaaaggatagccaaacccctcgttccgaattcttnnnnnnnnnnnnnnnnnnnnnnnnnnnnnnnnnnnnnnnnnnnnnnnnnnnnnnnnnnnnnnnnnnnnnnnnnnnnnnnnnnnnnnnnnnnnnnnnnnnnnnnnnnnnnnnnnnnnnnnnnnnnnnnnnnnnnnnnnnnnnnnnnnnnnnnnnnnnnnnnnnnnnnnnnnnnnnnnnnnnnnnnnnnnnnnnnnnnnnnnnnnnnnnnnnnnnnnnnnnnnnnnnnnnnnnnnnnnnnnnnnnnnnnnnnnnnnnnnnnnnnnnnnnnnnnnnnnnnnnnnnnnnnnnnnnnnnnnnnnnnnnnnnnnnnnnnnnnnnnnnnnnnnnnnnnnnnnnnnnnnnnnnnnnnnnnnnnnnnnnnnnnnnnnnnnnnnnnnnnnnnnnnnngacatgtgagcaaaggcagcanaggcangaacgtanaaggcgcgtgctgcgttttccatagtccgcccctgacagatcaaaatcgagtaaatcaaggtggcgaacgacagatatanatcagcgttcccctggactcctctggtctctgttcgactgcgctacgaactgt

SEQ ID NO: 80022 - DNA, 979 bp, Homo Sapiens
  misc_feature (19)..(19): n is a, c, g, or t
  misc_feature (55)..(55): n is a, c, g, or t
  misc_feature (69)..(69): n is a, c, g, or t
  misc_feature (114)..(114): n is a, c, g, or t
  misc_feature (119)..(119): n is a, c, g, or t
  misc_feature (122)..(122): n is a, c, g, or t
  misc_feature (128)..(128): n is a, c, g, or t
  misc_feature (142)..(534): n is a, c, g, or t
gacagagaccagaggactncagggaaccctgatcttaagctgtccgatcgcactntgattacgtcgatnttgatctgtcaagggcggactatggaaaacgcagcacgcgccttntacgntcntgcctntgctgcctttgctnnnnnnnnnnnnnnnnnnnnnnnnnnnnnnnnnnnnnnnnnnnnnnnnnnnnnnnnnnnnnnnnnnnnnnnnnnnnnnnnnnnnnnnnnnnnnnnnnnnnnnnnnnnnnnnnnnnnnnnnnnnnnnnnnnnnnnnnnnnnnnnnnnnnnnnnnnnnnnnnnnnnnnnnnnnnnnnnnnnnnnnnnnnnnnnnnnnnnnnnnnnnnnnnnnnnnnnnnnnnnnnnnnnnnnnnnnnnnnnnnnnnnnnnnnnnnnnnnnnnnnnnnnnnnnnnnnnnnnnnnnnnnnnnnnnnnnnnnnnnnnnnnnnnnnnnnnnnnnnnnnnnnnnnnnnnnnnnnnnnnnnnnnnnnnnnnnnnnnnnnnnnnnnnnnnnnnnnnnnnnnnnnnnnnnnnncaagaattcggcacgagggtttcatccaaactcttaccctatgtctacccacaccagagggaggaacatgtctttgtggagaggatttctttgagactctaaatatgctttgttcaggaaaggggaagatacaaaaatatagaacaaaaaagaatattggctcattgtacacaagagaggccagccattaagaattgttatcaatacaataaaagggaatacttggccagagatcctctagataagtagctaaaatgtgatcaaaaggagaaagaggaagaagcaaatacacaaacgttttatgggtattaataaaaataaagacatctctgaacaaatgataaaatcccttccctgaaaaatttcaaatgagattcacagaaatgcagaagcagaagaaactttagatttagaaacatctcatttgggctgggtgcagtcgtca

SEQ ID NO: 80023 - DNA, 1029 bp, Homo Sapiens
  misc_feature (126)..(126): n is a, c, g, or t
  misc_feature (136)..(136): n is a, c, g, or t
  misc_feature (169)..(311): n is a, c, g, or t
cacgcttgatgagtgtacgttccgcacgaacgacgagccagcggtcatggcgagaagcgagagcgccatacgcaacgcctgtcccgcggttgcgattcataatgcagctgcacgacagtttccganctggaaagcnggcagtgagcgcaacgcaataatgtgagtagcnnnnnnnnnnnnnnnnnnnnnnnnnnnnnnnnnnnnnnnnnnnnnnnnnnnnnnnnnnnnnnnnnnnnnnnnnnnnnnnnnnnnnnnnnnnnnnnnnnnnnnnnnnnnnnnnnnnnnnnnnnnnnnnnnnnnnnnnnnnnnnnccaaggaattcggcacgaggaggaaacatagggatggagactactactaagcatcttcgactatgctaagtcctgagcagacagtgaagaactagaaagacatggccccgccctcatgaagattacaagttaggcctattctccacacttgttctaactcaatctgctacatataccttgagtacccagtatgcgttaggtactaaaaggagctacaaagatgaaccagacacagtcttcaagaacttcagggatcagggaaggtttatcctgattgtaatccctccagaggttttgatcatttctctaatcacttattaggcctcttgcttcctgtaggaatttgttctctatattagattgaaatctgcctgttctaatttcaacttcctttcttctggccctggctagtcctcagtgtacagaattgccattggtacctgctggtcaaggccaagtgttgtgagccaaggtttctaaccttggctgcagttacacttaactgctcctctccgaagctggatttagcagagatttgatggaagccctgcaaacctcgattcaaatcaaagttcaaacctagtgactggttgagtgaactgctttaataataacagtgcaaaaattgaatttaaaataatccttttagggatgcaagatgcagtggtttagccttttattaatattcttttctttccactaataaagattttaagtc

SEQ ID NO: 80024 - DNA, 1057 bp, Homo Sapiens
ggacgcgtgggcgacggggaaaggcgacctgtggtgatgtcgacgtgctcatcactcacccagatggccggtcccaccggggtatcttcagccgcctccttgacagtcttcggcaggaagggttcctcacagatgacttggtgagccaagaggagaatggtcagcaacagaagtacttgggggtgtgccggctcccagggccagggcggcggcaccggcgcctggacatcatcgtggtgccctatagcgagtttgcctgtgccctgctctacttcaccggctctgcacacttcaaccgctccatgcgagccctggccaaaaccaagggcatgagtctgtcagaacatgccctcagcactgctgtggcccggaacacccatggctgcaaggtggggcctgcccgagtgctgcccactcccactgagaaggatgtcttcaggctcttaggcctcccctaccgagaacctgctgagcgggactggtgacccatggctgggggtgctgaggagagccgagttggactggctacccctcctggccacccagtactccctccagcctcagctggctgaacctcgccgctccaaccaccagcttcctcagcgagcagggcccagggctctgggcctgaagcaagagccagcccggctcccagtgtctgccaggctcccagtgtctgccccagccctctcccaaacaggagcaggctgccaccccttctacctcaccacttgcccctcggaagaattttgcaaatggccccttgccccattttaagcaggagcaggtggctggtatgaagccccaggtatcccccttccctgctatgggaaaggccaagctgctgggtggggacagaagctgcaggggagagggaagcagccgtgctgtcaacatcatccggcaccctctggggtaggagaacagccattccacatgtgttccctctatccgtcctgcttcctgggcagctggtggtgctgggaatggggtgccccagccttggtgaggacagtgttgggaggcccaggggcccagtaaagtgcatttgacattg

SEQ ID NO: 80025 - DNA, 596 bp, Homo Sapiens
ccaaagtgctgggattataggtgcaagtcaccacgcccggcctattttattccacttcggagaccgccccccttgtccctcagatgcatccaaatcaggagttagggatcatactccactgtggtcctgaattatagaataatgaagtcctagatgtcagcggcccctggctgcatgatagtaagagtatggctgagcctgtcttgcagatcatccagtacctgtacaggccaggctacactgttctccagcactctctgtagccaagtgccagtaatcacagactaggctacctctgctgggccagaaatagctgcctgaaccaggagctcacagcaccatccactctcatcaccaaagctatgcccaggagaagtcccacgctgctcacaatgaagcccacagcctcaaatatgaacttaggggcaaacactttccagaccataagatgcctgcgaaggatggaggctgccaaggcacaggccagaatctgaataccaaggataaagaggtacttgaggcccagctgcagcagtgctgcatagaagtgctgaggcgcatcccggagccgcatctccatcagtggctcctcttcc

SEQ ID NO: 80026 - DNA, 1742 bp, Homo Sapiens
  misc_feature (917)..(927): n is a, c, g, or t
  misc_feature (1707)..(1707): n is a, c, g, or t
gggagactggggcctcgctcgctcccgacccggttgcaagtgttgcggtgggagaaagtcgcgtccgcatcggaggggaagcgccgtcatgcctaagtattatgaggacaagccgcagggcggcgcgtgcgcgggcctgaaggaggacctgggcgcgtgtctgctgcagtcggactgtgtggtccaggaaggaaaatcacctcggcagtgtttgaaggaaggatactgcaactctttgaagtacgcattttttgagtgtaaaagatcagtgttggataacagggcaagattcagaggaagaaaaggatattgatgcattatgttgaagccaacatggaaaacaacaaatattttccctggtcattaacacaaagaagccaaaacaggaaacatactttttactacatctgtttggttggaccagatttcccctccgtggaacactgaagaaagtggatgagttgttttcgaatatgtataaagtaaatgattctcttgatccaagttatttttagaagaaaaacctaattgaacaggtatgggttgggagcataataaatgtgttttgagaattgttctaaagcacagaaaatggaaagactgttatttgcaaacttgactcttcaattgaattacccaattagtacaggccactgatttgactgacacagtcgataacatgcagcctatccagaaggtgtctgtgggaaagtttaggataaaactttttctttagttcagtcttttcctgtctagttctaaaatgaattgtgtttgattccttaagagaagaaatacttcatttgtgctctgattcactgaagtaataacctcagcactttaatagcgtccacaggcatagctgatgctaggccccagattgtgttgcccaggctctttaccatcatcttcggacnnnnnnnnnnncctggttacattttcagtctggcccgctctacataatgggccagtgtcagctccaagtccacatccttattatccatgattcaaaagggagagagagaacttcctttttcagggtccacaaatcaaatctataaaaggactctggtcttcccaggatcacctgcccttgcattggaccagtccctgtggaagaggggatgggggcctgtgatcttggccaggcctgggctatctatctgcactgtcattgctaactcctgtcagaatcacatggatgagtagtgggctgaatcccaaaaggaaaggggtttagagcaagtggaaacaacagatgttcactatagaaagcaagaatgaaaaccatgaagtggttgaagattagccttacagtaattttattctgatcacttaatacagtagagtcaaacaggaatccaagtttccaactttattatttttggcactgaagaattacaaagaactctagcgtctttatacctccgtggttcactggagttaaagcaatcggggcgttgtacagctcacttgagtttttaaaggttctactaaaaagtgagaattccacagcaatatgggtcattgttgcagaatatcacaaaggtctgttgtgtatactccttttcaccaggaaagggacaataatagtttttttcaatgtatatatatataagtgatctaactttttattaataaaagtaaacaactctaaaatgtatattataaagccctgtcatctttgttgagtaatagctttattgngctttatttggagaaatacacataccgtaaaattc

SEQ ID NO: 80027 - DNA, 2044 bp, Homo Sapiens
  misc_feature (958)..(974): n is a, c, g, or t
tgagattactgcttgagagcaaagaaaagaagatcagggaattcattcaagactttcagaaactcaccgcagctgacgataaaactgctcaggtagaagattttctgcagtttctttatggtgcaatggcccaggatgtcatatggcaaaacgcgagtgaagaacagcttcaagatgcacagctggccattgagcgaagcgtgatgaaccggattttcaagctcgccttctaccctaatcaagatggggacatacttcgcgaacagggtcttcatgaacatatccagagattgtctaaagtagtgactgcaaatcacagagctccttcagataccaaagggttatcttcgagaagcaccatggccatctgcacaatcagaaatcaggacaataagtgcttataaaaccccccgggacaaagtgcagtgcatcctgagaatgtgctctacgattatgaacctcctgagcctggccaatgaggactctgtccctggagcggatgactttgttcctgtgttggtgtttgtgttgataaaggcaaatccaccctgtttgctgtctactgtgcagtatatcagtagcttttatgctagctgtctgtctggagaggagtcctattggtggatgcagttcacagcagcagtagaattcattaaaaccatcgatgaccgaaagtgaccaagaccaaggcccaccaaggcagcagactgttaatcagacaaacagatctctgagaaggtgcatcagctgctttgaaggctgaagattgttttgtatgatactgcacagcatcaggcattttaaagcagatctttactaaacaggttaatgagctaacaagcaggttctctcgtctttgggctctttcctttctgagttgcatattctattttcttgtccccaagtagagactagtactacaaaaagggaccacatttttcaagtatttctaagtatnnnnnnnnnnnnnnnnntctcttaggaaatgtctagacctccattcttggattccctttctttccttttattttaaaaaagaacagtacccctcttttaagatgctgtcttacattaatgagcatctaatggaaagaaggtatgagttgcactgaggattagaatagtggtgcgttagtggcattatctataaatacactcacctaaattgaaagctaagaaggaaatgtaaatataatatatatttatatttgatgtaatatggacatctgcagattctaataaacaaggactattgctgatagtaggctgtgacatactgtcttgtgaaatggtttccttgacaaaatttaagctgagcttaaacagcaaaaaacaaaaagtacacagaaactatttattaaaatgtaatacagtttattgaactttctaggtatggagtttgatggacagggctgcctttaatgagtgtgaacggtcactaagtcacttagacatctcaccgtggaagttcgtgagcctgcattaggagatagactgattaccatacatgacataaaagaggaacagtggatagctcatactttatggtggttcttctcctccgaaataagtatactgcagaaatcccagacagagctccttacaaacctttaattgtaatatattttggatgattattcacattgaatgcacagaccaagaattcagtgaatgtcatttttaaaaaaactaattggtattgtctgctctagtgatacaagttttactagtgataaactattttaatcaaccatactattcttatggacaacaaaatatctacgttggccaggtttctgtgcctttattaccctcttctgaaacaaagtctgtgttttcatagctcaggttggcattgtatactccagtaatttaatccagggaattggggcttagggaggccttgaaaaaatcggccatggagggcacaccaagagcttcaagcaacaaagtctggtacatgggccatcacctggctggttcacctatcgtgggtttcctaaaaactttagctgacttataaaaaatcagcccaaattgatcc

SEQ ID NO: 80028 - DNA, 2441 bp, Homo Sapiens
  misc_feature (109)..(109): n is a, c, g, or t
  misc_feature (170)..(170): n is a, c, g, or t
  misc_feature (1737)..(1756): n is a, c, g, or t
ccgcatacgaggtgctcacggccgagcagattctacaacacatggtggaatgtatccgggaggtcaacgaggtcatccagtgcatattgggtacttccagaagtatganttcagtgatgcaaaggacaggcgggctgcagcagcaaagaatccagcaactatcacaagantactccttagccacttcaattgggataaagagaagctaatggaaaggtactttgatggaaacctggagaagctctttgctgagtgtcatgtaattaatccaagtaaaaagtctcgaacacgccagatggaatacaaggtcatcagcacaggatatgccttgtcagatctgctacttgaactaccctaactcgtatttcactggccttgaatgtggacataagttttgtatgcagtgctggagtgaatatttaactaccaaaataatggaagaaggcatgggtcagactatttcgtgtcctgctcatggttgtaatatcttagtggatgacaacacagttatgcgcctgatcacagattcaaaagttaaattaaagtatcagcatttaataacaaatagctttgtagagtgcaatcgactgttaaagtggtgtcctgccccagattgccaccatgttgttaaagtccaatatcctgatgctaaacctgttcgctgcaaatgtgggcgccaattttgctttaactgtggagaaaattggcatgatcctgttaaatgtaagtgggttaaagaaatggattaaaaagtgtgatgatgacagtgaaacctccaattggattgcagccaacacaaaggaatgtcccaaatgccatgtcacaattgagaaggatggtggttgtaatcacatggtctgtcgtaaccagaattgtaaagcagagttttgctgggtgtgtcttggcccatgggaaccacatggatctgcctggtacaactgtaaccgctataatgaggatgatgcaaaggcagcaagagatgcacaggagcgatctagggcagccctgcagaggtacctgttctactgtaatcgctatatgaaccacatgcagagcctgcgctttgagcacaaactatatgctcaggtgaaacagaaaatggaggagatgcagcagcacaacatgtcctggattgaggtgcagttcctgaagaaggcagttgatgtcctctgccagtgtcgtgccacactcatgtacacttatgtcttcgctttctacctcaaaaagaataaccagtccattatctttgagaataaccaagcagatctagagaatgccacagaggtgctctcgggctaccttgaacgagatatttcccaagattctctgcaggatataaagcagaaagtacaagacaagtacagatactgtgagagtcgacgaagggttttgttacagcatgtgcatgaaggctatgaaaaagatctgtgggagtacattgaggactgagaatggccctgcataaaatgaactctgaaaactttaccatctagagtgctcatgcaattaaaacaaaacaaacacaaacaaggaggcactaagcctattctgacaccactggtctgtagtaccagaattgttttgttaatggaaagtttaagtaaattatattgtaataaaaaggtagataaaccattgtacaacagtattctaggccgccaacaaaagtgtgacagacacactaaaagccctccaactttaacttgtaacgtagcttcattctcaaagctgactccnnnnnnnnnnnnnnnnnnnncctgagtgtagtacagttaaaatttcaaacagctccttgacactgcttttcatgttcaaaccagccattttgttgtactttggtaaaggacctcttccccttcctcccctacacatacagatacacccacacacagactgactctctttctctcataccccaaggtcatgagtgaatgatgcttagttccttgtaaagaaaatcttgggatggggaaaggggtaggcagcaagaggattcaacaaacgaaaaacataaaaactttgtatatgacttttaaaacaagaggacaacacagtatttttcaaaattgtatatagcgcatatgcatggacaaagcaagcgtggcacgtgtttgcataatgtttaattacaaaaaaatatttattctttaaaaatcttcaagattatgtctatttgctgtgcattttctttcagtttgcttatctttcccgggttggggttgggataaaggtgtgtcggtttagcacctctggaagacctatctagagctctttcactttcctgaggttattttgccctttctggtgttggtatgtctgttgccggccatgggcctcatgccttgaattcctgctcttgatcagggacaagggaggtcaagctctgactaatgccatgacctgattaaggggtacagcagggagttttgttgctacagctc

SEQ ID NO: 80029 - DNA, 1100 bp, Homo Sapiens
  misc_feature (242)..(242): n is a, c, g, or t
  misc_feature (519)..(575): n is a, c, g, or t
  misc_feature (609)..(629): n is a, c, g, or t
ccgaggactcaggaaccctgttttaagctgcgattccccctgaatgagcgattttgtttttccgggccgaactttgaaacccagcaccgccttttacgtcctgcattgctgcccttgccactattcttctgcggtatccctgatgtttggtacactataccaccttggtgagccttaccgcttcccccacccgaagaccgagcccacgagttcttggcgcaggagcggaaggcgcgccaaangcaaaacccttctcccgcgcggttgcgggtccataattcccgtggcccgacaggtttccggacttggaagcgggccctgggccccacgcaattaatgtggggttggtcactccttaggcccccccggctttaccccttattcttcccgctcctattttttttggaaatttgggccggtaacaattttcccccaggaaccagttttacctggtttcgaaatttattcggcccccttttggggaatttgcccctggggcccagaaattcgcccgggggnnnnnnnnnnnnnnnnnnnnnnnnnnnnnnnnnnnnnnnnnnnnnnnnnnnnnnnnnatgcaaaaatgagtattttattttgtcagcactnnnnnnnnnnnnnnnnnnnnnccactgtatttctacattgaggtgaaaacaatgtttaaactttcttatcaatcaaatacattccaaaagaaagtgtgttctatgaaggttccaaaacacactcaaaacacaatagtacaggaatctaatactgaaaatgactgttctgacagggtgtttaacaaacataacttttaaattattaaaccagtgaagcaatcccttcctaataagtgtgtcaagagagtgaaactgggtttgttccattaataccctaacaatttcatcgtaatactttttactgctatgacagttttaaataaattttgctgtacttaaaataggttttgaaagtggaaaagtgtacaaagtttcagataaaaagattaataaatgcaatttaaataaaatttcccctcttctctcatatcaacaataatcaattttagcagataacagattgagctttaaaaccctactcccaaaatgaaa

SEQ ID NO: 80030 - DNA, 1496 bp, Homo Sapiens
  misc_feature (439)..(498): n is a, c, g, or t
  misc_feature (613)..(694): n is a, c, g, or t
  misc_feature (774)..(834): n is a, c, g, or t
ggcacgagggcaacagacatcttcctaggctcgcgagagcgcccccttgtcccacggctgctggggccccccagtagccatggctccggtgtccggctcacgcagcccggatagggaggcctcgggctcggggggaagacgtcgcagttcgtcgaagagtccgaagcccagcaaatctgcccgctccccgcggggccgccgctctcgctcgcactcttgctctcggtccggggaccggaatggactcacccatcagctgggtggcctcagccaaggctcccgaaaccagtcctaccgctcacgctcgcggtcgcgttctagagagcggccctctgcgccccggggcatccccttcgcttctgcctcctcgtcagtctattacggcagctactcgcgcccctacgggagcgacaagccttggcctagcctcctcgacaannnnnnnnnnnnnnnnnnnnnnnnnnnnnnnnnnnnnnnnnnnnnnnnnnnnnnnnnnnngggagctcctgaagtatggggactttctccaaagaatcctgaaccagattctgatgaacatacaccagtggaggatgaagagccaaagaaaagcactacttcagcttctacttcnnnnnnnnnnnnnnnnnnnnnnnnnnnnnnnnnnnnnnnnnnnnnnnnnnnnnnnnnnnnnnnnnnnnnnnnnnnnnnnnnncataagaagtattctgaagatagcgacagtgactctgattctgaaacagactccagtgatgaagataacaaaaggagagnnnnnnnnnnnnnnnnnnnnnnnnnnnnnnnnnnnnnnnnnnnnnnnnnnnnnnnnnnnnngaggtctaagaagagcagaaaagagtccagtgattcaagctctaaagaatcccaagaagagtttctggaaaatccctggaaggatcgaacaaaggctgaagaaccatcagatttaattggcccagaggctccaaaaacacttacctctcaagatgataaacctttgaactatggccatgctctgttacctggtgaaggtgcagctatggctgaatatgtaaaagctggaaaacgtatcccacgaagaggtgaaattggcttgacaagtgaagaaattgcatcatttgaatgctcaggttatgtaatgagtggtagcaggcatcgccgaatggaggctgtgcgactgcgaaaagagaaccagatctacagtgctgatgagaagagagcccttgcatcctttaaccaagaagagagacgaaagagagagaacaagattctggccagttttcgagaaatggtttacagaaagaccaaagggaaggatgacaaataaagattttctgattgtccagaagacatttttaacaacaaaaaagaaagtctgggttccacacatacatagaaaaagattattatgttctgagaaagctttacagtgctactgtgccttctatttaattctttcagtccttcaataaaaagctgcttattgatataacttt

SEQ ID NO: 80031 - DNA, 579 bp, Homo Sapiens
ggttatgtcatgagtggtagcaggcatcgcagaatgaaggctgtacgactgcgtaaggagaaccagatctacagtgctgatgagaagagagctcttgcatccctttaaccaagaagagagacgaaagagagaaagtaagattttagccagtttccgagagatggtgcacaaaaagacaaaagggaaagatgacaagtaaggacttacttgttgcacagcaggaattttaacaacaaaaattttatgtgaccaaaagtgttaaaaggctttacagtgctactgtacttaccatattagtaagtccctcaggaaaaagcttcttttgagatatctttagcagcttattttttgttattttaactttaaaaagtaatatgtgcacatggttttaaaaatattcaaccattataggaggagagttagtaaaaagtgaatctttcactttagcccctgacacctttcccccaaaaatatatattttggtgtcttatatacagaatatacattctgtgcatatacaagagtatatgttgcagcataagattaaaagctattaaagttttttttcgctcgttaaaa

SEQ ID NO: 80032 - DNA, 442 bp, Homo Sapiens
  misc_feature (221)..(281): n is a, c, g, or t
ttctgccttaggatctccaatgcttgcttttaatggttcttggacaatcgatgctgttactgaaaaatttggagttcatatctttacactccatggtccatatctcatcactttcctaattcttataaccattttatttaaattcagttctgatgaacatacaccagtggaggatgaagagccaaagaaaagcactacttcagcttctacttcagaaggtnnnnnnnnnnnnnnnnnnnnnnnnnnnnnnnnnnnnnnnnnnnnnnnnnnnnnnnnnnnnnagtttgtaaatagttgaacattagactttgcttttactcaaattgcccatcgtctgtttcttttgatgttcagaaatagttttttagaatataatttttttatttgtactttcttagaagaaaaaaagaagaagtctagccgttcaaaagaaaggtccaaa

SEQ ID NO: 80033 - DNA, 1130 bp, Homo Sapiens
ggctggaccggtccggattcccgggatcaggtgagtcagggcaggggggtggtgagggggtgcccctggaggctgcgagcctaggctgtccccgccaggccaccacctggctggcagcagctgtttacaggagtatggactgcccttcatggagaccagcgccaagacgggcctcaacgtggacttggccttcacagccatagcaaagtaagtcctgccagtcaccaggactcccccagcccagggcctgaatcctcattagagtccaggccatcgtgtccccttgtcacccccactccgcagggagttgaagcagcgctccatgaaggctcccagcgagccgcgcttccggctgcatgattacgttaagagggagggtcgaggggcctcctgctgccgcccttgaacctggctgagctcagtcctctggaggaagccgcccagtccctagaaggctggacagagggtctccaggcccttctgactttgttgcccagtggccaacgcccgagtgtctgttttcaggagccccaggtcaagccttgtcccttcctcctcccagcaacagtcccaacaagcaggcttctgagagcccgtggccgcacactggccgccacggaaaagcagtcttctgcacgggacggggagcggcaagtggacagactttgccacggtgctctgctgccccctcctgggcacgtccaggtgagggagggctggggctggcaccacgcacagtgcctaaccctagaaaagccatgtcttcagccgcacatgctcaggcagctaagggaggacgcctgcccacgcctgggacagaaggcttcactgctaatcacatcgtgcatctgtgtgtcctgggagctgcctgctcccggcccaccctctaggaggctctggctcaaacagcaatagggtcttcctcactgaccttggaggatgcctgtggccttgtgataaaatgtgggaaatcacagaaaacaccagaaacaacaactgccagcccggcctggccacaggtgaggtctgtgatttccgagcacgctccaccttgcactcaacttggccttttgattgcacaagcctttgttttcagtcctagtgaataaagttgtgttttctggaaaaaa

SEQ ID NO: 80034 - DNA, 544 bp, Homo Sapiens
ggcacgaggagaaaaggaagaagattgaggaatgcttgctcatcttagcataatccactttttgggcatcttaggttaatggagggagaagaagttatgagaaaggctcatgagtgcttttgaaaacactttcaggatcataaaattacagattataagaggctgaaagaatgttagaggtctggctgttctcattttcagagaagcatagtgatatactcagccaagctcaagcagcagcataaccagagccctggcaatacatctgtttgacttaaggacaaaaatccaggattctttgatatcaccatctctttttgagtttttgtgggaataaactgagaaattgttttctgaggtaatagtttgtttttctctgatcatgtttcttaatgcctgtagtgtgccactacacttgtggagaataaggatactgttttaccaagcctagaaattgcaattatagaatgtagcggtagggaatggggcatgcccagaaacttaacaccttgtgttttataggaaaaatgttttgaaaattggc

SEQ ID NO: 80035 - DNA, 700 bp, Homo Sapiens
ggcacgagggctcatagcactttaatttggcaagccatttttcctgttttattataaatctatattagatgtttgaatatggtttgaaatatttcactaccgtgctgaaaaaggttggttgatagcagcttggagtgctaactggaagatcaaaatcatgtctcttgctgataacctaagagcattaagctctgagtccagtgaggtcatagcagtgtatgctccttgcccttacggagtgtctgtttttagaaatttagattttaaaaggcgtgggacatacgaccaggccctatagccacataaatataaatttcatagaaaaagaataaaagcggagatatattttttgacacagaggcacccaaagaaatacaaacattgcctagctgctgccatttctgtaactgcccagaagggtgacagatttctgaaggggaaaggattcagatatgaccttttctttagtcccaaccactagttttaacaaatgtgaattattgaaatgtgaagggacaaaaagaatcatacatttaaactgtcttgttcagcataccaatattgtatgttacaaatcatcatttctaaatctggattgattctgttgtgtttttgactgtttctaaagtaagtgtgtataaaagtctcctttttaaaaagatcatatttttaaataaagcattttttgtagaaagtgcca

SEQ ID NO: 80036 - DNA, 728 bp, Homo Sapiens
  misc_feature (16)..(16): n is a, c, g, or t
  misc_feature (86)..(86): n is a, c, g, or t
gtcctttttcctatcntgctgcaaggaaaaatggacttctgattaggtttacaaattgtgaacttttatgtaaatgttaagtgctntcgaggagaccaaactattattaatatataaaatggccttgcccttaaggagcaaattaaatctcatggagattagactcaaaaggcaataaataatcgagggtttatgcaatgaaatagaatttcagaagagtttggatctcaaagattgtccttcactctcagaaacaggcaagtttcttaaaagcccttatagtcgtgtttttattttaaaaatcgtagcactttatttttgaagtttaaaaagcccataaacttaatgagtctttataatcagacacatggaaatatagaaaaccaaagactgatcttagaatatagagtagagagacatgtttgttattctccactagtgactttagtattttgttatgtgatgttttttaggtgcaccttttctcatgactccttttactttatctaatgtcttcctctttaaagtgtgacccagagaccagtagcatcagcatcaactgagacctgtgaacactgaagctccagctcagacatgttggggaccattttaataagatacctagctgattttttgcacagcaaactttgaaaacccctggtctaaggggtagtatttgtatcacttatggaatataatctcagggaaattaaatctgctcaattgac

SEQ ID NO: 80037 - DNA, 459 bp, Homo Sapiens
caattgagcagatttaatttccctgagattatattccataagtgatacaaatactaccccttagaccaggggttttcaaagtttgctgtgcaaaaaatcagctaggtatcttattaaaatggtccccaacatgtctgagctggagcttcagtgttcacaggtctcaggtgatgctgatgctactggtctctgggtcacactttaaagaggaagacattagataaagtaaaaggagtcatgagaaaaggtgcacctaaaaaacatcacataacaaaatactaaagtcacgagtggagaataacaaacatgtctctctactctatattcaaagattgtccttcactctcagaaacaggcaagtttcttaaaagcccttatagtcgtgtttttattttaaaaatcgtagcactttatttttgaagtttaaaaagcccataaacttaatgagtctcctcgtgc

SEQ ID NO: 80038 - DNA, 632 bp, Homo Sapiens
  misc_feature (258)..(266): n is a, c, g, or t
aaactccaatacctaatgtgccagataattctttcaccccaaaatataaaatcctatgcttataattttaaaatcctcagtgagctatggaatattgtgcatatttaatacccaccagcaacctagaagtagatggcatccatgtgtctgtcacaccgactttccaaacaacctcattcacccattactgactgctctggccctgggcgctctgacttcctcagaaaccacctctttggaactttcctttccacaacnnnnnnnnnaaaacttcacctcgagctttctccatcatcccagcctctctgcctgattccatctcatgtaaagtaaactcgtctgagaacctgcgatcaccttttaccaagcacatgataagccgtagcaacctagggactatgataactctggccttggcctaagtttacataagaacatgatagtttgctgacctcgtggagggaaatctaaatgaaatcaatatcttataacaaaactagccaagatcaggtatttccattctgagtataaaagcaactgatcttaagcaacaggcagagatgttaataccggagatatatttgtacaatcaaactcttgtgtgctggtgaaagactttacccccaaagtca

SEQ ID NO: 80039 - DNA, 640 bp, Homo Sapiens
  misc_feature (36)..(36): n is a, c, g, or t
  misc_feature (48)..(48): n is a, c, g, or t
cattttgtgcatgtgagcctgagtccatggaaatgnctttcagcaganttctcaaagggagcccgacctcaaaaaggttgaggagccctggtgcagactgtgctgtttgtcaatgtgcagagtaactgtgcccctgtctcgggtgcttccccaaggcttgcaaggagcttcctggagagcagtgtctgcaggcaggaacctctgccgtgggaacaactcacccatgcagacatcgcagagcgactgcaagggcttcaggagctgtggagggtggggcctaggggagtcagctctgaggtcagagcagactttcgttccatgccctgagggattctggaggttattctgcaacctgtcactcaccgtagagtgtgctgcgaagcatttggggatctgcaggccccgcccccagtagtgcctcactttccttagtctgcttgtccagggctgtgggtctagggggaagcagcagtaggttcttcatcttgagccaccatgagctcctcacctccaggatcccgaggagctctgttttgatccagctggccctaaaaggctgcaaaactaattgggaaaaaaaatacagggacttttggcctccagaattgtaagagaataaatctctgttgttttaagcaaa

SEQ ID NO: 80040 - DNA, 1602 bp, Homo Sapiens
  misc_feature (1016)..(1095): n is a, c, g, or t
gctggaccggtccggaatccctgcataaacggcgggccggaccgggcctgccgaggggagcggaagcccaccggggctggcccgccgctgacccgccgcctcctgtctgcctcctcccgggctctgggcccagcgcgcccagatgccgggcaggacccctccgcccgctgctggaacaccaatagcagcgttggagcctctgggccggaggaactggggcctccaccgacacctgcttcttccctcacctcgcagccttccacacctgttgatctgacctctgccccgctgccgcccaggagtaacctaagacttttggcctgattcgagctcactccgtctaaacctctaaatgcggtgcgaaaaaatcctggggaatgtgccatgcaaagcctgggcatttcaagtgcttttctggattcgcatcaactcctctttacaggcatctttatccggaattcagctcgtcccaaaccccacgtggtgtagctctgcttgtgtttttgaatcccggggcctctttgaatcagaagccctttgtatagagataagtatcctttagggccagaatcagcctccatttttttcgcagtccccatttcctacccgtaatactttcttctgatttttaaagccatttgatagagaagggacaggggaacagaaccttcgccccccgcctgagcagctggctagactagatatcttccaaacattatctcatttactttcccctggagttacaaataggtagatttcatgtccgttgaggggtgagaaagctgaaactgttgagactcaagaatcctggccgaggtcagcctcctccgaagcttcatctcttgccaccactttctggtgcacacctaggacagatttcaatccctgagatcccaggatgaaacctatgtttgccaaataccagctactgtgccagaagagatcatggaaccaggtgtggaaagctgcttgagaagaggagccgaaaaatcatagttgaaccgtcctggaatagnnnnnnnnnnnnnnnnnnnnnnnnnnnnnnnnnnnnnnnnnnnnnnnnnnnnnnnnnnnnnnnnnnnnnnnnnnnnnnnnagtccacaatgccagagaattaaagagaaccacaaagctgaacctcataaaagttagcctggcgaggggaggatgatgagatttcccctgttgtcacataaacaaggaagtaaagggggccccttgtgctctcagaactccaagcatgaaacgatagcaaagggaaaaacagctaagtgtttcctggctgaattttattttgctttcagtttctgccatttcagttcctgttatcgtgctttgaggtgcactgaactgcagcaaacccaggggatccaaggctacgttgaaaagcctttgaccacagtgcagggagcagaagacattaatgacgtgatgtcgacacagcccgcactcaggatcctccaggaaaagaacacagagataaccccggatcgatggtactttttgaaaatgctttattgcaaaagagtggctagggttttacaagggctatgaagaaacatattaaggttaataaagctttttatcctcgtgccgaattct

SEQ ID NO: 80041 - DNA, 534 bp, Homo Sapiens
ggcacgaggggatcatcgaggatttggcaaaaaaggtcctgtgttttgaggaactgcctgcagacacacaggagcccatgaaagccccaagctggcctttctggtatgttgtgtgcagcagtgaggcttggcagtggctctgggatgccctcagctttttcctggttgaaaggaacctaaattctaactcaagagttgagagttttccttgactgcatctgtactgacagcctagaaaaccgatgctgcagctgctgcaaatgcatggtgcaaggggttttgctgcattttcagcttgaccaaaaaactcagaataaagacctcaccttgatccaacggaggcatgaaattgatggccaagtgtgaataagcagttggcggtgtgtcacctgagtgacagctgtatggggacagagagcagacaagtgccccaaggagaagaggcagttccctcctcaaggcctgtctgaggttgtgctttctcctagttggctttcttacaaataaacatgttgtttatgacaacagacattt

SEQ ID NO: 80042 - DNA, 313 bp, Homo Sapiens
aactaaaactacagaatctatttttcttggtctcatactcagttttttatgtagtcacttagtaaataacctaatttgcttgttttctccacactaattttagggtgaattcctcatttcgcttttcagatcatggggtgagggggatggttgtgtgtgtgaggaactgaggaatcagatggaaaacaatgcctctgctcctttgagtataatcagtgatatttgaggttccagggttaaatgctgcatttttatttctgacgttcgtaccttaaaatatttgaagaaaataaactatttcattgttgtcaga

SEQ ID NO: 80043 - DNA, 930 bp, Homo Sapiens
aattagagtatattatactttcaaactggatacactagaaattggcaatgcaacataagatgcaaaggaatataccagttactgtcaaaatgaccctgtacagcctcgtaatgcaaaaagctttatacaatacaaattttcagtaatgtacacaaaccttgacagtatgatcatctgaacataatatgaagagttaaaaaaaggatagaagaaagaaagtgctgagaaccctaactgcattactatatggaaaaataagctagttttcattgaagaatgcatagtgacaacaattgaagttagttggcaggtgaatttctcaaagatgttagtgttttatacggaaaggatatctatggaatacatccttccctgagtatcaaactgcaaaccaaattcaggggtacatattttctagggtggagtctgaaaaatgctgtagatttttttctttattaataacaataataatataaaaagtcaaacaaactccaaacacaccttttctcactcagaaaacttttataatttaccagaaagattgatgactctttccaaagtgctaaaaaagttgcccaattatattaagcattactaagtcattcaaatacaagttcagtggcaagcagtgaaatgcatggcatttgagcagtaaacgtctccttccttcacctcctctcgttcttgaaagtttcaaccctagacctcctattgcacaagtggcatgctgtaaaacctatagtctgaattgtcagggccaccctttcaggtttttaacctgctggtgcttaagtgtgattcgccttttctaccagcctctgtgggactactttagccctctttcctgtcatcactgaacttgtagttttgaaaacacattattagccaagtggcacattctccattatatggggataaagacatgacttg

SEQ ID NO: 80044 - DNA, 942 bp, Homo Sapiens
  misc_feature (127)..(127): n is a, c, g, or t
agcgccttgggaggtatgaggtagagaaacgctgtgccgtggagaaggaagactacgatctcgccaaggagaagaagcagcagatggagcagtatcgtgccgaggtgtacgagcagctggagctcancagcctcctggatgccgagctgcattctgcagtagacccgttactccctgccacagatcctcatccaaagatcaatgcagagtccctgccctacgatgagcggcctcttccagctattcgtaagcattatggggaggcagtggtggagccggaaattgagtaattgcagacatcagcgatgcttcggaggggagggcatgttagggggagccagagcccttaaccgaggaaggccttgaagagaagccagctctgccatcgatgtgtttgggagaaaccttggtttgctgaggcctattgtaagacgtggtcctaccgagaggatgcactgcttgccttgtctaagaagttaatggaaatgcctgttggaaccccaaaagaagatttaaagaacacactgagagcatccgtctttctcgttagaagagccataaaggacattgtgacctccgtttttcaggcttctttgaaattgttgaaaatgatcattacacaatatattcctaaacataaactgagtaaacttgaaacagctcactgtgtggagaggaccattcccgttttgctcaccagaactggagattcttctgcccgcctccgcgtcacagctgcaaattttattcaggtctgaacttcaccacggcatttgaaaccgtagatgataaacatattcctgtagctctctggctttcttaacaccttttacaagattctgtctctactcagttaacattattctcagggattcaccatcacactttccttatgctctaaaaggtcagttttgtcttagacataaacttcagttaaaatct

SEQ ID NO: 80045 - DNA, 770 bp, Homo Sapiens
  misc_feature (218)..(270): n is a, c, g, or t
catggagggcgtctgtcatccacccctacctacctatttaccatataggatatcaagatgctcatttgcataatcccatgaaagataagtcaagtatgatgtggatctatacagcatatacatctcagctgtaagcacacaggtgaaagacgtgttaacttccaacctgaacttcagcctgaatttgctttcagtgctgccagctgcccttgtaaagnnnnnnnnnnnnnnnnnnnnnnnnnnnnnnnnnnnnnnnnnnnnnnnnnnnnncgtgccctcatctcagcatctgtagctctgccatctattttagcaaatccctcaaaaattgttttgtagagaatgttcctgcgtgtgttgctgtcgtctggaggaaggtactccaggatggaagcctggtgctgtctgtacatgtccaaaataattcgaaccgccgtctcgcggacctcatacactctatgctccagggcactcactgaaaacttcatcacgttgtcaatggtgaagcccgagctgccagtgcccaggtctttcagcagccgggccaggaggcccatctgactcattgccaggtgaactgaagagtttgctttcaatggctgcaccaggtaggatggaataatttggagagacttaacttctttaaacaaggccatttcctgaataaaatttgcagctgtgacgcggaggcgggcagaagaatctccagttctggtgagcaaaacgggaatggtcctctccacacagtagcgaacgggtaccgagctctg

SEQ ID NO: 80046 - DNA, 1083 bp, Homo Sapiens
  misc_feature (15)..(15): n is a, c, g, or t
  misc_feature (107)..(184): n is a, c, g, or t
  misc_feature (255)..(278): n is a, c, g, or t
atccaacacaggcantattccagctatggagctagctttaaaaaggaacagtaaaaatattaatcggttagctgggtggaatggcccatgcctgtagtcccagctannnnnnnnnnnnnnnnnnnnnnnnnnnnnnnnnnnnnnnnnnnnnnnnnnnnnnnnnnnnnnnnnnnnnnnnnnnnnnttaaaaataataactttattgccagatttggggcatttggaaagaagtgcattgaagataaagcaaaagtnnnnnnnnnnnnnnnnnnnnnnnncaagggggaagggttggttaggcaataattaattctagggcaggaagaagtacaggataggaagtaagagcatcatacgctgtttttctcaacaatgggcaatatgtacatagtcataatgatgtggtgactgactgcttagcccctaaatctggtaactactttgggacaatatggggggaaaagtgaagatagtgatggtgtaagagctaaatcctcatctgtcatatcaagaaatcactatataatgtataacataatcaagaaatgactaagtagttatgtgaagaaaagaatggaacattgctagaagagttagaagtcattgctccagagaattaggagggatggggcaggggactgttaggatgcattataaactgaagaggcttttaaagattacatgtattaatatatgtattcacttgaaaaactaaaaaaatagtaattttttaaaacccatggaggtaactaccagaaggaaaaactaagagaatgaaaagtgctttcctctggaaagaacaagtcgcaggactgttttcattgtaagacttttggagccatttgattttacttaaccattttcatatatttctttaataaaaataattctatcttaataaaaagttacactcattcattaaaaaaagaattttaagactgtaataagaatcatagtttatttctgttagagaaaggcaatgtgttatacttggaaagaggtcatattaattttatcacatttttgggactcagcatctttatattttctgattttaaataaacaactttgcttatgaaaaaa

SEQ ID NO: 80047 - DNA, 1448 bp, Homo Sapiens
  misc_feature (579)..(598): n is a, c, g, or t
  misc_feature (1006)..(1021): n is a, c, g, or t
  misc_feature (1225)..(1316): n is a, c, g, or t
  misc_feature (1324)..(1338): n is a, c, g, or t
aggggattcattgagccatgagtccaagctgcagtgagtcgtgacttgccactgcattcctgcctggtgacagaagagaccctgtctcaaaaaggaatctgaaaacaatggaaccatgccttcataattctagaaagttattttcaactgataaatctatattcacccaaataatcaagggtgaaggtaaaataatacatttttagacaagcaaagactcaggggttacctccatgtgccctttttagggaagctgttggagaaaatactccagcaaaatgaaggagtacacaaaccagagaatgacatgaatccagcaaataggatccaacacaggcaatattccagctatggagctagctttaaaaaggaacagtaaaaatattaatcggttagctgggtggaatggcccatgcctgtagtcccagctactcaggaggctaagcaaaaggacgacttgagcccaagagttcagaccagcctggccacccttagtgagatcccttctcttaaaaataataacttattgccagatttggggcatttggaaagaagttcattgaagataaagcaaaagtnnnnnnnnnnnnnnnnnnnncaaggggaaagggttggttaggcaatcattctagggcagaaagaagtacaggataggaagagcataatacactgtttttctcaacaaggagcagtatgtacacagtcataatgatgtgactgcttagcccctaaatatggtaactactctgggacaatatgggaggaaaagtgaagattgtgatggtgtaagagctaaatcctcatctgtcatatccagaaatcactatataatatataataatgaaatgactaagttatgtgaggaaaaaaacagaagacattgctaaaagagttaaaagtcattgctctggagaattaggagggatggggcaggggactgttaggatgcattataaactgaaaagcctttttaaaattttatgtattaatatatgcattcacttgnnnnnnnnnnnnnnnncaataatttggaaaaacccatgaaggtaactaacggaaggaaaaactaagagaatgaaaagtatttgcctctggaaagaacaactggcaggactgttgttttcattgtaagacttttggagccatttaattgtacttaaccattttcatctatttctttaataagaacaattccatcttaataaagagttacacttgttaatannnnnnnnnnnnnnnnnnnnnnnnnnnnnnnnnnnnnnnnnnnnnnnnnnnnnnnnnnnnnnnnnnnnnnnnnnnnnnnnnnnnnnnnnnnntttggcgnnnnnnnnnnnnnnnaaaaatttttcaaaacctttctttgggcgcggggccccaaaaggaagggaaacggggccaaagtttttcccaaaaaaacccgggccagaacaagggttggaattcccccc

SEQ ID NO: 80048 - DNA, 711 bp, Homo Sapiens
gtgtctatccttcaatggctgaatagttccttaaatcagacaagctcctggctatcttcataaccagcagtgagtagatcttcttaatatagctgtctgaccacatgtggaaggcagctagacttattgtatttacagcctggccactctagacatatgaatccaggctgactgcttaagtgcccatctcgtttgatataaactgtagaaaaggcaagcactttgttctgagtcttttatctccaaatacatagttgtctcaaaccaagcaagctttatcaaaatggcttatttgcagaatagttccaatgatataaatgccaactggcaagtcattccaaactgcttgaaggagtagatgaaccagaatctgagaatttggaaataggtcacagaaaaagcctccatttggctaaatatgacaattatctgagtatggttaaatacatacaattaaatgtctgaagccaatgagttgtttattctaacttgaaatatatttttgtgagaataaatgttagaaaagttagtttattttggaaacctgccgtgaaaggaaattctaaaggcttaacatgaaactgtctgcatttctacctgttagacaatggttgctcttgggctcttgttatacagtcatatggctacacgtttatgtaaagtttgcaaaagtttggtgttttgatttataataaaactgttatattattc

SEQ ID NO: 80049 - DNA, 828 bp, Homo Sapiens
  misc_feature (65)..(65): n is a, c, g, or t
  misc_feature (126)..(126): n is a, c, g, or t
  misc_feature (759)..(785): n is a, c, g, or t
aggtgcgttcctgcagaccacgggaagccctgtgcttgcctgggtcagggctaagctgtgcgccntagaggagggaggaggactgcagattcttggtcgagaaagaatgaagaggatttctgtgtntgctgagcagccattgtggagggttacccgcctccactttcccgttgcccatttcactgccaccagctcctcttcctctgctcgaacctatgagtcccagcctcactggcggcctcagacatgctcaggagtgacggggacagagggaggccgctgagttgcccgttagaactcttactgctgcgccagtgacccaggtggagagggaccctgaaccaaacagaacgtgtgctaattttccgaactccaaactgtacactcatattcatttttaaattgtatttttccaaacttcaaaaaggacgatgagcgtgggggataggaaacaaaacctgtaaacgttgtgaatgggctcagtggactctgggaccaaaccttctgtaatctctaaaacaatgggaccaagagctggatggaacctggagtcaaaaagaactgcttcagtccccgctgtaccgcctgcctagctgtgggagcaggcagggcgcctgggagcctgcgttttctggaccgttccatgggactcatccctacctcacagggctgttgtgaggtgttgtgtgactgcgtgtcctgcaaacgcccagctcggtgcccagccagcggtgggcacccaataaacgctacaacatnnnnnnnnnnnnnnnnnnnnnnnnnnngaccgcgtatgcggccgcaagcattattccctttcagtgaggg

SEQ ID NO: 80050 - DNA, 746 bp, Homo Sapiens
ggacttgtacgttcaggctgaaatcctccattctgatgctgtactgaccttgtttgtggacacctgcgtggcatcaccatactccaatgacttcacgtctttgacttatgatctaatccggagtggatgcgtgagggatgacacctacggaccctactcctcgccgtctcttcgcattgcccgcttccggttcagggccttccacttcctgaaccgcttcccctccgtgtacctgcgttgtaaaatggtggtgtgcagagcgtatgacccctcttcccgctgctaccgaggctgtgtgttgaggtcgaagagggatgtgggctcctaccaggaaaaggtggacgtcgtcctgggtcccatccagctgcagacccccccacgccgagaagaggagcctcggtaggtggtcgctctcagaccccactgtccaccggggcgcagacccctgactcggggacttgggatgttcctcttggtgtcatattccaactcagattgagccctacattgtgctgcacctggtcatacggagttgaatcagacctggttcccgcctcccccaaggctcatggtccttggaggacccgttgcagggtgaggtcaagagagttctgacctggatggcccatagacctgacgtcccagaatccatgcttctcatctgcaaaatgaaaatgtcaatacttacttcttagcactgttgagagggttacttacataaaggaattttggtgaaactgaaaaaa

SEQ ID NO: 80051 - DNA, 1409 bp, Homo Sapiens
cgtgctgcagtagcgcctggtggcggtggcagtttgcccgcgggtgtgtgaagggagacagtgtggaggccacagggtactcgccacgatgagcagcaccttagctaagatcgcggagatagaagcagagatggctcggactcaaaagaacaaggccacagcacaccacttagggctgcttaaggctcgtcttgctaagcttcgtcgagaactcattactccaaagggtggtggtggtggaggtccaggagaaggttttgatgtggccaagacaggtgatgctcgaattggatttgttggttttccatctgtggggaagtcaacactgcttagtaacctggcaggggtatattctgaggtggcagcctatgaattcactactctgaccactgtgcctggtgtcatcagatacaaaggtgccaagatccagctcctggatctcccaggtatcattgaaggtgccaaggatgggaaaggtagaggtcgtcaagtcattgcagtggcccgaacctgtaacttgatcttgattgttctggatgtcctgaaacctttgggacataagaagataattgaaaatgagctggaaggctttggcattcgcttgaacagcaaaccccccaacattggctttaagaagaaggacaagggaggcattaatctcacagccacttgcccccagagtgagctggatgctgaaactgtgaagagcattctggctgaatacaagattcataatgccgatgtgactctacgtagtgatgctacagctgatgacctcattgatgtggtggaaggaaacagagtttatatcccctgtatctatgtgttaaataagattgaccaaatctccattgaggaattggatatcatctataaggtgcctcactgtgtacccatctctgcccatcaccgctggaattttgatgacctattggaaaagatctgggactatctgaaactagtgagaatttacaccaaacccaaaggccagttaccagattacacatccccagtggtgcttccttactccaggaccacagtggaggatttctgcatgaagattcacaaaaatcttatcaaagaatttaaatatgctctggtctggggtctctctgtgaaacacaatcctcagaaagtgggtaaagaccatacgttggaggatgaggatgtcattcaaattgtgaagaagtgaaacctttcccttttcccatctgccggacgaaccacaacagcgttccccatgatcaagcaccctaccccagttctttctggttttggcagtcactggatcaggatccaggggagggagatggaggcacccaaactggaacttcatttgtcttaccttggtgtcaccttgtatgtcgaactgcataaaagatctggtaggctggtcagctacatgcaaa

SEQ ID NO: 80052 - DNA, 703 bp, Homo Sapiens
  misc_feature (609)..(618): n is a, c, g, or t
gagagtgcttcccacacaccggtgactgactgagtccctccagtgcgcaggacagcggggagctttatggatggaacagtggtggggcggccccagctgtcacaggtaggagaatgccgcaagccagaaccaagcgaatgctgggagtgaggccaaagataggggagtggcctgggagtcgggagggcagacagactccgcctctgacacctctgggtggcataatcaggtaaatcaggctctccaagctggcttctcctctgaacaatgggatacctgcctcaggggttgctgcgaggactgagtgcttagcacagcacttggacaggaaactcaaaaatccaacggagctctcagtggtttcacagaggaggtggcagctgaggatctggcctcagaggatgttaggatttcactccgttactcatctgtccctttggccattgccatcctggtctgtctccacagctcctagaaggaaaggtcggggctgagactgactttcggctggcacagggcctggacgaatgaggccagtgaggcatttcagatgcagagtttaccggaatgccagcaaattgcatgataatattttaatccaatgtggtnnnnnnnnnngtttttaattaatgcaaaagtccatgatgaataaaatatcaaaaattaaagacaggatccgactttgcacgaccctgcctcactc

SEQ ID NO: 80053 - DNA, 833 bp, Homo Sapiens
ggtccaaggaggctttgttttataatcacgcccttccacttccgggtttcgtcttcttggcttctgatatttatgaccatgcagttctattcaataagtctgagttatatgaaattcccgtcatcggagtgaccctgcccatcatgtggttctacctcctcatgaacatcatcactcagtacgtgtgcatccggggtgtgtttatcctcaccacagaatgcgcctccctcaccgtcacgctcgtcgtgaccctacgcaaatttgtgagcctcatcttttccatcctgtacttccagaaccccttcaccctgtggcactggctgggcaccttgtttgtcttcattgggaccttaatgtacacagaggtgtggaacaacctagggaccacaaaaagtgagcctcagaaggacagcaagaagaactgaggcctgtctggagtacgtagaccagtgtcgtcgtgagggtgggaccctgtgaaggtctgaccaccgttttcgcttttgttaatgccgagctacccgcagtgctgagccagccgtgcaaaaagaaatcttcaggaggggacttctcacggtgctcagacggacacatgtagactaaatagaaaccccctcagcccttaaaatagaaaaagaaccggttcgcttcccccaagcacccccgtggaattcctgttcgggccgcctccggcccttgaaaaagcttttcctagacaattcggtttgggggccgcggggccacagaaagggaaaagggaaacaggggcccataactgggtttcccatagggaaaatcctggggcaaggaacaacggcgctggggaatttcccccc

SEQ ID NO: 80054 - DNA, 454 bp, Homo Sapiens
agaatatgagaagttaaaccagggaccatgccagaaggttctctcactgatcccacaagtacagtctacagaaaactaccttgactccactcctccagaaccccttcaccctgtggcactggctgggcaccttgtttgtcttcattgggaccttaatgtacacagaggtgtggaacaacctagggaccacaaaaagtgagcctcagaaggacagcaagaagaactgaggcctgtctggagtacgtagaccagtgtcgtcgtgagggtgggaccctgtgaaggtctgaccaccgtttcgcttttgttaatgccgagctacccgcagtgctgagccagccgtgcaaaaggaaatcttcaggaggggacttctcacgttgctcagactgacacatgtagactaaatagaaacccctcagccctaaaatagaaaaaagaacagttctagaatattaaa

SEQ ID NO: 80055 - DNA, 210 bp, Homo Sapiens
gtttgtttgtttaagtggaggtgggaggaggtagggaagaggtctgaatattaaaatatgtttatgttcatgtgttcataatacgttcctttttctctctgtgtgtgtataaaagtgccttgctcatgaatgcatttttgctattcacttcgaaaggaagcctttccccagcttggcagctgaataaaccaatagctttgtacatgcaaa

SEQ ID NO: 80056 - DNA, 647 bp, Homo Sapiens
tggcaggaagttaacctatttaacaattagagctagcatttcatgtagtctgaaattctaaatggttctctgatttgagggaggttaaacatcaaacaggtttcctctattggccataacatgtataaaatgtgtgttaaggaggaattacaacgtactttgatttgaatactagtagaaactggccaggaaaaaggtacatttttctaaaaattaatggatcacttgggaattactgacttgactagaagtatcaaaggatgtttgcatgtgaatgtgggttatgttctttcccaccttgtagcatattcgatgaaagttgagttaactgatagctaaaaatctgttttaacagcatgtaaaaagttattttatctgttaaaagtcattatacagttttgaatgttatgtagtttctttttaacagtttaggtaataaggtctgttttcattctggtgcttttattaattttgatagtatgatgttacttactactgaaatgtaagctagagtgtacactagaatgtaagctccatgagagcaggtaccttgtctgtcttctctgctgtatctattcccaacgcttgatgatggtgcctggcacatagtaggcactcaataaatatttgttgaatgaatgaaaaaa

SEQ ID NO: 80057 - DNA, 1107 bp, Homo Sapiens
  misc_feature (90)..(90): n is a, c, g, or t
  misc_feature (106)..(451): n is a, c, g, or t
  misc_feature (1049)..(1067): n is a, c, g, or t
ttgttttttagggcgggcttagaaaaccaaacagccgctttaagtctgccctttgctgctttgcaaaatgtcttccgcgtatccctgatnggtggatccggtatcnnnnnnnnnnnnnnnnnnnnnnnnnnnnnnnnnnnnnnnnnnnnnnnnnnnnnnnnnnnnnnnnnnnnnnnnnnnnnnnnnnnnnnnnnnnnnnnnnnnnnnnnnnnnnnnnnnnnnnnnnnnnnnnnnnnnnnnnnnnnnnnnnnnnnnnnnnnnnnnnnnnnnnnnnnnnnnnnnnnnnnnnnnnnnnnnnnnnnnnnnnnnnnnnnnnnnnnnnnnnnnnnnnnnnnnnnnnnnnnnnnnnnnnnnnnnnnnnnnnnnnnnnnnnnnnnnnnnnnnnnnnnnnnnnnnnnnnnnnnnnnnnnnnnnnnnnnnnnnnnnnnnnnnnnnnnnnnnnnnnnnnnnnaagaattcggcacgaggagtgacggtgatgacccagcagcaactgaaagggaggtgaggggcttcctttctgcagctgagatgcacgcagacccatctcccttgtcatgctgggcagcacaccggctaagcaggggagcagagcaccaggccgggcgcctgcccagcaggagctgatgccggaggcagtgggtgccctggttagggctgaggaccccaagataggctgaagtcctaacttgaagcacctcagaatgtgaccttgtttggaaacacagtcgttgcagattaattagtcaccatgaggtcactggggtggcccctaacccaccatgactggtgtccttctaaggagatggccacatgaacacagacacgcagggagaaggcagccgtgtgaaggagtcggagatcagagtgagggacgcatccacaagccaaggaacccaaggactgccagaaaaccaccagctgcccggagaggcaggacaggatccttccctaaagccttcacaggggggcacggccctgcttgctgaccccccggtttcagatttccggcctccacagctgtgagacaataaatttctgttgttttnnnnnnnnnnnnnnnnnnncctgagcggcggccgcaagcttattccctttaggtgaggt

SEQ ID NO: 80058 - DNA, 1494 bp, Homo Sapiens
  misc_feature (80)..(114): n is a, c, g, or t
  misc_feature (348)..(476): n is a, c, g, or t
  misc_feature (485)..(503): n is a, c, g, or t
  misc_feature (541)..(601): n is a, c, g, or t
  misc_feature (878)..(919): n is a, c, g, or t
ctgtatcgactcactatagggcgctagctccctttttcgaacgacgagcgcagcgagtcgagtgagcgaggaagcggcgnnnnnnnnnnnnnnnnnnnnnnnnnnnnnnnnnnncagtcgacggtaccggacatatgcccgggaattcggccattacggccggggacggtttccggaatatggcggggcgtttggctcttgctgcagccagagctccaggtctcgtcttcatttctgtgtcctttgttcttagaggcccagcctgtgtggccctgtgacccgcagatattgggagatacacagctaagactccaggaccccctggaagcctagaaatgatggagtctnnnnnnnnnnnnnnnnnnnnnnnnnnnnnnnnnnnnnnnnnnnnnnnnnnnnnnnnnnnnnnnnnnnnnnnnnnnnnnnnnnnnnnnnnnnnnnnnnnnnnnnnnnnnnnnnnnnnnnnnnnnnnnnnncagctaaannnnnnnnnnnnnnnnnnnagtagagaaagggtttcactgtgttagccaggatagtnnnnnnnnnnnnnnnnnnnnnnnnnnnnnnnnnnnnnnnnnnnnnnnnnnnnnnnnnnnnnatgagccatcgtgcccagccctgtattatatctttatctttatcaagttgtggtctaagtgagcatttggtatgatttcgggattattgaatttgctgaggatcgtcgtgtttctgattgcgtggtcaattttagagtatgtgacacatggtgatgagaaagatatatatactatgtaggtttcagattgaagagtttcatatatgtttattagaatgatttggtccaagtgtcgagtttaggtcctgatatctgctaattttctgcctcaaggtgnnnnnnnnnnnnnnnnnnnnnnnnnnnnnnnnnnnnnnnnnncaaggtttcctgtattaggctgacttatcctagaggcagtaacaggcacagcccacatccaggaaaagttttgataacactatttaagaagccagggctggaaagaatgtgctctggagactctcccagcattccctcaacatagggagaagagaaacaaattttcctttctcttatgattcctgtttttcatttaagcagcacattgaaggtcatgagatgcctgagcaggcctggattgcagccacctaggcaccatagtgaaggttataagataagcccatgcaaggcactagagcaagcctaggtaacagccatctgggccacatagtaagagtcatatgtaagtctgagttataaacctgtcatagtatgattaactgcttttgttctgtttctgtatccttgctttcacatcactacactttgtgccactgtaggcttgtttcaagttagcccaccctctttagaagtgtatgtaaaagttaaatgctgtctttgtccttggcccagtctctggatgttaatccactgggtctgagtgcactcaataaaatcctccttttctacctaaa

SEQ ID NO: 80059 - DNA, 1047 bp, Homo Sapiens
  misc_feature (711)..(804): n is a, c, g, or t
  misc_feature (808)..(808): n is a, c, g, or t
  misc_feature (811)..(812): n is a, c, g, or t
  misc_feature (829)..(845): n is a, c, g, or t
  misc_feature (848)..(849): n is a, c, g, or t
ctcaagccccaggtgcgctacagctgcatccgccgggaggacgtcagtggcatcgcctcctgcgtcttcaccaaatatggccaaggcttctacctgatctcaccctcggagtggagcgcttctctctctccaccaagtggctggtggagccccggtgtctggtggattcagcagaaaccaagaaccaccgccctggtaacggtgcgggccccaagaaggccccgagccgagccaggaactcagggactcagagtgatggcgaggagaagcagcccggcctggtgatggagcgcgctctgctcagtgatgagagagcggcaactggcgttcacatcgagccgccgtggggtgcagcctcagcaatggcggagcagagtgagtggctgagcgtccaggctgcgcgatgagcacacactactactgatggcctttcgggggtccctgccccaaccggagaggccggtgcacagggccccgccaggggctgggggcatcccggcttcccacaatgcagctgctctgggcctcgggagaggagagaccccagtcccctgggctgcccttcccgggcctcgtctgtctgggtcctttggtcaatgttgcacagtttttattgctcccatccctttttgtagtgggctgggttttaagttataaatgttaactgcctctgggtgaaaaagtttttaataaacacctattacctcttgnnnnnnnnnnnnnnnnnnnnnnnnnnnnnnnnnnnnnnnnnnnnnnnnnnnnnnnnnnnnnnnnnnnnnnnnnnnnnnnnnnnnnnnnnnnnnncatntcnntagcgcccccggacccnnnnnnnnnnnnnnnnnganngttggggggcccccaggaccaccagggcacagggaaaacgcttgtattttgggcaatagaaaaacgcggggagggaaaccaagtcttgcataataaaacccagaagggccccccgagggacaaataaggggttttttatcacaaggcagtacaagaggggccctggaaattaaatttgggccctaaacccttgcagtt

SEQ ID NO: 80060 - DNA, 1526 bp, Homo Sapiens
aagctaggtacgaggctggtttgaatcggcacgaggctggccttggagggcccactctcccgcgtcaagtcctcaagaagtcttgcgtcagtcattccgccggatgcgtcggagccgggtgtccagccggaagcggcacccagctggccccccaggagaggcacaggaggggagtgccaaggctgagcggccaggcctccagaacatggagctggcgcctgtgcagcgcaagatcgaggctcgctcggcagaggactccttcacaggcttcgtccggaccctgtactttgctgacacctacctgaaggacagctcccggcactgcccctcgctgtgggctggcaccaatgggggcaccatctatgccttctccctgcgtgtgcctcccgccgagcggagaatggatgagcctgtgcgggcagagcaggccaaggagatccagctgatgcaccgggcgccggtggtgggcatcctggtgctcgacggacacagcgtaccccttcccgagcccctcgaagtggcccatgatctgtcgaagagccctgacatgcagggaagccaccagctgctcgtcgtatcagaggagcagttcaaggtgttcacgctgcccaaggtgagtgccaagctgaagttgaagctgacggccctggagggctcaagagtgcggcgggtcagcgtggcccacttcggcagtcgtcgagccgaggactacggggagcaccacctggcagtccttaccaacctgggcgacatccaggtggtctcgctgcccctgctcaagccccaggtgcgctacagctgcatccgccgggaggacgtcagtggcatcgcctcctgcgtcttcaccaaatatggccaaggcttctacctgatctcaccctcggagtttgagcgcttctctctctccaccaagtggctggtggagccccggtgtctggtggattcagcagaaaccaagaaccaccgccctggtaacggtgcgggccccaagaaggccccgagccgagccaggaactcagggactcagagtgatggcgaggagaagcagcccggcctggtgatggagcgcgctctgctcagtgatgagagagtcctgaaggaaatccagagcacactggagggagaccgcgggagcggcaactggcgttcacatcgagccgccgtggggtgcagcctcagcaatggcggagaggtgagtggctgagcgtccaggctgcgcgatgagcacacactactactgatggcctttcgggggtccctgccccaaccggagaggccggtgcacagggccccgccaggggctgggggcatcccggcttccacaatgcagctgctctgggcctcgggagaggagagaccccagtcccctgggctgcccttcccgggcctcgtctgtctgggtcctttggtcaatgttgcacagtttttattgctcccatccctttttgtagtgggctgggttttaagttataaatgttaactgcctctgggtgaaaaagtttttaataaacacctattacctcttg

SEQ ID NO: 80061 - DNA, 457 bp, Homo Sapiens
  misc_feature (364)..(364): n is a, c, g, or t
tgactgtggaaataggaaaagacttctgctgaaatgctgaatgttatactgttttcttgggcccatcttaataatcatctacaaagctgcaattttggcaatatgagctggcggcctgacctaacatcattgtactttggatcactgaagtgtctcctcacatgccaaaacctgctgcactttcttcctacttcgttgcggccttcatcaaccttgtccacctctttcagtcacctgagtctctacgtgcaccgttcagtatggcagccatgagccaatgtggccaccaagtatgaagaagggagccttctgaattgaatgtaaaatgtacactggctttccaagacttagcatgaaaaaaaantgtggaataactcaataatctttgatattgcttgcaggttgaaatgataatattttggatatagtgatttaaataaaatatattattaaaatt

SEQ ID NO: 80062 - DNA, 859 bp, Homo Sapiens
  misc_feature (384)..(428): n is a, c, g, or t
aggtttgggggaaaatgacaagacagacttggatgttatacgagaaatcatagattcctatggaatgaggaggacgaaatggacatgacttgggagaagagacttgctaagaaatactatgataaattatttaaggaatactgcatagcagatctcagtaaatataaagaaaataagtttggatttaggtggcgagtagaaaaagaagtaatttcaggaaaaggtcaatttttctgtggaaataaatattgtgataaaaaagaaggcttaaagagttgggaagttaattttggttatattgagcatggtgagaagagaaatgcacttgttaaattaaggttatgccaagaatgttccattaaattaaatttccatcacaggagnnnnnnnnnnnnnnnnnnnnnnnnnnnnnnnnnnnnnnnnnnnnnctgtgaagagtcatcacataaaaaatccagattatcttctgcagaagaggcctccaagaaaaaagataaaggacattcatcttcaaagaaatctgaagattctctacttagaaactctgatgaggaagaaagtgcttcagaatctgaactttggaagggtccactaccagagacagatgaaaaatcacaggaagaagaatttgatgagtattttcaggatttgtttctatgagacgagagagagaagcctccgctccttaatgtgaaacttcatgaagttttaaacttcatgcaatttgaaattccatataagtttttatctgcaagttacagcttgtgtggtttgtctttggaaataaaaatccaggttctctcagaatgtcagaggctttggaagttcattagttcaattaaagactttcctgtccttt

SEQ ID NO: 80063 - DNA, 654 bp, Homo Sapiens
cagtcgacggtaccggacatatgcccgggaattcggccattacggccggggtagagctaaaatgcaaatgtaaataatctgactccaaaggctgtacttttttgtactagaatatactacctctttactataccataacctctttttttcttgtcagtcttacagaacaggatatattatttgttaacttaggtatcttgtggcctggcacctataacttttaagctatcttaaagtagatggttcttaacagataaattggtgattgttcaatgtattttcttcaaatcctataagaagagaaaaatctgtcatgatgggaattacatttattttttaggttggtgaatgtcattgttggctccatgtttagatttctgtataatttaaatttacattggcataaatgtaatttttttattatcagtttggatttaggtggcgagtagaaaaagaagtaatttcaggaaaaggtcaatttatctgtggaaataaatattgctgataaaaaagaaggcttaaagagctgggaagctaaatttggattatattgagcatggtgagaagagcaaatgcacttggttaaattaaggttatgccaagaaatgttccattaaaattaaatttccatcacaggagaaaagaaatcaagtc

SEQ ID NO: 80064 - DNA, 1028 bp, Homo Sapiens
  misc_feature (204)..(204): n is a, c, g, or t
  misc_feature (226)..(226): n is a, c, g, or t
  misc_feature (814)..(814): n is a, c, g, or t
  misc_feature (843)..(843): n is a, c, g, or t
  misc_feature (931)..(931): n is a, c, g, or t
  misc_feature (982)..(982): n is a, c, g, or t
cgcaagcacagtgaggccaaaaccctatgtgtgcaatgtgtgccaccgtgctttccgctgggctgctggcctgcgccatcatgccctcacccacaccgaccgccaccccttcttttgccgcctctgcaactacaaggccaagcaaaagttccaggtggtcaagcacgtacgcaggcaccaccctgaccaagccgacccaaaccnagggtgtgggcaaagacccccnaccacccccacagtgcacctgcatgatgtgcagctggaggatcccagccctcctgctcctgccgctccccacactggacctgagggctgaaagcctgccccacctcctgtataggaagagggtatggtctgagatgtgcagactgggaccagcgctagcctgaggagctcagagcctaaggaaagactggcttttggggtacaagggtgactagaaccttcctgggactctggctatagtactttgaaattatcacccatataaaagagggacatggactataacgttgatttcttattgctgtacattgcgtttttaacctgcaagttctcagtttcttcaccatcactccatcaaagtccctggctataagatctggattttacccactccatcttctctttccttcttactgtgtcaattcctattttctttcagaatcttctaaaaacagttgtatctaaccgcatgtgctgttgtgcctaatgctctataaagcatgttaaacagaaagtggttactacattatagattcatccaaatccctgtcttaacatttccaggctgtcatcttgatcaactctgtcncctctcagacctctgcctcccttttgtcncttccatcttcactcagtattgatactgaaacaggcctaggtctgccttctccctgtccttgagccatcttgacccttgacctgctcnctacttccaagctcctttgtctacctgtatctatagagggaggattgctanccactaagcctcctcctagaagcactttagctcatcatcaatcctc

SEQ ID NO: 80065 - DNA, 658 bp, Homo Sapiens
ggcacgaggaatgaaaccatcatactgaccttttcctccaaaattgccaaattgactgaactggttgggtgtttgtaaagatgacgttaactgtgtgactaaaaagtcagatggttgccatattgtttggaatatgttgaatgtcagtgtatgccttatgtctttaattgggtatgcaaaaaaatttttacttaagtagattaaaattttaacctctagcatgaaaacccagcaccaacactgaaagactccattcaggttgaagtagcctcaaacagtaatttactttttgataataggctgttgtttttcttaaataagcttaaaacaattctatctgaaattggtagcatgggttcacttggctacaactgagcaaaatagatgcaactttcttttaatggggtgctgcctctttaggactgactgtactatccactgacactggtttggcagttggtactgctgaacatttttatacatgctaccatgaagctatatatgttagtattgaagaagctaacgggtatactatcatttttgatgtgtgggctgattataatttcctgtatttcctgtacattgggatgaaactactttagcaaagtccacagatcagaaaccagacggtagtgttttgaagttgaaaccagtaaaa

SEQ ID NO: 80066 - DNA, 815 bp, Homo Sapiens
  misc_feature (135)..(186): n is a, c, g, or t
taagaaaactgaattaagccaggcagggtgcgcactactataatcccagctgctggggcggctgaagtaggagggtcacttagcccaagagtgcaaatctgccagcctaggcaacatagcaaggtcccatctctnnnnnnnnnnnnnnnnnnnnnnnnnnnnnnnnnnnnnnnnnnnnnnnnnnnntgccagtacaatgtttgttgcaattgtttccaaaactttgaaataacgaaacccctattcaaatgtaaattttacccattcccacctgatagtactgtttattactttgctatgcaggagaaacaaaacagctttttatttgtgtgtatactctgaagtcaatgtgcatgggttaaatcccacctctgcttcattttatttgtgtggctttggacaagttcctaagccctctgtgtcaggcccctcattaacaaaatggagtttatgatggcatctacctcacatggttattgtgtggttgaaattagttcaaatctgtaaagtatgttgatgagtatctggtacttggcaaacactatataattgttagctttattattatgtgttgtttgaaggggaaaaaagtttttgtagattggagaacaccatgtaagagctactaagctcaccaccttcccatccaattattactcctctaaatgaatactacttaaaagtgatggagcttctgtttgtttattgaattgctaatacaaataaatatttggctataacttcttatactcattttaattttaacctgaaatgtcattaaattttgctgataaactttgaataaattgtggtcc

SEQ ID NO: 80067 - DNA, 761 bp, Homo Sapiens
  misc_feature (326)..(359): n is a, c, g, or t
  misc_feature (445)..(460): n is a, c, g, or t
cccacgccgactgtgatcagcccctgttccaagtatcttcatactttcttggaaaattaagtggaaaagatagtgcttcttttccttatgccatcatttttactgtacccaaactgtgactttaggagcaccaatttttaagggaagaatgttggtgaaaagcacagaaaccagtgacgtttgtggctgtggaatttccatggagaaaagagagcatctgaacacctggaccatcttttgcacctggcagaccctctgcactcaccccagcgtgttctgtgaacttgagtgacaacgcgtgcttgcagggtgctttttggatgacnnnnnnnnnnnnnnnnnnnnnnnnnnnnnnnnnngcatggacgagaacatggagcaaatgttttacaacctgaacctcagaactgtgatcctccaaggagcgcgctacttgaagaaaagnnnnnnnnnnnnnnnngtcgaatggcttctcagggattttgttttccgtgcacatataagccatagttacagtacaggtggcagtatttagagcactcagatttcagttctgttaaatgtgaaagagggatcgactgacgttcattgctgttccataactagtgtaaaatatgtatatgtttatctttatttttataatatgcaaatacatttaaatttatacagtttgaagcttctagcgttagttcacactgggtgcaatattctgcatgagaactgtgccaagatggggctgatttcttattttagtataagac

SEQ ID NO: 80068 - DNA, 532 bp, Homo Sapiens
taagatttgttctattaatgcccaaatttggctttcctctactatcccccatagagaaccactaacaagtggatgtctaatattcctctggtgagttgaaggcaggagaagttgagaatcattagtttcaatgagtatccaggtgacctatcctggccctctactcagaaaccggcaatttgtcttcactctgagattcattaaattgctgttgtataactgatggttattatgaacactgacctgtgagacatatggaagataaagtttggtcttacaggaaatcttgaggagagtcaaaagagaaatgggagatgtctcttgagaggtgatcagagaagtttatgctcactgtctgatgcaaatgtctggtctatttgttagtaaataacagggaaatcattttcactttttgttaaaaataaggtatttaccagcataccttgtagttattgtgggttccgtttcagaccactgcaataaagtgaatatctcagtaaaacaaggcccgcaaaccacagatcccccttgt

SEQ ID NO: 80069 - DNA, 943 bp, Homo Sapiens
  misc_feature (198)..(691): n is a, c, g, or t
ggtatgtctccgtgacagctatccgtagccggtggtgacgggttcaacaccattgggagactcacgaatggtctacagcgacttgagagccacgctccgaggagaagcgacagttccgtagcgcaggtcgatcagaggcgcacgaggactttcaggggaacgcctgttcttatgtccttcggttcgccacatctgacnnnnnnnnnnnnnnnnnnnnnnnnnnnnnnnnnnnnnnnnnnnnnnnnnnnnnnnnnnnnnnnnnnnnnnnnnnnnnnnnnnnnnnnnnnnnnnnnnnnnnnnnnnnnnnnnnnnnnnnnnnnnnnnnnnnnnnnnnnnnnnnnnnnnnnnnnnnnnnnnnnnnnnnnnnnnnnnnnnnnnnnnnnnnnnnnnnnnnnnnnnnnnnnnnnnnnnnnnnnnnnnnnnnnnnnnnnnnnnnnnnnnnnnnnnnnnnnnnnnnnnnnnnnnnnnnnnnnnnnnnnnnnnnnnnnnnnnnnnnnnnnnnnnnnnnnnnnnnnnnnnnnnnnnnnnnnnnnnnnnnnnnnnnnnnnnnnnnnnnnnnnnnnnnnnnnnnnnnnnnnnnnnnnnnnnnnnnnnnnnnnnnnnnnnnnnnnnnnnnnnnnnnnnnnnnnnnnnnnnnnnnnnnnnnnnnnnnnnnnnnnnnnnnnnnnnnnnnnnnnnnnnnnnnnnnnnnaagaattcggcacgaggcctgtgctagcgtgttacatacaacactgtgttttcacagtcttataacagccctatgcagaagagaccatggagttgagctcagcagttggtagctattatttcaataagctgattcaaatcactctgctaaagatatgaatgactaaaggatatagtcatgcctgtcatttcagcattttgggagccaaggcaggagaatcatttgaggccagtcattagagactagcctggg

SEQ ID NO: 80070 - DNA, 748 bp, Homo Sapiens
  misc_feature (718)..(719): n is a, c, g, or t
aatgtgtaaacgagtttaatataataagtaaaatttcatcctttccatctcatttcacctcaactccacaatcatgtcccataatgcattcacaaatcaaatacaaatgattttaggactatccatagtgcagcaagcaagcaggtggcatatcaataagttaaacatattactgagtccacaaaatacttgagagtattctctagctctcacctggagttctgggacagaaagcacagattcctcagaagctgatgacatttcatcttcctcattttgggtgaggtcatcaaagtcatcttcttcctctttttctggcctatctttctctcctccagtttctggtccaactggggtccccactgactgaccatcaacactggatgagtctttgggcttccctgggggctactaagcctcacttcaggattcatggaggatgaagcattatttggtgatcctttgccctcatctccccccaagtttccttcattgggggttcttgagaagatgaaggggttttagttggctgaatcctctcttcttccttctgtaagattgtctgtttctttacctctctagcactgctcaactcctcacttggggagccagtgtctaattccacagtgtgttcttccttgatgtcatcacaaataccgtgctcagggtgttaccagtggacggtcttgactacaagttgtccaggttcttggcgtanntgacagagaatggaacaaatgcacaagca

SEQ ID NO: 80071 - DNA, 652 bp, Homo Sapiens
tccaccaatcatttcagttctattgcagtcctggtgccatatgtcccctgcaaattgtgaaagtaattagtgacaaaatagcagcctgctccttttcaatggcgaaactgtcggcattagcagttttgggtaagctggcggtactataacacgtactggaaacctgttcctcatcaccacctaccagattctggaaatgccgtcttctagaaaacgatggcgtttgtggtggtcttcttttgaaaggaacagtaatttgtgtggatattgttaaagtgtttaaagaatattttgacaattaagtttacattttacaattgctttattttttattaaaatagttgtatataaatattaccctatttcactgttgttcaagtaaatctaaaccttgtagacaagtgagtcatctgatatgtatagaagctgtgatatatagagtacatttattgtgtaaatgtttatgaatataattgttcctgtgtttttataagttggggatattttgttgttttacggcaacaaaatttattgcatttaaatggtttttatgtaatagaaatcacgcaaaatagtgaaggatttaaaatatgtatatgatacatgtaaatgtacaaactttagaaagaaataaatccaacaaatttcaatc

SEQ ID NO: 80072 - DNA, 1065 bp, Homo Sapiens
  misc_feature (62)..(62): n is a, c, g, or t
  misc_feature (277)..(277): n is a, c, g, or t
  misc_feature (299)..(368): n is a, c, g, or t
  misc_feature (995)..(1025): n is a, c, g, or t
tccctatagctgtgacccctttgtttcaccgtagcaccaaagcttggttctatgaatcttantgagtgatggatgaatgaatcccatcttgacatggttgatgtcacccacattgacccaagtctccaacccaggatcacttgggagatctgagtcataaattgaaggtctgtatcattcctactcaaagtgtgtcccataagccagcagtggctatatatcttgggagcttgtgcaaaatgcagaatatgattttaacaagatccccaggcaattnatatgcacattacactttgagnnnnnnnnnnnnnnnnnnnnnnnnnnnnnnnnnnnnnnnnnnnnnnnnnnnnnnnnnnnnnnnnnnnnnnttctagaccttcatttgctgaatggagtggtccctgtgtgattgcctacaggtttcttctagtctcccatttttcttcctagttaacaaagcccaaattttgtttggaagggtgatcagcccttcacccatcaggcctttgcctcagggaagcttgaccccacctttagaccccatgttgggcctgagtagtccaaaggcatatcccattcccctggccagggattagtttagggatagacatgtgaccaaattcagctcaataaaatgtgagtctgcaggggcaatctagaaaaagtgtcctcttccctaagagaaagccacaggaggggaaaaaaatgtctcagaacattgtcctgcctaaacatgatgcctcggacattctgcttctgtcttgctacctgcagcacaaggaaatccaacactgaggggtcacagcagagggacggaaagcacctggatcttacaacattgttgagctcttttgtctcttgacttctagttatgagatgtaattttcttactgttaaagtcatttctgttccttgcaaccaaaagcattcattgatacactgaatatagtacaatatttattcaatcaataaatgcctggcaaattacccaagtnnnnnnnnnnnnnnnnnnnnnnnnnnnnnnncctgagcaggcggccgcaagcttattccctttagtgaggg

SEQ ID NO: 80073 - DNA, 775 bp, Homo Sapiens
  misc_feature (755)..(755): n is a, c, g, or t
catagtgaaatatgtatctgagaagctcccttattagattaccaagctgaggccatgaaaagaatgactattggccaacatttctttgcttttagttcaaaaggaaaatgaacttgagaaaaataacatctgaatagaatttcgcatgtttttttaaattagatttcttacatatttttaaatacacttaaaacactagagaatattttaaatacattctacagctcaaatatagctactattcacttttaaaaagttaaaacagcattaaaagtgacagagctgcttcagtaataatagtgctatagggaaaggtcatttttgcaaatgtgtgtaggtacaataaaaaattctagcattaaatgcaccaaaatattagtagggattaggactgggtgatgatgctatgggcaaaaattttcagttgtttttattcctttatgctatacagagttgaatatttactacttttgaattttaaaaatggaaaaaacagcactcaatggcccaattaaatcatttagtatatactcttgacacagtgctatattttacctttcataatagggatttttgacatttttaagaggtcagaataaagaaatacaagaatggaactaaacttagggataatacttccctttccttaattttcttgccagggaggaaacacgtggaactgaaaattaaatgggcttcaggtcaagggagctcgtattcagctgacacagaagacgatttcatttgattctganagacaggggcagtcgcctat

SEQ ID NO: 80074 - DNA, 1269 bp, Homo Sapiens
  misc_feature (41)..(41): n is a, c, g, or t
  misc_feature (148)..(148): n is a, c, g, or t
  misc_feature (817)..(845): n is a, c, g, or t
gagagagcccatgtgtggtgtgtgtgcccctgagaacttcngttggactgcccttgggagcccgcaggtggccagaggcaggggtagctgagttcctggagaccccttttttgcccccaggttccccagagggcaacgccatcagtangcagtgtggtgtttcaggcagagctctggccaggctgtgccagtgtgccccggacgcatcactaaggaagagagagtttatttagtcaactggcccaaggcagcgaggcttctacagtcccacaccccatagccgcctgggctggggcttactgggggctgaaggttctggacatgaacaagggtcaggtagaagagaaaggcttcccctacaccccagcctcctgctgtcccctgaagcccaggactgcgttgtatgctttccatccactcaccttaccccatagcatcttgcggcccagaaaccagagccatttgtctcagaccctaaatcaataatcacaaaccccaaaacgggagagagcagtgaaaacatgcagggctgtggacgggggaagggttgtggcgggtgttctgaggctgagaggacacctatatgcgtatttcctctacacacatcaccccccttctataatcttaagccatgactagcctggtggcgtgttagtttctgcccagttctaccccctcatgtgcttcttctgaatactgaatgtgactgtttgaaagctggtagaattcatccctcttactgtagataacactgcaaatcttggaattttgttttttgctgtttccagatgtatctataaatatctatacattatannnnnnnnnnnnnnnnnnnnnnnnnnnnnacatcgggtcctcccatgtgtggtgttcttctggaggttgtctctttggtcaaggtgaacttttaatgtttattattttcttctccgcacaaagtaaagagcctaattttgtgtattctggtggctgctgtcatgagatgataaaatgtaaaacaaaactctagtcaacgtagaaagagttaactgtgctgaaaaactaataaagaacctaagaagaattccagtgtggtgatgccatgcccatcatgggaggcttttggagaaacagaatgtttgggcaggggctgctggtgctgcttgggttttgggttgagggtgctaggagaggatggtctccacccatctttctatttccagtacacgtcacattattttaccggtgagatgagaatgtcacaaacattaaaagccttatgtgctcaaa

SEQ ID NO: 80075 - DNA, 703 bp, Homo Sapiens
  misc_feature (12)..(12): n is a, c, g, or t
aataaggcaggnccaactccgagagttcattgacaacggcagcaaaaagcccctgaattctgtactttcttcccccagcctccttctccagcaaggagaatagcactcctccctccagaagccagctccctaagttggagccactatgtaagagaagaggaacgttcactttttaaaattcatatatttaaaaatcaagaccaaaaagtaaattctgtactcctattattgactgtagtcaatcaaacataaaaaggtgaaagtaaaatttaattttttacccttattttactgaccaatatggaagttcttggtatctttaaggctgaccttcctggtattgtgtaatgattgaatgtatctaaactgtaataatttgaaactgacaaacataaccttctcagacttacaaaactatgttctttctaaagatacagatttttattattttattttgactaggaaggatttataaataaatgtaatgaaaaatctttgatcttaataaagtaccttcaaacagtgtgtgtacttacttgaaaattgtttttgcacttggatattctattttattatactactattgtgatctattccattatactatttcccatggtagaacaaattatattttctactgtgatatgaagtgatgtaattgaacttgccatgtctaaaattaaatttcatatttttttcaatc

SEQ ID NO: 80076 - DNA, 253 bp, Homo Sapiens
gaggaagaagcagctttgctgagttcatttatttactgacccgtcccttgcattccctccatggttttgaaaccacagacagtgtttgctggtgctgtcagtgatttttaccgtcactagcccagccaggcttcagtctgtccgacaggaagctgctgggtgggggtggggggagaaaaggcagataattaaaccatctcatcgtcttgcaggtcggagactacgtatgtaatcctcactctttggacagaaa

SEQ ID NO: 80077 - DNA, 335 bp, Homo Sapiens
cagtactcaagtatcagaaaagggtagccctgtacattgctgctttttgtgggtacattgaactcactgaatgggccctgaagcagggtgcgcggccccacgaggcagtcggtgttcacccctatcgagcatggtgccatgaagcccttcatgcagatgtctctaaatgccccattcatgcagccgcagaagcaggccaactgttgattctgaaggcctttgtcaactacagtgtgctgtgcctggaatgcaaaaatgcagcaggacaaactcccctgaccattgtgttcaaacacaagcataaagactgtgtattatatttgctcagtaaaaaa

SEQ ID NO: 80078 - DNA, 2088 bp, Homo Sapiens
gaacaatcgccagatgctgccagtcattaggagtaccgctggaggagactcagtgcagatctgcacaaacccgctggacaccttcttcccctttgatccctgtgtgctgaagaggtcaaagaaattcattgatcctatttatcaggtgtgggaagacatgagtgctgaagagctacaggagttcaagaaacccatgaaaaaggacatagtggaagatgaagatgatgactttctgaaaggcgaagtgccccagaatgataccgtgattgggatcacaccaagctcctttgacacgcatttccgaagtccttcaagtagtgtgggctccccacccgtgttgtacatgcaacccagtcccctctgacggcagaaatttgtgactgagatgtgacatttgggattccccatcacttgtcatgccctcagcacccagcttgtgccattgggcattgatggcattgaactagagcgagtgcctgcctcggctgtggcacttccaggttcgactgaatcaagcatctgaagactgggtttttttgttgttgttgttccccttacagacaaaatgaagactatcatgtgcaatcttttacagtggggttgatgatacatttggaaggatttgcttgtttaatatgtacattttttgtgttaacagctttttgacacaattactgggtaatttctaatataggcagcagactgttttacgggttgctgttttaacatgggtttttgtcagatccatggtcttaggacttgactgatgagctttcagtgaagaatcctctaagataaaacttctatttaaagactttaactagaaagtgtttattttggctacattgttcaccttctgctgtattggtatttgtctgttgggatttcaagggagtgtagagaagacagaaggaaagctgagagctggcccgacatggtctgggacacagagttggagctggcactgaagatctccagggacttcagagaccaataaaagcccatagggaagagagagaggatatagggaaacagaatcagatgtgtaatatacttggcacagcgaaaaaatggatttaaaagacaaaaatggaggtccaggtagatgtaattcacacagactgaaagtgagttcgggcttgtgtaaaacacatgagattggatttgaccccttggctctcaagtgtccccttagatctagaactgctccttggtggccattagatcgagtcagttttgatctgcatcacttagttattgggaatttctttgtcggaaacaggaaaatttttttagattatttggtgtacggttttgctcacaacaataggtggaagttgctagtgcagtcttggtctgatggctgtgtgcatcgcacattcggcttggtgaaatccttctctaaagcctctttttgtatttttataactaaacagaggaagtcttcagaagacctcgctttaaaacaaatttgtgcaaacactgctagagtcattttgaagctcaagcattttcactttgtttcttacatgtgtacttttttgtttacttgtgaaaatggccatctttaagcatatttattttctgccactttatttaaaggcaagcaatattttcttgatcataaatattttgtaatgaaatacttcctcttttccagggctttgtatgcacttgtataattacattgatggcaatgtagagtttgaatttcagtctgtaaatacttttttggaaaatagaaatttttattgctttaaagttttggatatgggtggttttcttttccgggtttggtggaaagtaatttgagaactttaaggttgtctttttaactgctggcaaaatgttgattttttaatattagataaaacgagtaaacgaaattccccagaaattagtagtaagtggggtctttgtgggttgggaagtagttttaatgtagaaagacatttacatataagtctgtttaatttcaaaggagtttgtgaaaaaaaatccatggtgaaaatgaaacaatgacatggttaatctggaacttacgttcttataccaataaaaggtacctcaatacatgttctttcaaaa

SEQ ID NO: 80079 - DNA, 973 bp, Homo Sapiens
gctaggtacgaggctgggtgttaatcggcacgaggaggagatgcaggagttcacccgtagcttcttccgaggccgcccggacctcagcacgcttacgcattccatcgtgcggcggaggtacttagctcactcgggccgcagccacctggagcccgaggagaagcaggcactgaagcggctggtggaggaggagctgctgaagatgcaggtggatgaagccgcttccagggaagacaaactggaccttaccaagaagggcaagaggcctcccaccccttgtagcgacccggagagaaaaaggttccgcttcaattcagagtcgggctggctcaggtcgccgtggagaggaccacccggctgtgatgaggctgaagcgctacattcgggcctgtggtgcccatcgaaactacaagaagctgttgggctcctgttgctcacacaaggagcgcctgagtatcctccgggcagaactggaagcgctaggcatgaagggtaccccttccctagggaagtgtcgggccctgaaggagcagagggaggaggcagctgaggtggcctccttggatgttgcgaacatcatcagtggctcgggccggccacgcagacgtacagcctggaaccctttaggagaagcagcacccccaggggagctgtaccgacggaccctggactcagatgaagagcggccccgtcccgcacccccagactggtcacatatgcgtggcatcatcagcagtgatggcgagagtaactgagctctgccacccccaggagggacccttgatacatgtacaaagcatacatagcaccccttgccctgtgtctgtggaacagaagcagcttccttcagagaagactgcagctcccaaggacacaagctgttgggatgctacttctcagcttcacgctgtccctttaaggtgtttattttttaagactcaataaaggagtgtttttaatcacctcatcaaaa

SEQ ID NO: 80080 - DNA, 1386 bp, Homo Sapiens
tctgctcgcgaggatgccttttctcttctgccttgcgaaataacagcagcctagctgttgcccgtgaccagtgagaaaggcagcgtcgcgggctgattaggtttcacccaaagggtgccggcgccgaattggtttctaacgagaacttttaaaatgatccgttccaaaaaagggtaggagccgcgagaccctccaactgcccagagaaaacaagtctcgtctggcaaagttctcggcccacgcggtccgcggccaagggccaacgtccctcgccccacgttgccgcagcactgcgcgtgcgcgagccgctgtcaaacgcgctgacggaggccgagaagaaaaaaaggcgggagccgtcaatcccgggttgagcaaaatggcgcgggagaaggagatgcaggagttcacccgtagcttcttccgaggccgcccggacctcagcacgcttacgcattccatcgtgcggcggaggtacttagctcactcgggccgcagccacctggagcccgaggagaagcaggcactgaagcggctggtggaggaggagctgctgaagatgcaggtggatgaagccgcttccagggaagacaaactggaccttaccaagaagggcaagaggcctcccaccccttgtagcgacccggagagaaaaaggttccgcttcaattcagagtcggagtccggctctgaagcctccagcccagactactttggacccccagcaaagaatggggtggcagcagaagtcagcccagccaaagaggagaatccaaggcgagcctcaaaggcagttgaggagagcagtgatgaggaacggcagagggacctgcccgcacagaggggagaggagagcagtgaggaggaggaaaaggggtacaaggggaagactaggaagaaacctgtggtaaagaagcaggcaccaggcaaggcctcagtcagtaggaagcaggccagggaagaaagtgaggagagcgaggcagaacccgttcagaggacagcaaagaaggtggagggaaataaaggaactaaaagcctgaaggaaagtgaacaggagagtgaagaggagatcctagcccagaagaaagagcagagagaggaggaaggtggaggaggaacgacaacgaacgaggatgagggacaaccggggattggcgaaccccggaaccagagcaatgcgcggcgaaagtcagcacgggaggaggagggctgtaaggcagaaagacagggaaggagccgggaaaccccaacgcgcgggaaggcaaagagcggcgcccggcgtcccgggggcgttggatcccggcaggcgggcgccgaccctcgggcacgtgcggacccccagagaaccgggtggacccgcggccaaagccatggccggcgggcgcagtc

SEQ ID NO: 80081 - DNA, 1408 bp, Homo Sapiens
  misc_feature (638)..(719): n is a, c, g, or t
  misc_feature (1192)..(1332): n is a, c, g, or t
gtcttcccaacacagccaggtctataccttgaacagtacaggtccccctgggtgcagactcagtaatctgccatactgctgatgatccacgcatatggaccatctgggtcgggacgggccgctcttcatctgagtccagggtccgtcggtccagctccctggggtctgcttctcctaaagggttccaggctgtacgtcctgcgtggccggcccgagccactgatgatgttcgcaaacatcccaaggaggccacctcagctgcctcctccctctgctccttcagggcccgacacttccctagggaaggggtacccttcatgcctagcgcttccagttctgcccggaggatactcaggcgctccttgtgtgagcaacaggagcccaacagcttcttgtagtttcgatgggcaccacaggcccgaatgtagcgcttcagcctcatcacagccgggtggtcctctccacggcgacctgagccagccttccctcctttggcctctggacttccatctgaggaggaagaggagcttcgtgtcctgcctttcctggagctcttcttggcttttctgcttacagctcctctcctccctagctgactttctccggccattgctcctggttctgggtttccaatcccnnnnnnnnnnnnnnnnnnnnnnnnnnnnnnnnnnnnnnnnnnnnnnnnnnnnnnnnnnnnnnnnnnnnnnnnnnnnnnnnnnactctcctgttcactttccttcaggcttttagttcctttatttccctccaccttctttgctgtcctctgaacgggttctgcctcgctctcctcactgtcttccctggcctgcgtcctactgactgaggccttgcctggtgcctgcttctgtaccacaggtttcttcctagtcttccccttgtaccccttttcctccacctcaggcctcagcattgtttctgcagcttcaactccttactcctctgtgctgtgagagctctgtgctcccacctctggctctgtcacccacagccagtgtgaataactccacaaggtgtcaccaagaccttccacctccccaggctctctgttgtgcaaaagggattcacacacctagagacagggctggagctgggtggccatgggactgacctagagggacagctcatatgctccaccattcttgagggcatctacttcccagctaacatgtnnnnnnnnnnnnnnnnnnnnnnnnnnnnnnnnnnnnnnnnnnnnnnnnnnnnnnnnnnnnnnnnnnnnnnnnnnnnnnnnnnnnnnnnnnnnnnnnnnnnnnnnnnnnnnnnnnnnnnnnnnnnnnnnnnnnnnnnnnnnnttttaaaatcatccaggtgtgcacctgtagtcccagtactcagaggctgaagagggagcagcggcgatcctctaga

SEQ ID NO: 80082 - DNA, 757 bp, Homo Sapiens
  misc_feature (107)..(117): n is a, c, g, or t
ggggggagcggcacggcagccactgcttggggtagcgggagggcagactctgggcgccactcccgggccggtcatgaacgggccggcggacggcgaagtggactacnnnnnnnnnnntaccggaatctgaagcggaagctcaagttcctcatctacgagcacgagtgcttccaggaggagctgaggaaagcgcaaaggaaattactgaaggtgtcccgggacaagagtttcctcctagaccgacttctgcagtacgagaacgtggatgaagactcttcggactcagatgccactgcatcatcagataacagcgagacggaggggacacccaagttgtctgacacaccggcccctaagaggaagagaagccctccgctggggggcgccccctctccctccagcctctccctgcctccttcaacagggtttccccttcaggcctccggggtcccctccccatacctgagctcgatggcctcctcccgctaccccccattcccttctgactacctggccctgcagctgcccgagcccagtcccctgaggcccaagcgggagaaacggccccgcctgccccggaaactcaagagcgcgcgctctggctgccgtgcggaggagctggatctgggagaggctgcgggcagggagtccagttaggaggctgggaccgcagcccagatggcggtgggaccccccgactgccctgtgggagggccgctgaccttccctggccgggttctggggggctggggtccgg

SEQ ID NO: 80083 - DNA, 1370 bp, Homo Sapiens
tgtcccgaccccagccccagaaccccggccagggaaggtcagcggccctcccacagggcagtcggggggtcccaccgccatcttgagtttccggggcaggcggggccgtttctcccgcttgggcctcaggggactgggctcgggcagctgcagggccaggtagtcagaagggaatggggggtagcgggaggaggccagcgagctcaggtatagggaggggaccccggaggcctgaaggggaaaccctgttgaaggaggcagggagaggctggagggagagggggcgccccccagcggagggcttctcttcctcttaggggccggtgtgtcagacaacttgggtgtcccctccgtctcgctgttatctgatgatgcagtggcatctgagtccgaagagtcttcatccacgttctcgtactgcagaagtcggtctaggaggaaactcttgtcccgggacaccttcagtaatttcctttgcgctttcctcagctcctcctggaagcactcgtgctcgtagatgaggaacttgagcttccgcttcagattccggtatttttttcttgtagtccacttcgccgtccgccggcccgttcatgaccggcccgggagtggcgcccagagtctgccctcccgctaccccaagcagtggcgtagcagcgacgcggtgacgccacaaaatggcggacgctggaaagcgccgttcctgactctaatgtacttagacacttgaagccacaaaaggatttatccccgaggttcctcatctgctcgcgaggatgccttttctcttctgccttgcgaaataacagcagcctagctgttgcccgtgaccagtgagaaaggcagcgtcgcgggctgattaggtttcacccaaagggtgccggcgccgaattggtttctaacgagaacttttaaaatgatccgttccaaaaaagggtaggagccgcgagaccctccaactgcccagagaaaacaactctcgtctggcaaagttctcggcccacgcggtccgcggccaagggccaacggtccctcgccccacgttgccgcagcactgcgcgtgcgcgagccgctgtcaaacgcgctgacggaggccgagaagaaaaaaaggcgggagccgtcaatcccgggttgagcaaaatggcgcgggagaaggagatgcaggagttcacccgtagcttcttccgaggccgcccggacctgcaggtgcccagggggttggacgatggggttggaaagggcgcggtgtgggtcgggactccgtcctgacaccatgtccctgcagcacgcttacgcattccatcgtgcggcggaggtacttagctcactcgggccgcagccacctgaagccacaaaaggatttatccccg

SEQ ID NO: 80084 - DNA, 1079 bp, Homo Sapiens
  misc_feature (99)..(107): n is a, c, g, or t
  misc_feature (839)..(839): n is a, c, g, or t
  misc_feature (843)..(843): n is a, c, g, or t
  misc_feature (859)..(860): n is a, c, g, or t
  misc_feature (863)..(868): n is a, c, g, or t
  misc_feature (909)..(909): n is a, c, g, or t
  misc_feature (987)..(987): n is a, c, g, or t
tccggatggagccctgcttggggtagcgggagggcagactctgggcgccactcccgggccggtcatgaacgggccggcggacggcgaatgtggactacnnnnnnnnntaccggaatctgaagcggaagctcaagttcctcatctacgagcacgagtgcttccaggaggagctgaggaaagcgcaaaggaaattactgaaggtgtcccgggacaagagtttcctcctagaccgacttctgcagtacgagaacgtggatgaagactcttcggactcagatgccactgcatcatcagataacagcgagacggaggggacacccaagttgtctgacacaccggcccctaagaggaagagaagccctccgctggggggcgccccctctccctccagcctctccctgcctccttcaacagggtttccccttcaggcctccggggtcccctccccatacctgagctcggaacggggccaggcctgactgaggagagcaaagcccaggacagcatcctgctgctgcccggcccttctgtgctcgggagccccgggagccgcactcatcaccatctctttggtttttccatcctccttctgtttgcatttcttcccccaccctcaccccggtccattccgcctcccatctccatccccgctcccgcccgcagctggcctcctcccgctaccccccattcccttctgactacctggccctgcagctgcccgagcccagtcccctgaggcccaagcgggagaaacggccccgcctgccccggaaactcaagatggcggtgggaccccccgactgccctgtgggagggccgctgaccttcctgggcggggnttcntggggggctgggggtnnggnnnnnnccctggcccccccttcccgccccggggggtgggccgtcggnccgggcgtggttctcggtctctccgggcgccggttccctcttttgcgcgccgccgtggcctttgctcctggctggggntccttgctctctgtgtgtccgctctcccccgtgtctgtcgcgccccgttctcttttgggcccctctcttctcccgccctgtgcgtgcccccc

SEQ ID NO: 80085 - DNA, 1421 bp, Homo Sapiens
  misc_feature (1103)..(1103): n is a, c, g, or t
  misc_feature (1305)..(1305): n is a, c, g, or t
  misc_feature (1314)..(1314): n is a, c, g, or t
  misc_feature (1349)..(1349): n is a, c, g, or t
ataagaaatctctaaaatttaatgacatttcctgcacctatagtgaaggcggaaatacaaacagtcccttccacgaaaacgaggtgctattacaatcacatttctcatcagcccttttcttttttgcaaaagtgtttatcctagtgctgcggacttacgacaaacgtcaacagttaataagataaccaaaaactgtgaaaatcaaacgttcctggaatgcatcggagcttcacactttagtccttcgcttgagactcaaaggccacatggccagataggtctttcacctctgcaaaccgttaaacatccttccagtaagacataatcgttaagcccacggtgttaaagaaacccagtgagctgttccccgcaggtcaccgcctgcctccaccctcctcccgcgcactgaaggcaaaacacttagaccggaacgagcgaggccagaggagacaacaactcccagcaggcgtcgcggcagcgggaagtcacgcacgcgcaacccaggccacaggagtaaaatctctctgccggtcttctgggaagggagaatggcggcgcccgggctgcggctgggagcgggaagactctttgaaatgcctgcggtgctagagcgactgagccgctataatagcacgtcccaagcttttgctgaggtgctgcggctgccgaagcagcagctgaggaagctgctgtacccgctgcaggaagtagagcggttcctcgccccctacgggaggcaagaccttcacctgcgtatctttgacccaagcccggaggacatagccagggcggacaacatcttcacggccactgaacggaaccgcatcgactacgtcagctccgccgtccgtatcgaccacgccccggaccttccgcggccagaggtgtgttttataggcagaagcaatgttggaaaatcatctctaatcaaggctttattttcactggcccctgaggttgaagtcagagtctccaaaaaaccaggacacacaaagaaaatgaattttttcaaagttggaaaacattttacagtggtggacatgccaggttatggctttagagcacctgaagattttgttgacatggtagagacctatcctaanagaacgaaggaacttgaagagaacatttttattagtggatagcgttgttggaattcaaaaaacagacaatattgccatagaaatgtgtgaagaaatttgcattaccttatgtgattgtattaacaaaaattgacaaatcttccaaggggacatctttttaaaacaagtggcttcagatcccagaaaatttggtaaccatganaaactccanggatggttttccctcagttggttttcttggtaaantgctgtggacctttttcctggaatcccaccctggttgaagaatgcttttataagcccaggtgggtaacccgg

SEQ ID NO: 80086 - DNA, 840 bp, Homo Sapiens
ggaggagagaaaattcctattcagaaatgatgtgtagatcccatttcaaaggctgcttcctgcccttgtgcgctaggatttgattttcatgtgaagggttatcagtgccattccagccagccttccatgctggcctgagtggcccactcagggtccgggacaggcatactcatcggaccagtcggagcagtgctgtacatggtcgcggcagagatgcctcggtatacagtcgcagtacttgaagaaggttgaaggacagcgccaccacccagggccgcagggtgggcacacagtcactgggctcacttcatctgaacagtccccgcagttgttagtgccatcacatttttggtctggagtagatccaggaggccgggtctccacagtgcgccacaaggaagtgggggaggctctggggcacatctcggcacaagctatcatcctcgtcctcgccgtgggtacaggtgcgaacgccatcacagaccccactggctggaatgcagctcctctggtcatggcacaagaagcctgtcctgtttgtcagtgttatacaagcttgggctcctggggtgcatgatgggagtccaagaatggtgaccaaggcgatgagggccgccacagttgccaggaggagcagcagagaggcagagaggcaggccccgcgacgtgagcagcagaggtggccgccgcctgcttcccctccagggtgggctttggattcagcagcagtgtagccattctctccctgggggaagaccttgttcatgtcttcggtttcctgctgcccgactggggctgtgtgcagagagctcagcacgggttccctgcattgtcaccaag

SEQ ID NO: 80087 - DNA, 756 bp, Homo Sapiens
agcatctgcatatttcatataattctgtacaccattttgttgtaaatacgagggtgcttgtgttctataaaatctctctgttgaatccaagtatgccttctcaaaattgtccctataaatttgaagtttatcctcaggattagaacaaaggttaacataggattctcttactccaataaccagctgagaatcaaaagcttctcccaatctctcagcatgtaccagcttcattgcactatcttggagtctgtcttttatgtttgaaaagattgactcattccatgtatcaagcataagctttcgaacaatactgtcttccacatttgattttttattgctgccctgtttacccattaaagtaatctctagttgacaaaaaggttttggtaaaatatcacattgtgtaaagaactttcgccattcaacaatatatgcttttagcaaagccgtatcatcttgatggctcagtactcgtgcctgtgcctgcttaataaactcaagaatatcttcttttaaagcctgatgaatttttgctgggcctttatcatcccaaagacagactgcatgcacatccgaaaacagatcaaaccactgctgttttgtaacagattcctggcgtaaaagcttcaaaacaatcgggcgcataaaatcccatttgtcttcaaactgaagagaacctttattctttaacagattagacgtcgccatgttctttaacttggactctcgcgagacgacgcgagtctccgtcgaact

SEQ ID NO: 80088 - DNA, 537 bp, Homo Sapiens
gatgtggtgtgtgtagtggtctaagtatatttacatatacatagacagagagattgattaagcaaatgtggccaaatgttaacaattaaatgttaccagctgaaaagagtacttgagagttgttggtgctattgcagtttttctgtaagcttaaaattagttcaaagtacaaagtttaaaaaccagaaaaatgaaggccaaatatagacatttttcagacaaacaaaagctgagagaatctgttggcaatagacctgaactgcagaaaatactaaggaagttcccggggtttaagagaaatgatcccagatggcagcctgcatctgcaggaaggaagaagagtgctagaaacggcaagatttctaaatgacactttcagactgtaattcaatatggtggattaagcacatgtgtttagctcctctccctcctaactccaaaaaacgactgtaaagtctaaagttataaatccacaaaaataaatagaagacatcagttgattaagagatttcaacatctaccaggggttgggaggga

SEQ ID NO: 80089 - DNA, 2879 bp, Homo Sapiens
  misc_feature (2161)..(2161): n is a, c, g, or t
  misc_feature (2168)..(2196): n is a, c, g, or t
  misc_feature (2543)..(2543): n is a, c, g, or t
ggatctttcaactgttcagtcccttgcagtgacacagtgcctgtaattgctgtttctgtgttcattctctttctacctgttgtcttctaccttagtagctttcttcactcagagcaaaagaaacgcaaactcattctgcccaaacgtctcaagtccagtaccagttttgcaaatattcaggaaaattcaaactgagacctacaaaatggagaattgacatatcacgtgaatgaatggtggaagacacaacttggtttcagaaagaagataaactgtgatttgacaagtcaagctcttaagaaatacaaggacttcagatccatttttaaataagaattttcgatttttctttccttttccacttctttctaacagatttggatatttttaatttccaggcatagcaatgttatctattttaatgtgtatttgtcacaataacagaacatgcaagaacaatcattattttattttataggcatttgattactattctagacttctggtatcttcttactaacataaatatctcaagtagaaaagtttttgaaaactaacatttaaaaactaatcagttacagtaaagactttgaaaaagaaatgtacttgttaggaagtagcttaattaccccccattgcagtattattgttatatatatagttaatatgttgtacatcacaataatatataattcagtctctagtttccctagagtcatttttgaaaacactgattgcaaacctccctgacaatttttaaaagtagtaaaccacattacatttatctttgtaaaaagatttatgggaaactggtttcttacctgacttttataaatagtattttacatcttatttttgcctttatttcataagtaatttaaaaatcactggattgctttattatattcagggcaatatggattatttttataccaaggatttgcatcgtgaattacattaagttatttggcaatttataatttattactactttaaatcaaatgtagcattatcacactgtatttaaattgtcattttttaaaggaatattttcttcttaagatatatagaggattttggagaagagagacaggaggggtaaaaccagcttaaggttcagcgagcagaaagggacctgagaggatgctcactgtaagactgttggacagtggtgtgtattgaggggatgaatcggaacgatagtctcatgcagaaaatagtgagattaagatcggcccttattgtttctaaattatttcaatccagaggaaagtgatacgattgaaatgaaatcacatagttcgggcctcagaaatttctattttggtatgtttgtattagcctttagaaaaaacactccgtttcagaattgttcacagttttatttcttaggtttttagagttcaggatttcatttattaatttcttcttgcttttttggtggaaataggctttgttgtaaacattaagaatataaaatctcctctatataaaaacaagaattttgttaaaaagagaatttgaatcccttcctatactataaaatgctctatagggagacaaagtgtttcttttttcttttatgtttactgtttatgtggagtgagatataaggctcttggatgtataacatactcaaaagctgttacactttctctgatctgctgtgatccactgaaaatgtgctggggtttgttctgctgtcactgtttatgctgctggaacttagcactgtcttgatttgaagcatatgattgagagccatttgaagcaatcttcattaatgcagataaaacaagtttacatgtgcagagttagaaaatgacatgttcaattctgtaagtggtgactttttgagcacctttcagtattatgtatttgtaaaaaccattgtttttggatataaagctaataagcactttaaaaaggaaaaggcagcctttactattttttctggttgagtcattgctctttagacctagcatcagcaatagatttcaaagataagtattaagcgctaccctaaagtgtgtaagtttttcattttgtcatattgaaaaatgatttgcatagtactgaatgttgacacacagcttatatgtatttacaagaatatctttaagtgtttttttgacacattaaaataaaggaaataaggaanaaaaccnnnnnnnnnnnnnnnnnnnnnnnnnnnnncatgaccacccgccctcatcccctcacaaaagctattctaaaccaattctctgtgggaaccacggccaccacatagttgaaagtggacgcatgcataccaggccggccaatccgttgggaggaccctctggctccctgccccctggggggcattaaaaacatactccaacccaaatgggcaacaccccgccccgctcgtccaaaaccccgaaacctgtctttacgacgccacaaacccccccacaggggccactcccctcaaaggggataaaatataagggggaaaatctattattacaaacaatggggcgagtactccacatggcctgtaagatcccccgactttnttcttttacaatctttatgtgcctgtcttgggtccctcttgtgttcctcactccaccttactctacccagtaacaccgcgcggcggcgtgaaacatcaagactctaacggcaccaatcctcgcaacacaaaaacaatggcaaaacacaccctcactgccctcataaaagcccctccgaccacatctctgagacgcccgcgaagagacccgccaccagcgaagcaccaactcactcgatgaacacacacaacgacggacccgacacaggcccacaataatacagacgtccacgagccccctattgctgacaattacatacctttaacgctccgcccc

SEQ ID NO: 80090 - DNA, 983 bp, Homo Sapiens
ccaaacaattaatttataaaaataacaaaacatttgtctatgaaaaaaagatcaggattcactctcatcgacgtcctcatctggatggggctcaccatcccccttttcctgctgctgtttcttccacagtttggccatggccagaagtttgaggttaggttggttggcaccatcttctggaaaaatgtaatcaaagtattcttcccaccctgcatcagacccatcatcagtctggacctttcttctcttcttgactttctctggcatgagttggtctactctctccttatctgaagctgttccaaattcttcttcaaaacttcgccaaaattccagcagcataagtctctcttccttttcttcacagtttcgcatggttttgttagcttcttcataaatttgtctgcatttagtcaaacttccttcttttcctgaagacaactcaaactgagcaaagctgatccataccttgacatgctgcgtccgttgaagcaaccgccggtaaaggtttcgtgttctttctgtttcttcctgctcaatttcaaaatcaatatatgatttccaaagcacctctggcatgtctaaacgtggctgactgatggctaattcatagattgcccgtgctctgtcaatatcaccaaggattgtctctaattcagcgaatttaatccatgaggtacaattttcaggtccaaattccaggaacttttcataaagcttccggcatctgtcaaattctcgaagctgtagctccaattctatgtaaactttaaataatttgttctttggacatttgcctatggaagttcccaatgctcttctggctaatgacagattcttctgtcgtatttcaaactgtgcatacagtatccacattttggcaaatgtgaactttttgtgaggaattagttccaaagaggcttgatacacctgtcttgtcctctcaggatcctttgcctccaattcttcatagagtgcatacc

SEQ ID NO: 80091 - DNA, 2166 bp, Homo Sapiens
  misc_feature (78)..(112): n is a, c, g, or t
tgatgatcacctatgggcgctagcgcggtttttgcgaacgacgagcgcagcgaagtcagtgagcgaggaagcggccgnnnnnnnnnnnnnnnnnnnnnnnnnnnnnnnnnnncagtcgacggtaccggacatatgcccgggaattcggccattacggccgggtacaagacatggggtccggagcaggtgtgctccttcctcaggcgcggtggctttgaagagccggtgctgctgaagaacatccgagaaaatgaaatcacaggcgcattactgccttgtcttgatgagtctcgttttgaaaatcttggagtaagttccttgggggagaggaagaagctgcttagttatatccagcgattggttcaaatccacgttgatacaatgaaggtaattaatgatcctatccatggccacattgagctccaccctctcctcgtccgaatcattgatacacctcaatttcaacgtcttcgatacatcaaacagctgggaggtggttactatgtttttccaggagcttcacacaatcgatttgagcatagtctaggggtggggtatctagcaggatgtctagttcacgcactgggtgaaaaacaaccagagctgcagataagtgaacgagatgttctctgtgttcagattgctggactttgtcatgatctcggtcatgggccattttctcacatgtttgatggacgatttattccacttgctcgcccggaggtgaaatggacgcatgaacaaggctcagttatgatgtttgagcaccttattaattctaatggaattaagcctgtcatggaaacaatatggtctcatccctgaagaagatatttgctttattaaaggaacaaattgtaggaccacttgaatcacctgtcgaagattcattgtggccatataaagggcgtcctgaaaacaaaagcttcctttatgagatagtatctaataaaagaaatggcattgatgtggacaaatgggattattttgccaggactgccatcatcttggaatccaaaataattttgattacaagcgctttattaagtttgcccgtgtctgtgaagtagacaatgagttgcgtatttgtgctagagataaggaagttggaaatctgtatgacatgttccacactcgcaactctttacaccgtagagcttatcaacacaaagttggcaacattattgatacaatgattacagatgcgtttcctcaaagcagatgactacatagagatttacaggtgctggaggaaaaaagtatcggcatttctacagcaattgacgacatggaagcctatactaagctgacagataacatttttctggagattttatactctactgatcccaaattgaaagacgcacgagagattttaaaacaaattgaataccgtaatctattcaagtatgtgggtgagacgcagccaacaggacaaataaagattaaaagggaggactatgaatctcttccaaaagaggttgccagtgctaaacccaaagtattgctagacgtgaaactgaaggctgaagattttatagtggatgttatcaacatggattatggaatgcaagaaaagaatccaattgatcatgttagcttctattgtaagactgcccccaacagagcaatcaggattactaaaaaccaggtttcacaacttctgccagagaaatttgcagagcagctgattcgagtatattgtaagaaggtggacagaaagagtttgtatgccgcaagacaatattttgttcagtggtgtgcagacagaaatttcaccaagccgcaggatggcgatgttatagccccactcataacacctcaaaaaaaggaatggaacgacagtacttcagtccaaaatccaactcgcctccgagaagcatccaaaagcagagtccagctttttaaagatgacccaatgtgaatgtctgtagtcagttgtttacaaactccctctcctgcacaattcatttagaggcttcaatcatagaattctgcaaattaatgacaactcatgctttaattttgtattttgaatgtacacgcatgctgaagctaagtaacttttaatcaaagaaataagatggtattaggcaaatcttactatactatgaaaagcattaccttgcctatttttaatattattaaagcctttctccttcaaaa

SEQ ID NO: 80092 - DNA, 708 bp, Homo Sapiens
  misc_feature (41)..(41): n is a, c, g, or t
taatttaattgaattcatctaaagatgtctctggtgatttntatatgttccgctatataattgatgctttatagttttatcataatccaacaacttcagttatatttaattattgttaaggagtttaagactagaaagactagagtgctttctagtccaaatagaggtcagtgaaacagcttttgacatcagattttcatttgagagggagagctgtggtactggctaaaaagaaaggaagataacatccagtaaccacaggaatatattctctgtgaattaaaagtcttcaaagttatcatttctctgacatatgttggagtagtcatttccattctttacattgtcatgaactggattgataaccctcatctgcaatattttcacccctaaaatttttaacagggtttcctttttttctcacgactatttaagtttagattgctccattattaactgattaatgcactttgaagttctctggaattaattattttaacttggcctagcttcgactgtcaaggtggctgttataaatttgacttcattggcagtggatgaagcctaagccagctgagtctctatcatagctgaaccctgaggacagcctcatagctcatgtatcagggacttttgccacatttcagaggcatagcatgaacaagtaatattaagccaagaataagcagcagaaccctattccatatg

SEQ ID NO: 80093 - DNA, 473 bp, Homo Sapiens
  misc_feature (259)..(267): n is a, c, g, or t
aaagtatttctagtcttttctctctctgtggaatggtgaaagagagatgccgtgttttgaaagtaagatgatgaaatgaatttttaattcaagaaacattcagaaacataggaattaaaacttagagaaatgatctaatttccctgttcacacaaactttacactttaatctgatgattggatattttattttagtgaaacataatcttgttagctaactttaaaaaatggatgtagaatgattaaaggttggtatgannnnnnnnnaatgtatcagtttgaacctagaatattgaattaaaatgctgtctcagtattttaaaagcaaaaaaggaatggaggaaaattgcatcttagaccatttttatatccagtgtacaatttgctgggctagaaatgagataaagattatttatttttgttcatatcttgtacttttctattaaaatcattttatgaaatcccctcgtgcc

SEQ ID NO: 80094 - DNA, 658 bp, Homo Sapiens
  misc_feature (41)..(41): n is a, c, g, or t
  misc_feature (103)..(111): n is a, c, g, or t
  misc_feature (484)..(494): n is a, c, g, or t
ggcacgaggaataacccaagtcagcaacaatttatgcaatntggaggaagctctggatcacagttgcctcaaatccagacagatgttgtacttccatcatgcnnnnnnnnngctcctgctgaaactcctgtgaaagaaagactttttattgtgtttaatcctcatcctttacctttagacgtattagaagatatattctgtcgttttggtaacctgatcgaagtttaccttgtgtcaggaaaaaatgtggggtatgccaagtatgccgatagaataagtgctaatgatgccattgccactctacatggaaagattctgaatggggtgagacttaaagttatgctggcagattcgccaagagaagaatctaacaaacggcaaagaacttactgattcttgagaacaaagactaaataatgacataatcctcagctgactgactgaaaatgtgactggacgcattccctgtggacagttgacagcnnnnnnnnnnnccatatacctgatagtctgtgtacagcattgttttgtctgggaagcagggattgctgacatgtatttttgaatccatacattaatgctaaaacgaatatagtagttgttccttagagcaatatgttgttacgtgtagcagaaataaagttttctttgcttaact

SEQ ID NO: 80095 - DNA, 513 bp, Homo Sapiens
ggggggcagccatggcgtcctatttcgatgaacacgactgcgagccgtcggaccctgagcaggagacgcgaaccaacatgctgctggagctcgcaaggtcacttttcaataggatggactttgaagacttggggttggtagtagattgggaccaccacctgcctccaccagctgccaagactgtggttgagaacctccccaggacagtcatcagaggctctcaggctggaggaggagactgccattgagatgccttgccatcaccttttccattccagctgcattctgccctggctaagcaagacaaattcctgtcccttgtgccgctatgagctgcccactgatgacgacacttatgaggagcacagacgagataaggctcgaaaacagcagcagcaacaccgactggagaacctccatggagccatgtacacgtgaggaggttggggctgagtgctggccctctgcgtcttccttattaaccttgaatcctcattaaaggtttctttaccc

SEQ ID NO: 80096 - DNA, 620 bp, Homo Sapiens
gggtatcgagcagggtccgagggctgtgtcagaaggctgggcagccatggcgtcctatttcgatgaacacgactgcgagccgtcggaccctgagcaggagacgcgaaccaacatgctgctggagctcgcaaggtcacttttcaataggatggactttgaagacttggggttggtagtagattgggaccaccacctgcctccaccagctgccaagactgtggttgagaacctccccaggacagtcatcagaggctctcaggctgagctcaagtgccccgtgtgtcttttggaatttgaggaggaggagactgccattgagatgccttgccatcaccttttccattccagctgcattctgccctggctaagcaagacaaattcctgtcccttgtgccgctatgagctgcccactgatgacgacacttatgaggagcacagacgagataaggctcgaaaacagcagcagcaacaccgactggagaacctccatggagccatgtacacgtgaggaggttggggctgagtgctggccctctgcgtcttccttattaaccttgaatcctcattaaaggtttctttacccccccaaaagcccctacctaccgccataaaaaatgtcg

SEQ ID NO: 80097 - DNA, 842 bp, Homo Sapiens
  misc_feature (15)..(15): n is a, c, g, or t
  misc_feature (108)..(108): n is a, c, g, or t
  misc_feature (116)..(116): n is a, c, g, or t
  misc_feature (842)..(842): n is a, c, g, or t
aaagaaagaaagaanaagaaatctgcactggatgaaatcatggagatgaagaggaaagaaaagactgcccgaaccagactactggctacagcctgaaattattgtganaattatanacaagaaactgcgagagaaatatcataagaaaaaggctattgttaaggaagtaattgacaaatatacagctgttgtgaagatgattgattctggagacaagctgaaacttgaccagactcatttagagacagtaattccagcaccaggaaaaagaattctagttttaaatggaggctacagaggaaatgaaggtaccctagaatccatcaatgagaagactttttcagctactatcgtcattgaaactggccctttaaaaggacgcagagttgaaggaattcaatatgaagacatttctaaacttgcctgagtttgaaaatttgttaacaatacattaaaatcttaaagcatcaaattggtgttcgccaaggcattatgagactctactgtgttagggtatattcttttgtataaaacaaacaggtttttgaaaatattactgtatagttagttgttcagctaaactttgagaagaatttaattatgtctcatgaggtatcaaactatgtaattttgtccttgttatttttgtttcctttgtaatttacttgatgagtttatatcttcattaaagaatgttataataaagtgttttatatatgacaatttagaatcatgtaattggaggaaatccttcatacactctatattttcagtagtagagtagtaaagttgaactctaagtgtgactaaattttaaatgtcaaactataaatatagaagcn

SEQ ID NO: 80098 - DNA, 145 bp, Homo Sapiens
aatttaaaatcagttggaaacctttaattaaagtatacaataaatggaaagttcccaaagtgtagctcttgaagattttggagaactgccattaatagaaacaaagctagtaaacaagaagacactgaaatatattcttatttgc

SEQ ID NO: 80099 - DNA, 568 bp, Homo Sapiens
ggcacgagggttggaagaaaaatctgcatattgggtgactgctctggggttgtgggtgatggaggagtaaaactgtgctttgaagcagacctgttgatccacgaagcaaccctggatgatgcccagatggacaaagcaaaggagcatggccacagcacaccacagatggcagcaacatttgcaaagttgtgccgtgcaaagaggctggttctgactcacttcagtcagaggtacaaaccagttgccttggccagagaaggagaaacagatggcattgcagaactaaaaaagcaagctgaatcagtgttagatctccaagaagtgactctagcagaagattttatggtgataagcattccaatcaagaaatgaaaccagtgttcctgagtgcacactgacatgtctgtgaatatgttactgaacctatagtccagtttttttatttcttgttttagtctgaaattatttgggccctaataatcctaaaaagaatggagctgcattgatgaattggctcagtatttaaagggagcaaactttttgataataaatctttttaagagaaaaa

SEQ ID NO: 80100 - DNA, 490 bp, Homo Sapiens
cttaataaaatggaatccactgtgttgaagactcttgatatcatgtgcttgtctaaccattttttgttttataaattagaataaaatatagttgtgataatggtcatcgaatggatttgtttggaaagctacatcttatttgtgaaatgttttttaaatcagagtaactatcaactgattcagctttttgttgttttgttcttggctataatacttgtgactcatgaagaattatgttgacaaacaggataaattccacatgcattttatttcccagtgagttgtataaactttatttttgttgaaggttgtatgttaaatcaatgttacattcttatatcacttcttgagaaggaagttccgatttgaaattgtatcatttccttcaaaatgaagggcagtgcttagttaaataaaagattgatgatatcttttaagccatttcctcttcactatgtcttattaaaataaaacctgtcaagttcttttc

SEQ ID NO: 80101 - DNA, 1217 bp, Homo Sapiens
  misc_feature (212)..(227): n is a, c, g, or t
atggatgtgagagaccacattgcctctcccactgctttggggagcactttcctgtcatttctaacttaccacatgcttggtgtactatatgtacgttgtgcctcatatgttgcaaagaactaaggtgagtatagcctactagatatgggcaatatccagcctagatgattggaaagataccagtttaagtaaacttggtaaaatccaagtcnnnnnnnnnnnnnnnnccaggaacaactacattttctcatatacaggtagctaggggcaacacagttccattctagagggaaacaaaagggagagccccacaaaactttggggacaagggagagagagactcatctgacacttcttttggaggtcaggatttgtatatcagaattgaagttagaattaagtgaattaaactgaatttgattgtgagtgaacctagaacagcactgaagtattacataacctggaagactgagaagggtatattatttgaaggatctttttatttccccgaggtctttcgcactggagacagcataaaagagtgaacaaatgttgggatgagagaagatgacatcaatgtgggagttcagtataactggggataaactagaagaacctgtgattttacagtcatcttattacctgccagggctcatctagccatggcaatgtttgccttgaatgggggtgaaagcctttctttgttggatcaaatactactacactattacacttccacactatttatttggggatgggctgggagtgacagtagcctagtagttcagctacctgattactgccccattcttttagaagcacatgtctgccaaggagtggtttgtactgctgtgtttggtacatctagtcttttttctgctataagttttccttacctgtcctttagtgtagattttattcatcacaggacagaataatcaaggacaaccaaaatccttttgttagtttcagtacctcagctatcaacatttctgagctaccattcaatgttcctctgtgtcatggagtgaaattcttgttttgtgggtattaggagtgtgggaatgtgataacctaaacaacctttgctctgaaattccatttttccctctttccctgagttgtattgacctacagagttaatttcctttgtatttttttaagaaaatattaaaaatcaacggtctcaaatgccgagagtttgtggctaaaaaaaa

SEQ ID NO: 80102 - DNA, 1075 bp, Homo Sapiens
cataatctacgaagaacttggctatggctgatcttttttaaatttaactttctgatggaccctgtagtttccagttaagtgcagattccttacagacatatagaacagcgcattcttctgtagacatttgctcatatgggtgattgtatttaccaacatgagcaaatgtctacagaagaatgcgctgttctatagacatttgctcatatgggtgattgtatttaccaacatgaaaaaattgttttcacctgatatgaaaatgttagaaaaggcaaactccgggacttctaaagatttacttaaatcccattatgtactctattcagaatgtagaagctgacttgaaaggcatccttggtactaagtgaagcttattcagaaaatgcatgttttcaaatgcaatggcaactgcttgtacatatcatttttgcagtgtatgttggagctgtaatggttgcaattatgtttcttatttccttaaaagcaaaaagcgtagcttctgatttatgttatagaatgatactgattagactttgagccaaggggaaaatactaaattcttttaaacctggagccttagagagccacaggaatatcttctgttgtacagtctaataagctgtggtaggaagtatcatgtaatcacagtttaatgacagtttatgtatatatataattcagtattccctctgataacatagttgccagtgtttaatacacttgtaacttggatttttaccttataggctatatgtatactcagttttttaaagcatttttttcagagatcacttaattccccatgcttctgcaatgcatataaaaactataaatgccgagtggtagaaactcctctttcttcatagtcctcaggctttggttacatttgcatatgccatttgaagcctccagcttttaccagtttaacatccaaagttcacagcatcagcattcatggtgtaagaacagttttgcagtataacacgatctgataatcattcagttattaaattgtaaataattattgggatggtttcttggctttaagtccactgaataaaaactatgaaattgc

SEQ ID NO: 80103 - DNA, 574 bp, Homo Sapiens
aatatttacagctttataagtctttcatcagattagctgttgactttttgtaatacaaaaagtttcagacaagtattaaagaataaaatctgtctcaggctggtagttagcagttgtgaccaagatgcttttggttgttgtatttcacaaaatttcctcatttctaacatgagagatgaacttattttaatataatcctttttctacactttaaaagtcagcaatagtgttatgtatttataggcagcttttaataatcttgtcatatttgtactaacccaaatgattcacagtgacaaaacattttaataacttgatcacaaaaccatatggacaaatatgaattttaatattataaatactatttttaaaaggtagaatttattcgcacagggtaaaaagaatgtaatatttagttctcaagtttgaattatcagtatattattacaattttgtatatcagaatcttaagtgttacaggtacaaaaagaatattgctagccaaatgaacaaagtttagctaaatctctgtagcatgcaaatcaaataaattaaaattttttgctattgcttt

SEQ ID NO: 80104 - DNA, 1406 bp, Homo Sapiens
ctacggcagccggcgcgatctactttcagcgaggcagtctgttctggttcacagtcatcaccctcagctttggctactacacatgggttgtcttctggcctcagagtatcccttatcagaaccttgggcccctgggccccttcactcagtacttggtggaccaccatcacaccctcctttgcaatgggtactggcttgcctggctgattcatgtgggagagtccttgtatgccatagtattgtgcaagcataaaggcatcacaagtggtcgggctcagctactctggttcctacagactttcttctttgggatagcgtctctcaccatcttgattgcttacaaacggaagcgccaaaaacaaacttgaagttgtctgaaagcttgctctacacttttacattcatcctcacccttttttttgtggggtagaggaggtgcagtaatttactcagtgatctttctactttctagaaactgtccttcaaagctctttaagaccccctcgttagtcagttttttctcttatatgctctggttgagcttgaatagaccagttgttacttaagaaagaaacagagaaagattttagcttttcaatcctatttggcagaggacttcagctaccttcttacagtctttggctgtgttggtaccctcgtgtgctctgagctaagccacatactaaactgactttttggttggtatacccttgctcccgccttctgatgaaaacaccttaccctcacaaccaccatctttcctctcctttccaaagctctttccaccttgctgcactaagataaagtgacacttccactatatgtcaattccacacacatttattaggtacctgtgaggtaggatcctatcctctcaaacttccatttctcatgctacagagaaagataaggaagatgagcaagtgcctggaatggggcaggctgagcagtcacacaggcatagaggcacgctgagaacctggaggggagactgcagagtgccttccctgatgctgcagccggaagtgatccttccctccacctggcccctgggacactgtgctctgcagtgtgcagggcctgatggcactgctagattgctccttcagctcagggccacagcttaaacagctttacctttcccctcagcacctgtcccactatcttgcacacaggtgctctaaccatgtttattgaacaaaggagggaaactgatttcactttcacttgttcattatcattccaatttttatgtgaaaatggcacaacccatttggggtaccctcaccccaaaataaaagcccaagtctacctttgactggtaccacctttttttgtggtttcgttggtgagaaacctttatctttttcatacctttctattctcaatcacttctccaaaagtgt

SEQ ID NO: 80105 - DNA, 456 bp, Homo Sapiens
tacattccagtgtctacactgccactgagaaggactattctaaaacacagttttgagcatgtgacttctctgctagaagactgtcagttgctcctttctcctccacagagctcttcctcacctgactggtgcttcccttctgcctccctctctgacctttgaactttaagctccagccagtctaaaccacttgtagttcctcagctacaccatcctctcccacagaactttcacatactgctgcttctggctggaatgcccctttcacccttctcttctctggtttctattataaggaaatctagcacaaatctaaactcttgagttcaggagtaacacaggctggaatcgaattcaggctccacctcgtataaacggtgtcatcttaagcaagtcacttttctttgcatttcggtctcctcctttgtcacataaagaacacctgcccctcgtgcc

SEQ ID NO: 80106 - DNA, 1077 bp, Homo Sapiens
  misc_feature (72)..(72): n is a, c, g, or t
  misc_feature (97)..(97): n is a, c, g, or t
  misc_feature (124)..(125): n is a, c, g, or t
  misc_feature (133)..(133): n is a, c, g, or t
  misc_feature (137)..(555): n is a, c, g, or t
gaccaggaggactcccaggggaacgcctgttcttttgtcctgtcgggtccccacctttgactgagcgcgatnttgtgatctcgtcagggggcgagcntatggaaaacgccagcacgcgcccttnntacgatcntgcnnnnnnnnnnnnnnnnnnnnnnnnnnnnnnnnnnnnnnnnnnnnnnnnnnnnnnnnnnnnnnnnnnnnnnnnnnnnnnnnnnnnnnnnnnnnnnnnnnnnnnnnnnnnnnnnnnnnnnnnnnnnnnnnnnnnnnnnnnnnnnnnnnnnnnnnnnnnnnnnnnnnnnnnnnnnnnnnnnnnnnnnnnnnnnnnnnnnnnnnnnnnnnnnnnnnnnnnnnnnnnnnnnnnnnnnnnnnnnnnnnnnnnnnnnnnnnnnnnnnnnnnnnnnnnnnnnnnnnnnnnnnnnnnnnnnnnnnnnnnnnnnnnnnnnnnnnnnnnnnnnnnnnnnnnnnnnnnnnnnnnnnnnnnnnnnnnnnnnnnnnnnnnnnnnnnnnnnnnnnnnnnnnnnnnnnnnnnnnnnnnnnnnnnnnnnnnnnnnnaagaattcggcacgaggctgaaaaattttagagctaggtatagtgaccgtgaactttctaacgcataatattctgtgatacagccattccgtacatgtgtgaagtcctgcataactttcgaactttgttaaatgttggcactaggagtcatcagatctaggcttcatcattttccagtgagaagcagagacccaaagggcctgttacttgtgcttggtcaggggactgtctgtcatgcctggaggctcttcggcacacttccccatctttcccttctgccactgtggcttcaagcacctctgttcatagagcgtctctgaaattgagtctcggtcatgacttatcccgaagtagagcaatgtgtttcctctcattgtagtttcaggactttgtcagtacaagctctgccctaggcttgttactttatactcatatcctgaaaagatgtgatttcatctatgaaggggtaaaatattggtttgtatttaattgtttgaaataaaagtgatccctataaaaaaa

SEQ ID NO: 80107 - DNA, 1226 bp, Homo Sapiens
gaagagtttctggtataccgtaatgactgcagccttccccggagcagctcagactctgagtccagcagcagtagcagtagcagcgctgcttcagaccggaccagcacaacgccctcaaaacaaggccggggcaaaccctccttctctcggggcactttcccagaggacagcagtgaggatacctcaggcactgagaatgaggcctactccgtgggcactggccgcggcgtgggccacagcatggtaaggaagagtctgggccggggagctggctggctgtcagaggatgaggactccccgctggatgctctggacctcgtgtgggccaaatgccgaggctatccatcatacccagctctgatcattgatccaaagatgccccgagaaggtatgttccaccatggggttcccatccctgtgcccccactggaggtgctgaaacttggggagcagatgacccaggaagcccgagagcatctctacctcgtcctcttctttgacaacaaacgaacctggcagtggctgcccaggaccaagctggttcctctgggtgtgaaccaggacctagacaaggagaagatgctggagggccgcaagtccaacatccgcaagtcagtacagatcgcctaccacagggctctgcagcaccgcagcaaggtgcaaggcgagcagagcagtgagaccagcgatagtgattgatactgctcaacacagcccaacctatagtgccctgtgacttctctcctcccctttgctcactgtcctggagtggcaccggcctctgcactgactcatttctggtcttggggccagtctcaggggaagctgggtgggggaggtccctcctgccctaagtgcagctggactgtacagaacactccaagggccaatggcagttcagcgcaaggagagggagggcccacaggtcagaaaaagctccagagacctcacagcattgtagggcggggtggtgggccaaagttaggacactgcgtaaaacaggccatcccaccacctctacctgctcatgccaggagaatccataactgcctagaggcctggggcccctaccggtcgtgaggtgagtgggcatctgtccagcctggaagaggggcactaggtgactccctcccctgctgttgtaaatactgtaattatcggagaatttaaattattctcatttgtaactgcgtttccgggtcgcgccagagtcatttggtactaaa

SEQ ID NO: 80108 - DNA, 478 bp, Homo Sapiens
  misc_feature (63)..(73): n is a, c, g, or t
gaaaaaaaagtaaaactgcactcttctttcattcagttagctttgttttggaaaatgtagtgnnnnnnnnnnnaataaagtatgttaatacaatgagtcttatttttaaatgaattagtatatattgtaaaccattctcaatttcaacttttaatttggtaaatattgattagctcataaaagttttttggggtcttctataaattagcactgtcaaagggtcctgagaccaaataagaatgcttgtctggggctattttgcttaccaactctaagttaaatttcttcccttttcacatgccggcaaccatctgatagctgtggacacaactttctcatatgcctggaaacagaacaaaccagattcaggaatgtaccagtcattatagctagcagatgaatggaaatcaaaccaagaggaagctttggaaagcaaactttgtttattttaattaaaaactttgtttccagagctgat

SEQ ID NO: 80109 - DNA, 558 bp, Homo Sapiens
tacactctgaaagataagtcagagtggctgatcaagagtgagtcagcaaagactggctctgagggaactccctttatgagagtcttacgtgattattcataagtgggtgggaagaggtgtgttcctagtaatcatgttctgggtggtcctctgggtgcacatgagcagttgctgtacatgcttgttcatacattgcatgtctcattgccgtcttaaatctctacccaggggtgtgttttttactattataatgagcaaagggtcattctgaggacaagcaaagtgaaaatgcacatgctctctacaggggaaagtccccagtgaaggtagttctgcttggatgagcttgattacaatgtgagtgctgaggtttgttgtgttgttggtgcggttgctatgtcccaatgaacatggttacagggctcattgtgctgttgacagtgtggttgccatgtcccaaggacgtggtcatctccttgactatctatcctgcctcagtaccatatagttcacttactaaagtatataattcgatgccctttagcatgttcacagtca

SEQ ID NO: 80110 - DNA, 1077 bp, Homo Sapiens
  misc_feature (66)..(66): n is a, c, g, or t
  misc_feature (84)..(84): n is a, c, g, or t
  misc_feature (117)..(117): n is a, c, g, or t
  misc_feature (148)..(148): n is a, c, g, or t
  misc_feature (162)..(162): n is a, c, g, or t
  misc_feature (172)..(172): n is a, c, g, or t
  misc_feature (205)..(205): n is a, c, g, or t
  misc_feature (288)..(288): n is a, c, g, or t
  misc_feature (291)..(291): n is a, c, g, or t
  misc_feature (305)..(305): n is a, c, g, or t
  misc_feature (1017)..(1035): n is a, c, g, or t
cccagactttgtctgtgagggagggacagctttacctgcgggagagcaggagtcccgctttagcanccagtctattaaccatgntatgggaagtcccaacatcacgaggatcatacntgaccaacacgtcccctagcccgtctccaanagcgggatatattnaacatgagantcgagagacaatatccaaccatacgcccacgtntaggatgtctctccatgtagatgattgcaaatagacggtgtatacccatccatgggaagcagggaaatatgtttgcacgtctntgnttagtcctcttctnttctactgacagtgggcttgtccatgtgtcctgcatgatcaaaatgacaatagcaaacttgatggccacagaagattgaaaagtgcttgggcattgagcttgctctctcttgaagtgcttggagccctgagactgccatgagaccatataaatgatcactagctagcctgctggaggatgagaggtcacttgagaaaccttggctcacagcatgcttacaccagacacatggatgagtctgtcttagactatccagctccagctgagttgccagctgacttcagtcacatgagtgagaacaacagaaggacagcactgagctctgccaaaattgctgacctacagaatcttgagctaatgaatgattgtagctttatgccattaagttctgaggcagtgtgctatacatagcaaaagctaactgatacaaaactaaagatacaatggcacaaacatgaaaagacatgttcaccgaagcattgcctataatagttaaagactggaaacgactcagatgtccaccaactcaggagtggttgaacctactacagtgcattcaccccgtggaatactaagcagctccaacaggggtaggaaatttgtatactttcataaaatgatctttaggatatattgttaagtgaaaaaaacaaggtgtagaatagttaatagagtatgctacctcttatttaataaagggagaatataaatnnnnnnnnnnnnnnnnnnncctgagcaggcggccgcaagcttattccctttagttgagggt

SEQ ID NO: 80111 - DNA, 1116 bp, Homo Sapiens
  misc_feature (44)..(82): n is a, c, g, or t
  misc_feature (86)..(120): n is a, c, g, or t
  misc_feature (283)..(306): n is a, c, g, or t
aaggaatgtatcgactcactatagggcgctacgtcggctttatnnnnnnnnnnnnnnnnnnnnnnnnnnnnnnnnnnnnnnnccgnnnnnnnnnnnnnnnnnnnnnnnnnnnnnnnnnnncagtcgacggtaccggacatatgcccgggaattcggccattacggccggggtatctctctgaattcctttacgcatggttgatgtcaacattgagtcgtgccgatggctctcaaatggcagaggaaaggataatggaagagcagcagaaaggccgtagtagtnnnnnnnnnnnnnnnnnnnnnnnngttcgcccattgagccgagagatcacaatgagcctagcatatcagaacatgtgtgctggaatgtttaaaaccatggtagcatttgacatggacggcaaagtacgtaaaccgaagtttgagcttgatagcgaacaagttcggtatgaacacaggtttgctccattcaacagtgtgatgaccccgacgccagtgcactacttacagttcaaggaaatgtctgacctcaataaatatagccctcctcctcagtctcctgaactgtatgtggcagctagtaagcactttcaacaggcaaaaatgatattggaaaatattcctaacccggaccatgaggttaatagaattttaaaggttgccaaacccaactttgtggttatgaagttattggcaggaggacacaaaaaggaatctaaagttcctcctgaatttgatttctctgctcataaatattttcctgttgtgaaacttgtttgagagagactggggaggtggccataaaggggcagagtcttctttcagacccaactcttagagggcacatcaccaggctccacatcacgggaagtgagatggatttcttgggtaacaactcattataaggaatacttttagtttgacagccttatatgacatgaatgaaaactgctgttttaaagtggtttattatgttccatggaagaaactggtcttattgaatgcattgatgaacgttatatggttttattacagatttaatcacaaatcattttttatgaatgattgagtgaaaatagtgtttataaaggttaataaatttcttgacaaaaaaaa

SEQ ID NO: 80112 - DNA, 777 bp, Homo Sapiens
  misc_feature (50)..(80): n is a, c, g, or t
  misc_feature (102)..(102): n is a, c, g, or t
  misc_feature (106)..(106): n is a, c, g, or t
  misc_feature (479)..(497): n is a, c, g, or t
aagctaactacaaatctagtaaaaagctatctgaaattcacaaatatcannnnnnnnnnnnnnnnnnnnnnnnnnnnnnnctgtattcatagtgactgcttntgtnttaaccagtttagtatcgttactgtgtgaatcgtcgcgctgcagtattgacttggaatcctgaccatgtccatcccaaaattcagtcctcagttaacggatcatgtttgcaaaaggtcactgtgaggctgcatatttcagaaagatgtccttaataagggaagtcatgtataagatgttttctaaaagacttttcagtattacaactaatactattattatccttctttttttatttagataattcttttaatttaaacaaaggttcactatggaaccagacaaatctcattagccatgtgttaagtatttgctactttaaattgttttacaactgattccagcactggatgatagagcaagactctgtctcnnnnnnnnnnnnnnnnnnngaccaggtactattagtcttctgagcaaaagaaaagggggaaaggacacgtactcccaaaatgaagtctgatagcttttggagaatgaagtctaatagcttttggaaagaccacacagatacgacactgtacaagaatagtctaattgatagtataatttatgcattttcccaggctaactaaaagcattctgtttcaaaaaggcctgtctagtttataaaagaagcttatttaattgtgattactgattctttcctcctcaaataaaaggaaaaacctt

SEQ ID NO: 80113 - DNA, 540 bp, Homo Sapiens
cagtggatgtgactcacactttcaggagtcaccccccagcatttggggttgggttggccctactccagcctggagctccctgagggagcctgcactccctgctcccaatccccgctactggtgcagggatgcagcctggagctggcgtccttgttctgggcctgctgctgccgccaccccaggaggccccaggcctgtcctgaattgacatcagtgcttccctgaactgcctcccccacccctggcattatcccaggaaacttatgttttctagaagctaagcagctgctgggactcagggactggtgcaggtaggctgagtggcagctcagtcctagaaggtctctgaagatctggactgaggaccctgctactccccaagccagagcccatcagccaggcctgctgtgagccacctgcctgtggagtgctgagctcaaccaaaggctggcaagctctgggcctcatttaagggattctgatgagccgatgggccctggaggcagcccattaaagcatctggctcgtttttggaaaaaa

SEQ ID NO: 80114 - DNA, 228 bp, Homo Sapiens
  misc_feature (19)..(19): n is a, c, g, or t
gccaagaatttcggaacgnaggaaaacaaacacctccaaaaaaattctaaaagattttgagaggggaaaatatagacacacaactgcattcattctgatcttccacacaaagatcaggtgaagaaatctatgcagctatacatgctaggacctgttgtacaccatccctgcaaccccatagaaagaaaaaaaactcttttttcaaaatagaagcagtattcttctacg

SEQ ID NO: 80115 - DNA, 1761 bp, Homo Sapiens
  misc_feature (97)..(694): n is a, c, g, or t
  misc_feature (736)..(753): n is a, c, g, or t
  misc_feature (960)..(974): n is a, c, g, or t
  misc_feature (992)..(1007): n is a, c, g, or t
  misc_feature (1040)..(1642): n is a, c, g, or t
cccaccccgtgtgagcgaacggcctacccgaattgagaacctacgggtgcctctggaaggcccccccttccccaaggagaaaggcgaccagtttccnnnnnnnnnnnnnnnnnnnnnnnnnnnnnnnnnnnnnnnnnnnnnnnnnnnnnnnnnnnnnnnnnnnnnnnnnnnnnnnnnnnnnnnnnnnnnnnnnnnnnnnnnnnnnnnnnnnnnnnnnnnnnnnnnnnnnnnnnnnnnnnnnnnnnnnnnnnnnnnnnnnnnnnnnnnnnnnnnnnnnnnnnnnnnnnnnnnnnnnnnnnnnnnnnnnnnnnnnnnnnnnnnnnnnnnnnnnnnnnnnnnnnnnnnnnnnnnnnnnnnnnnnnnnnnnnnnnnnnnnnnnnnnnnnnnnnnnnnnnnnnnnnnnnnnnnnnnnnnnnnnnnnnnnnnnnnnnnnnnnnnnnnnnnnnnnnnnnnnnnnnnnnnnnnnnnnnnnnnnnnnnnnnnnnnnnnnnnnnnnnnnnnnnnnnnnnnnnnnnnnnnnnnnnnnnnnnnnnnnnnnnnnnnnnnnnnnnnnnnnnnnnnnnnnnnnnnnnnnnnnnnnnnnnnnnnnnnnnnnnnnnnnnnnnnnnnnnnnnnnnnnnnnnnnnnnnnnnnnnnnnnnnnnnnnnnnnnnnnnnnnnnnnnnnnnnnnnnnnnnnnnnnnnnnnnnnnnnnnaagaattcggcacgagggttggagcggccgcggctgtaggcnnnnnnnnnnnnnnnnnnagggaacaaatttattttgatttttctgaaaatatcaggaactatgaaaaaacaagctcgatttctggccgtaccaaaagcaaaatacaagtaaaaataacatttgaaaaccaagtttaacctcagagaatcatgttttaaaatacaaagtttaacattctttcctctatggagctaaacaagttttctaaaccataagactgcagnnnnnnnnnnnnnnnaactgacgtaattttttnnnnnnnnnnnnnnnngccgacagccgcggccctcgtgccgaattcttnnnnnnnnnnnnnnnnnnnnnnnnnnnnnnnnnnnnnnnnnnnnnnnnnnnnnnnnnnnnnnnnnnnnnnnnnnnnnnnnnnnnnnnnnnnnnnnnnnnnnnnnnnnnnnnnnnnnnnnnnnnnnnnnnnnnnnnnnnnnnnnnnnnnnnnnnnnnnnnnnnnnnnnnnnnnnnnnnnnnnnnnnnnnnnnnnnnnnnnnnnnnnnnnnnnnnnnnnnnnnnnnnnnnnnnnnnnnnnnnnnnnnnnnnnnnnnnnnnnnnnnnnnnnnnnnnnnnnnnnnnnnnnnnnnnnnnnnnnnnnnnnnnnnnnnnnnnnnnnnnnnnnnnnnnnnnnnnnnnnnnnnnnnnnnnnnnnnnnnnnnnnnnnnnnnnnnnnnnnnnnnnnnnnnnnnnnnnnnnnnnnnnnnnnnnnnnnnnnnnnnnnnnnnnnnnnnnnnnnnnnnnnnnnnnnnnnnnnnnnnnnnnnnnnnnnnnnnnnnnnnnnnnnnnnnnnnnnnnnnnnnnnnnnnnnnnnnnnnnnnnnnnnnnnnnnnnnnnnnnnnnnnnnnnnnnnnnnnnnnnnnnnnnnnnnnnnnnnnnnnnnnnnnnnnnnnnnnnnnnnnntttctccctcgggaagcgtgcgcttctcatactacgctgtaggatctaagtcggtgtaggtcgtcgctcagctggctggtgcagaaccccgtaagccgacgctggcctatcggtactag

SEQ ID NO: 80116 - DNA, 582 bp, Homo Sapiens
  misc_feature (286)..(405): n is a, c, g, or t
ggcacgaggcgaggtggctttacctgcatttttccacagggttccatccagtttaaggagacaaaatagttgaccttgatggagtagtagaagcagacaaaaagcttgttctgtggatggtgagactcccggtatagagtctcaggccagtcactcagtagaaccacatcattctttggttcttcatcattctgagagagaagaatgacctgagttaagagttctgagtccccactcattcactcatttcagaaatatttactggccaggtgtggtggcttgcacnnnnnnnnnnnnnnnnnnnnnnnnnnnnnnnnnnnnnnnnnnnnnnnnnnnnnnnnnnnnnnnnnnnnnnnnnnnnnnnnnnnnnnnnnnnnnnnnnnnnnnnnnnnnnnnnnnnnnnnncatggtggtgcatgactgtagtcccagctactcggaaggctaagtaagacaggaggatcgcttgagcccaggaggtcaggccacagtgagccatgactgtagcactgcacgccagcatgggtgacacagcgagaccctgtctcaataagtttaataaataaataaatatttactgag

SEQ ID NO: 80117 - DNA, 863 bp, Homo Sapiens
  misc_feature (818)..(818): n is a, c, g, or t
gctggaccggtccggaattcccgggatatcgtcgacccacgcgtccgcgcccgctccggagcaacccgcgagcttacaccggcttctctctgtcctcagcccgcgcgccgccatcgccgtcatgctgggcgccgctctccgccgctgcgctgtggccgcaaccacccgggccgaccctcgaggcctcctgcactccgcccggacccccggccccgccgtggctatccagtcagttcgctgctattcccatgggtcacaggagacagatgaggagtttgatgctcgctgggtaacatacttcaacaagccagatatagatgcctgggaattgcgtaaagggataaacacacttgttacctatgatatggttccagagcccaaaatcattgatgctgctttgcgggcatgcagacggttaaatgattttgctagtacagttcgtatcctagaggttgttaaggacaaagcaggacctcataaggaaatctacccctatgtcatccaggaacttagaccaactttaaatgaactgggaatctccactccggaggaactgggccttgacaaagtgtaaaccgcatggatgggcttccccaaggatttattgacattgctacttgagtgtgaacagttacctggaaatactgatgataacatattaccttatttgaacaagttttcctttattgagtaccaagccatgtaatggtaacttggactttaataaaagggaaatgagtttgaactgaaattaggtatttgttccatgtgtttgcattaataagcagaaaattaagtgctgtatggttcatggtttntgccctacagctgagagactgtgtaatcctggaaccactgcatga

SEQ ID NO: 80118 - DNA, 1666 bp, Homo Sapiens
  misc_feature (1483)..(1494): n is a, c, g, or t
caaaagccttaatgggcctgcagactttgaaaagcgagtggagggcggtgggcggccgcgtgcgcccctggtcaatgccctcctgacagcacccgagttccttatttacactggctgcatggattgtgcgtttctgttttgtttctctccccctgcaggggctgtttgcggggtggggtggggggttcgctatgtcggatgacgattcgagggccagcaccagctcctcctcatcttcgtcttccaaccagcaaaccgagaaagaaacaaacacccccaagaagaaggagagtaaagtcagcatgagcaaaaactccaaactcctctccaccagcgccaagagaattcagaaggagctggcggacatcactttagaccctccacctaattgcagtgctggtcccaaaggcgataacatctatgaatggagatcaaccattctagggcctccaggatccgtgtatgagggtggtgtattctttctcgatatcacttttacaccagaatatcccttcaagcctccaaaggttacatttcggacaagaatctatcattgtaatattaacagtcaaggtgttatttgcttggacatattgaaagataattggagtccagcactaaccatttctaaagtcctcctttctatctgctcacttcttacagactgtaatcctgccgaccccttggtgggaagtattgccactcagtatatgaccaacagagcagaacatgacagaatggccagacagtggaccaagagatacgctacataaattggggtttcacaattcttacattatttgtctgtcacagaagagagctgcttatgattttgaaggggtcagggagggtgggagttggtaaagagtagggtatttctataacagatattattcagtcttatttcctaagattttgttgtaacttaaggtatcttgctacagtagacagaattggtaatagcaacttttaaaattgtcattagttctgcaatattagctgaaatgtagtacagaaaagaatgtacatttagacatttgggttcagttgcttgtagtctgtaaatttaaaacagcttaatttggtacaggttacacatatggccatttatgtaaagtccctctaagactacatactttttgtttaaaacaaaattggaatttgttttcccttcttggaagggaacattgatatttaacagagtttttagagattgtcatctcatatatataaaatggacacgtggctataaaacaccatataagagatgagtagtgcgttttattttatatgccaatctactttgtttaaaaaaggtctgaatcaggacttgtgaaaacctgtagtgaaataccttaagctgttaactaactgtaaggcgtggaataggagttgctcagtggattggttctatgttgtggactacttaagtctgcatttgttactgtgctaataaacaatattaaaaacccccttctttctnnnnnnnnnnnntataacttcttgttcgggcgccctcggcccctcaagaagattttctaagaccatttcttttggcccccgcggggccccctaaggtaaagtggaacttggccccttagctggttttccttaggaaaaatctcgggctcctggaacaagtaggcttgggaattcttcccctaat

SEQ ID NO: 80119 - DNA, 473 bp, Homo Sapiens
tacttagactctcactttacaaatcagctttttttaaaaaattctttcttcctgctgtcaagaatgagataaaatatattaatacaagctgtttctacgtacagagactacagagtgaatatactctagtgcagagaatatagaactgggttttgtttcttctccttaagctccatggagatcagaccaatgacttctgcaaactgagctaaggcaatatttaggcctcaaggggctcgagtaatgtcaaccttgaccccacattctttaagttgacctccacttagccttcaggatagaaagaaataaaagataaaggcactatacttttctggggacagagccaaactgaaaggtgtccttatagaattagaaagccattagctacctcattttagttgcggaaaattagaatgttttggttatataaacccacataccaacttgagccaaccttccacaaaaaactttgg

SEQ ID NO: 80120 - DNA, 408 bp, Homo Sapiens
ggcacgaggaaaaaatccaacctatgctgggaaagaagaaagtttacctgaaatctcactgctggaaatactgcagaacagacacgaaagggaaaaacaggctgtggctgctttcaaagtccttcacatcgtatagacaacatttgataggaaggagaccaaaaatggtccaggaatgaacgtggagaaaagaaacgccaaccaccttctctgcgttgagagtaatggcctattattatcatctatctgccgtccatgtttgctttctgcaggatttaaaatatgaggcccaattggattatggtgccatattttactttctaggaagaaaattttttaaattatttattttcaaatcagttagaattggagctgaataataactagagaataaagcttttgtttttt

SEQ ID NO: 80121 - DNA, 570 bp, Homo Sapiens
gcttggacgacctggttaccccttgagtgcggaatatataatctaaagcattgttatgtgcaaaaaggtgccatggtgttaaaaattaaaacttggaattggttgtagtaccattcgttacatttcaaagtgactaatgctgatgtcaaaaccagaatgctaatggtaataacaggtcatatcaagagttttttgaactccagggtcttcatgctccgaaatactcatttgcgtttccatgtattctatcctcttaaaagttctcggtcacagtgcaatatagcatttgcagtagctccaacagtgcttcctttatgaaacattcagtggggagttctccttccagctctgccccactcctgcctttctacacttgtgtagagatatagccaggatgatgacaaggatgatgaccacaaataccacagctccaatgatgtagaatatttctctgaattcccctttctcctggcccatacactctaccgggctgtctgtactcttccggttaactgttcgggagggaatcactgcttgaacactgaaacagtagttttctcccctcgtgcc

SEQ ID NO: 80122 - DNA, 1132 bp, Homo Sapiens
  misc_feature (42)..(76): n is a, c, g, or t
acgacgagcgcagcggagttatgtgagcgaggaagcggccgnnnnnnnnnnnnnnnnnnnnnnnnnnnnnnnnnnncagtcgacggtaccggacatatgcccgggaattcggccattacggccgggggacgctcctgctcggctgggtcttcgcccaggtggccggcgcttcaggcactacaaatactgtggcagcatataatttaacttggaaatcaactaatttcaagacaatttcggagtgggaacccaaacccgtcaatcaagtctacactgttcaaataagcactaagtcaggagattggaaaagcaaatgcttttacacaacagacacagagtgtgacctcaccgacgagattgtgaaggatgtgaagcagacgtacttggcacgggtcttctcctacccggcaggaatgtggagagcaccggttctgctggggagcctctgtatgagaactccccagagttcacaccttacctggagacaaacctcggacagccaacaattcagagttttgaacaggtgggaacaaaagtgaatgtgaccgtagaagatgaacggactttagtcagaaggaacaacactttcctaagcctccgggatgttttggcaaggacttaatttatacactttattattggaaatcttcaagttcaggaaagaaatattctacatcattggagctgtggtatatgtggtcatcatccttgtcatcatcctggctatatctctacacaagtgtagaaaggcaggagtggggcagagctggaaggagaactccccactgaatgtttcataaaggaagcactgttggagctactgcaaatgctatatggcactgtgaccgagaactgttaagaggataagaataccatggaaacgcaaatgagtatttcggagcattggaaaaccctggagttcaaaaaaactcttgatatgaccctgttattaccattaggcattctggtttgacatcagccattagtcacttctgacatgtacccgaatggtactaacaacccaattcccagttctaattttttaccaccatggcaccttttgcacataacatgctttagattcatatattccggcacctcaggggttaaccggggcgcccacgcaaacaag

SEQ ID NO: 80123 - DNA, 780 bp, Homo Sapiens
  misc_feature (687)..(687): n is a, c, g, or t
agctccccgcacccctcgcactccctctggccggcccagggcgccttcagcccaacctccccagccccacgggcgccacggaacccgctcgatctcgccgccaactggtagacatggagacccctgcctggccccgggtcccgcgccccgagaccgccgtcgctcggacgctcctgctcggctgggtcttcgcccaagtggccggcgcttcaggcactacataatactgtggcagcatataatttaacttggaaatcaactaatttcaagacaattttggagtgggaacccaaacccgtcaatcaagtctacactggtcaaataagcactaagtcaggagattggaaaagcaaatgcttttacacaacagacacagagtgtgacctcaccgacgagattgtgaaggatgtgaagcagacgtacttggcacgggtcttctactacccggcagggaatgtggagagcaccggatctgctggggagcctctgtatgagaactcaccagaggtcacaccttacgctggagacaaacctcggacagccaacaattcagagttgtgaacaggtggcaacaaaactcaatgacaccgtagaagatgaaccgaccttactcagaaggaacaacactttcctaagcctgccgggatgtttttggcaaggacttaatttatacactttattattggnaatcttcaagttcaggaaagaaatattctacatcattggagctgtggtatttgtggtcatcatccttgtcatcatcctggctatatctctaca

SEQ ID NO: 80124 - DNA, 777 bp, Homo Sapiens
tggaccggtccggaattcccgggattggttctgctaggaactcatggaatggatgggcatttgatgacccctgggggtcatcttggccctctgacctggtgctctctctccactgggccttgtgctggctgagtgcaagacaagccttaggggctgtgagagggaggctggggtgcctgggcggggctgggagtgggacctgagatccctgcccactctctccccttcattggctgcccaggccactggccccagttctcagtgtcccttgggtccaggctccttgggccctaagcatcaccagaagggagtaagcagggagagaagcaatattactccctcccctacaccagggacttgccccagggcagctacctatgggtctttgcttccccagccagcctctcctcactgtgacccacccccatgggcccccgtcccaggcagccagcaccatgggcaggccctgccatggacagaaaaagagtttttctcttgttcagcctgcacgtggcctgaggaaggagtagaggctgggttggctggagccgtcctactgggcaagatggcgccccacttggagggcggtggtctgttacagggtgtgcaggggcagagaaggaagggaccaggggactgggccagtatgtggaggatggggcctgcgtgttcaaagccaaggcccgccccttccttgtgctcaaatggccaaagctgttcacgtctgtgctcaaccatctgcttcaaattgaagtaaaagccccaaaatgtcaagaa

SEQ ID NO: 80125 - DNA, 1479 bp, Homo Sapiens
ggatcgcgcccgccgcccgggcagccgctggctccagctcacgaaacagccccgggcgccgcgccgctctgagtccagcctcctactgagaacagtccctcccttgtgcgggtcgcacggctagccgcaggttcggccacgtcaaatccattttctaaaaaagcagggagcagagctctctcttcgccgccgacgcagaaaggagctggggaggaaaaagctgctgccttttgcgctggagattcgtgggcaaggcttctcattttcccaggctgcttcccctcccgggtgaggagcgtcctgagactaaggaaagagcctggaaaatggagcagacctggacgagagattattttgcagaggatgatggggagatggtacccagaacgagtcacacagcagcttttcttagtgacactaaagatcgaggccctccagtgcagtcacagatctggagaagtggtgaaaaggtcccgtttgtgcagacatattccttgagagcatttgagaaaccccctcaggtacagacccaggctcttcgagactttgagaagcacctcaatgacctgaagaaggagaacttcagcctcaagctgcgcatctacttcctggaggagcgcatgcaacagaagtatgaggccagccgggaggacatctacaagcggaacactgagctgaaggttgaagtggagagcttgaaacgagaactccaggacaagaaacagcatctggataaaacatgggctgatgtggagaatctcaacagtcagaatgaagctgagctccgacgccagtttgaggagcgacagcaggagacggagcatgtttatgagctcttggagaataagatgcagcttctgcaggaggaatccaggctagcaaagaatgaagctgcgcggatggcagctctggtggaagcagagaaggagtgtaacctggagctctcagagaaactgaagggagtcaccaaaaactgggaagatgtaccaggagaccaggtcaagcccgaccaatacactgaggccctggcccagagggacaagatctaaaaaaaataatgctgggaagtcctaaccacatcaagaatgcctcagatcagtgacccaaggaccttccagaatggatgaaatagacccaaagctgaattcacctaattttagggcccacaaccgaagacattcttttcagggttgaattttcagtggtatccattatgaaaactcacttcatggattcagtgggcaaatagcggcaagcaagagacatggattcacttattcggcaaacatttactgggcatgccacatgccagataccgggctaagtatctggcatgtgttacagaaacaaaagacctaaatcttgtcaccaagaaacatgttacatgattttaataagttccctgatagaagagcatggggtgctctggggaaatattggagggtcatccattccacattaaaagagcaagttgtcaaa

SEQ ID NO: 80126 - DNA, 942 bp, Homo Sapiens
gcggccgcaccatcgactcgccaacgagagaaggtcctggggcacggacaccgacgggttgcgactgtgacgtgaggtgttctcgcgcgcgctagcgcgcgtctccgggtgccgctgacgggcgtgcgcgcttgtgcggagccggaggtgggggccgaaccagccaaggttgcgggggccgcagagccggacgaagacggagggcggagccggcttcgggactgcggagactacacaccgagcgagcgcctgggcccgaagggagcgatgctgtggttccagggcgccattccggccgccatcgcgacggccaaaaggagcggcgcggtcttcgtggtgttcgtggcaggtgatgatgaacagtctacacagatggctgcaagttgggaagatgataaagttacagaagcatcttcaaacagttttgttgctattaaaatcgataccaaaagtgaagcctgcctacagttttcacaaatctatcctgtagtgtgtgttccatccagtttctttattggagacagtggaattcccttggaagtaatagcaggaagtgtttctgcagatgaacttgttacaagaattcacaaggtccgacagatgcatttgctaaaaagtgaaacatcagtagcaaatggcagtcagtcagaaagttcagtgtctactccatctgcgtcatttgaacctaacaacacttgtgaaaactctcagtccagaaatgcagagctttgtgagataccacccacttctgatacaaagtcagatactgcaacaggaggagaaagtgcaggccatgccacttcctctcaggagcctagtggatgctcagatcagagacctgcagaggaccctcaacatccgagtggaaagactaacaaaaaaacttgaagaaagggggggaagaggaaaggaaagggggaggacccggagggaatttagaag

SEQ ID NO: 80127 - DNA, 1040 bp, Homo Sapiens
  misc_feature (33)..(33): n is a, c, g, or t
  misc_feature (64)..(83): n is a, c, g, or t
  misc_feature (651)..(651): n is a, c, g, or t
gggcagtgcctagccaaaattaaccctcactanaagggaataagcttgcggccgccgctcaggnnnnnnnnnnnnnnnnnnnngcgggagactggagttttattatcactcaaatcagtctcctcgagaattcggggagcagaatttttaagcataacttggtagggggaagccagtgagccaggagtgctggttggtcagggatgaactcacagggagtcgaagctgtcttcttgcgcttcgtcagttcccgggtgggggccacaagatcagacgaggcagtttatccatctgtgtggcgtcagctgatccagcaagtgcggggtctgcaacatgtctcaagcactgatcttagaagcagtttagggagggtcagaatcttgtagcctccagctgcgtgactcctaaaccgtaatttctaatcctgtggctaatgttagtctagtccccagacaagaaggaggtctgcattgggaaagggctgtcacagtctttgtttaaactataactacaaactaagtttctcccaaagttagttcagcctacgcccaggaatgaacaaagacagcttggaggttagaaacaagatggagctggttaagttagctctctttcactgtttcagtcacaattttgcaaaggtggtttcanaatgactatccatgagtttgtaaaataacccaggatgcctgttgttcacagcacatagcctgctgtgtgtctaagctgattatcagctagactcgggggagagaaaatgccaaagaaatgggcttgccctgcttagagtctcaggtccccctttggtgcatgacaataggtatggattgggaaggggaaagacagcatctccatattgggacagtttggaatcttgtgccattcttcatgcgccggcccattgcccggtattctgcgttaacgtggttctctgtgtgctgacacaagggctgcttggtattccccagcgtccgctgggtttgaactccacaaatcaaagatgggcccggcgatctgctaggcattccaagggcgaaatc

SEQ ID NO: 80128 - DNA, 218 bp, Homo Sapiens
ctcagtgataggacatgccctttggaaacactcctcagaatacatatgagtgctactaacatatcacatcctgctgcctctaatttaaagtgtctgtgaaactgttgtctgaaatgcccttagcaggttacaatttcacacactgactacagacaggcagcgtatgcagcagatgtacagctgggcaatgatgatggtaaataaaatttttataattc

SEQ ID NO: 80129 - DNA, 771 bp, Homo Sapiens
gcattggcatatgctcattgcgggcagtgtggcttcctgctgccccctcgtgccaagactgaccacggggtcccatctggagcccgggcccggggctgtggttaccagctatgcatcaacgagcaggaggagctgggcctcgtgggcccaggaggggccactgtcagcagcatctgtgccagctgagaggggctttgggcctggccctgaggggatatgaatgcttcctagagttctttctgggggtgtggagccctcttagaaggagacaggctgtatttcttgaggacatggagtctttctcaaggacacaaaactcttccagggacctggagcccttcccaggacatggagaacttcctgagggcctggagtccccctgcatcatggagtccttcttaaggactggagcctatgcaggcacagagtccctcaggaccaaggagtccctcctgcaggtgtggagcctttcctgggatgcagagccttcccaagacatggattccttcccagggagacaaagccctgtcaggagcacagcatctttccagaggaggtggagtctatcttggggaaaccaaatttccagattttcccagaggctcagcaactctggcctcaggcttccttcccagaggcagcgtctgggctgtgctgtgctgtggaggagggattgcaggatggatggagctgggactggggctgtctgggtggctggtatcctcgtttgatacaggtggagtctgtgtgtctccagtgattgattggttc

SEQ ID NO: 80130 - DNA, 1665 bp, Homo Sapiens
  misc_feature (1453)..(1490): n is a, c, g, or t
  misc_feature (1494)..(1494): n is a, c, g, or t
  misc_feature (1499)..(1503): n is a, c, g, or t
  misc_feature (1505)..(1526): n is a, c, g, or t
cggtccggaattcccgggatatcgtcgaccccgcgtccgccgcctcttcttcctcctgcgtcctcccccgctgcctccgctgctcccgacgcggagcccggagcccgcgccgagcccctggcctcgcggtgccatgctgccccggcggcggcgctgaaggatggcgacgccgctgcctccgccctccccgcggcacctgcggctgctgcggctgctgctctccggcctcgtcctcggcgccgccctgcgtggagccgccgccggccacccggatgtagccgcctgtcccgggagcctggactgtgccctgaagaggcgggcaaggtgtcctcctggtgcacatgcctgtgggccctgccttcagcccttccaggaggaccagcaagggctctgtgtgcccaggatgcgccggcctccaggcgggggccggccccagcccagactggaagatgagattgacttcctggcccaggagcttgcccggaaggagtctggacactcaactccgcccctacccaaggaccgacagcggctcccggagcctgccaccctgggcttctcggcacgggggcaggggctggagctgggcctcccctccactccaggaacccccacgcccacgccccacacctccctgggctcccctgtgtcatccgacccggtgcacatgtcgcccctggagccccggggagggcaaggcgacggcctcgcccttgtgctgatcctggcgttctgtgtggccggtgcagccgccctctccgtagcctccctctgctggtgcaggctgcagcgtgagatccgcctgactcagaaggccgactacgccactgcgaaggcccctggctcacctgcagctccccggatctcgcctggggaccagcggctggcacagagcgcggagatgtaccactaccagcaccaacggcaacagatgctgtgcctggagcggcataaagagccacccaaggagctggacacggcctcctcggatgaggagaatgaggacggagacttcacggtgtacgagtgcccgggcctggccccgaccggggaaatggaggtgcgcaaccctctgttcgaccacgccgcactgtccgcgcccctgccggcccccagctcaccgcctgcactgccatgacctggaggcagacagacgcccacctgctccccgacctcgaggcccccggggaggggcagggcctggagcttcccactaaaaacatgttttgatgctgtgtgcttttggctgggcctcgggctccaggccctgggaccccttgccagggagacccccgaacctttgtgccaggacacctcctggtcccctgcacctctcctgttcggtttagacccccaaactggagggggcatggagaaccgtagagcgcaggaacgggtgggtaattctagagacaaaagccaattaaagtccatttcagacctgcggaaaaannnnnnnnnnnnnnnnnnnnnnnnnnnnnnnnnnnnnnaaanacccnnnnnannnnnnnnnnnnnnnnnnnnnncatggtcggccgcctcggccccccgaaaagctttctaaaccattcttttgggcgcggcggcccccgaaaggaaaagggaactgggcccatacctggttccctagaaagaccccggggcaaggaaaaaggggctgggaat

SEQ ID NO: 80131 - DNA, 711 bp, Homo Sapiens
ctgggccccagattaattcagcaaatattgactgactgctgtggacaaagtgctggctcacccttggagggatccaacctccaggagctcgagcgcagcagggtagacaagccagggacacgtgatgcggctgtggcagaagccaagtgcaggagctcccaggctcctttgttttaatgagtcaccttaaatgtaactctgccctctcccttgcttcgccaaggctagcgagaaactcagtcttagccacacaggaggaatcggaccccttctgggggtttatgtggagtctgggaaaccaagggtggggtgaggcctggtactcaatccaggaggggcccctatgaccaccctcgcctgtttttcttctcaatgctccctgatcactggaccactggacactgatgtgtcctcagtgcttggggtctggctctgcaggcagcctgcagccagcctccatccccctttcagggacaaatggccttccaccagagtcggtgagtggagaggcacaatgccactccccttcctgaggtgggggtaggggaagggagtcccacaatgcagttacaaacaggatggacaagaacacctgctcaggagtcagacttacagggttcaaagttctgctccaaggtttgaccctaacaagaatcacttagtaataagtggttatgctctgtgaccttgagtaaattacttaccctctcc

SEQ ID NO: 80132 - DNA, 603 bp, Homo Sapiens
ccctagaggcagaaagttacttctaataatctatatagctaaaacgaaaaatacctgaaagttaatacatacatatgtagatatattttgttatgtgataaatgtttcttgtttgcacacttttggacttgagaaatctgcttttgttttgtgcctactctgagtttagaacccaaataagaggacttgttaaatatagagtgtactttttgttaaaactattgctagcttcacctgtataccatcattgttccaaattaaataactgttttgggtcagaatataaatgctgggaatatacattttattacttcttaatctgggtgtcaaagattttaccacctggtaaataatgttggacttcaacttgttactggcacattttaatagtagatgaaacatgtttttcttggttatgtgaataaatgtatgttgtgctcttcatacttgttggattgtatagagattaaatagtgatatgtatattttgttgtttgctttggtatgcaactcatgtaattttagtgctttgactagcttaaaacttcaaacaagtaattttataataaagttggactaatgtttacaaaaaaacctcgtgcc

SEQ ID NO: 80133 - DNA, 1181 bp, Homo Sapiens
  misc_feature (513)..(563): n is a, c, g, or t
  misc_feature (574)..(574): n is a, c, g, or t
cccccatcaactccgtgctgttgttcctcatggggatggcgtgcgccacaccgctgctgagtgctgctgggcccgtggctgcccctagggaagccttccgggggcgggcgctcctgtccgtggagtcgggcagcaagcccttcacccggcaggaagtcattggcttcgtcatcggctccatctccagcgtgttgtacctgctttcccggctgcctcagatccgcaccaacttcctccggaagtccacccaggggatctcctactctctgttcgcgctggtgatgctggggaacacgctgtatgggctgagcgtgctgctcaaaaaccccgaggagggccagagcgagggcagctacctgctgcaccacctgccctggcttgtgggcagcctgggcgtgctgctgctcgacaccatcgtatccttcagggcgtgtggggcaagtggcggggtgtgggcaaggaagcttctgcctgcacacagcgtcagcactcatccgtctcttcctcccttcnnnnnnnnnnnnnnnnnnnnnnnnnnnnnnnnnnnnnnnnnnnnnnnnnnntgttcacccangtcgtgcacacctcctgtgtgccaggcacccagctggaccctggagccgtgagtgagcaagaacagccatgagtgccccagaagcttacagcccagcggggcgcagagaggacacaacgctatcatcaaagaattacttcattgcagtggcaccaagtgctgcagagaaaaacaacaagagcgtctagccagggaccgtcctggttagaggggcagcaaaggcccctataagtctcattgaacctgtgacttgacagagtaggagaagtcaggcgaaggcaggagaggaatgttctaggctgtgcagacgagagctggagtgtggagagacacatgacttggtcagacaaacctgggttcaaatcctggctcctcccctgcttcctagctgtgtgacgcagggcacacagtcaacctctctgtgctgccgtgtcttcacctcagttaacagccactgtctcgtcaggatgttgtgtaagatgaggtatctggaaacactccccacaggaccccgttttcagtgagggctcagaaagtgtttgctgaatggctgtaaagagcgttacctgggtctcatttcggagcaagtaaacatggcctttgtttt

SEQ ID NO: 80134 - DNA, 1080 bp, Homo Sapiens
aaaatgtatctttggtggcccggcagagctcttgcatggggtgagaatggtaatttaggaagagcaagtcttcccatctgtgaagcagaagaaaaaagtggacttaaggagaagttcgggtgctgtttatttagataggagtaaggagagtgcagttggggaaaagcacttcagaggctttacttagactagcagaagtctgtttggcagggtgggaagcaagtgcagttgggagaaaaacgttttcaataggcagtttcagaattggaaattggaggagggcagtccatttcaacatttccaacagtattaaagaaaatttgcgggttgtttgtcaaaaggggtcatatgctttaaagattgagagatcttttcggtgaagtaggggagctggggacatcgtgatgtgacaagagccgtgggctcagaggctggggacctgggtgtttaacccaactcttgtgagtggtgtggctttcatagctttggttctctggtcttcactttatctgccaagtgaagacatttgactggatgtcgtgatcttgagttgctttcagctccagaattcgaagaccccttccattgggcattcatctaatttcaaagatgctccctggctccagctctgcagtgaagcagaacaaactgatacagcctagcttgggggtggggagtcggccctccttttcccctcccttcccaggtcctctgggtgattgggggaaactgagaagccgttctcttctccagagcactccatttaacaagcattgcagagcctggctcgtgctgcagtgaacaaatgctgacttcagcctttaccctgggtttcaggtcacactgattgtttgcaaaacatgttctttttttgtcacttgccagtacttgttctctgtgagtaaaacacaaacacatcctcagggatgttgcacaccagtttgcagcctgcagcttctgccctctggcctgcccaggtcctcggctccgggacgaggatgctccgggatttcgggagacagcagttgttttgacatgaatctcaaagttcctacaaagcttatttctttgaagaaggcc

SEQ ID NO: 80135 - DNA, 1608 bp, Homo Sapiens
  misc_feature (956)..(976): n is a, c, g, or t
  misc_feature (994)..(1423): n is a, c, g, or t
  misc_feature (1446)..(1446): n is a, c, g, or t
  misc_feature (1515)..(1515): n is a, c, g, or t
gagaaatgaaaatcgggatatcagtgaagttattgctctcggtgttcctaatcctcggacttccaatgaagttcagtatgaccaaaggctcttcaaccaatccaagggtatggacagtggatttgcaggtggagaagatgaaatttataatgtttatgatcaagcctggagaggtggtaaagatatggcccagagtatttataggcccagtaaaaatctggacaaggacatgtatggtgatgacctagaagccagaataaagaccaacagatttgttcccgacaaggggttttctggttcagaccgtagacagagaggccgagaaggaccagttcagtttgaggaagatccttttggtttggacaagtttttggaagaagccaaacagcatggtggctctaaaagaccctcagatagcagccgccccaaggaacacgagcatgaaggcaagaagaggaggaaggaataggcacaggtctctccaaagtgaatgaactcttacccataaccctaatgatgcaagtcatatgggggaacactttgtaaatggtcaggataaaaaccaaatctgggtgccagatcccagcactactttttattactggagaaatggggggggatagaaaattctactttgaattatttagttttttttaaagagtgggttgtgtttgtgcttctcccacctttcagcatttatagaacatgctgccccacatacaaagtcaagaccacttacttttatgtgacactagtagtttggggttaatgttttgtgtaagaacagctgcatatgagtaaagttaccccaaccacagtgaggaggaagatgttcacatactggaactgtcctgccaaataaattttgcccctattgtgctctgttttaatttggagtgggcaaagtaacctcttgcttggtgcaactatttgtttcaaataaaaacatttagacnnnnnnnnnnnnnnnnnnnnncctcgtgccgaattcttnnnnnnnnnnnnnnnnnnnnnnnnnnnnnnnnnnnnnnnnnnnnnnnnnnnnnnnnnnnnnnnnnnnnnnnnnnnnnnnnnnnnnnnnnnnnnnnnnnnnnnnnnnnnnnnnnnnnnnnnnnnnnnnnnnnnnnnnnnnnnnnnnnnnnnnnnnnnnnnnnnnnnnnnnnnnnnnnnnnnnnnnnnnnnnnnnnnnnnnnnnnnnnnnnnnnnnnnnnnnnnnnnnnnnnnnnnnnnnnnnnnnnnnnnnnnnnnnnnnnnnnnnnnnnnnnnnnnnnnnnnnnnnnnnnnnnnnnnnnnnnnnnnnnnnnnnnnnnnnnnnnnnnnnnnnnnnnnnnnnnnnnnnnnnnnnnnnnnnnnnnnnnnnnnnnnnnnnnnnnnnnnnnnnnnnnnnnnnnnnnnnnnnnnnnnnnnnnnnnnnnnnnnnnnnggcgcgttgctgggttttccaangctcgcccctgacgacacaaaatcacgccagtcagaggggaaccgcagacataaatcagcgttccctgnactcccggccctctgtcgactgcgtacgaactgcgcttctctcggagggggctccaatcagcgagaccatcggtagtctctcactgcgttgca

SEQ ID NO: 80136 - DNA, 385 bp, Homo Sapiens
ggatcatagtccacatagcacagtaactggtatgaaaacactcgatatttgctgaggatggagactgcagccaactcaacaacttctctgtccatctcaccaccaagtctggtcagctgaaagaacactttgcacagttcggccatgtcagaaggtgcattttaccttttgacaaggagactggctttcacagaggtttgggttgggttcagttttcttcagaagaaggacttcggaatgcactacaacaggaaaatcatattatagatggagtaaaggtccaggttcacactagaaggccaaaacttccgcaaacatctgatgatgaaaagaaagatttttgagactgcagcctattaataaagttaacataactgagaaaaaa

SEQ ID NO: 80137 - DNA, 1775 bp, Homo Sapiens
  misc_feature (975)..(1031): n is a, c, g, or t
aaggctaggtaagcgaggctgggtggcgaattcggcacgagggcggaagaagatggcgctcaccagctttttacctgcacctactcagctatctcaggaccagcttgaggctgaagaaaaggcaagatcccagagatcacggcagacctcactggtctcctcccgaagagaacctcccccgtacggataccggaaaggctggatacctcggttattagaggattttggagatggaggtgcttttccagagatccatgtggcccagtatccactggatatgggacgaaagaaaaaaatgtcgaatgcgctggccattcaggtggattctgaaggaaaaattaaatatgatgcaattgctcgacaaggacagtcaaaagacaaggtcatttatagcaaatacactgacctggttccaaaggaggttatgaatgcagatgatccagacctgcaaaggcccgatgaagaagctattaaagagataacagaaaagacaagagtagccttagaaaaatctgtatcacagaaggtcgccgcagccatgccagttcgagcagctgacaaattggctcctgctcagtatatccgatacacaccatctcagcaaggagtggcattcaactctggagctaaacagagggttattcggatggtagaaatgcagaaagatccaatggagcctccaaggttcaagattaataagaaaattccccggggaccaccttctcctcctgcgcctgtcatgcattctcctagccgaaagatgactgtaaaggaacaacaagagtggaagattcctccttgtatttctaactggaaaaatgcaaagggttatacaattccattagacaaacgtctggctgctgatggaagaggactacagacagtacacataaatgaaaatttcgccaaattggcagaagccctctacattgctgatcggaaggctcgtgaagctgtggaaatgcgtgcccaagnnnnnnnnnnnnnnnnnnnnnnnnnnnnnnnnnnnnnnnnnnnnnnnnnnnnnnnnntggcccagaaagccaggaaagaagagctgggatcaaaactcatgtggaaaaagaggatggggaggcacgtgagagggatgaaatccggcatgacaggcgaaaagagagacagcatgaccggaatctttccagggcagctcctggattaagaggtcgaaaccttcagagaaatgaaaatcgggatatcagtgaagttatgcctctcgggtgttcctaaatcctcggacttccaatgaagttcagtatgaccaaaggctcttcaaccaatccaaggtacaagtttaggaacagcatattgtgtgtgttgatgtgaatacctatcctcagggaaacgaaaattaacatactttacatttggatgtaaatgccagcatgatgacaaaaaaattggaagttgtatgttgaaacttgagacaagatgaaacagttctgattttaacttcttatagtgggctgagatttgagacactttactccatctataatatgattttcctgttgtagtgcattccgaagtccttcttctgaagaaaactgaacccaacccaaacctctgtgaaagccagtctccttgtcaaaaggtaaaatgcaccttctgacatggccgaactgtgcaaagtgttctttcagctgactcgacgccgcagtccaaggaattcttctcacaaaagcaaccggctgattgatacttctacgcagcgccgcagcacctcgcgctgctgaggccgccatcttcagactccc

SEQ ID NO: 80138 - DNA, 860 bp, Homo Sapiens
cggcacgagggccagcggtgctgtcgctcgcgctggaagaagcggaagaagatggcgctcaccagctttttacctgcacctactcagctatctcaggaccagcttgaggctgaagaaaaggcaagatcccagagatcacggcagacctcactggtctcctcccgaagagaacctcccccgtacggataccggaaaggctggatacctcggttattagaggattttggagatggaggtgcttttccagagatccatgtggcccagtatccactggatatgggacgaaagaaaaaaatgtcgaatgcgctggccattcaggtggattctgaaggaaaaattaaatatgatgcaattgctcgacaaggacagtcaaaagacaaggtcatttatagcaaatacactgacctggttccaaaggaggttatgaatgcagatgatccagacctgcaaaggcccgatgaagaagctattaaagagataacagaaaagacaagagtagccttagaaaaatctgtatcacagaaggtcgccgcagccatgccagttcgagcagctgacaaattggctcctgctcagtatatccgatacacaccatctcagcaaggagtggcattcaactctggagctaaacagagggttattcggatggtagaaatgcagaaagatccaatggagccctccaaggttcaagattaataagaaaattccccgggggaccacccttctcctcctgcgccctgtcatgcatttctccctagcccgaaagatgactggtaaagggaacaaccaagagtgggaagaattccctccctgggattttcctaactgggaaaaaatgccaaagggggttattacaaatt

SEQ ID NO: 80139 - DNA, 871 bp, Homo Sapiens
ggtctaatggtaattgtataacccttgtgcactttgttcccaagtttagtaatacccacgtggagtcttccactcttgttgttcctttgacgagtcatctttcggtctaggagaatgcatggccaggcgcaggaggagaagtggtcacccggggaattgtcttattaatcttgaacccttggaggctccattggatctttgctgcatttctaccatccgaataaccctctgtttagctccagagttgaatgccactccttgctgagatggtgtgtatcggatatactgagcaggagccaatttgtcagctgctcgaactggcatggctgcggcgaccttctgtgatacagatttttctaaggctactcttgtcttttctgttatctctgtgtaatagcttcttcatcgggcctttgcaggtctggatcatctgcattcataacctcctttggaaccaggtcagtgtatttgctataaatgaccttgtcttttgactgtccttgtcgagcaattgcatcatatttaatttttccttcagaatccacctgaatggccagcgcattcgacatttttttctttcgtcccatatccagtggatactgggccacatggatctctggaaaagcacctccatctccaaaatcctctaataaccgaggtatccagcctttccggtatccgtacgggggaggttctcttcgggaggagaccagtgaggtctgccgtgatctctgggatcttgccttttcttcagcctcaagctggtcctgagatagctgagtaggtgcaggtaaaaagctggtgagcgccatccctcgtgccgaattcgccacccaggcctcgctaccttaaaaccgttagagttactgcc

SEQ ID NO: 80140 - DNA, 443 bp, Homo Sapiens; identical to SEQ ID NO: 15245

SEQ ID NO: 80141 - DNA, 742 bp, Homo Sapiens
  misc_feature (102)..(102): n is a, c, g, or t
  misc_feature (119)..(119): n is a, c, g, or t
ccagtatgtgactcactaagaaccctgctataaaagcttttgatgaatcttagcaaagctaaatatctctaacttagagattcctatgaactcaggtcattntcatagcctgtttattntgtaggtctaatttagttctcaggaaaattaaactcatgctttatgactgtatcgttaaaggtacttgagcgtatgttgctgtaggtggtatgacactcaaatgcataagaacttgaagggatttattcttaaccactagaatatgaagagccctttttacctgagaagagtgaaattatgtcagaccttttaatttgatatcactgagtaaaaggtatgttcctatagccataggaatatgtctgcttcctttttttcatgttgagaaaacagtcaaatttaaccatttggagtttatttgaattcttggaaagagcaatattcaaaaccttttcaaaaataagatattctggactactggatggatgttttgttttcagttcatttttcatcagtagagatggtgatttcggttttgtagtatccttgtttctatgtctgtgcatgttaacattggatgtatttgtatatacttaattaatatacagactgtgtgtcattctggcttgattagaagctaagtcagttactgagtaacattttgcaactttattccagcaagtactaaatcggccaaaaaaagttttgtttttgataccattaaaataatattctctaaaaa

SEQ ID NO: 80142 - DNA, 841 bp, Homo Sapiens
ccaaacaaaaacttatacacaaatgtttatagcagcattacataataaccaaaatgtgtaaatccaaatggctatcaatggatgaatggataaacaaaatgtggtatatccatgcaatagagtattatttggccataaagaggaatgaagtaccaatacatgctacaacatagatgaactctgaaaacattaggctgagtaaaggaagataagacagaaaaaggcactactgtatgagcccatttatatgaaatgtccagaacaggcaaatctatagagacagaaaacaaattagtgatatcaggagttaagggggagaagagaaggaatgactgcttaagggtacagggtttctttttggggtaatgaaaacattctggaattgataatgatgataattgtacaacgttgtgaatgtactaacggccactaaattatacactttaaaatggtgaattttatatgaattttacttcaattttaaaaaagaaaaagaatgaagtactgctgtgtgctgctatatagatgaaaccggaaaacattatactaactggaagatgccagtcacaaaagaccacatattattatgatcccatttctgtgaaatatccaaaatgggcaaatatatagagaaacagcagattagtgctagccaggggttggggaggattggagggtgatatctaaacagtagattttcttttggggttggtgaaaatgttctaaaattgattctggtgatggttgtacaattctgtaaatacacaaaaaccattaaatcttacaccttacgtgggtaaattttatggtaaattgcatttcaataaagcttttttaaaaa

SEQ ID NO: 80143 - DNA, 1130 bp, Homo Sapiens
  misc_feature (919)..(952): n is a, c, g, or t
ggggggtgctcccgccagcatggggtgcccaaaaacggtccatcggccattgaacgtgggaagccaggataaggccgggcctcaagcacctaacggggacagcctgtccggctgggtggctgctgtgaaagcggatgaatccctgggctgacaaggtaaaaggttccagacatggctgaaatccagtcccgcctgccctacgtgtcctgtgtgcggcagctagaggtgtcaagtccagctcctactgcgagtacctgcgcccgcccatcgactgcttcaagaccatggactttgggaagttcgaccagatctatgatgtgggctaccagtacgggaaggcggtgtttggaggctggagccgtggcaacgtcattgagaaaatgctcacagaccggcggtctacagaccttaatgagagccgccgtgcagacgtgcttgccttcccaagctctggcttcactgacttggcagagattgtgtcccggattgagccccccacgagctatgtctctgatggctgtgctgacggagaggagtcagattgtctgacagagtatgaggaggacgccggacccgactgctcgagggatgaaggggggtcccccgagggcgcaagccccagcactgcctccgagatggaggaggagaagtcgattctccggcaacgacgctgtctgccccaggagccgcccggctcagccacagatgcctgaggacctcgacaggggtcaccccctccctcccacccctggactgggctgggggtggccccgtgggggtagctcactccccctcctgctgctatgcctgtgacccccgcggcccacacactggactgacctgccctgagcggggatgcagtgttgcactgatgacttgaccagcccctcccccaataaactcgcctcttggaaatgannnnnnnnnnnnnnnnnnnnnnnnnnnnnnnnnnaaagggcggcccgctctagagtaatcccctcgaggggcccaagcttacgcgtacccagctttctttggtacaaagtggtccccttatagtgaggtcgtattataagctaggccactgggccgtcgtttttacaacgctccgggactggggaaaactgctaaccttgggaatcttttgg

SEQ ID NO: 80144 - DNA, 1154 bp, Homo Sapiens
  misc_feature (17)..(17): n is a, c, g, or t
cctttggggccccaganccacgcgttctgttgccccggagaacttcgacttctgcctccgtccatctcggaggcagtgctggggcttgcgccctcgggggaccccccttcatccctcgagcagtcgggtccggcgtcctcctcatactctgtcagacaatctgactcctctccgtcagcacagccatcagagacatagctcgtggggggctcaatccgggacacaatctctgccaagtcagtgaagccagagcttggcagggctgcggcgcgaaaagaggcggcgcggacagcgcaggtgcaggtgccccgagcacccagctgcgcatattaagccactccacgggtgcgcgtggggcccgcgccctcctctcggtggagcaggactagctgcttaagggcgcgcacagccgtgttctccagcatctgctccagctggccgaggggtaggctcctgggtccccccaggccccacaatgaggagagcagtcggcctgtcgcaggcagcgcacggtccagggcgtcagcgaggcgtccgtctggtagagtacgatacggtgtgcatcctcctgctgggccagccaccctggacagccggaactcttggatgctatccagtgcggaggcccccaggcgtgcccggatgatgtcactgttaaggagtagcgtcggaccgatggcctgcagggcgtgctgcagctccagcgtgaaggccaccatggggacctcagcacacacaggcaggattgccacagttgccaggttgctggctgggttggtgagttccgagtgtgggggcacacccaacccagagcctgggaagggtccttgcagctgctgcaaattccctagaattttctggctcagtaggtggataaggcgggtcacgacctgcgggtaccggcgtttgatgtgacccaaggtgccctcgggaagcttggccagctccgtgtcgcgcaccgcgtgcaccgtcgtggctcgcggctgccgggtcagtgcctccaccacgccgatgaggtcgccgctccggccccgatcatcacgccaagcacctgagggacgaacggcactggctgcgcaccgcaaatccgtcccgccgagccttccccgggcgccaggacgtcctggcctcgtgccgaattcgccacccaggcc

SEQ ID NO: 80145 - DNA, 1673 bp, Homo Sapiens
  misc_feature (1635)..(1635): n is a, c, g, or t
  misc_feature (1640)..(1640): n is a, c, g, or t
  misc_feature (1654)..(1654): n is a, c, g, or t
cagtaactataacggttctaaggtagcgaggcctgggtggcgaattcggcacgaggccaggcggcacccgatcccagcggggcccgctgcctggactacagggggaccctgtgaaggcccacatccctggaaaccccctcggccctctgctgagccgctgcgtctccatgccagggacatctcaggcttgcagggtggccccgctccgacttcgacatggcctatgagcgtggccggatctccgtgtcctgcaggaagaggcctccggggggtccctggcagtccccgctcggcaccccactcaggagcctcgtgagcagccggcaggcgcctgtgaatacagctactgtgaggatgagtcggccactggtggctgccctttcgggccctaccagtggccgccagagcctagcgagcatcttctgaggcagcaaaagcagtgagctggccaagctgatgcgtgattgaggacccctccctcctgaacagcagagtcttgctgcaccacgccaaatgctggcaccatcattgcccgccagggagaccaggacgtgagcctgcacttctgtgctctggggctcgcctgcacgtgtaccagcgcatgatcgacaaggcggaggacgtgtgcctgtacgtagcgcagcccggggaactggtggggcagctggcggtgctcactggcgaacctctcatcttcacactgcgagcccaacgcgactgcaccttcctgcggatctccaagtccgacttctatgagatcatgcgcgcacagcccagtgtggtgctgagtgcggcgcacacggtggcagccaggatgtcgcccttcgtgcgccagatggacttcgccatcgactggactgcagtggaggcgggacgcgcgctgtacaggcagggcgaccgctccgactgcacttacatcgtgctcaatgggcggctgcgtagcgtgatccagcgaggcagtggcaagaaggagctggtgggcgagtacggccgcggcgacctcatcggcgtggtggaggcactgacccggcagccgcgagccacgacggtgcacgcggtgcgcgacacggagctggccaagcttcccgagggcaccttgggtcacatcaaacgccggtacccgcaggtcgtgacccgccttatccacctactgagccagaaaattctagggaatttgcagcagctgcaaggacccttcccaggctctgggttgggtgtgcccccacactcggaactcaccaacccagccagcaacctggcaactgtggcaatcctgcctgtgtgtgctgaggtccccatggtggccttcacgctggagctgcagcacgccctgcaggccatcggtccgacgctactccttaacagtgacatcatccgggcacgcctgggggcctccgcactggatagcatccaagagttccggctgtcagggtggctggcccagcaggaggatgcacaccgtatcgtactctaccagacggacgcctcgctgacgccctggaccgtgcgctgcctgcgacaggccgactgcatcctcattgtgggcctgggggaccaggagcctaccctcggccagctggagcagatgctggagaacacggctgtgcgcgccctttagcagctagtcctgctccncccanaaggagggcgcggncccacgcggcaccgtggag

SEQ ID NO: 80146 - DNA, 1378 bp, Homo Sapiens
  misc_feature (1239)..(1239): n is a, c, g, or t
aaggtagcgaggcctgggtggcgatttcggcacgagggccccacgcgcaccgtggagtggctaaatatgcgcagctggtgctcggggcacctgcacctgcgctgtccgcgccgcctcttttcgcgccgcagccctgccaagctgcatgagctctacgagaaggttttctccaggcgcgcggaccggcacagcgacttctcccgcttggcgagggtgctcacggggaacaccattgcccttgtgctaggcgggggcggggccaggggctgctcgcacatcggagtactaaaggcattagaggaggcgggggtccccgtggacctggtgggcggcacgtccattggctctttcatcggagcgttgtacgcggaggagcgcagcgccagccgcacgaagcagcgggcccgggagtgggccaagagcatgacttcggtgctggaacctgtgttggacctcacgtacccagtcacctccatgttcactgggtctgcctttaaccgcagcatccatcgggtcttccaggataagcagattgaggacctgtggctgccttacttcaacgtgaccacagatatcaccgcctcagccatgcgagtccacaaagatggctccctgtggcggtacgtgcgcgccagcatgacgctgtcgggctacctgcccccgctgtgcgaccccaaggacgggcacctactcatggatggcggctacatcaacaatctgccagcggacatcgcccgcagcatgggtgccaaaacggtcatcgccattgacgtggggagccaggatgagacggacctcagcacctacggggacagcctgtccggctggtggctgctgtggaagcggctgaatccctgggctgacaaggtaaaggttccagacatggctgaaatccagtcccgcctggcctacgtgtcctgtgtgcggcagctagaggttgtcaagtccagctcctactgcgagtacctgcgcccgcccatcgactgcttcaagaccatggactttgggaagttcgaccagatctatgatgtgggctaccagtacgggaaggcggtgtttggaggctggagccgtggcaacgtcattgagaaaatgctcacagaaccggcggtctacagaccttaatgagagccgccgtgcagacgtgcttgccttcccaagctctggcttcactgacttggcagagattgtgtcccgggattgagccccccacgagctatgtctctgatggctgtgctngacggaaaggagtcagattgggtctgacagagtatgagggaggacgcccgaaccccgactgctcgaggggatgaaagggggggtccccccgaggggggcaaagcccccagcactggcctcccaaaaatggagggaaggg

SEQ ID NO: 80147 - DNA, 561 bp, Homo Sapiens
ggcacgaggaaatggctgataataatctagggtatggacatctaagcatgtgttaagtatgcctgcagttttggatactgaaagattacacagattaatttgattccccatttatcaagctacagcagggccaggctcactttgttgtttggtttcttagtttcttgttcctggtcgaatgacagatgagactggtgaattatggagaatttctgtcactgccctctctagccttggcatagcactgtggctcctctctccaaatttctaggtgatccagccggctgggctctatgtactgaagcataggctgcccagcgtaagcagaattgctaacaggatactattatggtacccacctgtgtggccttgtgggggtgggggaacttacctttgttcctgtcctcctctagaaaatcagttacatttctcttgcctccctcccaaggatgatttccagggaagcaaattaaaaagcggtgaaaagcctttaacaattactcagaaatctatcatttcatcctctttcacctccagttcaagtttaagaacagtcctttc

SEQ ID NO: 80148 - DNA, 810 bp, Homo Sapiens
  misc_feature (294)..(325): n is a, c, g, or t
  misc_feature (631)..(631): n is a, c, g, or t
  misc_feature (678)..(678): n is a, c, g, or t
gagggggctgagggctgatgtgggatacacatggacagcttagtccccacacccaggcacaagtgactgtgagcagctggcactgctgcagatagtgctggccagctacaactctgacaggtgacacaccacaggaatgcagggggcgaggggtgatacaggagcaggacgttttgactggacctctgggggctgaggggaagggaaggcattgcaggaggggctggcagaggcacagaggcatggggatgcagccgcattgctgggaagggtggggccggggccggtctgtcnnnnnnnnnnnnnnnnnnnnnnnnnnnnnnnngcaagtcctcagttctgttacagactgagaagctcaagtcagcccactgtagaaaagctgggagtgttcatccgaaccgtgaattcagctttttcacgccgagagcagagctgtggggcggggttgtagacatgaatgcgctccattcaccatggacaggccagccctgcggccacccagcctgcagctgagccaccaggcctgaccagggccaccgagtaccaggctctgagggcagcaccctgactgaggggccgaggcagaggtttcatacagagatgagcttcatgctgtcacctttcacanagtaccggccaagcctctcacccctctgggcctcccttttgtggtgngagcttggggaaacttggtggggctgcctgtctgctgggcagggtgtggctggaggacatggggcctgctgacacagtgaccacatgcctcatcggtacgggtgctgccttggctggactgactgccatctc

SEQ ID NO: 80149 - DNA, 341 bp, Homo Sapiens
ggaagttctacaggcagaaggaatatgattgagtcagaaatttggatctatcaaagaaatgaagagtatcagaagtgatataatcaaaggtaaaataaaatatgtttatacctgaaattattttaaaagttagccatctaaagcaaaatctgtcacagtgtattatgtgtttacaccacatttaaaagtacaacaacaagcacgagggatgggcagaaggaattcagagtgtactgttaaaagtttcttatactgcatgtgaagcaatatgatataattgaagacagattgttttataatgtatttataaaccatagagcaatcactaaaaatatactttt

SEQ ID NO: 80150 - DNA, 1698 bp, Homo Sapiens
ggggcacgagtctttccttagtaacctgggcgatagctgtggatgtttccaaggattgtcttcagtcatggccttgggattaaagtgcttccgcatggtccaccctacctttcgcaattatcttgcagcctctatcagacccgtttcagaagttacactgaagacagtgcatgaaagacaacatggccataggcaatacatggcctattcagctgtaccagtccgccattttgctaccaagaaagccaaagccaaagggaaaggacagtcccaaaccagagtgaatattaatgctgccttggttgaggatataatcaacttggaagaggtgaatgaagaaatgaagtctgtgatagaagctctcaaggataatttcaataagactctcaatataaggacctcaccaggatcccttgacaagattgctgtggtaactgctgacgggaagcttgctttaaaccagattagccagatctccatgaagtcgccacagctgatttcggtgaatatggccagcttcccagagtgtacagctgcagctatcaaggctataagagaaagtggaatgaatctgaacccagaagtggaagggacgctaattcgggtacccattccccaagtaaccagagagcacagagaaatgctggtgaaactggccaaacagaacaccaacaaaggccaaagactctttacggaaggttcgcaccaactcaatgaacaagctgaagaaatccaaggatacagtctcagaggacaccattaggctaatagagaaacagatcagccaaatggccgatgacacagtggcagaactggacaggcatctggcagtgaagaccaaagaactccttggatgaaagtccactggggccagcaatactccagagcccagtttctgctggatcccatgggtggcacattgggacttctctccctcccccatctacacagaagactgtcaccatgctgacagaagcctgtccttgtaaggcccagccttccaggggaacactcagacatgttcattctcttcctgcttctgctctgggccggtgggtggctctcagaaaatacttgctgctggcaaaaggcctgtactcaggcatttgctttgacttgatgttgccaagggactgaggccattggcaggcttagtaccacctgctcctcatcttaggagtctccttttcaaataattaggctctgttcccattttaaaactctgatattggccttcacctgtgactggacactttactagaggcccattttcactaaacaataaaatctaaataaattggaaggaataacaaccacaaaggaaagaatagagttggtctggattgatgatcactgaggatctgtatgtgaggcacccataacagtagttttgcctgtgagtcgtcttcacacatgctgttttctctgcctggctctctcttcccctccttacctggccagtcctgtttatcatcaggccttgtcttggatatcacgtcctctgggaagtcttcttttcccctctaacctaggaccctcattaccggctctcatagcacagtctactgctttgtacgaattctaagtattcttgttgcacttaattagcctgtatatcctcagaactttgtgtaatgcctggagcatagtaggcagtcatatgttgtatcgtgaataaattgcacatagtagctaccc

SEQ ID NO: 80151 - DNA, 1286 bp, Homo Sapiens
  misc_feature (855)..(855): n is a, c, g, or t
aattctcgggattgcggtcgccgccgtcgcacgagtctttccttagtaacctgggcgatagctgatgagacggaagtcctgagagtttgaccgatttaaggtcacgtgcctaggaagtgctggaaccaagactcggagttttctctaagtttagtgcctttattttgttttaaaccacactgttgcatttccccccattttggaaagctttatagttggaaagaatgaaaacctgatctgaccccttcattttatggttgaaacaaaatctacgtaggagaaatcacttggtacaagtcacaagtcagtggtagagctgccgcaaatgctttttgaatacgtgtgattatgaatctaaatggcagatggcagggagtgataagtggatgtttccaaggattgtcttcagtcatggccttgggattaaagtgcttccgcatggtccaccctacctttcgcaattatcttgcagcctctatcagacccgtttcagaagttacactgaagacagtgcatgaaagacaacatggccataggcaatacatggcctattcagctgtaccagtccgccattttgctaccaagaaagccaaagccaaagggaaaggacagtcccaaaccagagtgaatattaatgctgccttgggtgaggatataatcaacttggaagaggtgaatgaagaaatgaagtctgtgatagaagctctcaaggataatttcaataagactctcaatataaggacctcaccaggatcccttgacaagattgctgtggtaactgctgacgggaagcttgctttaaaccagattagccagatctccatgaagtcgccacagcttgattttggtgaatantggccaggcttcccagagtgtacagctggcagctatcaaggctataagagaaagtggaatgaatctgaacccagaagtggaagggacgctaattcgggtacccattccccaatcagccaaatggccgatgacacagtggcagaactggacaggcatctggcagtgaagaccaaagaactcccttggatgaaagtccactggggccagcaatactccagagcccagtttctgctggatcccatgggtggcacattgggacttctctccctcccccatctacacagaagactgtcaccatgctgacagaagcctgtcctttgtaaggcccagccctccagggggaacactcagacatggttcattcttcttcctggcttctggctctgggggcccgggggggtgggctcctcaagaaaaataccttgcctgcg

SEQ ID NO: 80152 - DNA, 1013 bp, Homo Sapiens
  misc_feature (262)..(309): n is a, c, g, or t
tcaggagatttcaagtaacaattctgaattttcagcttttctttggaaaacatcgggcaacctggcaacatcggagctgccctcccgggttgcactcatcttcggtattaaatagatgctgcccctgtgtgttccaattcaccaaagtcccagccccacccactcgcactcactggcctggcccctgaggcgcatgaattggcaactctttaatgtttctgtgctagaatcaggtacatcagggctcaatttttgctctgtnnnnnnnnnnnnnnnnnnnnnnnnnnnnnnnnnnnnnnnnnnnnnnnngaaaacatgtaacatttgtagcctgtgccagagcgtaagggtctatgttagtgattcttcaaaactgctgtactttgctctataccaaggagacttgcctatgtgaccaaggctagcccctttccacatgtgggtcgcagagggaaggaaaacagcacagccaagattctgctctgtaatgtcaggccaaacagcgacttgttggagcaggagggaggtgagtgatcgcacaaggtttgtaaggcggtgacccaggacgccccactacacccactcccaggcaataactgccacatcaggtttcggtgcaaagggtgaggctcaagtctctgccatcccatccctcttccagggagtgacatcctgggatgagtcaggaagtggaagaaactacccagggaggaggagaaaccggtgtctgattgtgcagctttcctgaggcttttttgtggaccggaatcccttcctggacctttcagggctgtggccctcctgcccaggagaagttgctaattttctctaatctcctcacactcccagaaatgacacaagatggaatagtgcccagtagggtaccgaatgcacagtaggaatgcaaatgaaatccatattaggagtttctgtttgatcctaatttgcctttaagaaacataaattttagtgtttctttatatggagacaaagttagttccctgctctttacc

SEQ ID NO: 80153 - DNA, 665 bp, Homo Sapiens
tacgagtaacaactccaccggctggcgtccgcggcgcttggcgccacagtcacttttccagatctaggagcaccatggacacctcgtcagagatgctggtacggtttggacggcgctgtggacgggcgaaggaaagtacagaaataagaaactctgaagaagatcaagttctctatctgcctcttctacctagcaaagtagatctccagcaggtcaccataattccacacgatgagtggaaaaggattcaagatagccttgacaggttgacaagagaagcagcatgcctccgtgcagaaagaaaggcaaagaaagaaatgcatttgcgatctcaagaagtggtaaaacactggactaatacatatgcagggatgaaagaacagaaacttgaagccaaaaagaagcgtgatgaagaaatagaggcagaaagacaaattcttgatctggaagaagaaatatacaaacaaggaaaaagaaaaaaggccattgaatatgcaaagcaatatcaattttaccagacagaaagagtgaaaaactttcattcgggacttcttcttagtagagttatgaaagaacgtgatgcccagattgaattccgaaagagtaagataaaatcagataaaaaatgggaggaacagttgaaactcaacattgaaaaagctttt

SEQ ID NO: 80154 - DNA, 688 bp, Homo Sapiens
aaaaaggcatgatctttatgggaaaaggtacacaactttattgaaaacattgagtgcagaaataaaccctgctcatgaatgggaaaattcaattttacacaggtgctgattttatccagactgatctatagattcagctgggttccattctacatctcaaggggtttttggggggaatttgacaagctgattctcaaggttacatggaagagcaagggccgagactagagtttaggagatgattcccaaagggcacaggggcagaaaaatgaccagtggaaccacatagaaaaatcaattattgtattttcaatggatcactaggcagcagggaaaaggaatgcccatacagcctacacacaataatcccggatacatctcaggaacataatcaagtgaaaaggcaaactgtaaaagaataaactctgcatgatttcattcatatatttgaaaacatgcaaagccaacacaaacacattaataaaactataaagcaaagcaacggaatgactgaaacaggacagtgtctcccccaccaggaaggggcaacagcaggaacttcgaaggaaatggtaaccttctcaaatgcagtggggctgtttcctcttaatttttataaatgtgttcttgtagctcctcactaattaaaaacaacaacaacaacgagtccaggcatggtggctcacac

SEQ ID NO: 80155 - DNA, 323 bp, Homo Sapiens
atagcaaacaggggaatgtttaatgaaaaattaggctggtaaattttggcattttgcatagcatctgtcatctcttattcccatgtcccatggtagtcatgaggatgatgatccacatttctgttatggcttacttgtgcaggcttggcaataaggactttgtctgccaaaaactggaattgtgtgttttgatctgtctagtagctcactgaaggactggcacagaagcttcatattgtttcaacaccctcaggcaggaatggcttccctggtggcacctgccaccaagatggcacctttaaaagaatttaaagaaataatcc

SEQ ID NO: 80156 - DNA, 929 bp, Homo Sapiens
  misc_feature (77)..(126): n is a, c, g, or t
  misc_feature (686)..(691): n is a, c, g, or t
  misc_feature (694)..(694): n is a, c, g, or t
  misc_feature (701)..(702): n is a, c, g, or t
  misc_feature (706)..(708): n is a, c, g, or t
  misc_feature (713)..(713): n is a, c, g, or t
  misc_feature (715)..(715): n is a, c, g, or t
  misc_feature (718)..(719): n is a, c, g, or t
  misc_feature (731)..(770): n is a, c, g, or t
gggggagcggcgccggagcgggcgtcatggcgcggctcctctggttgctccggggcctgaccctcggaactgcgccnnnnnnnnnnnnnnnnnnnnnnnnnnnnnnnnnnnnnnnnnnnnnnnnnncgggactgggggaggcagggtctcttgcaacgtgtgagctgcctcttgccaagagtgagtggcaaaagaaactaaccccggagcagttctacgtcacaagagaaaagggaacggaaccgcctttcagtgggatctacctgaataacaaggaagcaggaatgtatcattgcgtgtgctgcgacagtccactcttcagttctgagaaaaagtactgctctggcactgggtggccttcgttttccgaggctcatggtacgtctggctctgatgaaagccacacagggatcctgagacgtctggatacctcgttaggatcagctcgcacagaggttgtctgcaagcagtgtgaagctcatctaggtcacgtgtttcctgatggacctgggcccaatggtcagaggttttgcatcaacagtgtggctttgaagttcaaaccaaggaaacactgaccatcttcaagagtcccgttcccttgccaccccttcacgtgcaccctcaatttccacaattcacttgaatgacttgttttatttgcaataaaactgggctgaatttgaacnnnnnnccncccacanncccnnnccccncnacnncaactcgaggcnnnnnnnnnnnnnnnnnnnnnnnnnnnnnnnnnnnnnnnncctggtcatagctgttttcctgaccccagttttccttggaaaaaggtgggtaaaatctggccgggtctcccctattagggggagtccgtaattaattttccgataaagcccaagggttaaacccgtggccttataagtgaaaacccgggccttgtccaa

SEQ ID NO: 80157 - DNA, 1011 bp, Homo Sapiens
  misc_feature (74)..(94): n is a, c, g, or t
  misc_feature (712)..(712): n is a, c, g, or t
cggtccaaggtagcgaggcctgggtggcgaattcggcacgagggaagagaactccattttattatggaaagttnnnnnnnnnnnnnnnnnnnnnaggcaattgataaaggcggcacaatggggaaggagaggtgaggtgtctccttagccacccgacaccatctcaattcagttcaattgtgaaccactaggagaaacagaattaaataactatcaaggggtacagagttaagagttccagccttccctcttggggaaaactaaggcaaagtaatactgagaaaaagtggaggaagccacaccttcaggtcactccaatgaggagactggaggggacagaggagagaattccacgcagacacagcaagtaagcgtggcttgtaaacctgggactttggcaggtggggctgggagctgatggaatttgtaaaccaggctgtggtcaagggaggaggcaggagctgtaaacaaaggggcagtgacctaggaaatgaaggagatgtgcctataaatggagtggggtctgggcctcccagagagacgagtgcttaaatcccgagagtccccacgggatggtggggaggaaggctgtggggagagtgtaccctgccatggggggcaggtgctccatctccaccctccagggagttctgtgcccccttctcaggacttgggcgctcactcttggatgacctaggatgcaccagcacgntttaacccccacccacaccaggggactttttggattaggggaagaaaattgggcaattgggctctgccccccagaaaacaggggtgggggaaagcaaagtaaccaagaatgttggtttggccctttccctggccaggctcatttatcagggtcttgtctgcccctgaaatccttcccgggctccagggatctttcagtttataagaaaaggagggagggtattatccctattgttgaaaagaatggtcacccggcccggcagggactcattccacaaattcggggcccttgggtggcgc

SEQ ID NO: 80158 - DNA, 1028 bp, Homo Sapiens
  misc_feature (75)..(95): n is a, c, g, or t
tctaaggtagcgaggcctggggtggggcgaattcggcacgaggggaagagaactccattttattatggaaagttnnnnnnnnnnnnnnnnnnnnnaggcaattgataaaggcggcacaatggggaaggagaggtgaggtgtctccttagccacccgacaccatctcaattcagttcaattgtgaaccactaggagaaacagaattaaataactatcaaggggtacagagttaagagttccagccttccctcttggggaaaactaaggcaaagtaatactgagaaaaagtggaggaagccacaccttcaggtcactccaatgaggagactggaggggacagaggagagaattccacgcagacacagcaagtaagcgtggcttgtaaacctgggactttggcaggtggggctgggagctgatggaatttgtaaaccaggctgtggtcaagggaggaggcaggagctgtaaacaaaggggcagtgacctaggaaatgaaggagatgtgcctataaatggagtggggtctgggcctcccagagagacgagtgcttaaatcccgagagtccccacgggatggtggggaggaaggctgtggggagagtgtaccctgccatggggggcaggtgctccatctccaccctccagggagttctgtgccccttctcaggacttggcgctcactcttggatgacctaggatgcaccagcacgtttaaccccacccacaccagggactttggattagggtagaaattgggcaattggctctgcccccagaaacagggtggggaaagcaagttacaagatgttggttgcccttccctgccaggctcattatcagggtctgtctgccctgaatcttccggggctccaggatcttcacgttataaaaagggaggggaggaatatcccctattggtggaaaatgggcccccgccgggcggaactcttccccaattcagggcccttggggggccagcccgccccttggagctttggctgcaggcagaaagcagcttctttcctctt

SEQ ID NO: 80159 - DNA, 1012 bp, Homo Sapiens
  misc_feature (80)..(114): n is a, c, g, or t
tatcgactcactatagggcgctagcgcgctacttgctgaacgaccgagcgcagcgagtagttgagcgaggaagcggccgnnnnnnnnnnnnnnnnnnnnnnnnnnnnnnnnnnncagtcgacggtaccggacatatgcccgggaattcggccattacggccgggctattgtgaggcaagtcaaggaaatgtcagtgaaggcatgaaaggcatcgttcttttgtctcaaaagtacttgaggagcccaaggacttttcttgtgaaaccgaggacttcaagactttgcactgtacttgggatcctgggacggacactgccttggggtggtctaaacaaccttcccaaagctacactttatttgaatcattttctggggaaaagaaactttgtacacacaaaaactggtgtaattggcaaataactcaagactcacaagaaacctataacttcacactcatagctgaaaattacttaaggaagagaagtgtcaatatcctttttaacctgactcatcgaggtgagactagagttgtcacagcccaccgtggccactaacgtgtctttgtttcacagactgtgtgatcaagtaaatgtgctgtagatctttgcctcattcacagcggaggtgagagttagaatttatacctattgttcatgccacgtttctcctcatggatgcacgcatcccctattatttgtttcttttaataatgtcacgagcaccaatgagcttactacccaacttcagaaactaggactctaacaagtaacttctgtcatatctcatcctgtaacgcccccaccttcgctccttccgccaagataattatcactttaaattgggtgcgtgtggattctcaattctaatgtgatggtaaaaatgctttattgttggttaagctgaaggaatcagcgttgtaaatcgattgtgtatcaattaaggtaattgcccttgtcgggggagcaaccatgaagcgggaggttaggaaaaaattatacgacctgggtggtac

SEQ ID NO: 80160 - DNA, 248 bp, Homo Sapiens
gcatgacactcccgtctcaaaaaattataataataataattaaatggcaccataaagaataaaaagacaagcaacagaatgggacaaaatgtttgcgaaagactagtatttaaaattacgtgaagaactcattacaatcaattagaaaaacggacaaaacacttgagtacacacttcaggtaagagtaaatcctaatggtccaaaaacatatgaaaagcgcttcatctcattagtcatgagagaaatg

SEQ ID NO: 80161 - DNA, 642 bp, Homo Sapiens
cctgccgcctgtgccgccaggatggcccggcagagcctgtggcccaggagcggcgtggcaagccggcccgcatggccgtggtggtggctgctgcctttgccatcagcttcctgccttttcacatcaccaagacagcctacctggcagtgcgctcgacgccgggcgtcccctgcactgtattggaggcctttgcagcggcctacaaaggcacgcggccgtttgccagtgccaacagcgtgctggaccccatcctcttctacttcacccagaagaagttccgccggcgaccacatgagctcctacagaaactcacagccaaatggcagaggcagggtcgctgagtcctccaggtcctgggcagccttcatatttgccattgtgtccggggcaccaggagccccaccaaccccaaaccatgcggagaattagagttcagctcagctgggcatggagttaagatccctcacaggacccagaagctcaccaaaaactatttcttcagccccttctctggcccagaccctgtgggcatggagatggacagacctgggcctggctcttgagaggtcccagtcagccatggagagctggggaaaccacattaaggtgctcacaaaaatacagtgtgacgtgtactgtcaa

SEQ ID NO: 80162 - DNA, 483 bp, Homo Sapiens
tgttaaacaaatgtgtatatattagactacattaaatatgcaattctttcttccagttaaatactgttgctccctaaaacccttacattgtacaccattgggaatgattgttcatcatactacttttccattagtgaggctacagttatgttttaaatgtgcgattacagagatggcatctgaacataaactgatggctcgaaaatgaaaatggaaatgtagcagccatatactgctaactttggatctgttcctgaattcaaaactactaggagaaaagtgtcctttataaaaaaggaccttattaatgcctaaaaaacatcatattctctaggaaagcttgtgtctgtttccttagggaaaatgtttgccttttaaaaactgtgatcctttaggatgatcatgactttccctttccttatggaaatgcaagaataaaatatttcattaaacaataaaccttgaaaataaaatataaacatt

SEQ ID NO: 80163 - DNA, 992 bp, Homo Sapiens
agatatttatctttttagaagtaaagttgttgacagtgttaaggtgtgcactgctcgtttgtttgaccaacctaaaatagaagacccctatgcaattagcttttctccatggaatccttctgtacatgatgaagccagagaaaagatgctgactcagaaaaagaagcctgaagaacagcacaataaaagtgttcatgttgctggcctgtcatgggtaaagcctggctcagtacagcctttcagtaaagaagagaaaacagtggcgacttaagagatggtgaatctggtgcaccatgcactttcctgctagactctggcctagttcaagctgaccaatggcagaggactgcctgaagagtaaaactgtgtgaacaatgactgactgccagtgttttccatgtatgcataggttctaacagcagggtttggaaacctgtctctaagtaatgcattacttctgtcagaagtgtcttagggtggttatctagttcagtactccaaattattggggaccttgaggcttaagtaagtatttttctgaatataatgctaaaggtaagttgcattcatttaaactaatagagcagacagaattcagcactacttaatagtttataaatcagtggtttcagttgtatatatgttaggaaatggagaggtatagagagagcaggttccatagctcagcacttttaagtggaagatcatttgaatctcagtcttcagcctgcactgatttgtagcctgcactgtcttactgatttacaaactgaaatcactgagaaatgtctttagttcagtgagaagaaaccagaacacttgttcctagtgttgtgttgttttttttaagcaaattacttactgtatttttatggcaggagggagaaaaagtgttacaacggtttctaatgaagtccggtatttaaatgataaatgactaatgtgtttagtagagacaaaataaaccaataaatgattgttctttgccattt

SEQ ID NO: 80164 - DNA, 685 bp, Homo Sapiens
attcggcacgaggtaaagggggtagctagctgtatttcagaattgatgtttttacaaatactgtgtgtgtgtacatgggggtactgttggattaaaaataattgatgatttccttaggaaacttcagttttcactaagttcttgaaagcaatttgtagaaaatttacgtgttttttgaggaaatataaaccaagacaatgatttcttttctttacagagaccatgaaacgtatggtgcaatagccctacttttggtgggaaaaatatacagccattctggtgaagcagtgagtagtggtatcagtagcttatactacagtgtccaggttgagaacttaggccctcaagtagtatgcttgaatgattgtgttgtggtacattataagtaatatttttttggtgattattctgcttatatgccaagatgtcaataaaggctttacacagtgaaacagagaagaggcaagtgccagtcactccctgacccacacagctttaggacgcccactactgtgcagtatgtgttgagagtgagctcttccattgcatgttgcattaatatgatctttttcagaagtgattattagttgggcattaaacctggtttcattctgagtctaaagaatcctccgggccactctgcctatggggtagccctgctctgtctatggagaagctactctag

SEQ ID NO: 80165 - DNA, 504 bp, Homo Sapiens
  misc_feature (68)..(76): n is a, c, g, or t
gtaaataactatgaataataattatttatttgcaaggtgaggtgagaacattttaatcctgcacacannnnnnnnngtttaggtaatacaggagttgatggcaacgatggttactcattatgaaccacactgaaacgaccttcaattcaatttccatctgctaataaatatagtcaagtgctgcataatgttttggtcaacatcccctaagattataaaaccatatttgactgcaccttttctacatttagatacacaaataccactgtattacaactgcctacagtattcagtacagtgacatgctgtgcaggtttgtagcctagaagcaataggtttgtgtaagtacacttgttatgaaatccacaatgtttgtacaataaaaccgcctaatgacgcatttctcagaacatatccctgttgttaatcaatgcatgactgcataagaatatctgacttaaaaaacacatgaactaatggccaagtggtgaaaggctgcatatg

SEQ ID NO: 80166 - DNA, 1133 bp, Homo Sapiens
cagtcgacggtaccggacatatgcccgggaattcggccattacggccgggggagtggagcggcggcatgcttgcagctcggcggcagcctgtgagagctgagggtcagttcttcgagtagatctcaagctgcgttttcctccttctccaaagcagggatgggaaggtggaggctactggttgaagagaagaacacggggtcgggggaatgcaacacctgcaaacactagggatcgtgggtcgagcggaagagctaatgagagccgagctcaggtatcccaagtcaaccagaatcaaatgcgcagtacgccacaaggcatttaatgcccacagtaacagggctgtttgacagtggcagaagaggacgggactaaagttactttgtgctgagagggggaaagaagcacaaagtttggtctgttgcgtaattgaatttttaacactcttatccacaacaaacactttttcgtgtcctgctgtgtaaaagacatcagatatattacagattttcaaacaggtgagcatccttttacgagctgggcaggtggggagtggcgtggttttgatggagtgaggagatttggttgaatgaacgctaagatggccagacgcacctcttcgatctcaactctgcagcctgggattccagagctgcaaacaaccactgaattcgttctgtaaacctgttgtcatttgacgtttccaggcaggcatcaacatttacattgtaattcaatagacgctactactacaaaggagctttattcttccagcttaatatggttgctgcgggaacactgcaggatgaaactgactttttttgtggtaatgtttctcctggttgggaacaacgcaaattagcaaaggcgtaatttataaccgctgctaccaaagagtgaagtatttgtggaagttctgactggaatctagctcgtacatatggattgtggaaataaaggaggacgtggaaagcttgccatattttatttcaagttaatactaaagctgccagacttaatacaactttcttttaatctttatggatcacatattttctgaaaattacatgataaaacaaggtttggtttgttccatgtgtccattttcaacaataaatttcaaaattgtattttt

SEQ ID NO: 80167 - DNA, 875 bp, Homo Sapiens
  misc_feature (53)..(53): n is a, c, g, or t
  misc_feature (87)..(87): n is a, c, g, or t
  misc_feature (93)..(93): n is a, c, g, or t
tttgacgctagagtaaaattccatgtcacattttctacccaatcatctggatntcaagattccttttaagatctcaatgaagcaatntggatntaaagagtggtattcacaaggggtgaactttcacagtcagggcagttgcctcagtgcccacataggcagaggaggatgtgggaaagggtttttctcagctagtttttgtgtgctcatttcttctgggagcattaaaagtggtgatctgttacagtcactattcaactgggcacgtgttgtgattggtcagtcactgagccagggatacagtccggacttgcttagtacctaagcctaatgctggtggggtttcaagacatggttcagcatcatcttttaacaaggcccagaggcccagagcccccatcaagtcattttgatgtaaatagtgaactttgttagagccctcacttctatcaatcagctgtcctgtccctgccagcacctggagcaccaactaccactccctggaaagaacccttccctgcagttttttaaggacaaaactgcccactcctcattaagtttgctgcctggatacacttttccacaaaggaaaactggcatatcctgccttccgagtagtatgggtctctgtgtgagaaaccaggagatattttcatcttgttcggaaatacttgtatgtattttggtgtcaataaatatcttgtacctcattattttactttgtaattttaacattatgtgtaggaccatagtaaaacattcatttcacacagacatctaatctcacctcgtgaaaagtgaaaataaaggaaaactattagattcatccaaaaatgcaacacctactgggagtgagatgtgataggaacagaaaa

SEQ ID NO: 80168 - DNA, 812 bp, Homo Sapiens
aggtgacaagtagtcatttgtctaaatctatacatatcacttgtatctagcgcagaataagctataacatcccattgaggaatcttaaatttcatagacatgtaaagctgaagtaactctaaagagcagatgcttcagaaccatcagaaggttctggtcaacagtcagtattatctcttaaatgtatatgttggtcactaattgcacaaaatctataatttgccagggctttagagattgagtcaatatgtcatttaccatggttttcccactgaaggctttaacttttctgataaaataatattttaaattttcaaaaacccattcctgaggagaactacttctagcattccttttcatgatgtgcttttgtgcagtaagtagcattttcggctacttaactttacattcctcttatttttcagtttccagtcaagattataaaaagcaaatgattgatataatttgatattcatagagttgtgcctacctttaatggaaaaatacatgtcagatacttagatgtttattgatatgagactatgtggttaaaaaacccaagtatgtccatgtgtttcttataaggtacacttgaaactagtgagtgtttgtcacatttcactttcatggtatataaaatgcagtttgcatatataacttgaatatctggtactagttttttcacgcctgcaatcttggagtctaggttgccttgtctctcctatttttaaataagtgaaatttgggagattgtaaaatctgtaaagtttgttttgtgaaaataaaatgttcaccagtagaatttttctctg

SEQ ID NO: 80169 - DNA, 760 bp, Homo Sapiens
  misc_feature (59)..(75): n is a, c, g, or t
  misc_feature (80)..(189): n is a, c, g, or t
  misc_feature (220)..(342): n is a, c, g, or t
gtgctaagcgaaaattaccctcactaaagggaataagcttgcggccgcatacgcggtcnnnnnnnnnnnnnnnnngcttnnnnnnnnnnnnnnnnnnnnnnnnnnnnnnnnnnnnnnnnnnnnnnnnnnnnnnnnnnnnnnnnnnnnnnnnnnnnnnnnnnnnnnnnnnnnnnnnnnnnnnnnnnnnnnctcctaagtagctgggactacaggtgctcannnnnnnnnnnnnnnnnnnnnnnnnnnnnnnnnnnnnnnnnnnnnnnnnnnnnnnnnnnnnnnnnnnnnnnnnnnnnnnnnnnnnnnnnnnnnnnnnnnnnnnnnnnnnnnnnnnnnnnnnnnaaaggtgtgagccaccatgcctggccctatgtgtgttttttaactactaaaaattatttttgtaatgattgagtcttctttatggaaacaactggcctcagcccttgcgcccttactgtgattcctggcttcattttttgctgatggttccccctcgtcccaaatctctctcccagtacaccagttgttcctcccccacctcagccctctcctgcatcctcctgtacccgcaacgaaggcctgggctttcccaccctccctccttagcaggtgccgtgctgggacaccatacgggttggtttcacctcctcagtcccttgcctaccccagtgagagtctgatcttgtttttattgttattgcttttattattattgcttttattatcattaaaactctagttcttgttttgtctctcc

SEQ ID NO: 80170 - DNA, 797 bp, Homo Sapiens
  misc_feature (438)..(489): n is a, c, g, or t
ggtgcgtgcatatgaaaccacatcatgattcccgacgtgagttagatgagggagagtttgtgtaactccacacccaggagggtaagccactttattatcatgctttggggctgtgcttaagaatttaagctctgttttaaagccgaagaagaaaacatttgaatttaccttcatatgccactaagaacaaaagctctgaagttcttcctgctggcaccaaatattaggattacaagctgtctctctgacaccagtggtaaaaaagcaagtagaatagtttctgagtctgtgttgcagcctctgacacgtggctcaccgctgtcatttgggggatggaatgaacagtcactgttctatagcatcctcctgtgctcttacctaaggaatctaaattgtcctagccttccattgctatgcactgaatgaggactactctcnnnnnnnnnnnnnnnnnnnnnnnnnnnnnnnnnnnnnnnnnnnnnnnnnnnntggatctactaacatgtttagcaaatggctctgacagggtggccatgagcagatgagaccagctcttgcttggttggaagccacactgcagtttgcagtttagcctttggtgtctcagtggcctcttgcttattccatgctttttctatcccatcctctctctgtgccctcctgcaatggcagccttggcacaatgcctgggtgtcctcatccttgctttactctggaaagtgtggggatggagaggatggtgcatttccagtgcttccttacctgtcaataacaatggtggccacctgggtcccagc

SEQ ID NO: 80171 - DNA, 694 bp, Homo Sapiens
  misc_feature (639)..(639): n is a, c, g, or t
cactttggggtagagttctgtattagtcaaggtaaatatactgtcttgaggatggggatgcaaacagtgctctgtagtgttgtagaaatcggattttgaaattatcagtacaaaaataacagcttgattaaaattaatttgtatctgataattgtttacaagttatgaaattcagtgatgatttacaaaatccaaacagacaatggatacctaatgccactgaactgtaaaacaaaagttatgctgacatctagtggtaacatacaaaaaatctatgctttacccaattttgatgatatcatttctcttcacaaatttcactcctttgttgatatactttcctgaactcttcaccaagcagatcaatatcatcctcttttttaaatactcctttagggagatagcctagtaagtttgtagcatgctctttaagaagttttagcctttcttcttcaataattgcattaataaatccttgccgcctttgctgcaactgccactcttctagttcacgttgtttgtctgcaaggaattgttggcgacgctcttcaataagtttttccacagccctcctgtgttccagctgcttcattctttgtttctgagcattcattaattctattcgatcatcctcagcanatttagctagcatagtttttctaaagttctcctcttcctcttttgcagcctgtag

SEQ ID NO: 80172 - DNA, 733 bp, Homo Sapiens
  misc_feature (65)..(164): n is a, c, g, or t
gccatagcctcaactgaaattgaatttttgtagggactgttaattgccatttgtacctaatactnnnnnnnnnnnnnnnnnnnnnnnnnnnnnnnnnnnnnnnnnnnnnnnnnnnnnnnnnnnnnnnnnnnnnnnnnnnnnnnnnnnnnnnnnnnnnnnnnnnngaaatacagcctgtcactgtgtgcacagattgcatatttgggattgcaataagggcttggtgagctgggggaatagtggatatttaatgactacttgttttttaaataatgaacacttagcctttctatgcgcataatggtgtaaaagttagatggttaggtgtttgacaaacagatggttgcaattcagttacagactggggaaatagcccagtgtttggggattaaaactgtcaagactggataggtgttagtcatcactgtctttcgtccagtggggatttaataaatactttcaagcttctggtttgggagtttagataggtttgattttggatttgtaaatagtgattgctaaatttggtcagatttctcctgactggctgttcctaaattcttaggatatgtcccagtaaaattatactttgtgaattaattgtcatatgtgtaattgttgcattttggatgtacctaatttgataattaaaacaaaataatttccgtttaaggtatctgtttgcaggtcagaaaatgagaaaatgtaattgtgtaatgctctgaaatgtaaa

SEQ ID NO: 80173 - DNA, 1459 bp, Homo Sapiens
  misc_feature (84)..(84): n is a, c, g, or t
  misc_feature (798)..(821): n is a, c, g, or t
  misc_feature (1327)..(1335): n is a, c, g, or t
  misc_feature (1354)..(1362): n is a, c, g, or t
tacgattcatacagtagtttagcagccagcatggtcccactgcttcacattaatgtcaaatgccaaacttggaacagagttttntggtattttccctcccctccccaccttataaacaaaacatggcattcagttttcagcttactcctgttctgtagcaatttgtaattagcttgtgactttacataggtgcaaacatttccatacattgagccaaagactgcagagtgcaaacaaaattttatctgacctacagtagcatctgacttaataagaaaacaaaaggatttgaacacattggattctaaataaccagaccagttcagatgctcctttttgttcatagtgttccatcattattttgtttctccagcaattttagtggcaggaagtagaatgagagaaatgaaatgaaaatgataacaaaaggtggggtggagagcactaatattggtctgaaatatttgtgctaacgaatgttgttacctgaaaataacaacactcctctccagcagattcagggcatgagaagcacaattattgaaatcaagactttactcagagaatcgacaaggtgagtctaaggaactataaagctttgcaggatttctgctactctcagtgcctaaccgcttaaaaattaagcatttctacaaaaaggtttgttttaaagtatctgaaaacagtcatctccagtaagttgccctcccacccccaaccctgcctaagggaaaagccactgaggtttaggaaaagcagatcaagtaagatattaatcacatagaaaaaaagtaatcnnnnnnnnnnnnnnnnnnnnnnnnaaaaaaaggtcccaggaatatacagcaatctcgtaaggaactctagtgaaatgtaatcggaggactgaaggagggtgctctggcaaaaatagatctattctaacgtgttctatagaataacaagttagtaccattgtcaaggtgcatgttccgcaccatacaatttttgttgttgggtttttgttttggattttagctaattataatcttcaaatcactgctagcgagtggtccaaaactccaacagccaccaacatcgggacccagcaatttcaaacattcactttttgttttgaaatttagaaaatattaataaaacagcatcatagtaaaaatattatgcaaaagtctggaactgctcacttgatttattcctacatgaatggggttaagttgtaacgtttgattaaccttttactaatgccttcttcctccatccccaccaggaatatgcatttttgagcacatcattccgatgctttgctaccctctttacctgctttggnnnnnnnnncaagaagaaaaacctctannnnnnnnncaatcctgttagtatgttgtacatattttccagcaccggaactgaagtaatatctacaaccatgagaagctaaacctagtatgaatagagtcatttt

SEQ ID NO: 80174 - DNA, 2281 bp, Homo Sapiens
  misc_feature (64)..(449): n is a, c, g, or t
  misc_feature (706)..(751): n is a, c, g, or t
  misc_feature (1987)..(1998): n is a, c, g, or t
ctatgaaaacgccagcacgcgccttttaacgttcctgcctttgctgccctttgctcacatgtcnnnnnnnnnnnnnnnnnnnnnnnnnnnnnnnnnnnnnnnnnnnnnnnnnnnnnnnnnnnnnnnnnnnnnnnnnnnnnnnnnnnnnnnnnnnnnnnnnnnnnnnnnnnnnnnnnnnnnnnnnnnnnnnnnnnnnnnnnnnnnnnnnnnnnnnnnnnnnnnnnnnnnnnnnnnnnnnnnnnnnnnnnnnnnnnnnnnnnnnnnnnnnnnnnnnnnnnnnnnnnnnnnnnnnnnnnnnnnnnnnnnnnnnnnnnnnnnnnnnnnnnnnnnnnnnnnnnnnnnnnnnnnnnnnnnnnnnnnnnnnnnnnnnnnnnnnnnnnnnnnnnnnnnnnnnnnnnnnnnnnnnnnnnnnnnnnnnnnnnnnnnnnnnnnnnnnnnnnnnnnnnnnnaagaattcggcacgaggaacaaacctttttgtagaaatgcttaatttttaagcggttaggcactgagagtagcagaaatcctgcaaagctttatagttccttagactcaccttgtcgattctctgagtaaagtcttgatttcaataattgtgcttctcatgccctgaatctgctggagaggagtgttgttattttcaggtaacaacattcgttagcacaaatatttcagaccaatattagtgctctccaccccaccnnnnnnnnnnnnnnnnnnnnnnnnnnnnnnnnnnnnnnnnnnnnnngaaaatcatattgctatagtgtgtactttaatctgccagcagataccatctacactaacatttgtcccacagcatcctcaagagaaaaagttgttgcaccttatatatatctcaagcaaaccaaaatatgatgctcttctgctttgttttattctaaattgttgtatcatatctttctgaaaccattctgaatttagttgaaattatcaatatttatgcttttaaccttaatttctggattcaagcctgtatataaatcttttgaaaaaaattgtcctagcccttctctgcgatgctggaagtagaagattgcgtctcagatggagacgcagtactgttccagttttctttagccttttatttatttagttattctgggtatttcctatgtaattttgaagtgtgtagagtatattatagtaactgaagctgcagctgtaagaagctgagtgaaagaaaaaatactgtaagacatccttaaagtttttatttgtttgggtactgtatatgagatcaggaaaaagaaaaatgtcccacagccacattggaaatacaggttcttgtccccaaatttgatctatggtggtatgattcatactgttaaattgagagaggaaaccttgtggttaaaaattatatggctgctgttttctttttgcagtcagtggtcaaaactgatcatgtgcttaaatcgatttttatgcacagaactagttattgtgaacattactactccctccaaagatttcctgataacttgggccagaggtggttactgagtaacaaggatctaattcaatgcctcaaaactcttccacccacaatgcaaatcttacctcacaagctctaacctaaatcacagagacatgcatgtttcatgcattaacactgatttcgctctgtggcccaccagaggggtgggctcatgtcccctgactcctcacatgagtgcctcagctctaagagccgtggaacggggggtagggaaggtttgcgatctggagctcagcaactggctcagcaacgttttctccatttcattagcactaaacaagtctcttgctctcaggaatttgtcagaaaaaagaataaaatcacctgagactccacataccagattataaactcttctcgtaggtttgaattgcttactcacatgtcataaattaaccacagcttcatttgaccaccacgtctaaagtctgttgacagtttcagcatgactgaatcgctcannnnnnnnnnnngctttcagaaattggcttggttctctttagagttggtgtaaacatgccatgtaataaatgatttccacttaatggtacaacagaattattgctttcttagatgtatgtgtagtaaaagtcaatatacacatttatataatttctttcttcaaaatcttatacctaatttgatatttctaaaaattgcacatgtaagtcatgtgtataacatgctaaagtactttaactgtgatcttaaaactgaataaaaatatttaataaaactttgaaatattttaaagat

SEQ ID NO: 80175 - DNA, 1145 bp, Homo Sapiens
ttatttgaattcactgtgtggagccctagccctccattctcgacattccccaacctcccagccccttccaagcaggactaggtgccctgcattccacccaaggtgggattggccttccttaggctggctacttgtcaccatcaccgacatcactgttgcctgcaaggacaccacgtggccattttccttcaactgagggctcaaaactcctggacaagttgctggctcctgagaccagtatttcctggagctgtgcctcagtgaaggggcccagcctgaggaaccctggctcttttctttaaagcccaggccccacttacataaaacatttcagggtcactggaaacagtgaagtgccatttgttgaagcctactgcatgccagcccactgctcatccacgtggtctgccatgcctacgaggaaggccagcgcatgcaggactggtctctaatgctgtggtcattgcacagaagggaaaggtctcaaggaagagtcaactgggacaagcacaagcccaccggacatggccttggtaaaggttagcagactggtgtgtgtggatctgcagtgcttcactggaaataatttattcattgcagatactttttaggtggcattttattcatttcctgtgctttaaataaacaaatgtaccaaaaaacaagtatcaagctgtttaagtgcttcggctacttgtcccctggttcagtagaggccccggtttcccagttgttgactgtgacaggctcagcatgggctcagcagatgctgtcttaatttgtggatgatacagaaagccaggctttgggatacaagttctttcctcttcatttgatgccgtgcactgtgtgaagcagatgtttttgtccggaaataaaaataatagtcttggagtctcgccaccactggttttcaagtctccctgtaattagagcagggttcagcagggactgtatatctctcctccatgtggccacagcttgggcagcataattagaatcctctttcaagtgggctccatgacactgctgacaagttagtgctggctattgactgggagctttgactcctggtcacttggaccactgcacagggcttcttcacaacatggtggctgggttccacaactgagtgctcccagatt

SEQ ID NO: 80176 - DNA, 1468 bp, Homo Sapiens
  misc_feature (143)..(625): n is a, c, g, or t
  misc_feature (667)..(687): n is a, c, g, or t
  misc_feature (1052)..(1102): n is a, c, g, or t
agactaccgatgggtctacgctgatttgaagccacctccgaaggggaagcgacgtaccgtagcgcagtggaccaggagccagaggagctccagggaacgcttgttcttatatctgtcggttccccactctgactggcgtcgannnnnnnnnnnnnnnnnnnnnnnnnnnnnnnnnnnnnnnnnnnnnnnnnnnnnnnnnnnnnnnnnnnnnnnnnnnnnnnnnnnnnnnnnnnnnnnnnnnnnnnnnnnnnnnnnnnnnnnnnnnnnnnnnnnnnnnnnnnnnnnnnnnnnnnnnnnnnnnnnnnnnnnnnnnnnnnnnnnnnnnnnnnnnnnnnnnnnnnnnnnnnnnnnnnnnnnnnnnnnnnnnnnnnnnnnnnnnnnnnnnnnnnnnnnnnnnnnnnnnnnnnnnnnnnnnnnnnnnnnnnnnnnnnnnnnnnnnnnnnnnnnnnnnnnnnnnnnnnnnnnnnnnnnnnnnnnnnnnnnnnnnnnnnnnnnnnnnnnnnnnnnnnnnnnnnnnnnnnnnnnnnnnnnnnnnnnnnnnnnnnnnnnnnnnnnnnnnnnnnnnnnnnnnnnnnnnnnnnnnnnnnnnnnnnnnnnnnnnnnnnnnnnnnnnnnnnnnnnnnnnaagaattcggcacgagggttggagcggccgcggctgtaggcnnnnnnnnnnnnnnnnnnnnncaaacaatggtttgaaacaactactggaatattgtccacaataagctggaagtttgttgtagtatgcctcaaatataactgactgtatactatagtggtaacttttcaaacagcccttagcacttttatactaattaacccatttgtgcattgagttttcttttaaaaatgcttgttgtgaaagacacagatacccagtatgcttaacgtgaaaagaaaatgtgttctgttttgtaaaggaactttcaagtattgttgtaaatacttggacagaggttgctgaactttaaaaaaaattaatttattattataatgacctaatttattaatctgaagattaaccatttttttgtcttagaatatcnnnnnnnnnnnnnnnnnnnnnnnnnnnnnnnnnnnnnnnnnnnnnnnnnnnatttattatcaaggagcaatatttttatcttttccaaaataaatttgttaatgatacattacaaaaatagattgacatcagcctgattagtataaattttgttggtaattaatccattcctggcataaaaagtctttatcaaaaaaaattgtagatgcttgctttttgttttttcaatcatggccatattatgaaaatactaacaggatataggacaaggtgtaaatttttttattattattttaaagatatgatttatcctgagtgctgtatctattactcttttactttggttcctgttgtgctcttgtaaaagaaaaatataatttcctgaagaataaaatagatatatggcacttggagtgc

SEQ ID NO: 80177 - DNA, 456 bp, Homo Sapiens
tgacagagccagaccctgtctcaaagcatatttcaaccctaaaactagactcttctgcccacagtgcagtcttctaaggcttaccctctggtatatgttcttttgctaaatgaaggcttggagttggagggaagaaggggagatggagtggtgagggcgagtcaaataaaaggatttgagtgtctcgtttttgactaatgaagatgattcaataaacatcctgtaagaagggttcctatgtgcaagttgaggtgctactaagtacattaagacacaattgctgctctcaaggagttagcagctggtctcatgcagggatctcaccacgtggttatgtattttgtttctgatgaggtgcctttcttagcagatgctgccttatttggccactgaaacaatcaaagctaataaatgcttaaagaaaaatatctgacaataaaaaggtttaaatccaaa

SEQ ID NO: 80178 - DNA, 650 bp, Homo Sapiens
  misc_feature (298)..(328): n is a, c, g, or t
cattttcagcaatacattgttctctctggaggaggcagtttgtgaagtcaaaacactgcagtggaaaatagtggcactgaaggtagaagcaaaaaaagacaaacttttgaaacaggacttactgaaattaacttttaaagccgaggtagcccattaggattggccttatatgagggctctgtggagcagtgcaattgaaggtgaatctcctcaacagcatcacaccccgcaacatcccctttacaaatgatggctccaggcctcctgcaatttccttccttttcccagagaactagannnnnnnnnnnnnnnnnnnnnnnnnnnnnnnaaaaattatcttatttagattgactaacagcatacttacaattttaaaagaagctgttgttcagttcatcttaccagatgtgtctggcgaagtattcagggtttgatggactgctttactttcgtttggaagtgatagctaagtttattatactctatattaaacaactttgttcatttcactgaggaccttatcttccttatatttcagaacaaagaagcaacaagcgtgaataaaaagacaaatgtatttgactccctcataatccccatctgtatgtgctacccttccttcaaatatataaatgtgcatctttttttct

SEQ ID NO: 80179 - DNA, 970 bp, Homo Sapiens
  misc_feature (245)..(245): n is a, c, g, or t
cccttctccaatttcaattaatgaacatgaaatccgcttccgattgtttaagtaagcttgagatatagatgttgttgtattgcccaatgagttctggcaaatgctttatgaatgggtaataattcctcagttcaagggggacagcgcagcaacaccggaggacccgtccttaaccgcattgtgtaaggatacccggacctcatatgtacatacacgtcagctgtaaggccattgaagtttgaatntaagtgctgtggaaatgtttgtccttcacctgaattacattcaatgtttgtgaaacactcttttgtctacaaaatgcttctagtccaggaggcacaaccaagaacttgggattaatgaagcattttgtttcatttacacaaatagtgatttacttttggagatccttgtcagttttattttctatttgatgaagtaagactgtggactcaatccagagccagatagtagggggaagccacagcatttccttttaactcagttcaatttttgtagtgagactgagcagttttaaatcctttgcgtgcatgcatacctcatcagtgattgtacataccttgcccactcctagagacagctgtgctcaccttttcctgctttgtgccttgattaaggctactgaccctaaatttctgaagcacagccaagaaaaattacattccttgtcattgtaaattacctttgtgtgtacatttttactgtatttgagacattttttgtgtgtgactagttaattttgcaggatgtgccatatcattgaacggaactaaagtctgtgacagtggatatagctgctggaccattccatcttatatgtaaagaaatctggaattattattttaaaaccatataacatgtgattataatttttcttagcattttctttgtaaagaactacaatataaactagttggtgtataataaaaagtaatgaaattctgaaaaa

SEQ ID NO: 80180 - DNA, 430 bp, Homo Sapiens
cgtgcctcctcactcatttgtctctgtctgttttcatagccatcaatatagtaacatatttactatattcttgaatacccttgaagaaagaaatccgttttctattgtgcattgctatacgaagtgaagccagtaaactagatactgtaaatctagatattgtacctagacaaaatatcattggttctatctctttttgtatctgttgtgccagggaaggtttataatcccttctcagtatacactcactagtgcacgtctgaaatagtatcccacgggagatgctgctccacgtctgaggtcacctgccctgtgtggggcacaccaccgtcagcaccaccgtttttacagttactttggagctgctagactggttttctgtgttggtaaattgcctatataaatctgaataaaaaggatctgtacaaag

SEQ ID NO: 80181 - DNA, 267 bp, Homo Sapiens
acttaattatttacttttcaacaagcttttaagatataccatgcttatagaaaaatgaacagatcttaagtgtacagcgtgaatgttcacaagcaaacacacctggtggagctaccatccagatcaggaaacagaacatgccagccccccagaagccctctttgtgttctcagagctcacctttctcccctaaagataactaccattctgaccactgttagttctgcctgtttttaaactttatataaaaggaattatatagtagat

SEQ ID NO: 80182 - DNA, 2687 bp, Homo Sapiens
  misc_feature (349)..(362): n is a, c, g, or t
  misc_feature (405)..(440): n is a, c, g, or t
  misc_feature (2275)..(2275): n is a, c, g, or t
  misc_feature (2283)..(2327): n is a, c, g, or t
  misc_feature (2332)..(2333): n is a, c, g, or t
  misc_feature (2500)..(2527): n is a, c, g, or t
tccccaacctcccaagccaggatagggggtgagaaagccaaggtctggagcttgggattggtgggcactttctcacatgctgtcccttatgagtcgcccaagcctccagggacacagactctcagacagggccctgaaggggtcaatgcatccattcctcaaccccaagcagcattctgtgcaaggaaacggatgaaaggcttttctagtccctgaaatcctgagagatcatttcacgttggggtccactaagacctcagacattctactggatttgtccttcctccatcaccttttctccccaagagagctctatgagggggaggagaatagccagcaaatggtggtnnnnnnnnnnnnnntcaaacaagttcctgtactctttatccagcacattcacattannnnnnnnnnnnnnnnnnnnnnnnnnnnnnnnnnnngggtttgtacaagaaatttacagtgtgaaaaatatacaagtgaaaacgaggccataaacctgggtgaagggagaggctgcttggtcacaaacacaaataaacaagacatttctgagttcttcctttggtctgacttcagccccctcactccaggagagaggctgcagagctcaaacctgggaaccgagcccaggcccggccctgtcccccaatgtgggcaggcacatccggagcagctggtgccatctggctttctctggctttggggtcggggggaatgtgaagaggagggagccccttcttcttccctgctcccctggctggagtgggctggaagcgcctgtgaacagggttggcagtggcactggcagcggtggggaatgaagtgggtagtaacaagagcctctgggtaacagtgaacacggggacctttgagcggtctgatcttgctcctccaagtcatagggccaccctgagttcttggcagaagcccagaggcctggatcctaggagacaagtggctttggggccctcagcctttggggccatccgtggaccctggggcctaagtggatctgcagctgctgcccctctggcagagctccctacagagctggttgctgagggccctagatctcagtagcagtgatctcctccaggcagatgcagggggcctgctcgcccaggcccaggtcagcgagctcccgggcctccagctccaggctgagctgctgcagctcctgctctagctgccggttgcgccggtacatctggatgtagttgtgctgcagctgcttctggtagcggatcacctgctccttctctgcctgccaggccagccgctccccctcaaagctgtcccgctgctcctcaccccgccgccgctcccgctgcagctccacccgcaatcgctccacctgggcccgcaagctgcccccaaccccggctgctgcccgctgcactttggcctcatcactctccgccaggaggaatgggtcagcgggtggcaggtgccacagggggctcccggagtccggccgcctcaggcatccaactgcccagctttcttcccgcagctgctcagctttcctggcggtgtcgctgcagcttcctgggaacagggcttccagctccagctcccgagctcggggcggcctcctgtagaccccgcgcacggccctcactgacccggcagcgtagcacgggcctcccgcagcgccacccgcagagccaccagctcgctgcccttctgcaccagctctgcctgagactctttcagctgctgcttcagcagggagatctcgcctgatttctggcacacctcccacttggtctcctcaagcctcggcccgagctcccgctgctcccgctccaaggtggcgcagcgccgctccagctgttcgcgctcctgcagcagctgtgcgaagtcgtcctgcaattgccgcttctcctgctgcagctggaacacctgcagctgcagcagctgttgggccccctgtgcccgctggtgcctgggccgcacagtcctctcgcagggcctcacgctctcgctgccagtgccgctgccgctcctcgtatgcctggcacatggtagcctcattctcgtccagactgtcccgcagctgctgaagctctgcctcccggtctcggagctttccttccaggacacagtgcagcagggcctcatccgaaggaggtggaggcgggggtggtggtgagcgctccccacaggagctgctgtcaggggaggcccgagtaccactgcccaaaagccccccagccacacggccccctagggagcctgtgctcttgctggaggaggaccggccactgtntctcatgnnnnnnnnnnnnnnnnnnnnnnnnnnnnnnnnnnnnnnnnnnnnngtggnncccatgggaaggcaggtgcccgcctggggagctggtggttggctcggcacctccggtgctgtaggtgggcaggctggacagtgagtttcggccagagtcggatagcgtccctgatgggcagccactggcccagccactaaatgccaggggtttgtcagcagctgaannnnnnnnnnnnnnnnnnnnnnnnnnnncagggcccccaaacagctgcgtcaggctgccctggctcccagacagcccggtggcccgaggacccatgaagctaggcagggacggagcccctcgaggtttgggcagcactggcttgaaggccggacgcgtgggtcgacgatatcccgggaattccggacc

SEQ ID NO: 80183 - DNA, 838 bp, Homo Sapiens
  misc_feature (713)..(738): n is a, c, g, or t
ggcgtctgtgactaaagagacgctggattgctcaggtcagctgctcggggctcccaggctgggtgtgccttagccacaggcagggctgtcaataacccccttcctcactggccaccacctgacatcagcaccagtgacaggctggtcagagggcggggctggtgagggtttgtcctaagaggaccaccgccatctctgggtctccagggggagagcctggccctgtcctttgctacccagggctgcccccaggcccatgaagccaataggagagcgtgtggcactggcccacaaactgtccctgtcctgtcttcctcccgagccatggcctctgctagctccaccttgaaggagccccccacatcctcccctacatcccagagatgccaccacttgtgtctccacaatgtgctcctgcccacccgggttccgcactgtccgacccctgcacaccactcatgtcaccacggcgtgcatcatgttcatccccatctatttatttaagcctttctttgcttgtagggcattttgtatgtagagcagttgaaaacagaacctcagaacttaacatctgtcctgatgttaaagtgcttttcatgaccaccctgttatctatgtatatgtaaagttaaggatgagatcttaagtttacaattaaaaactcagtactcaatatttaatattctactcgagctttatggaagccaaatcannnnnnnnnnnnnnnnnnnnnnnnnncaagctttgaacctccttccacagccgcatcttctcatgacacaaagcttttgataagtactttcctgtgggtcgctcaggggctcatagcatctcattc

SEQ ID NO: 80184 - DNA, 541 bp, Homo Sapiens
  misc_feature (434)..(459): n is a, c, g, or t
aatctcctgggctcaactgtccctgtcctgtcttcctcccgagccatggcctctgctagctccaccttgaaggagccccccacatcctcccctacatcccagagatgccaccacttgtgtctccacaatgtgctcctgcccacccgggttccgcactgtccgacccctgcacaccactcatgtcaccacggcgtgcatcatgttcatccccatctatttatttaagcctttctttgcttgtagggcattttgtatgtagagcagttgaaaacagaacctcagaacttaacatctgtcctgatgttaaagtgcttttcatgaccaccctgttatctatgtatatgtaaagttaaggatgagatcttaagtttacaattaaaaactcagtactcaatatttaatattctactcgagctttatggaagccaaatcannnnnnnnnnnnnnnnnnnnnnnnnncaagctttgaacctccttccacagccgcatcttctcatgacacaaagcttttgataagtactttcctgtgggtcgctcaggg

SEQ ID NO: 80185 - DNA, 1171 bp, Homo Sapiens
  misc_feature (352)..(365): n is a, c, g, or t
cagtcgacggtaccggacatatgcccgggaattcggccattacggccggggatgaatcacttgtcacttttcttctgtgctgggaaaaataaacaacaatgtgggtctttcatgagcgagtgacggatagtatagcttactatgttgaccccccaatccaatgatctataacaacagagcaaagtctatgctcatttgcagactggaatcattaagtaatttaataaaaagattgtgaaacagcatattacaagtttgaaaattcagggctggtgaaaaaaatcaactctaaatgatgataattttgtacagttttatataaaactctgagaactagaagaaattattaacnnnnnnnnnnnnnnaattctaattcacttgtttatttgggggaggaagacttggtatggagcaaagaaataccaaaactactttaaatggaataaaaccaactttattcttttttttcccccatactggtagataaagcaaactttataagtgggctatgaaagaaaagttacaagcttaagatacagaagcatttgttcaaaggatagaaagcatctaaaagtttaggctcaagatcaatctttacagattgatattttcagtttttaatcgactggactgcagatgttttttcttttaacaaactggaattttcaaacagattatctgtatttaaatgtatagaccttgatatttttccaatactattttttaaaaaattgtatgatttacatatgaacctcagttctgaaattcattacatatctgtctcattctgccttttatactgtctaaaaaagcaaagttttaaagtgcaattttaaaactgtaaattacatctgaaggctatatatcctttaatcacattttatattttttcttcacaattctaacctttgaaaatattataactggatatttcttcaaacagatgtcctggatgatggtccataagaataatgaagaagtagttaaaaatgtatggacagtttttccggcaaaatttgtagcttatgtcttggctaaatagtcaaggggtaatatgggcctgttgtttagtgtctccttcctaaagagcacttttgtattgtaatttattttttattatgctttaaacactatgtaaataaacctttagtaataaagaattatcagttat

SEQ ID NO: 80186 - DNA, 1737 bp, Homo Sapiens
ggggcagtgggaagctcgcagcagctggggaggagccaaagcctcggcgctcacctaagccgcagggagatacacccaactgggagatgaggaaacagcaacccagagaggagaactaacccacacaggatcatttcgcgaaggagcaaggctgaagaaccagacctggactttcttaggacaaacttactgcagcttgaaggagccaaccatggatttgaggcgtgtgaaggaatatttctcctggctctactatcaataccaaatcattagctgctgtgctgttttagagccctgggagcgatctatgtttaacaccatcttactaaccattattgctatggtggtatacactgcctatgtctttattccaatccacattcgcctggcttgggaatttttctcaaaaatatgtggatatcacagtacaatttctaattgatcctgttcacattcagtgaaatggcattgcatatttatatgttgcttacagcttattgatttaggtaactattgtgtcttccttcactatctgacctgaaaagcactctcttctctatgcactcttatattctgcctttctgcctggagtttgaaatacatgtctctttagtttcttttgcacatgctacattgtgctttagaccggagataatacagtgactttacctcacaaatcatattctgtcaacacaaatctatgaatttagtttatttaaaatcagaacaatttcctacaaaatttttctggaaaatagactcctaacagacctaccagaatcatgcttaaagtgctcccttgacacttattctatactgaaggataaaattttaaaaaatctttataggctactgtcagaagtatcctatccttgtttacgatgtataaaaagatgtgaataaattatatggaccccctaagtcttattttctagtaaactgatgatactggaaattcttttacttcaaatgcaaaagaataagctggaggcaattatttcctttcatacagagttcatgaattgttttaaatgcttcttaaagtctggctttataaccgtttaaaatcaacaatgttgattttagataaccaaggaagtattataatacaaaataattttaagtgtaagaaactaaagtataatcaaagtaaattcagttattgtatttgtggtgttgccttgccttgcatgatgctgggggaaaaagagaaaagaaatggttttctttttgtactttcattcagtgtagagggaaaaaagcatgtattgggccaccggaagacaagctaataaataggctggaagtaatattctaccagcaggaactcaacagctccagttaaatgctttgatataggggctcctttgcagagccaaaacaagatttattaaatttccttcaaactgtttatcttttaaaacaaatataagggttttaattatactgctgaagcaaatgtgaatgccaaagactacgttttgcagttttgctttcctcccaataaatattaatgtatgtaattctagagggtaaaaatgtaaataggtttggacaatatttgcacccttgtttgtgttatgaaaaaaatttttccaaggcgagctagagagaaagatgtttggcatgccaaattaacttgcatgtttgttaaaaaaacaaacacatgttttgaagagaaaccagatctgaacatgtatttgttgagttttgcaaaataaaattaattttgtaagt

SEQ ID NO: 80187 - DNA, 874 bp, Homo Sapiens
aatagggctaggtagcgaggctggcgtggtgaattcggcacgagggagctccggggcccgcggagctcgcgccaggctcctgggaaaggacggggagtgttaccggggagcagctgctccattgtgcctcgaggccccgatcgggctaggccgacggcctccctcccttcacctttcctctcctggcggggttcggcggcgggcgagtgactgcggccacgcctgaaaggcgactctcctgattcaagatgaccaacgaagaacctcttcccaagaaggttcgattgagtgaaacagacttcaaagttatggcaagagatgagttaattctaagatggaaacaatatgaagcatatgtacaagctttggagggcaagtacacagatcttaactctaatgatgtaactggcctaagagagtctgaagaaaaactaaagcaacaacagcaggagtctgcacgcagggaaaacatccttgtaatgcgactagcaaccaaggaacaagagatgcaagagtgtactactcaaatccagtacctcaagcaagtccagcagccgagcgttgcccaactgagatcaacaatggtagacccagcgatcaacttgtttttcctaaaaatgaaaggtgaactggaacagactaaagacaaactggaacaagcccaaaatgaactgagtgcctggaagtttacgcctgataggtaaacaaatcatactccccagtcaagacttccctgacagtcccactacgagaaagctgtggtgggacagccaagtactcgtttccacaccaagactcagactttttgagccaaaaaaaagccacattcttacactgtccagcttgtaatggttaatgtaaaacttaccagatg

SEQ ID NO: 80188 - DNA, 1052 bp, Homo Sapiens
  misc_feature (15)..(15): n is a, c, g, or t
agagctcttgtgatnccgagttgcaaagattttctccagaccgatctgattcactggaaatatactacgacccatcttggaatgtactttaatcttatcctaataaatcaccttactacaagacactccttttggggatgaacaggttcgataaagccggctaaggacagaccaatcaaaagaattacgtgctcttctagtaagtgtttagagactgtttcacgttctccaggtaacaccgccattactcggcggtccagatggcagtcttgcttcagggagtctactccacttgcaggacctctttgattgagttcactaaacctcacagggccgccttccccgtgttccagttagcaaggggccctcaacgccgcggacacagcgcaacctccgacgccagagaacaatagctcctcgatgcgtctccagagatgtcaaggaggaacgaacccagcggccaggagactgcgcctcacgactgatgagagggaaggcatcggtttctaagttctcaaaacttacaggtgagcttctgctaagagtaaacgcccgcggctcgccgcccacggcctctctcttgaggtggcacctggtcctccgacacgcggaagcatcacggatgagcgtcacgaacacagagcggccaatcacgcgccgccttcgcccagatccctccgcacgaggcagccccgcagccgcaggtggccccggcgagtacttccaccttcccttcccgtgatgccctggggctgacctccgacctcgctggcccgcccctcccctcggccgcttcccttactgagcttgctgagctccggggcccgcggagctcgcgccaggctcctgggaaaggacggggagtgttaccggggagcagctgctccattgtgcctcgaggccccgatcgggctaggccgacggcctccctcccttcacctttcctctcctggcggggttcggcggcgggcgagtgactgcggccacgcctgaaaggcgaccctcgtgccgaattcaacacccagcctcgtacctaaccgattcatccgttt

SEQ ID NO: 80189 - DNA, 924 bp, Homo Sapiens
  misc_feature (535)..(535): n is a, c, g, or t
ggggcacgaggcagccccgcagccgcaggtggccccggcgagtacttccaccttcccttcccgtgatgccctggggctgacctccgacctcgctggcccgcccctcccctcggccgcttcccttactgagcttgctgagctccggggcccgcggagctcgcgccaggctcctgggaaaggacggggagtgttaccggggagcagctgctccattgtgcctcgaggccccgatcgggctaggccgacggcctccctcccttcacctttcctctcctggcggggttcggcggcgggcgagtgactgcggccacgcctgaaaggcgactctcctgattcaagatgaccaacgaagaacctcttcccaagaaggttcgattgagtgaaacagacttcaaagttatggcacagagatgagctaacctcctaacgatgcgacaacaatatgaagcatatgtacaagcttcggagggcaagctacacagatcttaactctaactgatgtacactggcctaagagagtctgaagaaaaactanagcacaacagcaggagtctgcacgcagggaaaacatccttgtaaatgcgactagcaaccaaggaacaagagatgccaggagggtactacttcaaatccagtaccctcaggcaagtcccagcaacccgagcggttggcccaactgaggatcaaccaatgggaaaaccccgcggaaccaactttggtgtttcccaaaaaaatggaaaaggggtgagactgggaaacacaaacctaaaagaaccaaactgggggagacaaggcccccaaaaattgaaacttgggggtggcccgtggaaaaaatcttatcacgcccttggtagataaggtagaaaccaaatttccatttactctcccccccaggtacaaagaaactcttctcctcgggacacg

SEQ ID NO: 80190 - DNA, 1013 bp, Homo Sapiens
gctatggtactatagacagctcgtgttaaaaaaagcaggctggtacggtcggaattcccgggatatcgtcgacccacgcgtcgatataaaacagcagatgggaagacatattattataataatagaacattagaatcaacctgggaaaaaccccaagaactaaaggaaaaagaaaagttagaagagaagattaaagagccaattaaagaaccctctgaagagcctctgccaatggagacggaggaggaggatcctaaagaagagcctataaaggagataaaggaggagcccaaagaagaggagatgactgaagaagaaaaggctgcccagaaggcaaagccagttgctactgctcctattcctggtactccatggtgtgtcgtttggactggtgatgagcgggtcttcttttataatcccaccactcgtctttctatgtgggaccgacctgatgatctgattggcagggcagatgttgacaaaattattcaggagccccctcataaaaaaggaatggaggaattgaagaaactaaggcacccaactccgacaatgctgtcgatccgaaaagtggcaattctctatgagtgcaattaaagaggaacaagaattaatggaagaaattaatgaagatgagcctgttaaagcaaaaaaacggaagagagacgataataaagacattgatcagaagaaaagaagctgcatggaagctggaaattaaaggctggccgagaaaagggcattgtcccctctggagggtcgaaatgaagccagctcaaggacattgctggtaagagagaagggtgtcctgttttcaacgtgggacgaagggttggcacagattgttttgatccccgggactaatttctcaatccttaagagaagaacccaggtgttggtcagtcttttagaccaggggcagggaagacggcggcgacaaactcatttgcgcccgggtttctcaaacggcgcgacagccttctccagacttttgggttgcgcgttcgtcacta

SEQ ID NO: 80191 - DNA, 842 bp, Homo Sapiens
  misc_feature (79)..(113): n is a, c, g, or t
ggtctatagatcactatgggcgccctccttcagagcgaacgaccgagcgcagcgaagtagtgagcgaggaagcggccgnnnnnnnnnnnnnnnnnnnnnnnnnnnnnnnnnnncagtcgacggtaccggacatatgcccgggaattcggccattacggtccgggtgagttctggagactcaacatgaagctaccggccaggttttctttactctggggtcccggctgtccctgtggcctcgctcctcggaggtttttcagttatgggacaaaaatattatatcaaaacactgaagctttgcaatctaaattcttttcacctcttcaaaaagcgatgctaccacctaatagttttcaaggaaaagtggcattcattactgggggaggtactggccttggtaaaggaatgacaactcttctgtccagcctaggtgctcagtgcgtgatagccagccggaagatggatgttgtgaaagctaccgcagaacaaatttcttctcaaactggaaataaggttcatgcaattcagtgtgatgtgagggatcctgatatggttcaaaacactgtgtcagaactgagtcaaagttgcaggacatcctaatattgtgataaacaatgcagcagggaattttatttctcctactgaaagactttctcctaatgcttggaaaaccataactgacatagttctaaatggcacagccttcgtgacactagaaattggaaaacaactaattaaagcacagaaaggagcagcatttctttctattactactatctatgctgagactggttcagggttgtcagtaacaagtgcttctggcaaagcaggtgtggaagccg

SEQ ID NO: 80192 - DNA, 1957 bp, Homo Sapiens
  misc_feature (1248)..(1331): n is a, c, g, or t
  misc_feature (1442)..(1442): n is a, c, g, or t
  misc_feature (1500)..(1500): n is a, c, g, or t
  misc_feature (1509)..(1509): n is a, c, g, or t
  misc_feature (1697)..(1697): n is a, c, g, or t
tgtgctatgaacagtgggtcaaaaagcaggctgtacggtccggaattccccgggatatcgtcgacccacgcgtccgggagactcaacatgaagctaccggccaggttttctttactctggggtcccggctgccctgtggcctcgctcctcggaggtttttcagttatgggacaaaaatattatatcaaaacactgaagctttgcaatctaaattcttttcacctcttcaaaaagcgatgctaccacctaatagttttcaaggaaaagtggcattcattactgggggaggtactggccttggtaaaggaatgacaactcttctgtccagcctaggtgctcagtgcgtgatagccagccggaagatggatgttttgaaagctaccgcagaacaaatttcttctcaaactggaaataaggttcatgcaattcagtgtgatgtgagggatcctgatatggttcaaaacactgtgtcagaactgatcaaagttgcaggacatcctaatattgtgataaacaatgcagcagggaattttatttctcctactgaaagactttctcctaatgcttggaaaaccataactgacatagttctaaatggcacagccttcgtgacactagaaattggaaaacaactaattaaagcacagaaaggagcagcatttctttctattactactatctatgctgagactggttcaggttttgtagtaccaagtgcttctgccaaagcaggtgtggaagccatgagcaagtctcttgcagctgaatggggtaaatatggaatgcgattcaatgtgattcaaccagggcctataaaaaccaaaggtgcctttagccgtctggacccaactggaacatttgagaaagaaatgattggcagaattccctgtggtcgcctggggactgtagaagaactcgcaaatcttgctgctttcctttgtagtgattatgcttcttggattaatggagcagtcattaaatttgacggtggagaggaagtacttatttcaggggaattcaacgacctgagaaaggtcaccaaggagcagtgggacaccatagaagaactcatcaggaagacaaaaggttcctaagaccactttggccttcatcttggttacagaaaagggaatagaaatgaaacaaattatctctcatcttttgactatttcaagtctaataaattcttaattaacgcgtatgccctccccggactgcctgcccccccgtccgcaggcaaggcccagnnnnnnnnnnnnnnnnnnnnnnnnnnnnnnnnnnnnnnnnnnnnnnnnnnnnnnnnnnnnnnnnnnnnnnnnnnnnnnnnnnnnaatggaactacccgcccgtgcgatgataccgcttcgaacagaggccgcacccctcgcccctatcactctctctctaaacacaatatcatctttataggctacgaaccgccncgtgaatatgcgccccaccaaatgccccccgccggcgcgcgtttctccccccccgctncatggtccnccgtgaagctacgccatcatctgtgcgcgccagcgacccgcccccgtccgcgtgcccccgcccatcacgagtgaatgcagccacccccccgcggtacgccctgtccatcgaggatggaaagacggtcggggcggccaactccgtgacctctatcgcgacccccgaatctgacaccgcaacaaaacccntcatgcctcgcggtggggagccggccagtgacaccatggcgatgctccctcttttctctagcccgactcaacttgtttccaccgctcacggcacctcccgtgtatgtaacacgcgcccccagtgcacccggcccggcgtgatcgcgtactccggaaccaagacggtgagtgataccacaacaccggtccggccatgcagataatccaaacagagtacttcgcgggaacaacgcgtcccctcacctcttccgtccccctgt

SEQ ID NO: 80193 - DNA, 697 bp, Homo Sapiens
  misc_feature (56)..(56): n is a, c, g, or t
agcagttctctgctgcaatattcccattgaccacgtaaatgaccataagtgtcatntaagaacatgttaggttcagccctgatctgaatataaaagtgagaaaagggctacagtgcatttcttggtaacttaaactgagtcttgaagttataatgatccattcgagttctgtgatccttattgttcttaattgtgtttctctacgtattgttacagatgagccatacgtttctttgtatcaatgtagacatgacttcagatacctctgaggacctacccagcagtctaggaccctgggccaagtgctgggactatggtactaaatccagtagatgggctgtgtagcaactctcccagggaacacactagggtacttagggaggtgctttgtggagcatgttgaagctttgagatctgagcaggaggcagtgatgtccctggtctattcagggaaagatttcagtgtgaaatggtaaacatccaattgacaggatttagattttgcttagtttttctgctttttaatgtttctatcccccatctcagtgttttctttatccatcccagtgatgccttatttgaaactgggcttaaactgcaaaaagaatgaagttggatttaggaagctgttagatcattgagtggtgttgagagtgaagtttcactagcagggaagtttccttgagcctaaaataaa

SEQ ID NO: 80194 - DNA, 1744 bp, Homo Sapiens
  misc_feature (1371)..(1403): n is a, c, g, or t
  misc_feature (1555)..(1575): n is a, c, g, or t
ccggcagtaactataacggtcctaaggtagcgaggcctgggtggcgaattcggcacgaggccgggcgcagcacactcccagccggccgcagcctgacacgccgcgcggccccccagtctcccgcggctgctcccccaggcatggcacagggcctcgcctcactatggcagcagcacggcacagcacgctcgacttcatgctcggcgccaaagctgatggtgagaccattctaaaaggcctccagtccattttccaggagcaggggatggcggagtcggtgcacacctggcaggaccatggctatttagcaacctacacaaacaagaacggcagctttgccaatttgagaatttacccacatggattggtgttgctggaccttcagagttatgatggtgatgcgcaaggcaaagaagagatcgacagtattttgaacaaagtagaggaaagaatgaaagaattgagtcaggacagtactgggcgggtgaaacgattaccacccatagtgcgaggaggagccatcgacagatactggcccaccgccgacgggcgcctggttgaatatgacatagatgaagtggtatatgacgaagattcaccttatcaaaatataaaaattctacactcgaagcagtttggaaatattctcatccttagtggggatgttaatttggcagagagtgatttggcatatacccgggccatcatgggcagtggcaaagaagattacactggcaaagatgtactcattctgggaggtggagacggaggcatattgtgtgaaatagtcaaactaaaaccaaagatggtcactatggtagagattgaccaaatggtgattgatgggtgtaagaaatacatgcgaaaaacgtgtggcgatgtcttagacaatcttaaaggagactgctatcaggttctaatagaagactgtatcccggtactgaagaggtacgccaaagaagggagagaatttgattatgtgattaatgatttgacagctgttccaatctccacgtctccagaagaagattccacatgggagtttctcagactgattcttgacctctcaatgaaagtgttgaaacaggatgggaaatattttacacaggggaactgtgtcaatctgacagaagcactgtcgctctatgaagaacagctggggcgcctgtattgtcctgtggaattttcaaaggagatcgtctgtgtcccttcatacttggaattgtgggtattttacactgtttggaagaaagctaaaccctgaagatcagtagcccctaatcacatgtgctgcaaatagccttcctgacctccatatgctgtacatgacatcaaaatgagtcaggcaattgattgtgaattccttaaagnnnnnnnnnnnnnnnnnnnnnnnnnnnnnnnnnaaaagcaaatggaaaatgtatattttgatgagcttagggtgttttttgaaagtcagctgaaggatggttagacagcacagcgaagactgctaaatgcactgaccccccccattagaatgtgatttttgttcctttttatttctctgtgggcnnnnnnnnnnnnnnnnnnnnnggtagatcttcaatttggatatttggaggagtgaacatcgttgttttgctggagggaagatcttgatggtgtttctttccccaaaaattgacttagatattaaaatttggtgcttataagagagagttaaaaaaaataggattgcttcaattaaaattacaaaagagcc

SEQ ID NO: 80195 - DNA, 665 bp, Homo Sapiens
agtagtgtttttatggggaacagtataatgtctcagagttcttctctcttatcctgctgatgctgagacagtggctttgtataagcttttatttatacctatttcaacatcatgaaaatttttccatcagcattttcttgcaactttaaaaatcacaagggattatttgttaataaagagatacaggatctataatttattggcaatactttattttaggaatcttcaaattgtacttaataaataaatcacaggtcaaaatgactgtaaaatcaatcaggctttctcgtaagttatttcctgaaaaccatccatgataaatacaacaaggcttggcgaaacctcattactcttggaagtcttcagaggttattatacctactgatctgtatttgtctctaagagacatttgaaacacagttacaatgtcaatttggtgtaacattacctgtagtagagctcagagtatatggcagtgcacggtcactcaagatgcatggcgtgtcatttgggtcgctttgatgggtgctcgggtagaattagccttgtagagactaatgtgttcatgctatctctgatcctgtggtgttgtataaaaatgaacagctaaaaatttacccatgacaagattaaagcaaaaataaacaccaaagttgttagacttt

SEQ ID NO: 80196 - DNA, 551 bp, Homo Sapiens
  misc_feature (48)..(157): n is a, c, g, or t
gtaaagacaggatctcactctgtcacccaggttgctgagagtgtggtnnnnnnnnnnnnnnnnnnnnnnnnnnnnnnnnnnnnnnnnnnnnnnnnnnnnnnnnnnnnnnnnnnnnnnnnnnnnnnnnnnnnnnnnnnnnnnnnnnnnnnnnnnnnnntcattgtactccttaacacaagaagacttcaacaatgataagtagttgtttataaggaagcaggatcattaccaaaataaatcctgctaaaacaacaggaatcatgttttaaagcctagtttgctaatttttgctagtaggataagagtgatcgtaatatctcgaacattacatagacacttaaaacctttagttgtatttcatcaaaaatctgttcataccccacgttggtttcaaaacatactatgctttttacttcgtgttatttcctcatattcatttttgtgtgtatgtgtatgtcacaaatattgatatgcctggttgtttatttttgttttctattatgcctttttcaaaatataaaaataaacttgtaatttctaactaaaaaaaa

SEQ ID NO: 80197 - DNA, 633 bp, Homo Sapiens
  misc_feature (427)..(482): n is a, c, g, or t
ggcacgaggagtttctgtaaattaaaccttgagacaggagggaagttaataaaaactatattttctgtgacttaagcaataggttttcttctatgctcattgtaactaggtgggtctccttccactgactcattcccgccaggatttagcccctgggaagctccctggtatcacttggtctcctggccaaagtagaagacagagggagagaggctctattcattcagttcctatctctcaaataatttgctactttcattattctggcgctatatattatgaggtaaagacttcaaatagtgtcccatttggagatgctttctcagcccatctttccatggatatttctaagagtctatttttgttccttcttatccaaaccctgaaacatgcatcaaattccatggatctcatcactttatttacnnnnnnnnnnnnnnnnnnnnnnnnnnnnnnnnnnnnnnnnnnnnnnnnnnnnnnnnaggccaatccaaattgaaatatcatctaagtttgaaatatacactgatttttaaagacctagtaccaaaaaaatgtaaactcagtaattttttaaattgatttcatgttggaatgataatatgttgagttaaataaaacattattaaaatt

SEQ ID NO: 80198 - DNA, 1534 bp, Homo Sapiens
  misc_feature (70)..(70): n is a, c, g, or t
  misc_feature (202)..(202): n is a, c, g, or t
  misc_feature (226)..(226): n is a, c, g, or t
  misc_feature (261)..(261): n is a, c, g, or t
  misc_feature (1028)..(1045): n is a, c, g, or t
  misc_feature (1054)..(1092): n is a, c, g, or t
  misc_feature (1139)..(1211): n is a, c, g, or t
  misc_feature (1264)..(1357): n is a, c, g, or t
ctcgataaggacctcaggaatgcctggccagatcgccgaggcacagaactcatcattgccgtcatctctntagatagatgacagtgcccagcctgagaagtctgggcatcctggtcctcctggtgtaacggaccagtccgcaagcatgtaatttctagcaacacggtgcgagcaatcaccaggtgcattgaagcgtgcgcanccggcggaccgcgagagatcctcntgcaggagctgagccggtcatctcccgcgcggtgnggacaccccgcaccatgcttctcaaactcggccatcatggaagagcgcctcctagacgcagtgggcccttcctcccgctccagcggcaccacgtccggcactgcgtgctcaacgagctggcccagctgggcctggagccaagagatgaggttgtccaggctgtgctggacagcaccaccttcttccctgaagacgagcagctcttctcctccaacggctgcaagaccgtggcctcccgaatcgccttcttcctctgactctctgagtggtgtcctcggcccccctgatggccaggccatgcaggaaaggccaggggcctctgtcacaggaacccagagcaccaagtgagatgaacggagtgtcggctaggccacgggacagatggccaggaagggccctggcctctaaactggctcgagagcatcttggccccggccaccttccccagggaaacccctggtcaccccagaacctcactgagccttgacctccccctgcagcctgagccttcttactgtgaattataactcagggactgtggctcgtggcggtgctccctcctcagtctgccacccttgccccttgcctccttggtcgggcaccatacctcctcccctccaccccacaccctgtgtccatatcaagccaggtggagccttctcagtttccagaaatggagggactcaagctgccacttgggcctggttttagatgtttttaattttgtaaaagaaaacaagtataataaactcagctgtgggaccagnnnnnnnnnnnnnnnnnnctcgaggcnnnnnnnnnnnnnnnnnnnnnnnnnnnnnnnnnnnnnnncatggtcatagctgtttcctgacccagctttcttgtacaaagtggtnnnnnnnnnnnnnnnnnnnnnnnnnnnnnnnnnnnnnnnnnnnnnnnnnnnnnnnnnnnnnnnnnnnnnnnnntgcagtacccgggaatttaacccgcctaatgagcgggcttttttttgtgatcnnnnnnnnnnnnnnnnnnnnnnnnnnnnnnnnnnnnnnnnnnnnnnnnnnnnnnnnnnnnnnnnnnnnnnnnnnnnnnnnnnnnnnnnnnnnnngatcaagaagctaccaaattcttttttccccaagggtaacttggctttccgccagagcgccaaataaccaaataactgtttctttctaagggtagccccgaagttttaggccccccacctttccagaaacttcttgaaacaaccgccccataacaaaaccctcggcctcctgggctc

SEQ ID NO: 80199 - DNA, 1367 bp, Homo Sapiens
  misc_feature (121)..(163): n is a, c, g, or t
cgaatatcacgatactcgttcggggggagcagaggcgggagcccgcgcgtgaacgcccccgcgcgggcggggcttgtaagggggtcgcaccgggcggccgaaacgggagccggcggcttcnnnnnnnnnnnnnnnnnnnnnnnnnnnnnnnnnnnnnnnnnnntccaggccccagtgtgagccgggtggggtaaggagccccggccgggaggccccagtcccggaggtatgattcccagtaagaaggactcaggcttcagggggaggtcaaggctcagtgaggttctggggtgcccaggggtttcccctgggaaaggtggccgggcccaagatgctctcgacccagtttagagcccagggcccttcctggccatctgtcccgtggcctagccgacactccgttcatctcacttggtgctctgggttcctgtgacagaggcccctggcctttcctgcatggcctggccatcaggggggccgaggacaccactcagagagtcagaggaagaaggcgattcgggaggccacggtcttgcagccgttggaggagaagagctgctcgtcttcagggaagaaggtggtgctgtccagcacagcctggacaacctcatcccttggctccaggcccagctgggccagctcgttgagcacgcagtgccggacgtggtgccgctggagcgggaggaagggcaccactgcgtctaggaggcgctcttccatgatgcccgagtttgagaagccatctgatgaagatgaagatggctttgcggtaattggtcccgtataccacccaggaggagcccaggaaaggccgcaggacttccatcaggcctgggggcatcttgtccatctcatcgaagaggaagagggagcggccacaggcagtgaggttcccttggacccagctcttcagatccttcttgtagcgctcgatgtggctggggtgggggaagtggaggacgggagaaaagtggtgcacgcgggggctgcggaggccgccctggaagaggtagtgcgccagcagggagctgacataggatttgccggtgccggtccagccgtgcagggagaggaccagcggcttggtgggggctgggtcccgcacaaaggccttcagcgccttcaccaccagcgccttggccagatgctggccggccaggtgctgagccaggtcacactccagacccggcaagtcgggccggaagtcgcattcgcaaaaggcgcccaaggtgcagcgcagggaagccaggtcccaggcggcggccgcggccgagaccagcccgagcagcccgaggagcgagccccagggccggcagccgcgcgtcgcagccgccatccgggtgaggcccgagctcgtgtggggcagt

SEQ ID NO: 80200 - DNA, 1347 bp, Homo Sapiens
ggcacgagggaagggcactgactgggtcactggtgaagttccccgcaggaactgagtcagaccccgtctcagggccctgcacaagataggtgcctgctctaaggcgtggaccctcgccacagccctggcccgtcttgacgggcgagggttactgtacttgtcccaaccgtacagatgagaaagctgagactcagggcgagcaacccgggtcccagcggagcgcccggcacgcgccgacacttcagcaccagtcgcggtggccaccactgtgcgcggagatggctgcgacgcgtgcgcagatctcgatcccaaactccctcctgcaagaatctggacccgaatccacccattgcccgttttctgctgccgctggagagaatctctgaggtccccaggagagcctgcctgcacggaagagatgcctcctcagtatggccgcccccggagaggagcgattaagtgcagacctccatgttgctcttgagcctgagcggcttcagggagccatgtttgttactggcgggcgccgacctcactgagcatgtgcagccctggccgggcggcctcaaagttctgacatcacagggcggttcctgaagtggacgtagttgtaagagctagttattttagacaatgcctctgggatcagggactctaatctggaaataggtagtcggagaggtcggtgatgcagtctcgggatcagagacctgagctatatggggttagagaggggccctgggcaggcgagtctctggggagtgtgatgagaatccttgtgtaagatgctgggaggaggtggggtcagggctggggtccgtgggccgacgggttgggggatggccagcgtcagggatcagtagtagagattctatgtgccctgatcgccagtggaggttttaaatacagagtattcatgagtttagcaatgttattcgcctctcattatttaaataatttgaagttttccccaataactagtgtcttagaagtcatgaaaatttcagaaaatgacaggtcttctgagttcgtgatgggagttgggcagcagtcgcatacgagcacctggagagtccttgccagttctttggggatggggagctcttaagactgccctgagaccgccctttgacctcattgtggtcctttctagatcaaatgctgttttccatgactgtctctgttcttcccatacgcgaatggcaggcatccagatctccaagaatagaggattaggagagactccaccacctatgtcctcacagttaattatcgatttgtgtcagttgcccattttctcacttcctgtttgtgtgtcaaggagtattaataaatctttgcctattt

SEQ ID NO: 80201 - DNA, 1181 bp, Homo Sapiens
  misc_feature (84)..(130): n is a, c, g, or t
  misc_feature (537)..(563): n is a, c, g, or t
gggtccggaattcccgggatcaccgcgactggtgctgaagtgtcggcgcgtgccgggcgctccgctgggacccgggttgctcgnnnnnnnnnnnnnnnnnnnnnnnnnnnnnnnnnnnnnnnnnnnnnnnaccctcgcccgtcaagacgggccagggctgtggcgagggtccacgccttagagcaggcacctatcttgtgcagggccctgagacggggtctgactcagttcctgcggggaacttcaccagtgacccagtcagtgcccttcagttaaagaccaccaggagcacacttatatcatggaaatcaggacagtagcagttgggattgtggcaatcaaaggggtggaaagtgaattctatcttgcaacgaacgaggaaggaaaactctatgcaaagaaggaatacaatgaagattgtaacttcaaagatctaattctggaaaaccattacaacacatatgcagcagctaaatggacaaacaacggaggggaaatgtttgtggccttaaatcaaaaggggattcctgtaagagnnnnnnnnnnnnnnnnnnnnnnnnnnncagcccactttcttcctatggcaataacttaactgcatatggtatataaagaaccagttccagcagggagatttctttaagtggactgttatctttcttctcaaaattttctttccttttattttctagtaatcaagaaaggctggaaaactactgaaaaactgatcaagctggacttgcgcatttatgtttgttttaaggcactgcattaaagagacatttgaaaagtatacacaaaaatcagatttagtaactaaaggttgtacaaaattgtaaaactggttgtacaatcatgatgttagtaatagtaatttttttcttaaattaatttacccttaagagtatgttagatttgattatctgataatgattatttaaatattcctatctgcttataaaatggctgctataataataataatgcagatgatgttatataaggtatatcagacctacaggctgctggcaggatttgtcagataatcaagccacactaactatggaaaatgagcagcattttaaatgctttctagtgaaaaattataatctacttaaactcaaatcagaaaaaaagaatattctcaaaaaaatctattatgaaagtcaataaaatagata

SEQ ID NO: 80202 - DNA, 549 bp, Homo Sapiens
agcggaaacgggcaatgggtggattcgggtccagattctggcaggagggagtttgggatcgagatctggaaaaaagcactagactggaagaggacgcgatggagtcggagccgctggcggggacaaaaaccagaggccggggaaggcgccggtgggaggcaaggcacggatggactttacctgcgcacgcgtcgcagccatctccgcgcacagtggtggccaccgccactggtgctgaagtgtcggcgcgtgccgggcgctccgctgggacccgggttgctggccctgagtctcagctttctcatctgtacggttgggacaagtacagtaaccctcgcccgtcaagacgggccagggctgtggcgagggtccacgccttagagcaggcacctatcttgtgcagggccctgagatggggtctgactcagttcctgcggggaacttcaccagtgacccagtcagtgcccttcagttaaagaccaccaggagcacacttgtaattaaatataattacattgcagcaaggaatggggtactatgggtcatctc

SEQ ID NO: 80203 - DNA, 904 bp, Homo Sapiens
  misc_feature (376)..(389): n is a, c, g, or t
  misc_feature (692)..(714): n is a, c, g, or t
  misc_feature (806)..(843): n is a, c, g, or t
tttttttaatgtgcaggctattcaagttcaatagtaaaagctcaaaaatgaatgttctactccatgctgaaggagctgaaagctgccttcttcatattttgcactttctggtagttcccctgttttttctaattccctaaaattgtgtgggtggagtggagccctgcagttggggggtaacatggaccactgattttgccctttgaccctgcacaatgacctttgcatcagccaaactcattgccatgacaactctttgtactgtgtccgtgccacagatctgttggtcacattgttaatagtaaaggggacaagttggagacggtcaatttttacattctttggtgcaattttttcttcaatggttgtaagtagnnnnnnnnnnnnnnaataataaaagggttcactagttaatactctagaaatatctgtgtgttgcaattcaaatgtatgttgagattgtgaaaagcgcttcagtgccactagcttaccggtacactagactaagcccttgatgacttattgcatgatacagtaccaggaacaacaggtggcctaaatacatgaaaagcagtgtaagctagtgacactaaagccagtcttgtattactgtatttttgacagaatggttttgaaaactgtgctacagggactgatgtggcaaatatatctctttatgcagaaggaagtcnnnnnnnnnnnnnnnnnnnnnnnaagaagtatggctttttatgcatccttcatcgagggcattgaagttgcatggactgataaaagttgatgcaaaacaagaaagaaacaaaacnnnnnnnnnnnnnnnnnnnnnnnnnnnnnnnnnnnnnngcctacagccgcggccgcaagcttattccctttagttgagggttaattttagctatggcac

SEQ ID NO: 80204 - DNA, 986 bp, Homo Sapiens
  misc_feature (513)..(513): n is a, c, g, or t
  misc_feature (626)..(679): n is a, c, g, or t
cattggaatgcttgaccagatggccgggaattggcaaaatcgcatttgttgtgatgatgatgtaccaggatttgttgccacctccttgatggagaagtgtaattctttttatgtgttcactggagtgagaagaagggcttaatgaacaatgcacatcagctgtgtatgcagttatatggaatggccaaaactgtatgtgatccaggaggtgtttcgttattttccagaagccaagcagaggaagaagttattttaagcatccaaaatgaacgtgaagcttcaagtcaggataagatttattctcaatcacaagttgtcaacctatgacagttcaggaatatgttccccattctggtgtggatctataggtttattagaatccttaccacagaatccagattatcttcagtattctatcagtacagctctctgcagcttaaactcggtggtacataaagaagatgatgaacccaaaatgatggacactgtataatttggttaagactgctgagnccaagtgctattttgttacaagaaaggaagaacttggctattttcttgacacttttatgggtgctgcactttatttttgttcggtttttgatgggagggaaagagtactgaannnnnnnnnnnnnnnnnnnnnnnnnnnnnnnnnnnnnnnnnnnnnnnnnnnnnntgaagagaagagtggtaccatatgttgcaggaagtcaaactggactttttgtggctactaaatttgcctttaatcttattgttctcaattttggaatcaagtatgaaaatctgcacaaatgcaatgtttacaagaactggttgattctgggaggcatctgctacagtctctttttatatggatatgtacatgtcctattctacaaaaatgattaaagataaaaacatacttgtatcccactgctactttagctgtcaaatttggtgtttcatcacattaaaagcaataaatcagtagttggtaatgt

SEQ ID NO: 80205 - DNA, 687 bp, Homo Sapiens
ttcccactctgactttccctctataatacccatggcaggaacctagtacaggtctcccacccagggccttccaccctcggctcctgtgttgggagaaacttccaggcgtggacagcccagcctgaggcattccagtgctggggcaccgtcgcctaacctggtttctagctttgccctcactccccggaaaaactgacactgacacaggggccctttccttgcccctttagctggtacctcagtggggaggcttccttaccaagaatgagttcctgaaacccagggccagagacaaggacaacttaggggaagacggggttttcggtggagccaggggcaaatcttaatgggaccagtgggggataccccagagcccatggcctgactgcacagcctgcctggaggatgggtgcgcagctctgccctccctgaggcccaggactatgccagaagcgatggggtaccgtgtaggggagccaaggccagtagtttgggggtaggagtcccctagagtctcagaagactgggctctttggagtacagggtccccggcctctcctttaagattctctccccagctggaaggccgatgactgggtggtcgggagggagacccagctctcctttctgtcccgtttgcagcactggttttgtttccttaataaatttttagttatgaaacataaa

SEQ ID NO: 80206 - DNA, 712 bp, Homo Sapiens
ggagagacagtctcgctgtattgcccaagttgttcttgaactcctagccttaagcagtccacccgcctcagcctcctaaagtgctgagattactgcaggcatgagccaccgtgccgagcccctatgcgagcgttttcaccattggaattggaagcgcttcactgtggactgttgagctctggcgtgcagggccctgtcctgctctgagctgagggtgtctgagtgccacagaggtgtgggtgagcacccaggctcctgggcccgctcctgtcgcagctcactttctgtcctctagagcaggcagcttatcttgctgtgagagacaattccttcctaagtccgtttctttaaactcagtaaaggttccacggtgattcttcctgtgcaactttgaaaacagcgatatcacatttcttgatggccgagaatgttgcctctatttttgcagcatattttactctgtcatctaacagtgctgggcacccatgctggcagccccagtgctaggggacccacgcccatgctcttgtgttatgcctgggccccgtggggagcactgtcctggattcctgcctactggtcctctcggctgatgacggatggtgaaattgcagcccccaagtgaccttggtgccttctagctgagagagtcacggatctcagttgggaacacatggtgccaaggtgccatgggctggtttctgcaagttgt

SEQ ID NO: 80207 - DNA, 716 bp, Homo Sapiens
  misc_feature (81)..(81): n is a, c, g, or t
gataaccaaacaataaaaataaaagtatagactattttagtactaaaaaggtcctgaacatgtgagcttaagtactcattntgtccccagtggctaagaaactaaaggcaagccagcaagtgtctctgagtttcagtgtctgtatgtaaaaactgactctgacttccatcttctgcagggttagtgatacagatgctagctttttcactaaagaggtcttttagtttatactcaaccttgtctggatctaatttgattgtgcattcatgtgccttagaatgaagccaattcaaaaactcctagctggccttattctactgacttcgtgcgtggaaggctgctccagccagcactggtcctatggactgcgccctggaggaaagagagatgccgaaaatttgattgattctttccaagagatagtcaaagaggttggtcaactggcagaaacccaacgcttcgaatgcaccacgcaccagccacgttctcccctccgagacctgaaaggagctctggaaagtctgattgaagaggaaactgggcagaagaagatttaaatccattgggccagaaggaatgaccattactaacatgacttaagtataattctgacattgaaaatttataacccattaaatacctgtaaatggtatgaatttcagaaatccttacaccaagttgcacatattccataataaagtgctgtgttgtgaatg

SEQ ID NO: 80208 - DNA, 671 bp, Homo Sapiens
  misc_feature (561)..(561): n is a, c, g, or t
gttcaaccccaaagcccagtcaataattccctaaagtagcagaaactccctccgaggtagatatctgagtcagacactctcgtccaccgagcgattctattggtttaagatgagctgcgtatgaggtaagtaagccgtccggaggggcgggggtggggatgccatgggggcgtggcccatgtcctctgtccagaagtcatgtccccatttttggcatctctgattgggcagggctggcgtctccacagattccagagcatacaagtggggtggggaagggaaagtgggggagcccaggagagaaacagaatagttgcaagtgggagtatgtgtgtgtgaggtgtgggagagggagagagaaagacagaggagaaaaaggggtctgagaaataggtttctcggtatgtgtatgtttctgtgtaagaaagaaagcgagagaggaaaaagatggaaaaaaagggagagacagaccccacactccccttagaggccccattcttcctgccatgtaattagcacccccagcacagagagtctcgttagggaggggatgaccccatntggcccttctctgtcttgtgcttctcctgtattggggtttgtcctctggaagcctgcgtcctcttcaagtcgccttgtgagagcccccaccctgtgcccagaggccgcac

SEQ ID NO: 80209 - DNA, 845 bp, Homo Sapiens
  misc_feature (67)..(101): n is a, c, g, or t
  misc_feature (212)..(225): n is a, c, g, or t
atagggcgctagctcgccgcttcccaacgagcgagcgcagcgagtcagttagcgaggaagcggccgnnnnnnnnnnnnnnnnnnnnnnnnnnnnnnnnnnncagtcgacggtaccggacatatgcccgggaattcggccattacggccgggggaatatgcacagtggggcagtgtgggggcttctcagtaatggagaacagttggtgaaacnnnnnnnnnnnnnnaactaagcatttaatttatcttgcatattttccacatttaaaaatgaattaggtctattaggataattaggagtttgatcccatcaacactattcttgtagcagttaggaatcttgagctatttttttctcatacgattactatagtccagtttaccaaagttttctttagatgtctgataatcttgagatgattgcttaccttaaaaggtatagaaaggatcacttaaatatatggaaaaatgaaataagggtgaagctgaataaagttctacttactgtattaactggcaacagttgagtttcttaagatctgaattgctgtgtatgttacgctgtattcagaaccagtttctaaccagcctgtgagatgggaagttttttccccataattgggatgaaacctttcattcaggtattttgaattgaaggtgtatgtgttgtttgtaaccttgtggagattgcaagtggtgttgacattctggatcttctatgtaacagttgaaatttggaagtgacgtcacttacctgtctaacgtggtgtgggagagaatttacaagtcctttattgaaagaataattgttgcaaaatatattgcttcaactaagcctggaaaaaaa

SEQ ID NO: 80210 - DNA, 714 bp, Homo Sapiens
ctccagcttagttccacattctccaaccatcactccagcgacccttcaactgggttcaagccccacggtgggcgccacttgccgacaccagctcggtcttggagaccctaacccagcggcgctagaggaattaaagacacacacacagaaatatagagtgtggagtgggaaatcaggggactcacagccttcagagctgaaagccccgaacagagtttgactcacatgtttattgacagcaagccagtgataagcattgtttctaaagattatagattaactaaaagtattccttatgggaaacaaagggatggactgaaacaaagggatgggctctggctagttatctgccacgtccttaaggcacagctcgctcatgctattgtttgtggcttaggaacaccttaagaggttttcccccctgggtgggacaggtgttccttgccctcattccagtaaatccacaaccttcagtgtgtgcatcatggccatcatgaacatgtcacagtgctgcagagattttatttatggccagtttatggccagatttgggggcctgttcccaacagcagattctatgaccacttcagccctgcctttacagtttctgtttacctgtaaactttttcttcctgtggcctagggtagttcaggatcactaaaaatgtgttctgtgatatattaataaaaattcctgaaaaatggacttacagc

SEQ ID NO: 80211 - DNA, 541 bp, Homo Sapiens
ggaaacagcctgggtgacagagcaagactccatctcaagaaaaaaataaataaataataatttgtgtatgtgatgactgactctagtcattatggaaaataacttttggcagtttagttcctacttgttaacaattcctctttttaagagaggtactacatttgatttctcaatttctcagtgtgttttcaatacaaacagcaaccactgaaatgcagaaaatggtaatcaagtgtgatgtttctataaaaataattgagattcacatgtaatagaccctttagctttaatgagcagacatgagaatggtttatgatcttaagttggtaacataggaatatgtatttgtcaattttagttcacaaacatatccataagaatgtttacacatggcagtatcaaagcatataaaatattttctatgtaagtaaattgcatctttatgctagtgaacaaagtagcaataaatgttcatttttggatggcagtacacattgttaacaatcgtgtaattataataaatatgtatacctactccttg

SEQ ID NO: 80212 - DNA, 994 bp, Homo Sapiens
  misc_feature (111)..(111): n is a, c, g, or t
  misc_feature (235)..(235): n is a, c, g, or t
  misc_feature (275)..(275): n is a, c, g, or t
  misc_feature (286)..(286): n is a, c, g, or t
ccccggccgggtgtgggagagcgagcgccatagaacccttcccgggtgcgatcatatcagtgcagcagttccgatggagcggcgtggcgaacgcatatgtgatgctcatcntagcacccagcttacacttatctccgctcgttgtgtgtggatgtggcgatacaaattcacacaggaaagcttgcatgatacgatttatacgactcctataggattgccctcgagccagatcggncacgagggcgcgcgatagctgccaggatggaactaacacntgagagtgctntggaaatgcctgcccagcactggcagagtgcgaaggtcgggcccagtgacccaatagaatacctgggctcactggctttatcattacaggggaaaacagcaaaagcaaaagaagagaatagggaaaagaagatccacctgcaggaggaatatgacagtagcctcaaggaaatggaaatgacagaaatgctgaaacaggaagagtatcagattcaacagaactgtgaaaagtgtcacaaggaactgacttctgaaactgtttccacgaagaagaccatattcatgcaggaggacacaaacccccttgagaaggaggccttgaagcaggaattcctgccaggtacttccagtctgattccaggaatgcctcaacaggttcctccttcagagtctgctggccagattgaccagaacttcaaaatgccacaagaaataaattacaaggaggcttttcagcatgaagttgctcatgaaatgcctcctggctccaaatctcctttttaggttacagaaggtagatgcttctgatttacttctctcaaagctagaagccaagaaaatggccagctagaaccaagatttaaggggctgtaaaaggcaagttgagggactctccagcctactccttttctgaaaaacccttaatcatgtgaacatttgaactagttataggataaaataaactcagaataaggatttaaaataagta

SEQ ID NO: 80213 - DNA, 472 bp, Homo Sapiens
  misc_feature (214)..(412): n is a, c, g, or t
cagagcaggagtgaaattttattaaaaagcctcagaacagtaaggaaaggaaggaaagtaaagaaaagaaggaaaggtatgtgctttccttggttgataaaccaagtgtgcctggtgatttttaatgttactgaagatgtggcatgttaaaaaggcatctttctgctagcacagtggctcacatctgtaatcccatgattgtttttgttttaannnnnnnnnnnnnnnnnnnnnnnnnnnnnnnnnnnnnnnnnnnnnnnnnnnnnnnnnnnnnnnnnnnnnnnnnnnnnnnnnnnnnnnnnnnnnnnnnnnnnnnnnnnnnnnnnnnnnnnnnnnnnnnnnnnnnnnnnnnnnnnnnnnnnnnnnnnnnnnnnnnnnnnnnnnnnnnnnnnnnnnnnnnnnnnnnnnnnnnaattagccaggcatggtggcctgtggttcaacctgagtgagaccatgactctaaaaatca

SEQ ID NO: 80214 - DNA, 1429 bp, Homo Sapiens
  misc_feature (42)..(80): n is a, c, g, or t
  misc_feature (83)..(117): n is a, c, g, or t
  misc_feature (1197)..(1205): n is a, c, g, or t
taaactgatagactcactatagggcgctagctcggcgttatnnnnnnnnnnnnnnnnnnnnnnnnnnnnnnnnnnnnnnncgnnnnnnnnnnnnnnnnnnnnnnnnnnnnnnnnnnncagtcgacggtaccggacatatgcccgggaattcggccattacggccgggggaagtttttgtggacaatgaaaagttattttcgtacctttctaccaaaaccaagtttcaggaaaataactctatgttgtttattttcagtgacacttatgtaaggccctgtgagttgtatttatcctgtatccggcactgctaagcttttcaaggtatctttccaatcctgctgatgtggcagtcaatggctgcagggctggcaaacctccccttagccagtcagcacggcattgttccttatcaggaataacaaaggtactacatctttccagccatcagcacgttgtacaacttaactttttaacatagtccgtctgtttactgaggcactggcgagtcccagggctgatacagaaccttccctagagggacataccagagttagctgggtatagaggtggctcaaaggaagtgtccgtgggcagggggaggaatgaacaaaatggcgctgtttactttggctcagactcctagaatgcttgacaagacagaatttttttggaagaacctcatctcactatagttacttttttcacttttgttatatatgtatttattagagcatttgaatattggtacctttaaaagggtcatttggtgttttgctgttgagctggtttttgagtcatagatcttggcttcctttagaagccacttaacttccatacactataataaactgtgaacatatttttgttacctaatgcatccactgatgaacatgcaaactttgggcataatgtgaactaaaattgaaatggaaaatgttagtggccattttgcaacaatgaagaggatagcactttatctagatgaaaactggatttcttatctttgaaatatcttgaactgtttattgctcagaacttaagtaagcatgccaacatttcgtttgtttatgcttgaagtgaaatgttttacttttcactggagaagacaaaacagggtgatcttcatgttattgttttatacaagtgatggaaatgtaccttgccttgtttagaggcaatttcacatttataaatannnnnnnnncctccatgaaacttacgcagtaatcactacctggaaggtgagttttgatctctttttaaggagaggcactttccaactgaaggtgattgatgtagggaaatgtttgtactatatagaatccatatatttgactgcaagttacaaagttttaagaacatgatggttggtctctaatatatttggaactgattcataagaaaagttattaaaattatctttgaacc

SEQ ID NO: 80215 - DNA, 312 bp, Homo Sapiens
tgagccaccgtacctggcccttggttgaatctttggggttttctattcatacatataaaatcatatcattggcaaacagagataattttacttcctcctttccaatttggatgccttagatttcttttccttgcctaactgctctgtctagaactcccagcactatgctgaatagagtggcaagagcaagcatttgccttgttcctaaccttagagaaaaatccttcagccttttaccattgaggatgatgtttgctgttagtttttcataaatgatctatatcaggctgaataaatttctatttcctaaag

SEQ ID NO: 80216 - DNA, 201 bp, Homo Sapiens
  misc_feature (140)..(153): n is a, c, g, or t
gtagagatgggatcttgctgaattgcccaggctggtttcaaacttctgggctcaccaaaggcctcttttctaagaaagagccctctccctcctctccctcttgctgtctccaggagagacatcctgcaaggttgtattcnnnnnnnnnnnnnngggacagagttttactctgttgcccaggctggagagcagtggtccaat

SEQ ID NO: 80217 - DNA, 775 bp, Homo Sapiens
cgaggcaattcatgagaaattatctaatcttgctcaaatagctgaactatcattgccagcagctcctgaaattacctcaaatgaaaacatatatgaagtagaagtggaagaggaatcagttgataatgaaatggaagacatgattattcaatgttgctctgaaatagcatctctgtttttgaatgataaagagccaacaccactatctgaggtcccatttgatatctcactgccatctatattcaatcttgagagactttttgatctggctaatggttgcattttatcaggaggaagccttttcaactggatagtgtcaattattccctgaatatcctatacacgggatgataaaactgagaaataaatcaagagtatgacaacagactgaggaatttttcagcaatatctgtcagcctttggaaatttggtgagaagaagtagtcatgattcaatgtcttgcttgcacagaagcctctagttcaaacttggatcttgccccatctgatttcttatgatatatacaaatactctagatattgctttgagatttcgctgttgatcaactggcctgctgcagcttcataggtgtttcagctcccagtagggcagtttaactcctatcttctctgtgagttccaggtctgtatatctcctcagctcgctctcatttgtccagcttatctatttctttatcaagttgctttggcttccccactctctcctgcgttttgaaaagaattaattctcaagtagattaaaactacattctggt

SEQ ID NO: 80218 - DNA, 724 bp, Homo Sapiens
gccctggagccttgagtctgaaggtgttggggatggagacccatgagctattaacttgtaccgagtccaccccagcactatctgctttgggttggtgttagtttagcaccatgtggatatgctgatgcttgtgctagtcacaagtgcctactggttattcattttggagaatgggatctgttttccatcaatgtgatttattttgtgaatgtcttaagttgggtcctagaagcggagtctgagacaaggattctggggtaagtgatttattgagggaggctctcaggagaaaccaagaaggaggtgagggaagcgagggaagtacagcagagaaatcatagcgacggattcttaagggtgaaaaagacggcggtccacagaatctggctacatccctctggaacatttgcattttgataaaggacttgcttttggagctaaggagtgaatcatttattgcaaattatgtggcattttcagaagaagtaaaataatatatagaaatgtacacaaaggaaagtcatatctgcaaacgagtcccttatctgccaagcctctcctctaccattgtaattaaccactgttattagctcctcctgtaactttcctgagtttctttaccccatatataagcaaacagtgaatgtgtgtattcttgctgtccactgtttcttcttcttttagcattttaattagcagatagcatattatacatactgtttgg

SEQ ID NO: 80219 - DNA, 1281 bp, Homo Sapiens
gggcaaggagtttttcctggtgccaggtgactgcttgcccgtcttgcttaaaactcatcgtgggcccacctcgagggagaaagcccacagcttcctcaggtgtctccacacctcaagcactgccttacagctggttaaggtctatatttggcagttttaaaagaaaacaccaagaaacatgtttcacatggcggtcaccgtattactacaacccaagctggctctgcagttttgctgacagaagaaaatgatcgggttgatatataatgggtgctatttcccttaaacttcacagcagcaagtttaaagctctcagctgaaaatacagatttgatgatagggtattagatcgctaatgttggaagtcacttaggacttttagtcctttttcaaatgattggaaacacagggaaagttatttgtcaaaaatcacacagctaatacagattttaagatcacgtctattccactactactacgttagactaatatgtaatatttaataaaatatgtaatatttcatagaaatatatgagattttcaaagtaaaagaagttgctaattggaaagttcacctgagcatgctatgtttgaaattggtaaacgtttaatatttctctttataaggaacaggcaattaaggctaaaaaatgttttgagttcatgtgttttcactacacaatcaacaagtcgtgtaacgtcagaaaagatagagttatattaccctaaagggaatgaataaaaaagaggtgcctgagaaaaagccaagcctcctgttccaacaggatgcagacagaaacaagttcatttatcactcacattgcacctgaagcaaattgcagctagatccaaggagcacctcctaagcatttggcatgggaagcattgggattaagtcatgagcataaccttaaatccaatcctaacccctaaattactaccttaacaagcagaacagtgactttcagctgatgtccacatactcccttgagacttgaaatcacaaacaaatatccatgtgtacacgcacattcatttttgtaacgcatccttgttcttaatggcatgttgcaaaatttacaacagtaaatatgtaatcaatgtgttcatgtttattacaaggagcatagtaaattaataaacactcataaacttcttttcaaatataaagtcaggttctattatgggatttctgccaaaagtacaatatgtggttcagaaaataatgtgaagtattatttgtcctttggagttccttttcctaataaatatgacaaccac

SEQ ID NO: 80220 - DNA, 593 bp, Homo Sapiens
  misc_feature (359)..(359): n is a, c, g, or t
acttgcataattgtaattgatttaaacatgtatgccagaattcacaggcccatactaactgtccttaatttctttcctacagcagtactgctatatgccagtcctgtctgcattcttaagggtgcagttcaacacatcctctctagattatggtgaaaaagtattccaaaggaagtcttatcagagctagtgtcagaaagaatgacactaccaattgggcatgatcttcagcataggaaatgtcttagaattttattattttttcctaaattgtgatgctatactacttgtatagccagttaccacatttctaaagcatagtgtgcctctgtgaatcttgtttatatactgtttgggcnttctgtaagatattttgaagtttgaaaagcaaatactgaaactttaaccaagagactgacacatctctttgtacaccacgttgcttctgtgtgcatcataataactggtagaagtaatatatttaaagtaatatgtttccagttttaatttatgctttctaagaaataaaaatatgttttctgggtcaacacaacttaaagcatgaagccctttttagtaacgtgcctcgtgcc

SEQ ID NO: 80221 - DNA, 731 bp, Homo Sapiens
catcatgccatcgagctgcatcacttggctactcctacaagaggggaaggattgaaagaacagcatgatcagaaagtatgtgagagggagatgcagcgaatcactctgcccttgtctgccttcaccaaccccacctgtgagattgtgatgagaagactgtcgtggtccacaccagccagactccagttgaccctcaggagggcagcaccccccttatgggccaggccgggactcctggggcctgagcccccccagtgggcaggagcccatgcagacactggtgcaggacagcccaccctcctacagctaggaggaactaccactttgtgttctggttaaaaccctaccactcccccgcttttttggcgaatcctagtaagagtgacagaagcaggtggccctgtgggctgagggtaaggctgggtagggtcctaacagtgctccttgtccatcccttggagcagattttgtctgtggatggagacagtggcagctcccacagtgatgctgctgctaagggcttccaaacattgcctgcacccctggaactgaaccagggatagacggggagctcccccaggctcctctgtgctttactaagatggcctcagtctccactgtgggcttgagtggcatacactgttattcatggttaaggtaaagcaggtcaagggatggcattgaaaaaatatatttagtttttaaaatatttgggatggaactccctactg

SEQ ID NO: 80222 - DNA, 874 bp, Homo Sapiens
  misc_feature (46)..(46): n is a, c, g, or t
  misc_feature (51)..(53): n is a, c, g, or t
  misc_feature (73)..(73): n is a, c, g, or t
  misc_feature (87)..(87): n is a, c, g, or t
  misc_feature (107)..(107): n is a, c, g, or t
  misc_feature (135)..(356): n is a, c, g, or t
  misc_feature (375)..(697): n is a, c, g, or t
tccctgttcttggtaacctttcccgccttaggtggttggtacactncctgnnnggaaagatagaggcagcganccgtgggcgggaancggagacccccatcaccaanccgctgtccacgacggtgccgaatcaannnnnnnnnnnnnnnnnnnnnnnnnnnnnnnnnnnnnnnnnnnnnnnnnnnnnnnnnnnnnnnnnnnnnnnnnnnnnnnnnnnnnnnnnnnnnnnnnnnnnnnnnnnnnnnnnnnnnnnnnnnnnnnnnnnnnnnnnnnnnnnnnnnnnnnnnnnnnnnnnnnnnnnnnnnnnnnnnnnnnnnnnnnnnnnnnnnnnnnnnnnnnnnnnnnnnnnnnnnnnnaccaagaattcggcacgannnnnnnnnnnnnnnnnnnnnnnnnnnnnnnnnnnnnnnnnnnnnnnnnnnnnnnnnnnnnnnnnnnnnnnnnnnnnnnnnnnnnnnnnnnnnnnnnnnnnnnnnnnnnnnnnnnnnnnnnnnnnnnnnnnnnnnnnnnnnnnnnnnnnnnnnnnnnnnnnnnnnnnnnnnnnnnnnnnnnnnnnnnnnnnnnnnnnnnnnnnnnnnnnnnnnnnnnnnnnnnnnnnnnnnnnnnnnnnnnnnnnnnnnnnnnnnnnnnnnnnnnnnnnnnnnnnnnnnnnnnnnnnnnnnnnnnnnnnnnnnnnnnnnnnnnnnnnnnnnnntcctgtatacattcacactagcattttagttttagaactagttctatgttactatctgaattaatttttccacaattttgtaaggaaaaataatgcgttctttgaatttcatgtgtaaatgatatttttagttttgtgtcattttgtccaataaattctgaaaatctttgtattgcc

SEQ ID NO: 80223 - DNA, 492 bp, Homo Sapiens
cggtggaagaaatgtttaatattttccaaaaccattaaaattcagaagaaattcacgcacactgagctaacccctccctagctcttggcctctggctcgtctgtgagagccatgttcttggtatagatctctttcgtgcattgtaggagtcagttcccctccaggatgttatcatagagaactctgggtcccaagaacctcacagagacccaggaagatggctatcatggcctggttttgatctcagaaaaaagactggctaaacatttctccatatacagcaccacaatacatgtacatcgatttccttcagaaacaggagcctgatgccacatggagtaagagagaaaatgttacattgaaagtgaggagacttgagttctggttctacctctgccactatctagttggtgactgggccaattacatagccctctaggctttaattacctcattaaaacatgagggctttggtgtaaaagacctattcca

SEQ ID NO: 80224 - DNA, 725 bp, Homo Sapiens
gcacgaggggtacatagtggagggtactacctagagatgtgactgtagcgcggggctggggttgtgaaaggagcattacatgctgtgttaaggtttctgtcttgtatgtggttataggaagccaaaaaccaagccaaagagttttgagaaagtgaggaatgtgatgagatttttgtgaaagatctctcctgcagtattatggtgtgggtgttgatgagttgttttaacaaccttacattcctgtgataaacgtcacttggtcatgatgaatcatttttaaatatattactagactccatttgttagtgcagtattttgttaaagatttttgcatacgtgctcatgttttctttgtcacaatttgatatgaggtgttatgcttgcctcaaaatcagttgttaaatattcgtctatttttctggaagtgttcaattgatgttagttattccttaaatgtttgagagaatttgccatttgaacctgtggtttggtttgtgtgaatattcgcatttgataacaaattcagttagtagagttagggctattaggattttttagtctatagtatgtcaattttgataagttatatttctcatggaatatgtccattttgcctaagttgtcagatttttttggcataaagttcattgtatcgttcatttaataatatatgtatggtctgtagtgattttgtctttatttatttattttttgagactgtctca

SEQ ID NO: 80225 - DNA, 893 bp, Homo Sapiens
  misc_feature (247)..(363): n is a, c, g, or t
ggctttgtagctcccagttcccttctctttaagaatcttcatggctatcacttactgggtctctggtcctgcctgtgtgctgtgctatatctgagcatgctgccaggcaccctgaagccaggcctgatgctccctcctgatccagtcctaatgatcctgcctgaggccaggcagagggacagatggcagcagcccctcgtgtgcctgagtttgtccactggtgcaggtgaaagcagagatgatggannnnnnnnnnnnnnnnnnnnnnnnnnnnnnnnnnnnnnnnnnnnnnnnnnnnnnnnnnnnnnnnnnnnnnnnnnnnnnnnnnnnnnnnnnnnnnnnnnnnnnnnnnnnnnnnnnnnnctcccgtgagacctggaacaacacggttcagaccaactgggccagaggagaggaaggaagagtggcagagggctcagggtcagatgtctgagcttctgttcccatgggtgcctctcattatgcttgtcaggaagcagaagagagtgcaacctttgacctcatttgaactaacccatctcaccctggtttctcttccctgactgtctccgaacctgttaccccacttggaaaatcagggggtagtgcaggggtgaaccctccattttggaatcacccagcctccagtggtttcaggtccacacccaccagttgtgtgacactggacaactggctttgctcctgctctgcctcagtttccccaaaaaattagttaatgcatggaaagtgtttagaagagatcctcatagacagtaagtgtgtctgttccctgtagtgtcagctactaactgtatggctaggaaaataacagtaactccctcatcagctgtgctgaggattccatcagatcatgtatgtaaagtggttggcat

SEQ ID NO: 80226 - DNA, 979 bp, Homo Sapiens
  misc_feature (72)..(72): n is a, c, g, or t
  misc_feature (216)..(216): n is a, c, g, or t
  misc_feature (327)..(327): n is a, c, g, or t
  misc_feature (343)..(343): n is a, c, g, or t
  misc_feature (388)..(388): n is a, c, g, or t
gggcaagagctgtgtgctgggaagagaaacaaagacaccgcttatgcgcacgtaacaggcataaggcgatgncaagacggttccgagtgagagaaaccggcagcaaaacgaatatatgggatcagatcacaactagacacacgagcttggaagtttatctccgggctgtagtacaggatggattggggcgggtagggattcacacagaaccaagantgacatgagttcggatactagacgaatcagtatgggaactttggcccacgagaccaaggaatgagcagcgacgaaaaccgcgtagtaggacccgaaggaacgggacagctngggaaaatgtacaganacgacaactacgtaggactggagtaatagataagaaagaggagangggattattccacataggaggtgacagaggcaaagaaggatggagggcaaaagagacaggccctagcagaaatatggagaaaggctgtcatagatcctgagagacaccaaagtcacagaactgataaaagggttataaacaaaaaggaccagaaaaatagaaatgaaggccgacaagaagagaccccaaggctgaaaggcacagagagtctagacagtgaaatagagtgagtgacaaggagaaacacccaggctcaggagtgatggaggaaatactggcagatagagagatcagaagagcaagaggagaggtgggaacagagaagagcggggacgagtccggggagctgagaagcagaaggcggaggaggcagtcagtgggaagattcactgacagaagagaccaggagatatggggacttggaggcaggcagaaagacaaaggacaaacagctgcagcgcaaaccctaaagacaggctgacagtaaccggtcggcagagactggtaggaagataaggacaagtcagaatcaggggtgtcaactgagatgcaaatataggcaaaggagctgacaaagagaatcacagagag

SEQ ID NO: 80227 - DNA, 729 bp, Homo Sapiens
atatgtatcctgggatgggaaaatgagggagggatacatatacggagggggatcttactcttcccattcctcagaccagcaggaaaagaggggagacgtcagtctttttcctgtggttccctctcatttgtcccagttactaactacggaaatagcatcctctgctggtgctaagtgtgattaggaagaagcctggggagaggtgagtctggaattttggtcacaagagggaaggacttggagaggagaattagttttctaggctcattggcatttagtttccctaggaaaggggtcaaaacttcaagacactggtggtggtgggagatcaggaaaataacttggcctagctcaaacaatattggataatcccctccttgggggagagggattagagtgtgctcctactggccccttggagcctcccctagcttacacagttaacttgattttaaaatccaaggccaggagagaagaatccaaaaagcaatatttttcatcacatgccaaaaacgggggatagagagaaggagtggcaggcctaggcccctccgattgtcccttgggggttacccctcagcccacctcactatggtgctgggtagaggggatacctgggttctaacctctaaataggggagatcccagcctccacaaagaggcccttttattttttattctgattagccattttaaaccaacgaggaataaaaagaaatcaagatctaa

SEQ ID NO: 80228 - DNA, 581 bp, Homo Sapiens
gagatgcttgtgtgtaggcagcatcatcagatcccatactcagtttccgtgtttcacttattctatccacatgtgctaatgtagggtccgtgaggtgctgaatattctcggtttctacataatgatcaggatgattaagaagatttgtaagttcaaaggtaggggacaccacccctggtgaaactgcagggggcttattgggaaaaactgtaattttgaaagtgtatttcgtattgggctgagtgactaccactcgaggagaggttgcaagagttattgccctattgctcgacttttgggaggatggtgatgaataaaggcaggacccatgctcacttgcccagacatgttcctggaggcagcagatgctccagagtttgtggatatgaagagtgtgggctgattccgcatgacctgttcatctcctgtggcagcattcgctgaaatatagaccttaggttgactacgggacatcagctcatccgtatttggggggctggcagctatgtaaacagtgggctgatttctgtttaaggtctggctattgactgaagaggaagtgctggacctcgaacctccag

SEQ ID NO: 80229 - DNA, 596 bp, Homo Sapiens
agaattcggcacgaggtgagaggcagtatagtccccaaaattattttttcttctcatgaaaagacaggcatactttgaaaccaaagcgtaccaatattgctgtcaaatattttaatgtacataagagaagagaaaatcaccagccgtatctcattcttctgacttgttttaaccaaccagaaaactagccattttagaaacagaaacttgaaaactagaaaattgaaaactacagtattaagaaaaaatggtttcacagcaagatcataaagtgtgtttatatttttaagggaacagtaaggaatgaatctaaagatccatttgttagggatcttattttaaccaagtgtctatttttggtaagtaattttactaaaacaaattcaatggaaaaattcagaagcaagggttaaatgatccactgtgaaggtataagacagatttgtaaaactaaacaaaagcaaactcatagtaaaatatttcagttgaaccgacagaacttttttggttcctgctccatctgcagatgatactagtccctcactgtgccacacatcatgtggcctctgtggaaaacaacaacaacaaccacacac

SEQ ID NO: 80230 - DNA, 805 bp, Homo Sapiens
  misc_feature (32)..(32): n is a, c, g, or t
  misc_feature (58)..(58): n is a, c, g, or t
gcctggagctatcatccgccagatgatgcctntcatacagtcatgtgtgaccagggcntggaccctgagatcatcctgcaggtattcaaacagctcttctacatgatcaacgcagtgactcttaacaacctgctcttgcggaaggacgtctgctcttggagcacaggcatgcaactcaggtacaatataagtcagcttgaggagtggcttcggggaagaaaccttcaccagagtggagcagttcagaccatggaacctctgatccaagcagcccagctcctgcaattaaagaagaaaacccaggaggacgcagaggctatctgctccctgtgtacctccctcagcacccagcagattgtcaaaattttaaacctttatactcccctgaatgaatttgaagaacgggtaacagtggcctttatacgaacaatccaggcacaactacaagagcggaatgaccctcagcaactgctattagatgccaagcacatgtttcctgttttgtttccatttaatccatcttctctaaccatggactcaatccacatcccagcgtgtctcaatctggaattcctcaatgaagtctgaagatgcatgtttccagcattagtttgattcccaatgtgagcaagaaggaagtatatacagtaaagtaaattcaaggatctgttaaatctggtaaaagtagatcaaatcagagattgacagcctgtggagggtgctgaactatacagaattagacacaactatgtcattattttttgtacctactgctcagaataaaaacacttgaaatatgaaaaaa

SEQ ID NO: 80231 - DNA, 893 bp, Homo Sapiens
agatggagtttcgctcttgttgggtgctttcctccatgtaggcgccatgtaggatgaggtccctacacattttggcgcccgttctctcgattcctctgtacttctgatgttctgattccagatatgtcattcttggctcggactgttcaggagaatcatttctggatcttgctaaaaaatggactgctggtcaccaactcttggtggttctggctcaggagggctgggtaagcctgggcaccccggagtgtttctggggcgctgcaggtgtgaacctctgccctcctgaagactcacaagcctcatctcccccatcccctccttcctccccgagaatcctacaagaggaaagcctccattcggaggctgctatggactcggagttgccaggtcacagccccaccctgcccccacctccccgggagttatccaaggacaatgaccatcctcagctgccaagtctcagctccagggtcagtcacacactgaaggacatgcacaagtcgccgtgtgctgggcactgctgaggacaaaggcctgactgacaagcgggaacaaagtcacaaggtcccaaaacctgcccgaggtcccacagtcagggcctcggaaatccatgaaaaaagccagtttaataccctgccacggaacacaggcaggagagggagcagcccccagccagcccccagccagcctcccgccagcctctttgcgaatcaccccactccgggtcacagtcagggcagccgccgctttcctccctgctcgacagcccttgagggcaggagccagcttgcccatcattgtcccctctccactagggcctggcaccctgcctggcatgtagtagaagcgtaagaagggctcactgtgttcattctgcaatagtcaatgtg

SEQ ID NO: 80232 - DNA, 117 bp, Homo Sapiens
ggtaaacatgatggttgaggaacaagaaaaggacaaaattgatgagcaaagtgattaaatactaaaatgaaaggaacagaagggtagaattaacagaaagccaactcaagaaaattc

SEQ ID NO: 80233 - DNA, 629 bp, Homo Sapiens
gtgtctttactgcaggatatctcagagtctttaatatgcaaatgttaagaaaaggatacagtatgccacatttcccaaacttatttgtccatagacacttctatttacagaactgtgttaatgtctcttgaaacaatggtcatagaacagtttgggttaaagctatttaaaaatgaacaggctgtcttctaaaggagtagggtcaggttcacatcaagatatctggaaaaactggttggtctggctgccgctcttatatttctgaaatgcttgtcattaaaactgaagtatataaagtttgggcacttagagcaatttctcttacctgttaacagtaacattatctgttaatattaacaggtgcctgttaacatgaacattgttacgtattaacattaacagtatgagacccaacactgttctacatgagaataatgttttaaaaccaatggaaatgaagctctctagaacagtgattctgaacttttttcctagtaacacactgcacagtcgtgccattcccgtgtctgtcctctgattcattcattgtgtatgaggtaatgtttctcaattttttttcatgaccatacacatacacaaacaaaaccctcatgctctaccatccctac

SEQ ID NO: 80234 - DNA, 775 bp, Homo Sapiens
  misc_feature (751)..(751): n is a, c, g, or t
ttatgctggccttatacttttcctagaagaggatcactacttagccccagacttttaccatgtcttcaaaaagatgtggaaactgaagcagcaagagtgccctgaatgtgatgttctctcccctggggacctatagtgccagtcgcagtttctatggcatggctgacaaggtagatgtgaaaacttggaaatccacagagcacaatatgggtctagccttgacccggaatgcctatcagaagctgatcgagtgcacagacactttctgtacttatgatgattataactgggactggactcttcaatacttgactgtatcttgtcttccaaaattctggaaagtgctggttccctcaaattcctaggatctttcatgctggagactgtggtatgcatcacaagaaaacctgtagaccatccactcagagtgcccaaattgagtcactcttaaataataacaaacaatacatgtttccagaaactctaactatcagtgaaaagtttactgtggtagccatttccccacctagaaaaaatggagggtggggagatattagggaccatgaactctgtaaaagttatagaagactgcagtgaaaatcacagttacaaaagcgacagtcttctatttttgatatttgtccaaacaggacatacaattgaataaaagagtttagggaactggtttctgctttaattacaaaaacaaaatcttgtaaaaggtgtcccaaatacatagtaatcttttccngttatgtctgattaaggtttaaaa

SEQ ID NO: 80235 - DNA, 895 bp, Homo Sapiens
  misc_feature (20)..(20): n is a, c, g, or t
  misc_feature (695)..(703): n is a, c, g, or t
tcctgggaggagcagcacancttgcccaggcccagtccacagagccaacagcttgggttgagatgaatgatgtgttcacaaatgaggggatttcccttctggactaaactgaaggagaggcttgttgctttccagaggtgtgtggctcttaagttgacatcagcttttccccttgtgggtggttctttagctctcctgtcacaccattcgggtgtcctaatgtagggacaagagcaagcctgctgctcaggccccctggcgaggcttcacctcactgtggaagggggcgtcctgcagctggttagtcttaggcctggtggctgatcacttgtggggtcagtctccagcacccagcgctcccacaagccttgccaaggaaggcctgcttttcagccacaaacttcaggaaactcatccccccgctccccaaagtgttgttgctggccctgggcttgtgtggctcctgaggattgggaatttcaaataattgcaatacctgagttagaattccttctaatggcatcgttttaagctggaccataaagcagaggggaattacaagtgtgtcccatgcctgaccttcataattggtgtgggggacaggggagtcacagccactgatatttaggtgatgtctcttaggacttcagtgcctcagctacctgaactgtaaatgttttctgaatttcacatannnnnnnnngcatgccttaggaagaagcacataggtaaaaccagcagtttccagtaatatagggggtttttgagcaaggcccctggagcagcggagagacaagatggagcacatgtagtctgtgtgcctggtcacacagaggcctgcatgcaagtagcaaagcagctctcaagggcttgtcagtaaaatatattagaaaaa

SEQ ID NO: 80236 - DNA, 801 bp, Homo Sapiens
gcggccgcctcagcatgtcggacttcgacgagttcgagcggcagctcaacgagaataaacaagagcgggacaaggagaaccggcatcggaagcgcagccacagccgctctcggagccgggaccgcaaacgccggagccggagccgcgaccggcgcaaccgggaccagcggagcgcctcccgggacaggcgacgacgcagcaaacctttgaccagaggcgctaaagaggagcacggtggactgattcgttccccccgccacgagaagaagaagaaggtccgtaaatactgggacgtgccacccccaggctttgagcacatcaccccaatgcagtacaaggccatgcaagctgcgggtcagattccagccactgctcttctccccaccatgacccctgacggtctggctgtgaccccaacgccggtgcccgtggtcgggagccagatgaccagacaagcccggcgcctctacgtgggcaacatcccctttggcatcactgaggaggccatgatggatttcttcaacgcccagatgcgcctgggggggctgacccaggcccctggcaacccagtgttggctgtgcagattaaccaggacaagaattttgcctttttggagttccgctcagtggacgagactacccaggctatggcctttgatggcatcatcttccagggccagtcactaaagatccgcaggcctcacgactaccagccgcttcttgcatgtcagagaccccctccgctatgtccctggggtgggtccactggggccccaacctgcccacagcctgtcatcgggg

SEQ ID NO: 80237 - DNA, 399 bp, Homo Sapiens
ggaaggggttgggatggggacagggtgcacagcagggcggggtaggaccccagcccctcccaaaacagcctctcctactcccatagacccctttcttctccccttccccacggtaggaacatagcgtgtttatattttatggccaaactattttgaattttgttgtccggccctcagtgccctgccctctcccttaccaggaccacagctctgttccttcggcctctggtcctctctggtcccctcctgggtttcttacgtagttgatttttcctctttagtctcccccgacctgcgcccagccccgtggcccctgcccctctcctactctctgtggcagtttcatatttgctaagacgaatttgctcattaaacattttgttgtattttactttaaaa

SEQ ID NO: 80238 - DNA, 596 bp, Homo Sapiens
gaataaacaagagcgggacaaggagaaccggcatcggaagcgcaccacagccgctctcggagccgggaccgcaaacgccggagccggagccgcgaccgggcaaccgggaccagcggacgcctcccgggacaggcgacgacgcagcaaacctttgaccagaggcgctaaagaggagcacggtggactgattcgttccccccgccacgagaagaagaagaaggtccgtaaatactgggacgtgccacccccaggctttgagcacatcaccccaatgcagtacaaggccatgcaagctgcggggtcagattccagccactgctcttctccccaccatgacccctgaaggtctggctgttgacccacacgaccgtgcccctggtccggagccagatgaccagacaagcccggccctcttagttgggcaaaatcccttttggattacttaagaagccattgttggattctttaaagcccagaatggccttgggggggttaaccaagcccctggaaacccattttgggttttaagttaaaccgggccagattttggcttttggagttccctcaattgaccggacttaccaggtattgccttt

SEQ ID NO: 80239 - DNA, 1417 bp, Homo Sapiens
  misc_feature (840)..(840): n is a, c, g, or t
caccccgctaccccgccccccacccttaatgctgccatttcagttgctccgctttcgtgtgtctgcgctgtcactcctctgcccatcgtcttcagaggggataagggggggcgggatggggagaagccccccagccagcctgcccccaccctccccagccgcctctaccagaagtcccggcggtgataagagtcggggtcacagtattttgtgacaaccactctgttggcgaacttgcggcccgtcaggccctgcatggctttctggcagtcaaacacagaggtgaactccacaaagatctttccgcagccgggcacctcgacgccgtccacaggccgggggatctcgatggacttgacaagcccgtacttgctgcactcgtcccgcacatcctccacgatctcctcatactcctcgtcgtccagcagctcctcaggcagcaccatgttcatgaggcacaggacctcagtcgggtggccgcccatctgcacctgggagctcatcaagcccggcacttgcagggtcacaggcgtctgattgatggtgctcagcgtggcattcttggctcccacactcgccctctggaccagcagcttcttatcccccagctgcatgccgttcagccccgcaatggcctgatccgtgacgttgatgtccacgtactcacagaaggcgtagcccttggagagccccgtggcactgtccttgaccaggttgaaggccttgaggggcccaaaggatgtcagcagctctttgacctggtcatcgttcaggtagttgggtaagcccccgatgaacagcttgtgggcagagtcggggaccacagtggacacaaccccnaggcacatagacggaggggttctctgacatgccaggaagcggctggtagtcgtgaggcctgcggatctttagtgactggccctggaagatgatgccatcaaaggccatagcctgggtagtctcgtccactgagcggaactccaaaaaggcaaaattcttgtcctggttaatctgcacagccaacactgggttgccaggggcctgggtcagcccccccaggcgcatctgggcgttgaagaaatccatcatggcctccttcgacgatggtagcaaactttttgttgctacgagggatctcagccccacaatatttcactcagtgatgccaaaggggatgttgcccacgtagaggcgccgggcttgtctggtcatctggctcccgaccacgggcaccggcgttggggtcacagccagaccgtcaggggtcatggtggggagaagagcagtggctggaatctgacccgcagcttgcatggccttgtactgcattggggtgatgtgctcaaagcctgggggtggcacgtcccagtatttacggaccttcttcttcttctcgtggcggggggaacgaatcagt

SEQ ID NO: 80240 - DNA, 1042 bp, Homo Sapiens
  misc_feature (109)..(109): n is a, c, g, or t
  misc_feature (174)..(240): n is a, c, g, or t
  misc_feature (254)..(256): n is a, c, g, or t
  misc_feature (271)..(272): n is a, c, g, or t
  misc_feature (274)..(274): n is a, c, g, or t
  misc_feature (375)..(375): n is a, c, g, or t
ttgatataccctcccaccagcccgccaggttatgagagagggagcccataccaccccttcccgggtgcgatcatatcagtgcagaggtccgatgaagggcatggccacncatatgtggtgctcatcatagcacccagcttacattatgctccggctctatgtgtgtggatttgnnnnnnnnnnnnnnnnnnnnnnnnnnnnnnnnnnnnnnnnnnnnnnnnnnnnnnnnnnnnnnnnnnngcccctcgagccannngaatcgcacgagccnnanggaacccaggaggagacacctcagtcagcagaaaggccacctggctcactggctcattccaggagtgggagagacggcagggctcctctttgtcctccgcnatcaggaaggggatgtgtccacctccccactgtggtgctttaggcaaggtcttattgtctgctctgcctcggtttccccatctgggaaaatgggggcaggggtcctgacctacctcaggtggaacggtgagcagggaacatgtcggagtccttcaagagaatgtgatgtgaggttggatcaacagtgtgggttcctgtcctgtttccccttcctctttggggctgaggaggaggttaaaggccaaatgctgtttcccaacaccccaaagtctgcacacgtctcatgaatgcatcacatttctgtcatatggatattagccattccgaaatctgtgtaatcaacttcacattattcaagttacaaatcactgtgtccatagaaaaactgtgctggtatttgctggacaaagggttgggccccttttatttttacctgccacccagcatctcccccacctgccccttctgggtgacacagccggtaaacggaatcacgtatggttctttctgtgggtctgtggcacagcaggaagagcccggtgccgccagcaccttgtggaagaccacacatgggtggtcccacagcatgggaccaggctggcctgagggatgcccagttgtaacaatgctgctgtcactgtctcattaaatatacatcctttaaaaa

SEQ ID NO: 80241 - DNA, 3418 bp, Homo Sapiens
caagactgctctcctcagacctcactgtagggtgactgagaagagtcatttatttcctgttccaggtcctagacccacctgcccgccggatctggaataatgtgactcgctggtttgtcacgtgtgtccggcagccagaattccgagccgtgctaggagaagtggttctatactcaggagccaggcctctctctcatcagccaggccccgaggctcctgccctcccaaagacagctgctcagctcaagaaagaggcaaagaaacgggagaagctagagaaattccaacagaagcagaagatccaacagcagcagccacctccaggggagaagaaaccaaaaccagagaagagggagaaacgggatcctggggtcattacctatgacctcccaaccccacccggggaaaagaaagatgtcagtggccccatgcccgactcctacagccctcggtatgtggaggctgcctggtacccttggtgggagcagcagggcttcttcaagccagagtatgggcgtcctaatgtgtcagcagcaaatccccgaggtgtcttcatgatgtgcatcccaccccccaatgtgacaggctccctgcacctgggccatgcactcaccaacgccatccaggactccctgactcgatggcaccgcatgcgtggggagaccaccctgtggaaccctggctgtgaccatgcaggtattgccacccaggtggtggtggagaagaagctatggcgtgagcagggactgagccggcaccagctgggccgcgaggcctttctacaggaagtctggaagtggaaggaggagaaaggtgaccggatttaccaccagttgaagaagcttggcagctccttggactgggatcgagcctgtttcaccatggaccctaaactctcagcagctgtgacagaggcctttgtccggcttcacgaggaaggcatcatctatcgcagtacccgccttgttaactggtcctgcaccctcaactccgccatctctgacattgaggtggataagaaggagctgacaggtcgcaccctgctctccgtgcctggctacaaggagaaggtggagttcggggtcctcgtgtcctttgcctataaggtccaaggctcagatagcgacgaggaggtggtggtggcaacaactcggatcgagacaatgctgggagatgtggctgtagctgtgcaccccaaagataccagataccagcacctgaaggggaagaacgtgatccacccattcctgtctcggagccttcccattgtcttcgatgaatttgtggacatggactttggcacaggtgctgtgaagatcacccccgcacatgaccaaaatgactatgaagttgggcagcggcacgggctggaggccatcagcatcatggactcccggggggccctcatcaatgtgcctccgcctttcctgggcctgcccaggtttgaggccaggaaagcggtgctggtggcgctgaaggagcggggactgttccgtggcattgaggacaaccccatggtggtgccactttgcaaccggtcgaaggacgtggtagagcctctgctgcggccgcagtggtacgttcgctgcggggagatggcccaggctgccagcgccgctgtgactcggggtgacctccgcatcctgcctgaggcccatcagcgcacatggcatgcctggatggacaacatccgggagtggtgcatttccaggcagctgtggtggggccatcgcatcccagcctactttgtcactgtcagtgacccagcggtgccccctggggaggaccctgatgggcggtactgggtgagtggacgcaatgaggcggaggcccgggagaaggcagccaaggagttcggagtgtcccctgacaagatcagtctccagcaagatgaggatgtattggatacctggttctcctctggcctcttccccttatccattttgggctggcccaaccagtcagaagacctgagtgtgttctaccccgggacactgctggagaccggtcatgacatcctcttcttctgggtggcccggatggtcatgctgggcctgaagctcacgggcaggctgccctttagagaggtctacctccatgccatcgtgcgagatgctcacggccggaagatgagcaagtctctaggcaatgtcatcgatcccctggacgtcatctatggaatctccctgcagggcctccacaaccagctgctgaacagcaacctggatcccagcgaggtggagaaggccaaagaagggcagaaagctgacttcccagcggggattcctgaatgtggcaccgatgctctccggtttggattatgtgcctacatgtcccagggtcgtgacatcaacctggatgtgaaccggatactgggttaccgccacttctgcaacaagctctggaatgccaccaagtttgcccttcgtggccttgggaagggtttttgtgccctcacccacctcccagcccggaggccatgagagcctggtggaccgctggatccgcagccgcctgacagaggctgtgaggctcagcaatcaaggcttccaggcctacgacttcccggccgtcaccactgcccagtacagcttctggctctatgagctctgtgatgtctacttggagtgcctgaaacctgtactgaatggggtggaccaggtggcagctgagtgtgcccgccagaccctgtacacttgcctggacgttggcctgcggctgctctcacccttcatgcccttcgtgacggaggagctgttccagaggctgccccggaggatgccgcaagctccccctagcctctgtgttaccccctacccggagccctcagagtgctcctggaaggaccccgaggcagaagccgcccttgagctggcgctaagcatcacgcgagccgtgcgctccctgcgggccgactacaacctcacccggatccggcctgactgtttcctggaagtggcggatgaggccacgggcgccctggcatcggcggtgtcgggctacgtgcaggccctggccagcgcaggtgtggtggctgttctggccctgggggctcccgccccccagggttgcgctgtggctctggcttctgatcgctgctccatccacctgcagcttcaggggctggtggaccctgcacgggagctgggcaagctgcaagccaagcgagttgaggcccagcggcaggcccagcgtctgcgggaacgccgtgctgcctcgggctatcctgtcaaggtgccgctcgaagtccaggaggcagatgaagccaagctccaacagacagaagcagagctcaggaaggtggatgaggccatcgccctattccagaagatgctgtgatccaccacccagcttcacccctcacccccagcggctcaccatggggatggcagcaataaaatattttcccacaaaaaaa

SEQ ID NO: 80242 - DNA, 735 bp, Homo Sapiens
ttcagcacacatggacttgtagggccactggcaacatactcctctttggcccttcccatatctactcttctgtgattgggagactgcaaggcactgaggagtatcaaagaagcaaatattttcactttgaaagaaaactgccattttgtatttaatagcctccaggttctttcagtaatgttatttgctctgtgtgtttttgtgtgtttgttgatgtgcgtttgtgcatatgcgtgagtttcattgccggggttggggcacaattgtggactggggccatgaggccttccctggtccccactgaacccaccttagttccacatttggctgcatcttgaattatgccgactccagacttctcctccttttttgcccttggctcttgacactctaaacccctggaccatctgaatggagcagccaagttcagtcccacatttctgtactgttcctctttcacagctggaatatgtcacatgatgaagttgtatagaaacagaaccatggatggatggccaggattgccgtggtccctagctagatccccttcctatcaatcacctgatagcaacagggacagctgccaataccctgctctttactcaatggtacccagggagggagcatgggaagagggtgagctgagggctggaggagggcaacagccactgggtgagctgttcacggtcttatactattgtttgtttgtgattaaaagtgcttcaacccaaaaaa

SEQ ID NO: 80243 - DNA, 1434 bp, Homo Sapiens
  misc_feature (348)..(356): n is a, c, g, or t
  misc_feature (751)..(751): n is a, c, g, or t
ggggaacaagcagctatacccctgataagtcatcttttaatttagctacagttgttgctgaaacacttggacttggtgttcaagaagaatctgaaactcaaggtcccatgagcccccttggtgatgagctctaccactgtctggaaggaaatcacaagaaacagccttttgaggaatctacaagaaatactgaagatagtttaagattttcagattctacttcaaagactcctcctcaagaagaattacctactcgagtgtcatctcctgtatttggagctacctctagtatcaaaagtggtttagatttgaatacaagtttgtccccttctcttttacagcctgggnnnnnnnnncatctgaaaacactcccttttagcaacacttgtatatctagattagaaaaaactagatcaaaatcctgaagatagtgcccttttcacacatcacagtcttgggtctgaagtgaacaagatcattatcccagtcatctaataaaacagatacttataaataaaaatataagtgaatccctaggtgaacagaataggactgagtacggtaaagattctaacactgataaacatttggagcccctgaaatcattgggaggccgaacatccaaaaggaagaaaactgaggaagaaagtgaacatgaagtaaactgcccccaagcttcttttgataaagaaaatgctttcccttttccaaaggataatcagttttccatgaatggagactgtgtgatggnataaacctctgggatctgtctgatcgattttcagctattcagcgtcaagagaaaagccaaggaagtgagacttctaaaaacaaatttaggcaagtgactctttatgaggctttgaagaccattccaaagggcttttcctcaagccgtaaggcctcagatggcaactgcacgttgcccaaagattccccaggggagccctgttcacaggaatgcatcatccttcagcccttgaataaatgctctccagacaataaaccatcattacaaataaaagaagaaaatgctgtctttaaaattcctctacgtccacgtgaaagtttggagactgagaatgttttagatgacataaagagtgctggttctcatgagccaataaaaatacaaaccaggtcagaccatggaggatgtgaacttgcatcagttcttcagttaaatccatgtagaactggtaaaataaagtctctacaaaacaaccaagatgtatcctttgaaaatatccagtggagtatagatccgggagcagacctttctcagtataaaatggatgttactgtaatagatacaaaggatggcagtcagtcaaaattaggaggagagacagtggacatggactgtacattggttagtgaaaccgttctcttaaaaatgaagaagcaagagcagaagggagaaaaaagttcaaa

SEQ ID NO: 80244 - DNA, 1034 bp, Homo Sapiens
  misc_feature (62)..(62): n is a, c, g, or t
  misc_feature (68)..(68): n is a, c, g, or t
  misc_feature (112)..(114): n is a, c, g, or t
  misc_feature (178)..(178): n is a, c, g, or t
  misc_feature (195)..(195): n is a, c, g, or t
  misc_feature (219)..(219): n is a, c, g, or t
agaggatattcaatcagtcagattatagtctgtgtttgcaccctttcaagtacaaatcgtantagatntatgcaagatgtactgtacatccatatatcttaacagcttgtannnaaaagggactgatatattgtgttatataaatgtacagtctgtataaatatgcattattaaaatntaaagtattgatatgtnaaatgctaaagctctattatattnaatacaaaattgttgctaccattttactataattgcccttcatatgtggcggataagctcaccatatgatcatgcagttagcttcatgcttattttaaatgtattattagtgaccattaaacatctgaccagtaaggtcatgtgaacacagcagcaaatagtttatgatttgctgattttggagctttgaaatataggttcttaatacattgatacatattgtagcactatgacttcatcatacctcatttctttaaacagctctccaagctttcactgaagtctgtctgttttttatattggctgtctggattttaaagacttttcatattttatatttctactgattttgtttcccctaacaacatttgtcactgtctttgaattatgacccaggcaagatgatttcagattttctaaaatcttgcctgtgaggttttgttcatatcagtgcttcattttgtaatgtcttctcaagaaaaatacctatgttaactcacaagtataaaatatgtgtgtattataaaacaatgaaaagtgtatttttggagatagtcaagcatttagaagtgcagtgaacttgctgtcacggagtaaaatgctaattatgtttcactttcctagcctagtgaaaaagaaaagtgctcttgagtacaataccttaattatttcttaaaatactgactttgacctagctcactgtattttttatttaatggattatggattacagtatttttcttctgagttaaattttcataatttatgtgaagacacaaagatgtttaaaacaatgattattcataagaaatcaa

SEQ ID NO: 80245 - DNA, 1242 bp, Homo Sapiens
  misc_feature (627)..(786): n is a, c, g, or t
  misc_feature (794)..(809): n is a, c, g, or t
  misc_feature (894)..(957): n is a, c, g, or t
ccagatttccatggcaaccggtctcccttagcagatctgacactaaagggcatggtcaccggattgaaactgtctcaggaccttgatgatcttgccattctctacctggcaacagttcaagccattgctttggggactcgcttcattatagaagccatggaggcagcagggcactcaatcagtactcttttcctatgtggaggcctcagcaagaatcccctttttgtgcaaatgcatgcggacattactggcatgcctgtggtcctgtcgcaagaggtggagtccgttcttgtgggtgctgctgttctgggtgcctgtgcctcaggggatttcgcttctgtacaggaagcaatggcaaaaatgagcaaagttgggaaagttgtgttcccgagactacaggataaaaaatactatgataagaaataccaagtattcctgaagctggttgaacaccagaaggagtatttggcgatcatgaatgatgactgaacagggcttgcaggtgctgatgccagaagcttctgtgccattgcattaaagacttctgtcatttgatccatgttcaagacccttgaggtattgtttcatcatttctgtattgtctttcaataaagaaaacaaacatgnnnnnnnnnnnnnnnnnnnnnnnnnnnnnnnnnnnnnnnnnnnnnnnnnnnnnnnnnnnnnnnnnnnnnnnnnnnnnnnnnnnnnnnnnnnnnnnnnnnnnnnnnnnnnnnnnnnnnnnnnnnnnnnnnnnnnnnnnnnnnnnnnnnnnnnnnnnnnnnnttttgcgnnnnnnnnnnnnnnnnaaaaaaattttataaacccttttccttggggcccggggccccccaaaaagagaaaaaagacaggggccaaaacgtgtttcccacnnnnnnnnnnnnnnnnnnnnnnnnnnnnnnnnnnnnnnnnnnnnnnnnnnnnnnnnnnnnnnnnaacacacgaagggtttctggaaaaaaacccaaaaggggatttctcgggggggcttttcagtgggttttattacacagggaggcccccaaggcgggctctcatattttaataatatacgcccccgcgcccggggcaattttataagagaaatagagggtgggaaaatttaactataacacttcccccgccgaccggcgggaaccccccccacaaacaggcggagtgtatgaaaaaccctcatactccccaagggggacactcaaaccctctttgggcccctccgtg

SEQ ID NO: 80246 - DNA, 938 bp, Homo Sapiens
ggcacgaggtgagcagtgggctgcttaggaagagaaggtcagagttcgcgggggcagaggcattcttgccgctggcccagtcactatgtagtggaggggcagacaccctcccgcaaattctggaaggttcttagtctcgactagggcagtagccccaggactcctagtcgccggcttcaggtcactgccggctgaacggagctgccgtcgccatgtttggctgcttggtggcggggaggctggtgcaaacagctgcacagcaagtggcagaggataaatttgtttttgacttacctgattatgaaagtatcaaccatgttgtggtttttatgctgggaacaatcccatttcctgagggaatgggaggatctgtctacttttcttatcctgattcaaatggaatgccagtatggcaactcctaggatttgtcacgaatgggaagccaagtgccatcttcaaaatttcaggtcttaaatctggagaaggaagccaacatccttttggagccatgaatattgtccgaactccatctgttgctcagattggaatttcagtggaattattagacagtatggctcagcagactcctgtaggtaatgctgctgtatcctcagttgactcattcactcagttcacacaaaagatgttggacaatttctacaattttgcttcatcatttgctgtctctcaggcccagatgacaccaagcccatctgaaatgttcattccggcaaatgtggttctgaaatggtatgaaaactttcaaagacgactagcacagaaccctctcttttggaaaacataatttgaataaaataatttttaatggattctgaaatttgtcatgttttgaagataactgactccatctaaaagtatgaggtcaaaggatcacgaaacctaagtttaaaaactgcttagagactgaagcttaatt

SEQ ID NO: 80247 - DNA, 813 bp, Homo Sapiens
ggcccagtcactatgtagtggaggggcagacaccctcccgcaaattctggaaggttcttagtctcgactagggcagtagccccaggactcctagtcgccggcttcaggtcactgccggctgaacggagctgccgtcgccatgtttggctgcttggtggcggggaggctggtgcaaacagctgcacagcaagtggcagaggataaatttgtttttgacttacctgattatgaaagtatcaaccatgttgtggtttttatgctgggaacaatcccatttcctgagggaatgggaggatctgtctacttttcttatcctgattcaaatggaatgccagtatggcaactcctaggatttgtcacgaatgggaagccaagtgccatcttcaaaatttcaggtcttaaatctggtaattattgaacatctacttgctgcctactttcaacatctgcatgtgtgtgtgaatattaaatatcacaccaagacattgttcagaggagacagaatagtgagctgagataaatgagaatctctctatggaagattagactggagcatgaacttgaaatatgagagaaggaagccaacatccttttggagccatgaatattgtccgaactccatctgttgctcagattggaattccagtggaattattagacagtatggctcagcagactcctgtaggtaatgctgctgtatcctcagttgactcattcactcagttcacacaaaagatgttggacaattttctacaaatttgttcatcatttgctgtctctcaggcccagatgacaccaaggccatctgaaatg

SEQ ID NO: 80248 - DNA, 589 bp, Homo Sapiens
  misc_feature (461)..(482): n is a, c, g, or t
agaaaaattcactaacacctgtaaaaatcctgacatgtttatgttatttgcccagaatatataattaccgagaaatcatgtttaaatagtatgtgaagttgcttggataatgccttacccagttcaaaaggaaattcagtaattctgaagattagttatgagttttgaaatagagctgaaaacactcaaattggtaaatttattgaaactatttgtgccatttattttactatttatttccagaaacctgaaaaaatacacttctattttgaacatttatgtgaaagttattggtagatgttccagtctattattcattacacagtaaatcgccaagctacatgcaacacatataataacagaaatgaaactcttaagtcagatgtgcacattgttgcatttgttttctataattttgttttactcagaagaaaaacttaaaacaatgaaaacacattccnnnnnnnnnnnnnnnnnnnnnngatgtctacttcttgggttaacatcatttttaagaccaatttggttacccaaacatatactcagataacatagataaccctcctaagatatgtacacatcaaaaatt

SEQ ID NO: 80249 - DNA, 820 bp, Homo Sapiens
gcctcacaattaattggaggactggggtggagaaaaatcaagatgggcccaagctgcagatgaccttcagataacatatgaaaatttaactggcgatgtcttagtatcagcaggagtaatagcttaccttggtgctttcacttctggctttcgacaaacatgtacaaaagattggagcatgttgtgcaagaagaaaaaaatcccgtgttcagaggagttcttgttgagtaaaaccctgggtgatccagtaaaaattagagcttggaatattgctggtttaccaacagatacattttccatagataacggagtgatcgttaacaactgtaggcgttggcctttaatgattgacccccagggtcaagccaataagtggatcaaaaactctgagaaagaaaatcagcttagtgttattaagctatcagattcagactatatgagaacattggaaaactgtattcagtttggaactccacttctattagaaaatgttggtgaagaactggatccatctttggagcctttactactcagacaaacttttaaacaaggtggcattgattgcatcagacttggtgaggtcattattgagtattcctttgatttcaaattttatatcaccacaaaactgagaaacccgcactatatgccagaactggctacaaaagtgtctttgctcaatttcatgataactccagaaggacttgaagatcaattactaggtattgttgttgcaaaggagagaccagaattagaagaggaacgaaatgccctgattcttcagtctgcagctaacaagaaacagctgaaagacatagag

SEQ ID NO: 80250 - DNA, 658 bp, Homo Sapiens
tttccaggttgcatctttccttaaaagccattaacggtcatctactgtccatggggcggaggtggagctgattcatacagaatttgagaatcttgccttgcttaccatctaaaggtttatcttatacatttttcacttttatgctgcagtccccataggactatctgtcattctaagaacactgtgccatttcttcagctcttccttctccttattaaaagcttatttattttccatttcatgattcctttagacagaattacctatttcctgctaccaactcagcactaattcttaatgatattagtggttagttcagaatgaattgccaactctcactcaaaggccctttaagtaaaacatcttactctaacttctgtgcccagcattttttgggtacatagctggtacttaatcaatatgttatttcagtcctaaatattaatttagttttagtatacggtatagactatttaaaacctttatttaactgtaccttttttttgagtgtattattagttaatggcccataaaaagtctattaatttcctgtcaacttagcaaaatgtgtttcaaacaccctcttggacctcttatatttcgatgttttccaatttttataagtgagcctcaaatgtactattttacaatataatag

SEQ ID NO: 80251 - DNA, 661 bp, Homo Sapiens
tacgagaatgagctgatgatcatgtctgttctcacgtgcatgtttgagtctctgaaccacatgttaaggaagaacgtgtagaagcgctggttgctggagaacatggacggagccttcttggtgctggacgagattgtgcatggcggtgtgattctggagagtgacccccagcaagtgatccagaaggtgaattttagggcagatgatggcggcttgactgaacagagtgtggcccaggtctctctgctcagactaatcctgcttgtatggaacttcccgccctggcgctaactcctcgtgctgtggtggccctaccgagatgagcctgtgctgtctcgtgtggagtcccaggttcttcagtctgccaaggaacaaattaaatggtcgttattgaaatgaaggctgtggattcaaggctccctgccccccagaccatttccccaatcctggcaaaagcccaaagatcccagggtcaggagagacccctctgtatccccaggtccctcccagaactgactcctaaggtctccagccagggcttctgagatgcaaaggtttggcctcaggagagtcaccttttctcacggccctggccttaactcatatcttaggcattcctggccccagggccctaataaacctgcttttgtcttctgaaaaa

SEQ ID NO: 80252 - DNA, 644 bp, Homo Sapiens
  misc_feature (28)..(28): n is a, c, g, or t
ccggactgagagtgagattgcatttttntgggggtatgaccatcgtctacaagaacagcattgacctcttcctatacgtggtgggctcatcctacgagaatgagctgatgctcatgtctgttctcacctgcctgtttgagtctcgaaaccacatgttaaggaagaacgtggagaagcgctggttgctgaagaacatggacggagccctctcactgctggacgagattgtggatggcggtgtgattctggagagtgacccccagcaagtgatccagaaggtgaattttagggcagatgatggcggcttgactgaacagagtgtggcccaggttcttcagtctgccaaggaacaaattaaatggtcgttattgaaatgaaggctgtggattcaaggctccctgccccccagatcatttccccaatcctggcaaaagcccaaagatcccagggtcaggagagacccctctgtatccccaggtccctcccagaactgactcctaaggtctccagccagggcttctgagatgcaaaggtttggcctcaggagagtcaccttttctcacggccctggccttaactcatatcttaggcattcctggccccagggccctaataaacctgcttttgtcttctgccaaaaaaaa

SEQ ID NO: 80253 - DNA, 768 bp, Homo Sapiens
cgtgggctttgaggctgtgcaagaaagtgccggtggggctggtgcaagccggccaagcgcaaccctgtacgactactacaaccccgaagcgcaagatgttctgtgttttacggggcaccaaagtaagagcagactcttggccaccttgtgttctgctgaagtctgccagtgtgctgaggggaagtgccctcgccagcgtcgcgccctggagcggggtctgcaggacgaggatggctacaggatgaagtttgcctgctactacccccgtgtggagtacggcttccaggttaaggttctccgagaagacagcagagctgctttccgcctctttgagaccaagatcacccaagtcctgcacttcaccaaggatgtcaaggccgctgctaatcagatgcgcaacttcctggttcgagcctcctgacgccttcgcttggaacctgggaaagaatatttgatcatgggtctggatggggccacctatgacctcgagggacacccccagtacctgctggactcgaatagctggatcgaggagatgccctctgaacgcctgtgccggagcacccgccagcgggcagcctgtgcccagctcaacgacttcctccaggagtatggcactcaggggtgccaggtgtgagggctgccctcccacctccgctgggaggaacctgaacctgggaaccatgaagctggaagcactgctgtgtccgctttcatgaacacagcctgggaccagggcatattaaaggcttttggcagcaaagtatc

SEQ ID NO: 80254 - DNA, 413 bp, Homo Sapiens
taaatgtgtcaggctctcgctgtgtcatctgggctgaagtgcggtgagcaagatcacagcttgctgcagcctcaaactcttgcactcaagcaatcctcccatctcagcatctctagtatctgggaccacaggtacatgccaccatccccagctataagtcgacaattaaacttaatttcctcctgggcttttcctcagaccctaatccaaaccaggcttcctgtatacacttcacatctccctctttatcaccctcgtagttacctgtcagctgccactctctccctctagattgtgagctccatgtgggcaggactgtgtgtgtctcagacgccctgagccccagtgccccaaacagcaccaggcacattgtaggcaaccagcacatacttgctgaataaacagatgaaatg

SEQ ID NO: 80255 - DNA, 980 bp, Homo Sapiens
tatcagctcgtacccttccacagcaagacttcgggatgtctgggctcgctttggcacgctgtacacagaaaaccaggatgtggccactgccgtggcttccctctgccgctaccacggcctcagtggcttggtccagtaccagatggcacagctgctccgggaccgtgactggatcaaccaggtgtacctgccggaaaaccatgcccggctcaaggctgcccacacctatgcctcaggaagagcttagggcattggggatccccttcttgagtcgtggggctggcttcttcatctgggttgacttgagaaagtacctgcccaagggcacctttgaggaggaaatgctgctctggcgccgctttttggacaaccaaggtgctgctgtcctttggcaaggccttcgagtgtaaagagcctggttggtttcgctttgtcttctcagaccaggtccaccggctttgcctggggatgcagagggtccagcaggtgcttgcaggcaaatcccaagtggcagaagacccccgtccctctcagagccaggagccaagtgaccaacgcaggtgagctggtcattgtctcgtggccagagggcccagcagccactgtggacctggggcgttctggggctgcagaagactgactgtggatgtgccatttgccaggaaggtatctaacttggctttgtgcctgaagaactgtttcttgtctttcgctgtagcagtgggaaactccttaagctgtggttcagcctgggccctccctctctcctattaaacaaaactaggagagtccatatgtctccattgtgagttatttagaatggaggagtcgtgactgcttctaaccagagcctcagcccccctgaggatgtgaaaagaaaacaaacaacttgtaccttctttctgatatcaccgtcattcctctttctttgtcaccaaggaaacgagtcaaaggaacagcacatacaggagagtttgtag

SEQ ID NO: 80256 - DNA, 1065 bp, Homo Sapiens
  misc_feature (294)..(306): n is a, c, g, or t
ggaggaaaaggccttgaagctcttccagtgcagaggccacgcagaggacatgctcctacctgtgcacatcggccacgcctggggtgcctcctggagtccaggctgctggcgatggaatccatcatgttgctgatgtcactgtaagtcgcagcccgcaggctgagctatggggcagtttgaggggccagaagttttctcctggatgtcatcttcagcatacccaggaaccagagaaaatgtaattcttcccatgcccatctcactcctgcagactggggtccctcttcagtttcnnnnnnnnnnnnnaatcataagcacataggctctgggacatcatggaacccagaagcatgctgaaaggtgaagcacaagtctaaagtcttgttagttatgaaatccagctttcctggattaggcaaggggaaaaccacatatttaagatatactagggcaagaagtaaagcggagagagctgactcaatgaaattttgtgtataataggagccatcctatgtctaattgtctcctgtctcagagacctcatgattatttctgagctttaaccaatgaattaatgtaggttctgtctggctcttctaacatctttggaatggttcctcagtgaaccacagctatccatagagataacaacctgaatccaagcccagtgcccaatcaggtgctactcttacttgcatgacttggttctattcttgcccagtcccattgggataacagcggtagctaagcagctaagcagagtgacctcattagattatcttctagcataaaatcacatgttaactcatttttggactcatagtcagaaacttgtaatttttcttcattttgctatgcagctattgcacagtgggggaaatatgactggataatgagtcaaaaagacttgctcttacattccatcttccccttcattgcctgggtgtctttggaccagtcaatctttgagcctcagttatctagaaaatggggactctactactttatattttttcttttagtgggacctagataaggtaatgttaataaaggggctttatttgt

SEQ ID NO: 80257 - DNA, 565 bp, Homo Sapiens
  misc_feature (41)..(53): n is a, c, g, or t
tgaaggaataaatgttctttatacagcctagttaatgtttnnnnnnnnnnnnntagcttggttttatttgtcatctagtctcaagtatagcgagattctttctaaatgttattcaagattgagttctcactagtgtttttttaatcctaaaaaagtaatgttttgattttgtgacagtcaaaaggacgtgcaaaagtctagccttgcccgagctttccttacaatcagagcccctctcaccttgtaaagtgtgaatcgcccttcccttttgtacagaagatgaactgtattttgcattttgtctacttgtaagtgaatgtaacatactgtcaattttccttgtttgaatatagaattgtaacactacacggtgtacatttccagagccttgtgtatatttccaatgaacttttttgcaagcacacttgtaaccatatgtgtataattaacaaacctgtgtatgcttatgcctgggcaactattttttgtaactcttgtgtagattgtctctaaacaatgtgtgatctttattttgaaaaatacagaactttggaatctgaaaaaa

SEQ ID NO: 80258 - DNA, 725 bp, Homo Sapiens
tcagtctttgaattaaatgcgtttttttcttcccttacagatgattttttaaaaaatgaaattcttgaagagctgcaccttaaaaaataagacaaagtgaaagtattgtattatgttacaaacaatgcaggctccttcctcatttaactttacaaccttgcgaagtgggtccaggagatttggagtttgtggtaaagccagtaatgggcattgtcctgcattcccttcccttcatggtttgcctcgatcctctctaagcttctatcctggcctgaataactcaaagataattggtctcagagatcaagccatatcctcaggccttatttccatcttctcatgattctgccatcatacctttgcttctccgctaatgaaatgagctggcaagacctctgttcattgtgaagtgcttctgaaagagcctaagaaaaaaggctcatctgaaagaaatggagaactctatttcgaaccaagcctgtttgaatgtgtgttagtctgatctttgatcatgtgtttccatgtaatgggagtctcgttttttataatgtttctaacgttttattgaaaaacctatggccctccttctttctcaatagctactttcttactgctttttgaaaataatatgcaaccaaattatttcttaatgtcacataattaagtaataaaatgtcaaaagaaatgttggcaaggagaataaaaaaatttccaagaaacttaaa

SEQ ID NO: 80259 - DNA, 1018 bp, Homo Sapiens
  misc_feature (218)..(377): n is a, c, g, or t
  misc_feature (464)..(464): n is a, c, g, or t
tttacgtctgctttatgcttgttcaaatttgtctgcattccctgatattggtacctttcccttggatgactgtacctcgcccaccgaagacgaggcacgatcatgagcgagaagcgaagacgccataccgcaaccgctttcccgcgcgtgccgattcataatgcagctgcagacaggtgtcccgaactggaaagcggcagtgagcgcaacgcaataannnnnnnnnnnnnnnnnnnnnnnnnnnnnnnnnnnnnnnnnnnnnnnnnnnnnnnnnnnnnnnnnnnnnnnnnnnnnnnnnnnnnnnnnnnnnnnnnnnnnnnnnnnnnnnnnnnnnnnnnnnnnnnnnnnnnnnnnnnnnnnnnnnnnnnnnnnnnnnnaagaattcggcacgaggtgtcacttcagttttcaaagcttttgcagtgctatttggattcatcccatatgggccccatcttgtggtntgaggcctgacagggctcacctgcaagctcggttctctgctgtctttatatggacttaggatcagctctacccataagcactgtgaacatgtgagtaggtggggaagggctagtgttcataaaaaactttgtggagtcactttcttaagctcttctctctctgctctctccctagcactttctagttccctggggctccccttttttggtcctgtggcccaaaattgcccacttctgcaattaagccatatccttcagagaggaaaaaaagcgcatcagctcagccccgcgctcttggtgatgcagctgtacttggtggagatgtgcgaggctgtccctcaggcttccgactcctgcaggctcccactggcagccagggggtgacctgggagcttcagcacgaaaaaatggggaaaaggagaggttgtcccaagaattaggaacatgattacaaccacattcatttctagaatgaaaagaaagaattaggaccatcagactgttaacaactatcaaattttcacaggttcaaaaggtaattgacactctttaaa

SEQ ID NO: 80260 - DNA, 731 bp, Homo Sapiens
  misc_feature (474)..(486): n is a, c, g, or t
aatcttaccaaatcgatcagtgagctgacccagaaagattggctcagtatcagtaccgagatgctgctgagacagctgagtcaaccggcggcacagcccccgacgctcaagagtgtgttgttagagagcacacagtgtcatacagtgcatttggacacaatcgtcgaacctgacgatctgaagtctttttaccaccatctttttctactctgtatggaagtagatctctatggggaaaagagaatctggggtgttctgcaagccagtcaaagtggcacagcaaatcatataaatcgaattaaatggacaacaccgttagatgtgtatgtaaaaattttctgtttcatatttttcctttcactttcggtttaaaacatgctatatgtactgtatgtcctgtagcccagtgcggctccacagcatggaatctgatgtatgatatgatagaatgtggcactaaatgcagtttcagannnnnnnnnnnnnaatcatatgaactaaaattgtcaattgtgaggtgtgcttttctcatcatgttggttatattgcacaattggttatatttatgacctgatattcaaagactctggcattgatagccagtgtgttttcttatttaactccgtttactacattctacatggtgtttacgtgatccacacttgaaatactagatcagtagacattcactaatataccaaaataaaatgaaaaattgagtttttccgtga

SEQ ID NO: 80261 - DNA, 884 bp, Homo Sapiens
ctgctagcactaatgtatgggttcagtacgtatggcacacagaatggggagtgtgtttgcctacagtgtctctctggatcctctttgtttatattgaagcagccattagatttaaagatctcaaaaactttcatgtagacctttgtcgtccatttgctgctcactgcagccaaaggattacctgatatggattcttcgatccttatacaccacaatggaggtatcccagccaacaaaaaactctccacaactttgccagagatagaataccgagaaaaagggaaagaaaaggacaaggatgccaaaaaacacaaccttggaataaataacaacaatattctacaacctgtagactctaaaatacaagagattgagtatatggaaaaccatatcaatagtaaaagattaaataatgatcttgtgggaagtacagaaaatctcttgaaagaggactcatgcactgcttcctcaaaaaattacaaaaatgccagtggagttgtgaactcttcacctcgaagtcatagcgccacaaatgggagcattccttcctcatctagtaaaaatgagaagaagcagaaatgcactagcaagagcccaagtacacacaaggacttaatggaaaactgtattcctaataaccagctaagcaaaccagacgcactggtcaggctggaacaagacattaaaaagttaaaggctgacctgcaagccagcagacaagtggaacaagagctccgcagtcagatcagctccctttcgagcaccgagcgagggatccgctcagaaatgggccagcttcggcaggagaacgagctgctgcagaacaagttacataatgctgtgcaaatgaagcaaaaagacaagcagaatatcagcccagttgg

SEQ ID NO: 80262 - DNA, 396 bp, Homo Sapiens
  misc_feature (382)..(382): n is a, c, g, or t
gcttcagttgcacattcctttcctcatctgccttcctccttccaccttaccacaagcacatcagcccgtttctaaacaactgcctcatttccaattctcatagcttccttggtcacatcttcaaatacttccaatagcttgcattccacccataagcctttggttactggggtggggcttagtctcagcaaaaattatggtaatcccaatccccttgatggcaattggttcagaaacccaggcgttcgtcagtcagcacatggtattcctctgtccattcttacttgttctgttcccaaacactgtattagaaggaaagatcaggttgtgagatccactgagaaggaagagataacaatccttctagagcatttgaataaanagtgattaattatt

SEQ ID NO: 80263 - DNA, 1183 bp, Homo Sapiens
  misc_feature (57)..(94): n is a, c, g, or t
gggagttccgggtcaggcccttctcccgcctccctcggccttagccatggcgagtannnnnnnnnnnnnnnnnnnnnnnnnnnnnnnnnnnnnnaatctgaatgcggtgcgggagaccatggacgttctgcttgagatttcaagaattttgaatactggcttagatatggaaactctgtctatttgtgtacggctttgtgaacaaggaattaacccagaagctttatcatcggttattaaggagcttcgcaaggctactgaagcactgaaggctgctgaaaatatgacaagctgactttctggagaaattctgatgagatatgtcaagctctgcaagagggtttgaagattgcattgtagttgagaatgtacaatgaaattactgcatgcagcagtgtagaaaaattttactttttaaaagaattataaaaccatagctttataaatcagtggaaagtggcttacagagagaactatcagatgtgtttacatcacatcttattcactttttttaacagctctaatgctttggcattgctatgttcatatttatgtattccttatttatagctctgatagctttaattttctaagcagtctgtctatcagatgtgcacatctgctgtgccaggttgaagtatagtggaacccatcagtagtaatgtgtagtagttatgacttgttgacatttccattataaactttaattttgaattgtttatgcattataactgtggatttatattgtattgggctgaaagttgacaggatttcagccaccacttgtgaatttttatttagattcattatgtatatcagaatcttgttttttgaaataagagcatggaaaacatttcttgtaatctactcttgaacaaagaatatttagtttttcaaacaggttgttgggcagctaatagtgtgaaccaggtcattttttggattgagtaaaaaaatcaaacttttgagaaacttggattttaaaaagtaatgacaatgcttaggttagtattatttgtaatttgaatcatttacatctaatgagaatgttagttgagaatgttttcttaaagttttatatcctataaataacggaataaaaaaatttgtaaaatgaaacaacaaacatgcaaaattcctatttacttttattacataaaagtaattttagtgcttacctaat

SEQ ID NO: 80264 - DNA, 952 bp, Homo Sapiens
  misc_feature (624)..(632): n is a, c, g, or t
gggggcgcagggccgcgcgtccagccccagacccgccggggtccctggggacgcgccagcccggcagtggctcgacgatggaggagccgcagcgcgcccgctcgcacacagtcaccaccaccgccagctccttcgcagagaacttctccaccagcagcagcagcttcgcctacgaccgggagttcctccgcaccctgcccggcttcctcatcgtggccgagatcgttctggggctgctggtatggacgcttattgctggaactgagtactaccgagtcacagcatttgactgggtcatgtgtgtagctgtattttactgggtcctcaccgtcttcttcctcattatctacataacaatgacctacaccaggattccccaggtgcactggacaacagtgggcctgtgctttaacggcagtgccttcgtcttgtacctctctgccgctgttgtagatgcatcttccgtctcccctgagagggacagtcacaacttcaacagctgggcggcctcatcgttctttgccttcctggtcaccatctgctacgctggaaatacatatttcagttttatagcatggagatccaggaccatacagtgatttaccattttgataattaaaaggnnnnnnnnnggaagactctcactgtaaaaacagctgtaggtataatgtatattcccagagaattgtatttaactaattaatgttttttatattcttaaatttgctcacaaattgtggtttgttacaattaaactggatacttatttgcaaagtgttgtagcttataatgaactcttaagtatcttattaatgtattaatgtcttcatagatcatattttcttagacaatgtttaaatagataaattgctaatattgagaatgtgtcaagtttgtaaacctaacttttaagatgccagattcttttttgattaaatgttgcaaaatccca

SEQ ID NO: 80265 - DNA, 1760 bp, Homo Sapiens
  misc_feature (948)..(948): n is a, c, g, or t
  misc_feature (951)..(953): n is a, c, g, or t
  misc_feature (1214)..(1244): n is a, c, g, or t
  misc_feature (1314)..(1368): n is a, c, g, or t
gccgcctcggggtctgggcccagccgcagcctctacaaccgcggccggttgggagtcgccgcgagatgcagcctccgggcccgcccccggcctatgcccccactaacggggacttcacctttgtctcctcagcagacgcggaagatctcagtggttcaatagcatccccagatgtcaaattaaatcttggtggagattttatcaaagaatctacagctactacatttctgagacaaagaggttatggctggcttctggaagttgaagatgatgatcctgaagataacaagccactcttggaagaattggacattgatctaaaggatatttactacaaaatccgatgtgttttgatgccaatgccatcacttggttttaatagacaagtggtgagagacaatcctgacttttggggtcctctggctgttgttcttttcttttccatgatatcattatatggacagtttagggtggtctcatggattataaccatttggatatttggttcactaacaattttcttactggccagagttcttggtggagaagttgcatatggccaagtccttggagttataggatattcattacttcctctcattgtaatagcccctgtacttttggtggttggatcatttgaagtggtgtctacacttataaaactgtttggtgtgttttgggctgcctacagtgctgcttcattgttagtgggtgaagaattcaagaccaaaaagcctcttctgatttatccaatctttttattatacatttattttttgtcgttatatactggtgtgtgatccaagttatacatgaatagaaaaagatggtgttaaatttgtgtgtaggctgggaattcttgctgaaggaattggagaaaacctgttgctgcaaaattttacatgttccagatggaaagggaagtctaagcgctttttaaaacaattnttnnntgtatttaattaagcaattgcagttatctgggatttttgggtcagaattttaaattctgtttgattctccatattccagtgaataaaatacaaaagcattgtgtttttaagattgtgtcgatattcacctaaaaacttgtgccaaaagcacctggattggtaattatatttcacttaaagggtaaatttgacaatatcttgataatcaaaagtgcaatttttttcttcaaaatttttctccagcatcacagatcctgcagnnnnnnnnnnnnnnnnnnnnnnnnnnnnnnnaaataattcttactcacaaaatatatttctgataaacattaagatattaaatctgatgcacaaacttttnnnnnnnnnnnnnnnnnnnnnnnnnnnnnnnnnnnnnnnnnnnnnnnnnnnnnnnatatagtttttaaaatctcacacatgcttcgatacttccttgttaagaattcttaataactactaaaactgatttttaatagttgctgatatatatttggtttgtttgggtatacttttcaaaaccatttttgaatgtccaaacatctgatttaaagtttctgtttatctttctgaccaaaggagcaagaggtataatggatatggcattcattaaaatctttactatgtacaaaaacagtaatatttacagcatcagtaaatatttttaagtggtacttctaaatcataaaagttggggaaagagacctttaaaatcttgtggtgttgaacaatgttatatgaagtagaaaaaataaaatacttccccagttgtgtgttttgttttacagc

SEQ ID NO: 80266 - DNA, 643 bp, Homo Sapiens
agacccaggactggcggccgccatgcccgcagtaggttctagggggcggtgctggccgcagtggactggcctgcaggtgagcactgccctgggctctggctggttccgtctgctctgctgccagcaggggagaggggccatctgatgcttcccctgggaatctaaactgggaatggccgaggaggaaggggctccgtgcacttgcaggccacgtcaggagagccagcggtgcctgtcggggagggttccaaggtgctccgtgaagagcatgggcaagttgtctgacacttggtggattcttgggtccctgtgggaccttgtgcatgcatggtcctctctgagccttggtttcttcagcagtgagatgctcagaataactgctgtctcccatgatggtgtggtacagcgagctgttgtctggctatggcatggctgtgccgggggtgtttgctgagggcttcctgtgccagagcccagccagagagcaggtgcaggtgtcatcctgagttcaggctatgcacggcatggagtgggaaccccaccagctgctgctacaggacctgggattgcctgggactcccaccttcctatcaattctcatggtagcccaaactgcagactctcaaacttgctcatttaaaag

SEQ ID NO: 80267 - DNA, 274 bp, Homo Sapiens
ctatctggtgcagtgagaatgataacctgcaactacctattaaatcctatccagaaagaaaattcctgttgaaatgtttaaaacaagaaagtgtcatgaccagatttgcattttagaaagcgttctgaaaactgcggtagatgccttataatggggctagactgaaggcagcaatattatagtaatgggaacttgctgtgtgcagtcagctctctgcttttgaatcatcacttcgccttctactatttgtttatatctgaataaacctcgtgcc

SEQ ID NO: 80268 - DNA, 682 bp, Homo Sapiens
tatactctttatgtacagcaattggcagtctgtgaaacttgtaaattcatatacataaccttgtgccctgcaattccacttctagaaattatcctaccaaacaaagcacatagatgtgcaaaagtatgtatttacaagtatattctttgcaacttggtaatgtcaaagaattggaagcaacctaaatatctgccataggtaggataaccatatgctttggctttttgaacactaccagtttatacctgctgttcttggataattattaatagtgctttcattctcaatgtctcactttagataataaattacagaggattggtgaaactaatttgcccaatggaaaaaggaatgaagaagtgctttaggtactgagatgaaaagatctctaaggcataataatgtttattgagaaaagcatggtgtcaaactgtatggcatgctacaattgatgtataagaagaaaaaatgtgtatgtattcctatttgtttgtatatggtagactgtctctgaagacatatatggaagaacctgatcacattggtagtctccaaggagcagaactagatacctgggggataaggatcccaggagtgagccttttcattgtaaacttcattgtactttgagtttttaactgttcaaaaataataaaattagaaataaaatatttcaacaaac

SEQ ID NO: 80269 - DNA, 586 bp, Homo Sapiens
  misc_feature (44)..(44): n is a, c, g, or t
  misc_feature (235)..(294): n is a, c, g, or t
gaaattcctgactggcttcaggtttacgcacgagcccctgtganatatgaccacattctgaagtgggaactcttccagctggctgacctggatacataccagggaatgctaaagttgctcttcatgaaagaattggagcagattgttaaaatgtatgaagcatacagacaagcccttcttacagagttggaaaaccgaaagcagagacagcagtggtatgcccaacaacatggannnnnnnnnnnnnnnnnnnnnnnnnnnnnnnnnnnnnnnnnnnnnnnnnnnnnnnnnnnnacagataaaaaattgcaaacaagtactctggttaataaatgctgcttcctttgtggaaattataaaattctaactttacatgtattttgttattagaaattttcttttattgaatgagaaaaattagtctatcattttaagagccaatatggcaaacactttcaaatactgtatattaggaaactgttttggtattcttgatggaaaaaaatgcagcggaaatgtcattatgaacagatgttaaataggaaattattacttgttaacttcttacagcagtagtaccttcttt

SEQ ID NO: 80270 - DNA, 1565 bp, Homo Sapiens
  misc_feature (162)..(255): n is a, c, g, or t
  misc_feature (1442)..(1501): n is a, c, g, or t
ggaccatggccctggcccggcgtcgctgggctttcctcacggcgtcccgagcagcgtcgcagagcgggccgacttccgggaaggaactgaccagcgactgagcggcggccggcgcgcttagcgccctgaacatgcggcagtccctgcgggcgaccccgggcnnnnnnnnnnnnnnnnnnnnnnnnnnnnnnnnnnnnnnnnnnnnnnnnnnnnnnnnnnnnnnnnnnnnnnnnnnnnnnnnnnnnnnnnnnnnnnagccctagggaggcagttcagcgcggcctcgggcctcgtcgagaaggatgctgtcccgaaagaaaaccaaaaacgaagtgtccaagccggccgaggtgcaggggaagtacgtgaagaaggagacgtcgcctctgcttcggaatcttatgccttcattcatccggcatggtccaacaattccaagacgaactgatatctgtcttccagattcaagccctaatgccttttcaacttctggagatgtagtttcaagaaaccagagtttccttagaactccaattcaaagaacacctcatgaaataatgagaagagaaagcaacagattatctgcaccttcttatcttgccagaagtctagcagatgtccctagagagtatggttcttctcagtcatttgtaacggaagttagttttgctgttgaaaatggagactctggttcccgatattattattcagacaatttttttgatggtcagagaaagcggccacttggagatcgtgcacatgaagactacagatattatgaatacaaccatgatctcttccaaagaatgccacagaatcaggggaggcatgcttcaggtattgggagagttgctgctacatctttaggaaatttgactaaccatggttctgaagatttaccccttcctcctggctggtctgtggactggacaatgagagggagaaaatattatatagatcataacacaaatacaactcactggagccatcctcttgagcgagaaggacttcctcctggatgggaacgagttgagtcatccgaatttggaacctattatgtagatcacacaaataagaaggcccaatacaggcatccctgtgctcctagtgtacctcggtatgatcaaccacctcctgtcacataccagccacagcaaactgaaagaaatcagtcccttctggtacctgcaaatccatatcatactgcagaaattcctgactggcttcaggtttacgcacgagcccctgtgaaatatgaccacattctgaagtgggaactcttccagctggctgacctggatacataccagggaatgctaaagttgctcttcatgaaagaattggagcagattgttaaaatgtatgaagcatacagacaagcccttcttacagagttggaaaaccgaaagcagagacagcagtggtatgcccaacaacatggnnnnnnnnnnnnnnnnnnnnnnnnnnnnnnnnnnnnnnnnnnnnnnnnnnnnnnnnnnnncacagataaaaaattgcaaacaagtactctggttaataaatgctgcttcctttgtggaaattat

SEQ ID NO: 80271 - DNA, 422 bp, Homo Sapiens
ttttttaaagaaggtactactgctgtaagaagttaacaagtaataatttcctatttaacatctgttcataatgacatttccgctgcatttttttccatcaagaataccaaaacagtttcctaatatacagtatttgaaagtgtttgccatattggctcttaaaatgatagactaatttttctcattcaataaaagaaaatttctaataacaaaatacatgtaaagttagaattttataatttccacaaaggaagcagcatttattaaccagagtacttgtttgcaattttttatctgtgaaaatattttaaagctcttacaaaacttaaatttttaaaaaatcagctcaaaaattttttccatgttgttgggcataccactgctgtctctgctttcggttttccaactctgtaagaagggct

SEQ ID NO: 80272 - DNA, 1406 bp, Homo Sapiens
  misc_feature (875)..(875): n is a, c, g, or t
  misc_feature (910)..(910): n is a, c, g, or t
  misc_feature (1038)..(1066): n is a, c, g, or t
  misc_feature (1231)..(1239): n is a, c, g, or t
gttggtcagagaaagcggccacttggagatcgtgcacatgaagactacagatattatgaatacaaccatgatctcttccaaagaatgccacagaatcaggggaggcatgcttcaggtagcttaacattataaataatatagtagtttatatttattgacatgtcaattaaaaagatgttcttttctagattttcttgggacacgaacaaatactactagcgaaatgtttttccactttgctcatcctgcttaagcctgtgtgcaaatagttgttaatctacactgaatggaagagtccttgtgaccatttattttattaactcatgttatgtaaacttggtatttatctcaaggctgtctagactcttaatgctgtgacccttgaaaacctagagaatttaatgtctccagttgggctgaatttaggtttaggtttggtagaataatgggaagggtaagtcttcagagacacttgacggagtcctcagagacacttgacaaacttgggaaaggaaagaagagtaggaacaactgggcatgctcagtgataccctgagcaatcacattacttcgctagatcctgccctttttctcaacaaaaagtagttcaagaattatttcctgagttgatcaaaaagacttatagtcatatggttaattatgtgttgagcatgtctttttattatttttgtaacagacaaaaaatattaccatataatttaagaaaagaaggtactttccatatctcctgagttggagatacttctgaaaggagcagaagagatgggagaaatgtacagttctactttattcctgaagtcctggttttaccagataaaattaagtgagaggaaaattaaactttcttgtccgantgtttttttctaccaagttatagactttaaatttnggcaggataaaaataaaatgtgagacagatttactttttggctcacataacttcaaataagacgacttaaaaatggttgggagcattagtatttcgactggtagaaaaaaattattcatttagtactnnnnnnnnnnnnnnnnnnnnnnnnnnnnntttggggggggcctctgggcccttgagaaaaacgttttctaaacaccatccggtggggcgcgcgggggccccagagggtagggcgacatgggccaaaagcgggtcccaaagggaaacccgggggcagagcaagggcggggttcctcacccattaaaaaaagggcnnnnnnnnnaaacaccgagggtgtctcctgaaccaattctccgcagagaggagtccagagaggccacaaaggggcagcactacacacacgagcgggtctcccaagggaagagcgcgaaattaaaatagcagccccgggggtgtgctggcgcagaagagaagaaaacaaaaacaagc

SEQ ID NO: 80273 - DNA, 886 bp, Homo Sapiens
aggatcgcttgaagccagaagttcaaggctacagtatgctatgatcatttctgtgaatggccactgcacttcagcctgagtaacgtagcaagacgctgtctccaacagaaaattgacatctgaagccttgactacagggggactatactggtttatgtgaagtgtggggagagagcaggattgtgcttctttgtacacatttgcttctcccaggatagtgtcatagtgcctaggaaggtgatgtgtgtgtcagatacaatgatagtgaaaagaagggattggaattttcatacctgtgtcagtctaaatgagcattaccttgtctgaattgtctaagtggtaagcttcgtgatttgaaacagttttcactttgaaaaactgcttccgtggattaaaagttgtcaccactaaagtgggctgtggtggagtcgatgctgatcctcacttagggcagtggcctccaaggggaagagggcacacaggatggctgggtgggggtgggaagaaaagattaggcctttgatttatattcattttgaggctcagccttatttagtttctcactttggatgtattttatatatatacatcaaatatacatcaatattagttcattagtacatgtaggtcattaatttataaataaaaggttgaaccacaataaactgctgataattgtttttgatctgtaaaagtggcagttatcatagtttaacagcatatacatgttggaggtgtatatgcttcaagtttttactgtttgtgtacagaaaataaactttggagacccctagccccctcctcagctcccaacccccaccctgataacttatttctgtatcctgggtgtggggatgggaggactttaaaatatttaattaatttg

SEQ ID NO: 80274 - DNA, 650 bp, Homo Sapiens
catgatctaaccaactgagctaactgcccacaccattttatcctttataatgatcactatgagggctgagtgcagaatggagtgtatgtggtcaagagtggaagctgtgaggctattgcagtaatccagaaagaaaggtgacaatggcttagacttcagtggtagtgttggaaatggacataaatagacatattcaggaaatatattgatcttagatctaataacacacgtaatagattagaagtagggaaattaatgaaaaagcagaattaaggatgacttctcactggcttgaaatgctaaatggatgacggtgctgtttagtgagttggggaagactgggcgtggtgatgggtgtagaaattgagaaaggaaaatcaagaatttccagaactttcagagcaatgttaaatactttccttgatagtgggtcagtcatcatttataagtgcatttctaaaaatattgcttaattttgtttttgagctttgtataagtggaattttgtgtgtactgattattttgctcaatactatgtctttaagattctctgtattgttgcatgtggctgagtttatttttgatgctgtgtagtgttttactaattaataaatcataattcagtttttactgttctattgatggaaaaa

SEQ ID NO: 80275 - DNA, 703 bp, Homo Sapiens
ttttttggtggaagaagtctcagcgtctcttaggactgactgttcaaaggctcctcagcaaatgagcccttgaacagtcctaagagaccctgaggattctgtggagtagtttgaaaaccattgttctgaggaagggggtccaatctggctcctctgcactaaagctgcaactcatggaaaagagggcaacggtggggtagacaagccatgctgtctccagacccactagggtggaaggaaggttcctgtgggcctgtggacttaggctaatatttgctgtcagcagggcacttaagaatccagggggttttatgtaatgttgccaccacatggttcttttaaaaacacataaggaaatgtgagggtgtagcgcagatgaggagagagatgacacagagggagcagccttctctttagcaagatgtaagggaaatataattcacttacataaaaaagaaacaacacacacgcaaacccttcaccagaagcttcacactacatcctcctcctcctcctgctccccaccttcaccgcatccctttcagagccagggtcactgcaaggggcacctggcctgcccactcacatctgccaaaatgttgcatgccagcgtggaagacaaaccaaactgcgcaaccccctgtgtgtatttacttggtgtacatagataactttaaaataaaataaattcaatgataactct

SEQ ID NO: 80276 - DNA, 1103 bp, Homo Sapiens
  misc_feature (821)..(843): n is a, c, g, or t
cagtcgacggtaccggacatatgcccgggaattcggccattacggccgggggctgcagaggggaaggcggctaccagtgtaaagccagagctgaggttcttgatagtccacaatgggtgaaccacagcaagtgagtgcacttccaccacctccaatgcaatatatcaaggaatatacggatgaaaatattcaagaaggcttagctcccaagcctccccctccaataaaagacagttacatgatggttggcaatcagttccaatgtgatgatcttatcatccgccctttggaaagtcagggcatcgaacggcttcatcctatgcagtttgatcacaagaaagaactgagaaaacttaatatgtctatccttattaatttcttggaccttttagatattttaataaggagccctgggagtataaaacgagaagagaaactagaagatcttaagctgctttttgtacacgtgcatcatcttataaatgaataccgaccccaccaagcaagagagaccttgagagtcatgatggaggtccagaaacgtcaacggcttgaaacagctgagagatttcaaaagcacctggaacgagtaattgaaatgattcagaattgcttggcttctttgcctgatgatttgcctcattcagaagcaggaatgagagtaaaaactgaaccaatggatgctgatgatagcaacaattgtactggacagaatgaacatcaaagagaaaattcaggtcataggagagatcagattatagagaaagatgctgccttgtgtgtcctaattgatgagatgaatgaaagaccatgaaagatgnnnnnnnnnnnnnnnnnnnnnnngataatagcatcatatattagttcattttcttttggacagtcttaagagaagtttcactaaaaatgtaaacagctttaatcttgactccaaatttttcaattatgagatgtcataggcagtaatttcgctgtataacaagcatagacaaatgagtgtccctgcactaagaagaatcactttaaaaagcaaagtgttagctgctgttgtatgggacattcctatgttttagagttgcagtaaaactttgatgataaccccc

SEQ ID NO: 80277 - DNA, 710 bp, Homo Sapiens
  misc_feature (40)..(40): n is a, c, g, or t
  misc_feature (43)..(43): n is a, c, g, or t
  misc_feature (53)..(53): n is a, c, g, or t
  misc_feature (103)..(103): n is a, c, g, or t
  misc_feature (116)..(116): n is a, c, g, or t
ccacagaacagctagactgatacgaattatacgactcatntanggattgcccntggagccaagaatcgacgaggaactccacagcaatcagacagctcaaaanggctgcatgaatntagtgatccagagccttgttccccgtaatttggagttctccttcgaatttgaccaactcaggtagagttaatcaaatctgatggaagaaaaccaaaataacaaaacaaatatgattactgaggacttttaatggtaaggagaagttaagaccagttacttgtcaatcttaacttttagtcactaaggggaattttcaagacaaaactctaattgagctacttacctaggaatgaggctcacgctgaacactgctgtctaccatctatgaagcaggaaaaaactcaaactcactttctctgttggaagggagcagaaactccagaaaggacttgctggccctccatcatcatggaaacaggaaaactaatcttccttgttggaagtgagtaaaactccaggaaaggagttataaagcaaaatgaaccttagacctcaaccaaatttggggagagcaatgattctctgaagggacctcccagacctcagcaaattgtattattggtttgagcaataaagataggccaagctggtaccaagcatggatggatttgtcaaagatcaggccacctcatctcttccattggccaccagtt

SEQ ID NO: 80278 - DNA, 754 bp, Homo Sapiens
gctcacgctgaacactgctgtctaccatctatgaagcaggaaaaaactcaaactcactttctctgttggaagggagcagaaactccagaaaggacttgctggccctccatcatcatggaaacaggaaaactaatcttccttgttggaatttttgaaaacttcacaagcactgaaaatcctagaatatgatatattttaggaggtttatgaaaggatggaacggaccctgaaaagcactcttgaatacaggtaaagaaagcatttcatggttcacttattgaggaccatcaaccacttcataatttagaacctgaagatcggatcttctgagaacctcagagaaagactgcccttgtcatccacactgcagcaaaacttcaggaccttgaaccttgggctaataatttcacaactgagacggcttcatctacacccttggaactatacccattagaacccttaaggattttgaagccagccttatacatggataagcttataccttgatagatggaagatgaggcgcaatgaaggtgagaaaacaaaggtttggcaaggatgagtacttgctgcaggtccaacagttatgactggattggaacttcatcccagcttggcctaacttcagaggagtttcattcaacttatatagattcgatatgaaatgggaatgcaagaaggcatagatatttctggttgattcaatttcctgataattcccaattacaataaaagaaatggtttcataaggaaa

SEQ ID NO: 80279 - DNA, 2961 bp, Homo Sapiens
  misc_feature (231)..(245): n is a, c, g, or t
  misc_feature (340)..(391): n is a, c, g, or t
  misc_feature (493)..(515): n is a, c, g, or t
  misc_feature (2139)..(2139): n is a, c, g, or t
tagtcttttattaactaccacactgttataatacactttaaacgtacaataaggtagcctttaaatttgaggtggtcttaagaataacaaatgaacagaattccaaatttttgaaataggtgaactgctgcagttacaggtatacatttaggaaaactgtatagctcttacaagaccagcaatgtaactttattttgtacatttttgaattgaaaatataaacaataattnnnnnnnnnnnnnnngttacattgctgcagttacaggtatacatttaggaaaactgtatagctcttacaagaccagcaatgtaactttattttgtacatttttgaattgnnnnnnnnnnnnnnnnnnnnnnnnnnnnnnnnnnnnnnnnnnnnnnnnnnnncatacgcttctcaattaaatgtactggatacatataaattttaagggaagaagcaaaaaaggaaaatgattgatatttaagtgcagactgactacctagacnnnnnnnnnnnnnnnnnnnnnnntatcataaaacctctagttcttctatgactaatatccatatggttggagtatcgtcactatggaagtgattttgttatgtttgcatatgttacactttacgggtaatttacatgatggcttttaaggccctggggagacatggtttttggaaacaagattggataaaaatcactgctaagacgcaatacaccttatttttttggtcctccaatagtcaagaaaagggataattcactataacattctcttaccacccaaatgcctcaacttatacattttaaacttttttaaacattggttatattgcccaacttcgttattgaaagaatattaacaagacattattttggcaaattaaatcataaacatggcttttcaacaggatttaaaaggtgactatccctagagttccatgttaaaatgtagttttcaaaatcttacaagagtaatgcttaaaatattgtacatagttaacctaattaaaataattagcttcaaaatgacaaattgataagctaagtaaagcctacactatgtaacatttgcttggaaacttgatttgtcagttatgcataataaaaattccagtcatcaagaaaattacaaaattttttatcataacatgatttctttcacccaccagcttttttatcttacaatagataaataccaacatgttctcatttttacactaaaccacacaggattgatgcatttggttagactaccattccgcattgttaaattcaattttctctttatataacttggtaaaatttcatttcttctagattccaaaagtacctacaaaacccatgcaattttaccatttttaatatactatggaatatcatacaaagtaaggcatttcagtgtcatgtataaccaagttactgtcaatccaaaaatttttgcacatcaataaaaagatatctaagaacttaggaacaatattcttctcactactgtataaaaataaccacaatgaataagtatttgtgtaatatttactccattgtctcatttccagaaactgtgacaagctgtaaaggtatttcagtgttggtaaggatatcttgattgctggtggcggaagtattaacagttcctatccctgaaacagaaccttgttgaatatttgcaaggataagcgttgttcctcctgcagtaatcaaagtatcatctcgcgcagcttccacagatgccagcactgtactgctagagtgaataccttttttattctggtgtgttttaatatgtttggcaaggtggacacttctcataaagcgttttgaacattctggacaaacaaatttcttctcaccctgtatgtgttcttctgtgcctctgtaattcatcacttcgagtaaatcttttaccacagtacatccagttacaaacaaaagggcggttctccagaatgccaacgcagatgagctctcagatgtgaggtcttcccatagactttaccacatcctgggtatatgacaaatgtgttgcttctttttcccaagattggtacctcttccaccaccttctttacagttgggacaggtgcaagctaccctccgaagtctttttccttcctggatgttgttggtccccttcctcatctaccacctngtactcttaagtgtgttaggtcattggtattcaaggtagaatcaccactgagctgccactcttcaggatcaggttcttcttccttgatcctaatatctgcaggactgtcagcattctctcctggatgtagctgtataccagcagaatctatagagttcactgtaactgtttgtagatttggcaactgaccagtgcttagactaactggagttgaagtgaaggctccacctgccgcaacttgaccaagtgtgagggtttgaacaggcgtcaaagttatttgttgggcagcagtattctgtatttgcaaattctgcaagttctggaccccttgtacttgaaacgtttgccaagttacctgtccagaaggggtcactgtctgtgcctgaattaaaaaggttccaggattcagctgcaactgaagattttgcaaagcctgttgtgatatattttgaccactggcttgcacaccatggattgtctgtggtgtaataccttgcacaatttgggcttgactggttggctgctgagactcttgaagttgtagatgctggtacaacaggctgtgctgtagaaacctgaatattctgtgcctgtgtctcttcagaaacaggcgactggatataatttccctgaagatctgaagaatgaacctgcccactagatgtagtcaagctatttgtgttttgttgtaatatacctgtactatctatcgtaacaggcaactgcggacgcgtgggttcgacgatatcccgggaattccggaccggtaccaagcctgcttttttgtgacaaactggttctatagtgtcacctatgctgggc

SEQ ID NO: 80280 - DNA, 915 bp, Homo Sapiens
tgagggtgctacaaggggagagctgaggacttgaatggctcagtgttcttgaaagctaattgtgctgggccctggagtgtggtctgcaggcctctccaacaggtgggcactgctagcctgtaccttttcttgtaggctaaatagagtcccagcacctcctgatgtctgagctccatggggcacatgaggcatcctgaagcattagaatgattccaacactgctcttctgcaccatgagaccaacccagggcaagatcccatcccatcacatcagcctacctccctcctggctgctggccaggatgtcgccagcattaccttccactgcctttctccctgggaagcagcacagctgagactgggcaccaggccacctctgttgggacccacaggaaagagtgtggcagcaactgcctggctgacctttctatcttcatctaggctcaggtactgctcctccatgcccatggctgggccgtggggagaagaaactctcatacgccttcccactccctctggtttataggacttcactccctagccaacaggagaggaggcctcctggggtttccccagggcagtaggtcaaacgacctcatcacagtcttccttcctcttcaagcgtttcatgttgaacacagctctctccgctcccttgtgatttctgagggtcaccactgccagcctcaggcaacatagagagcctcctgttctttctatgcttggtctgactgagcctaaagttgagaaaatgggtggccaaggccagtgccagtgtcttggggcccctttggctctccctcactctctgaggctccagctggtcctgggacatgcagccaggactgtgagtctgggcaggtccaaggcctgcaccttcaagaagtggaataaatgtggcctttgcttctgttt

SEQ ID NO: 80281 - DNA, 748 bp, Homo Sapiens
aatctcacctgagttagcctagaatgcgctggttgcaaagtggtgtcagctgtggggatcttgggccctcgttcctcacctgcatcctgccctgcactcaggtgctccccctgaagtcagggtcacatcaggtagacctgttactatatgcacctttggcctggaatgctctgaagttggactggaaatgttactaggttggcctgttacaaaaaggaccccatcctgcttaaacacattgatctcccttgccctgcatttgagtctttctagcccacggtctgaaacttgaggcagctttccagatttggaatgtaaaaggctcagtgggcactctgttcatccctgggtggggagggcccagccaacagaagtgcatgtccactgtgcgggccagtgtgtgtttacacaaatttcatctcagctttgaaaatgctgctattagtttccactgttggtgaactggattttttcctcctattgaaatgatactttcatacttataaagctgtcgtcaatatttatttcaaggtgctagatttaattttgttattaaattgaaatgcttatcttgtgttcaagcacagcactgattttaacaacctgcatttaatgtgaagtaaccgaagtaggatactgtaactgtgtaaggattttgtttgtaatcttgtaacattgaaccattgaaatgttcagttctttgcttttgagcaaaacgtcaattaaaactaaagtaaaatcctaaaaa

SEQ ID NO: 80282 - DNA, 1370 bp, Homo Sapiens
gggaggctgcgggaaagcggtgcgcgtgcagcggggtgggtgccctggtccgcgggcgagctcgagcagccaaccccgggcgcgtcggggccatggacggcctgaggcagcgcgtggagcacttcctggagcaaaggaacctggtcaccgaagtgctgggggcgctggaggccaagaccggggtggagaagcggtatctggctgcaggagccgtcactctgctaagcctgtatctgctgttcggctacggagcgtctctgctgtgcaatctcatcggatttgtgtaccccgcatatgcctcaatcaaagctatcgagagcccaagcaaggacgacgacactgtgtggctcacctactgggtggtgtacgccctgtttgggctggccgagttcttcagcgatctactcctgtcctggttccctttctactacgtgggcaagtgcgccttcctgttgttctgcatggctcccaggccctggaacggggctctcatgctgtatcagcgcgtcgtgcgtccgctgttcctaaggcaccacggggccgtagacagaatcatgaacgacctcagcgggcgagccctggacgcggcggccggaataaccaggaacgtcaagccaagccagaccccgcagccgaaggacaagtgaagcagccccctgagcctcacaaggacctcctggctggtgaggagggggccgcgccaggctcccaggcctccacagagtcttcagcgcatcccccaacagcagcccctgccagtccctcgggtccaggcaaggccctgggggtctccttaaatgccacctcgggcaagtcccagtcccagtcctcggccacccccagctctggatcccagggccagctgccctctggctctggctgtggctcccgcctgtccggcagggcccagggccagcgtcgggcacagggcagctcccactggtctcggcaacacacccagccgcctggtacttcctccagcccctcccagtcagccctcccgtcctcggggcccctgcagccacccaacgtcacctccagcccggtctcacccatggtccagtctcccagcagcagcaacatccccacgcagccccccagcaagtcctctggcaagccggaggacgcagcccccaagaccagcggacagcgccagaaggaatcgtcgaaacagcctgccagcagcgcctcagtgcccgagctggtcccctgccattccgggacctctctggagtacacttcggagtccaccaccgagatcacctgcagctggccacaccacaggcccccgtgcctgcagcactactggtgcctgaaacacctggcctgctaggaggctccaataaagctaacccggaccagaaaaaaaa

SEQ ID NO: 80283 - DNA, 493 bp, Homo Sapiens
  misc_feature (414)..(425): n is a, c, g, or t
ggcacgaggttggttaaggattaaccacagggaaaaatccagcagaaacagaagaactgtgggtttcttaccccagccctcaaggaagctatgccgtgaaaggggtactgatacactgacatacagcaagttggacggggcatcagttcttcatttgtggagtggagaaaagaagaggaaatctctcatttggggcatttgaaggatggcttccctgtttcatcagcttcagatcctggtctggaaaaattggctaggtgtaaaaaggcagccgctttggacacttgtcttgatcttatggccagtcattattttcataattttggctattactcggaccaaatttcctccaactgcaaaaccaacttgggattcttctacttggaacacttgtgatggatggatggcccagannnnnnnnnnnncctgcataaatgaggaaactgactcaagatacagggttatggttgcacaataaatcatttgcaaagct

SEQ ID NO: 80284 - DNA, 1799 bp, Homo Sapiens
  misc_feature (249)..(280): n is a, c, g, or t
ggtaccggtccggaattcccgggatatcgtcgacccacgcgtccggcaaagatgaaaaacaagcattactgctacccaaagggaactggtgcttggtgatgtgcagatggggctgttggttaagagagctattacaggttttctctcttaggtttcataggaggtagttactgagatgagattgttttatctttttgaatacagatctcttgtcttgagttagttctgaggatgggagtaataaaggannnnnnnnnnnnnnnnnnnnnnnnnnnnnnnnggctccttagtaatactcctctgacatttatttctattattcttcaaagaaaggaaaccaactgaaatgtttgctttaacaaacattttaataagttctctgggttttttttcccccttttaaaaaaattagcatataccatagcaataaaagaactaatgttaactattgtatgctacaacttaagtgatttttctaaagaagcacaatgtcattgaaagtattattgaaaaggatcatagtcacattgaatttgtgaaggccaaagaaattgaagggagtgatattttcattttatgatattcacatatttagtaaattttgtgtacaagaataccaggcagagtgttttacccatggaaacaggtttcagattactttatttttactgttagagtctcaagtttagaaatgctaacacttaaatcagtttttttctcactatacttgaagattgttaatattttgatatcttcctagcttgatgaatttaaacatatcttcagatctgtgacagtgacagccaataggactgataatattagcttcaaaccaataatatccagggttaaaataaaaatcatagtgaaagtacgattgtaaaattatgctatattaacttttaagtctgtaataacttgacatcaaaatgttatgtaattaccataaataatggctagcgagaacatctttggaaattctcaaattacctttcttactacactgtttgcagaatgaatgtagaaatgatcctgttagctttctgaatgttctgtggttgaatgtgtttttgcttaaataaagcttttggtatttgtttaaattacacttcttgagaagtggaaattttaggatcatctttgctttgtttcagttttgtgatttttgaaatgaatgtttagtttactgagccagttggtcatttcttcctcatgtcgttaagtccagtgagtaagcctgaactgtgaataaattaccaaaaacttgcttagaatttcattttgaagcaatttgctaatatttgaagtgtatacacatttgtagttatgttaaaaattgtattgtactaagaatgtaatcaatgtctactttagttgtaaacatttctgatgtcaaaactttattcattactgttgattttaagaataagaaatcactgcctaaatattaccaaaagccactgtctctacccgaacttcccagtttgggaaagaatcgttagataaaacaaaggctctgccctttctgataccaaactccacagatactttctcacatcttttaaacattttgcaataacatattgtttataggaagtttacagggtatgcaatgattaaaacttttaagtgaattgatagttgcaaaagaaaagataaatatttaagggtcagtgaagtagcaagacaatctaaagtttcctggtaataatctggcctcctctgttaaattatagaagccaaagtttttcccttaacagaaatccctttttaattgaacagccaaagccaaaaaggtc

SEQ ID NO: 80285 - DNA, 804 bp, Homo Sapiens
gggaaaaaagatcgcggaaccttccaccatcaagggaccgcagggccggctctgctttcccagcacgctgcctcaccaagaaagaatccagagaaggactggtggacttggaatgttaagtcatggcccatttgatgatgttcagggatgtggctgtagatttctctcaggaggagtgggagtgcctggacctggaacagagggatttatatagagatgtgatgttggagaactacagcaacatggtctcactgggtttttgcatttatcagccagaagcgttctctttattggagaaagggaaagagccctggaagattttgagggatgagacaagaggaccttgcccagacatgcagtcgaggtgtcagaccaagaagttattaccaaaaaatggcatttttgagagagaaatagcccaattggaaataatgagaatttgtaaaaaccacagccttgactgtttatgttttagaggtgactgggaaggcaacactcagtttcaaacacttcaagataatcaagaggaatgcttcaagcaggtgatacgcacctgtgaaaaaaggcccacttttaaccagcatacagtgtttaatctacaccagagacttaatacaggagacaaactgaatgaatttaaagaactgggggaaagcctttatttctggttcagatcatactcaacatcagttaattcacacaagtggagaaattctgtggagataaagaagtggggattaccctttcttcctgattcagaagttattccatatcagacaagttcacactgttaaggaaaacata

SEQ ID NO: 80286 - DNA, 847 bp, Homo Sapiens
aattcatgaacttgaatttatgtgaaacaaaaaataggggttttgaccccagggccatgtgaaaccataggcctgcaaaaggcggggctatacttgggtatccctctgcagagccaccgcacacacaggccgactatttcagtgacggcttcttgaaaacgtggggggaaaaccgtgaaggtgttgggtgctggcaaacaaatcagatggttccaggcagtcaggatggacgtgctgccttctgcctcggaaggtggtggggtggcccaggtgcccgccgtgccctcggggatcagtctgcataacccgtctggaattatgtcagcagacctcacaggtcttctcttgagatacaacctcctcgcagggcaggtcaccttggcgatggtggtctgggaatggctgtagtggctcggcttgcaggtcatccgctcctggaggcctcgcagaagtcaccttgtgccatccatgctgagccacgctggagtttctccaggcccaaggtgtgtgccacccttctcctgccccaccctgaagagctgcaggccagacctacctccttccggggtggtgaactccttggtctcactgcgaggcccatcacctctcccattgaccacaaccatctccagcttgtagttactgtaggggaagaggcgggacaccacgccacggaggcggtcaccagggaagctggcttgctgtctcttctgagacacccacaggttcttcagcaagctgctctccctccagtagtaggccttcgggacagaggcaggctggtgaggggtcaggcaggcagggctgggttagttgttagtggtggtggtagtgaccggtctttcct

SEQ ID NO: 80287 - DNA, 781 bp, Homo Sapiens
  misc_feature (78)..(78): n is a, c, g, or t
  misc_feature (91)..(91): n is a, c, g, or t
  misc_feature (175)..(175): n is a, c, g, or t
  misc_feature (189)..(189): n is a, c, g, or t
ctgttgcttaaacctcaaactgcagttaaaattatctatgtgaggtttttccccctacccttaataacaatttatgtntagattaaatatntaaaggaaaatgactgccagcccctccctcgtagtatattaaactcgactacattttgttagggttcaacatctctaattgctntaaacgtaaagtgngagggaaaatcggcatgatgctcgaaatggcctgggtatatgtgatttttttaatttaaaaaaagatttagccatacggtcattccaaatggtttctcaggttcaactaacttattttcagagcttcttctgcaggcacacgcacacccgaatagctaaacaaaactggaagatggaaagaataaccatattaaataaagaagcgaacaaatagttctaacatggcaataatcaagagcaagtgaacgtagagtagttataatggtttactagaggtattcttttatgagaagtctatgtaacacattttgtatggtacattgtcctttggaatgaatcatctttcctgatagaaaattgggaaaatacaaggagaaataattgagctcagaagttagtactacatgtgtgcagttacatatctgaattggacttttgtctggaaagtaacaagcaaaataatagtaataaccaatacaccaaattaaaaagaagaagagaataatataatgtaaaaagaattttgcaatgtcgcctccatccacagacaactgtgaaacatcagctcaataaacgcatttcatttttaaaa

SEQ ID NO: 80288 - DNA, 402 bp, Homo Sapiens
aatgcatttctttctttcatgagacattgaaaccactgatagctcatttcaccctatcttaaacccttctcttgtctataaaactaatacgggtcacaccggaccttcggattaattggatccacattccccaatgatgtttgcaccccattcaagatagccatgccattgtcatttaactcgtgaacctctctttaaaactaaaatggatgtgaaagaataaaattcagtgtactgtaagtattcacagtaattctagtagaattagctgtcataacatgtttattatataatgagctggcatgacacagaaatatattttgtgtttgtatgacttttattttaaataggttaaatctggtgccactccatatatagagtgcttttgaaaaaaaatcaata

SEQ ID NO: 80289 - DNA, 702 bp, Homo Sapiens
tataataacatgcttgctatcagaggaagtgaagaatgtgccttcctgaatgacaatggagtcaacaggggcagaatctacatgaacagaaaatggatttgtagcaagccaaacaattatgtctacagttgccagttatgtccccactgggatactacctagtagagctgtgagaagagggccaccatcctccagactccagaatggtggaatcatcagcagcttccaccatgcccctggaaaaactgcaagtaacagacctgcacatgtatcccctacatctaaaataaaagttggaaaaaatggaactttgatgttaagatgcactgatacaaaacttaaattttggtcttctacattaaaacaatatgagtctcttaaaatattgatttgttcttagtaagattacaagaggctttgatttttaattctgcaatgtttccttaacagccattctgaattacaaactaattcctatttctgccacattccttgctgagaactgtctagtcctggtttgggatttatcttaaaggtctagaaaggcaacattttacttcagcaaaacttgattctatattgttgtttttcttaatgtgtcaaaattgttttgttactaggatttcctatgttgttattaaatgtattcccctgatcaaggtcactggcctagaaaacaaagattctgtgttttaccaagat

SEQ ID NO: 80290 - DNA, 678 bp, Homo Sapiens
tttacaggctcaaaaatcaagtttaatatcaaaagaagttacacataaaggtttttacatttccgaaaatctgatagttaaaatatcccgtctggtgttgattgtgatacacttaagagaacccctgaaaacctttattttgaaattgaagtttttgctcagaaactgggcagaacttttcacattctgacagaagataaaacttaagtctaaaaaatattcgataacttttttctcaaaaacattaagtactttagaatataaagcagaaactcttaccaagcatgtgtacccatcagccacacctcctgtctttgggggaatttggttacttggagctctgtgggtgctatatgaatcctagagacagcaaacttctgctgtacagctaacttacaagggcctgaacccggctgatggcagcaagcctgctacagtccagaagagtgcgacttcttatatttacatatgaacgcatctgtctttccaaggctaactttgtagcattccactggtaccaaggagccaaatggtgacattctgtctaagaatttgtggttactggcttcgaatgaagttgacgctgtcttgaatgcacagttttttcttcaggattcaagcactttttaattccaggttcatctgtgtgactgtccttggaattgaaaactcgtgccg

SEQ ID NO: 80291 - DNA, 868 bp, Homo Sapiens
gcggccgctgcaggtgaaggtggtggggctcttcagctgccccaactttcagattgcgaagagcgccgctgaggaactcaaaaatgaaacctgggaatattcttcctctgtgatttcttttgttaatggtcagtttctgggtgatgcattggatctgcagaaatgggcccacgaggtgtgggatatagttgacattaaaccctctgcactttatgacgcactcactgaggatttttccgctaagttcttaagagacaccaagcatgatttcgtgtttttggacatttgtattgattcttctccaattggaagattgatttttgagctatactgtgatgtgtgtcccaaaacatgtaaaaattttcaggtcttgtgcacaggaaaagcagggttttctcaacgtggcataagactacattacaaaaattccatttttcatcgaatagtacagaatggctggatacaaggaggggatatagtgtatggaaaaggagataatggagagtcgatttatggtccaacatttgaagatgaaaacttttcaagttcctcataataaaagaagagtacttggaatgcccaacaaaggccgtcacagcaacgggtcacaattctatatcacactgcaagcaactccttatctagatagaaaatttgtggcttttgggcaactgattgaaggaacagaagtgcttaaacaactagaattagttccaacacagaatgaaagaccaatacatatgtgtagaattactgacagtggagatccttatgcttgattttcatatcaatattttctgtgataatttattactttgtatctgatcagctgtttgtggatttaattaaaaagtacttgataaattgt

SEQ ID NO: 80292 - DNA, 559 bp, Homo Sapiens
ggggccgctgcaggtgaaggtggtggggctcttcagctgccccaactttcagattgcgaagagcgccgctgagaatctgaagaataatcatccatccaaatttgaagatcctatattagttcctcttcaagaatttgcatggcatcaatatctacaggagaaaaaaagggaactcaaaaatgaaacctgggaatattcttcctctgtgatttcttttgttaatggtcagtttctgggtgatgcattggatctgcagaaatgggcccacgaggtgtgggatatagttgacattaaaccctctgcactttatgacgcactcactgaggatttttccgctaagttcttaagagacaccaagcatgatttcgtgtttttggacatttgtattgattcttctccaattggaagattgatttttgagctatactgtgatgtgtgtcccaaaacatgtaaaaattttcaggtcttgtgcacaggaaaagcagggttttctcaacgtggcataagactacattacaaaaattccatttttcatcgaatagtacagaatggctggata

SEQ ID NO: 80293 - DNA, 1076 bp, Homo Sapiens
tttgagtctcagattgaaatttaataagcatttgaagtgaagcagatagctctggtgataacgctttataggtttgcaacaaagcaaaacaaaacgaggcttagtgatgtgtcttggcactatttagataaagtccaggatgcaaacctgtggactggctgtcctgccatcctcaccaaaacccccaaccaggtaaagctgatcattccaaaggcaggtgcgatggcccatgcgtttcatcccacgatctgcacaggggaagtggaaccacaaaggaggagatgtgcgagtatcatagatgtagagatcattgcagatggtgtctctagctctggtcagagtttctccaccaaacagcacagcaaagggcccgaccacagaacatgagtgatgccgtagtccatggggccccttctgggacccctgcccactgctcacaagccttgcaagctgttccatcaaatgaggagcaacaggtggttcctccttaattttcccatgactccaatgcccagctacttctggttcagctaagttgcaacctccaaagagcaatagctgatgacctggatggggtccaggagtttggagcaggcacgcacagtgacctgagcgtgaggctgtgtggcagccttcgttgcttgtagcaataggtgcgggcgctggggtccagccttaatgtgtagatgcttccatagcgtcgctgagtgtggataccgccctcccggccagccacctgcagctctcggtcagagattcgggtgcaggtgtgactactgaggccggcgggggggcagtcaccaggggtccctgtccacgcctcccacacaccgcgctctgtgtccagtgcggtcactgtggccaagcggcgagacccgtcccagccgcccaccacgcagagccaacgcccgtccacgggtgccgcgtcgtggtgactgcgcggggggctgccccgggctcccaatcgtacggcctggcccctagctgggtcgaaaaccaccgtatcgctgctgggctctctcgctcctcctgctaggagaccacctcaagtcccggctttctctccgtggtcgcca

SEQ ID NO: 80294 - DNA, 639 bp, Homo Sapiens
cgggctgacagcatccacaacacttactcaactgaccatgcttctgcagcaccaccttcagttacaaggtcaccagttgaaaatgacggttacatagaggaaggaagcatcactaagcacccttcaacctggtcggtggaagcagtggtcctatttctaaaacaaacagatcctcttgcattatgccctcttgtcgacctcttcagaagccatgaaattgacgggaaggctctgctcctactcacgagtgacgtgttgctgaagcacttgggggtgaagctgggaacggctgtgaagctatgctactacattgaccgacttaaacaaggaaaatgctttgaaaattgaaaaaatccttgtgcaaatttagattgggccaacttctagaggcaccaatgccttcttagtgtggaatcatttttctgccctttagtcgtttttgttttgtagaaagtatctctcaaaatatattatagctagaattgtagaactatgttatagtccagtctacttctttaaaaaccatttaaactgctagatagtattagaatagtccaatagaaaattcattctttataggtctttaaaaattacttttattatattgtttacaaatatatttcatgcaagaaacagaaa

SEQ ID NO: 80295 - DNA, 795 bp, Homo Sapiens
ttttaattttgaagctacctgaggtttagaattccttcagccctagctgcttttattctgctttttatttaaacaaaaagagggggaggatctgaaggaaactagttttctgtacaaaggctttgaggtccatggactatacttgtcccatttatcatcccaggtggtgctttgaccctgccataccctggctattaagataaaaagatttgtggacattaaaattatgaatatgtcagtaataatccagcacacattgaaatattgacacagattaccataatttgtgcaacatcttataaacaatgtcatttccatagtagtctaaggcttcaccagcctggcccactgtatctagactttaggttcattttaataattatgctttccttctctgtatcatttgggaagttgataaatatcacttccttagataccttcattcagtgatatatctggcttttacaattaaattggaaaaggtaagtttctctttggtgggttgagagttggaccatcaattctaatctacaaaaggaaattcatgatttcactctgacgcctaggatctagccaaggctggtctgcagtatcagatgtccaaactcatctactattagccatattttgtgagtcgtttgtctaaactttgtcaaaaatgcctttgccatgattttgttgctatctggatttcaaacatggacagttaggaagatgtgcattgaagtaggaaaattttgttcagatttgctgttatttattttttaaattaaaaatggaaatgtattttaaaaa

SEQ ID NO: 80296 - DNA, 1004 bp, Homo Sapiens
tagctctactaaggtttcacatatgtgctattgccacattcctctactgttttctttctgatactggacatgctagtaacttggagaggagaataaaagaaagtctcctggaattttacattcccattaatgtcctcattcaagtggcagacctaggatgtatggttaactctcagaccattatgtttttcatggctcatttcccaaactgcattgttggtaggtgccttgctaagctgtaatgcagtgaagaagatggtggggcatttttagtaattggaactgtaacattaatttacaagattgaaccggggatgtctggatgctgacaagggagagccaagtactgttaatgccatcaatcctctaggaaggaattggtggtttttctgaagtgtgggggaaagggtggtttcttgctggatttcatggccagtaagtaaatttaaatgcttcatttttaatttggatgtttctgctagagacctttgatttggaaattagttattttgcatgtttgtcaactgtatatgtatgaaaatagaaaaaaaacatgctttttgtaaaaacccctaagatttgtatatgttcatctttaggcttctgaaagggagagaaatcatattggaaatcagtgttggtgttctgaaatctgcttgtaaaactctcatctcattttacattgatattaaaacattttaacagtgttggctagctgattacttgattaattatactcccatggccccataggaagctgttgtgggcctctgttcaaaagcacagaaaagagcagaaggaaatgtcttagaaagaatcaaagctgatgaaatcagcaaagattgggggaaaggaaggaagcctggtgtagattggattatatttttcctttggggactagaatactagaagaacttcagtatatttttccctttatttttgaatactgtcatataataaattgagattaataaattactcatattacagttcttccatggcaa

SEQ ID NO: 80297 - DNA, 1006 bp, Homo Sapiens
  misc_feature (113)..(722): n is a, c, g, or t
  misc_feature (752)..(766): n is a, c, g, or t
aatacgataaggcacgtcggtgaacgggttcgtcacacacccgctgagcgacgactacaccgactggatactacagctgagtatgagaagcgcccgcttcccgagggagaagnnnnnnnnnnnnnnnnnnnnnnnnnnnnnnnnnnnnnnnnnnnnnnnnnnnnnnnnnnnnnnnnnnnnnnnnnnnnnnnnnnnnnnnnnnnnnnnnnnnnnnnnnnnnnnnnnnnnnnnnnnnnnnnnnnnnnnnnnnnnnnnnnnnnnnnnnnnnnnnnnnnnnnnnnnnnnnnnnnnnnnnnnnnnnnnnnnnnnnnnnnnnnnnnnnnnnnnnnnnnnnnnnnnnnnnnnnnnnnnnnnnnnnnnnnnnnnnnnnnnnnnnnnnnnnnnnnnnnnnnnnnnnnnnnnnnnnnnnnnnnnnnnnnnnnnnnnnnnnnnnnnnnnnnnnnnnnnnnnnnnnnnnnnnnnnnnnnnnnnnnnnnnnnnnnnnnnnnnnnnnnnnnnnnnnnnnnnnnnnnnnnnnnnnnnnnnnnnnnnnnnnnnnnnnnnnnnnnnnnnnnnnnnnnnnnnnnnnnnnnnnnnnnnnnnnnnnnnnnnnnnnnnnnnnnnnnnnnnnnnnnnnnnnnnnnnnnnnnnnnnnnnnnnnnnnnnnnnnnnnnnnnnnnnnnnnnnnnnnnnnnnnnnnnnnnnnnnnnnnnnnnnnnnnnnnnnnnnnnnnnnnnnnnnnnaagaattcggcacgagggcggctgtaggcnnnnnnnnnnnnnnnctcctccccacaccatcaatgggactattctgttttgctgttattcactagttcttaacattgtaaaaagtttgaccagcctcagaaggctttctctgtgtaaagaagtataatttctctgctgaccccatttaatccactgcaaggcacctagagagactgctcctattttaaaagtgatgcaagcatcatgataagatatgtgtgaagcccactaggaaataaatcattctcttctct

SEQ ID NO: 80298 - DNA, 672 bp, Homo Sapiens
gctttagtccaatgctctttccagtagatcagaactgcctaacttcatcaaatatttccactctcagatgggcaaggagccagggggaaggtcaggtcccagttccctaacaagaatttctggtacactgctcagtgtttcacaaaactacattttagttcctctgacatattcataatttttcaagaaaaaatatattcaccttcaacatttttttgtttgcagtgttcttgccacagtctctccttagctgttcactcattgcttgcagctcttgtccaaagtggatcattctttctatggcggcctgacttcctccatacaactggcgtctcaactgacttgaatcaacttctgtaagaaaaacagacaagtattttactaccttatggaatggagtataatgaggacacgaacatacatttcttataccattttgtacatttagtaactattccctaatatttcatctaaatatgcagattgttaaaaattcatttttaatatgaaactgcagctaaaagatatactttatttagctctcaagagtctaggatccagtattcagcatgcagttgagaggggacaacctttcagtgttagagggtacttatgtcagaaaaaaattttagaaaaagtataattccctaaaactacattaagcaacattta

SEQ ID NO: 80299 - DNA, 1590 bp, Homo Sapiens
tagattttaatgaatgtgctatcttacagccaaatttgtatcctactgtggggcttcaaacaccaggagaagtggtcgatgccaattttgggcaacatcctttcgtgtttgatatagaagactatatgcgggagtggagaaccaaaatccaggcacagatagatcgatttcctatcggagatcgagaaggagaatggcagaccatgatacaaaaaatggtttcatcttatttagtccaccatgggtactgtgccacagcagaggcctttgccagatctacagaccagaccgttctagaagaattagcttccattaagaatagacaaagaattcagaaattggtattagcaggaagaatgggagaagccattgaaacaacacaacagttatacccaagtttacttgaaagaaatcctaatctccttttcacattaaaagtgcgtcagtttatagaaatggtgaatggtacagatagtgaagtacgatgtttgggaggccgaagtccaaagtctcaacgacagttatcctgttagtcctcgaccttttagtagtccaagtatgagccccagccatggaatgaatatccacaatttagcatcaggcaaaggaagcaccgcacatttttcaggttttgaaacagttgtagtaatggtgtaatatcaaataaagcacatcaatcatattgccatagtaataaacaccagtcatccaacttgaatgtaccagaactaaacagtataaatatgtcaagatcacagcaagttaataacttcaccagtaatgatgtagacatggaaaccagatcactactccaatggagttcggagaaacttcatccaatggtttcctaaatggtagctctaaacatgaccacgaaatggaacgattgtgacaccgaaatggaagttgattcaagtcagttgagacgccagttgtgtggaggaagtcaggccgccatagaaagaatgatccactttggacgagagctgcaagcaatcgagtgaacagctaaggagagactgtggcaagaacactgcaaacaaaaaaatgttgaaggatgcattcagtctactagcatattcagatccctggaacagcccagttggaaatcagcttgacccgattcagagagaacctgtgtgctcagctcttaacagtgcaatattagaaaccccacaatctgccaaagcaacctccacttgccctagcaatgggacaggccacacaatgtctaggactgatggctcgatcaggaattggatcctgcgcatttgccacagtggaagactacctacatttagctatgcatttcaagagctcacacttatatggtggcatatagtcaacatggaagtaagaccagctctgctgatttgaaatttagatattttaaattatgtactggggacaggtttttgtcgctttacattgcttcctagtttacagcatgatgcaaatgattttctacttagtgttaggagaaattattttccatctttaacctcttagtgtctaaggagttaaatattacttgatttccgacggttcaaattgatcatcacaaattccttaaacaatacctaaaagaac

SEQ ID NO: 80300 - DNA, 991 bp, Homo Sapiens
tgattctgatggctgtaaagttcaagattgggcatctgcatgatgagagcctcagtctccttctacttcatggtggaaggtgaaggggagcttgtacgtgcaacgatcacattgcaaaagaggaagcaagagaaagggtgggaaaagcggcaggctctttttaacaaccagctctcttgggaactaatggaatgggaactcactcacccttgaaggaggatattaatctgttcatgtaggatccactcccatgacccaaacacctcccattaggccccacctccaacattggtgatcagattccaacatgaggtttggaggggacaaacatctaagccaagcgtagatagagaaagaaaatgagttcaatgtaaacatttatgaatttgccagatgaaataaccatcggatatttagagatatagatttagagcctttgagagatttggtaaatacagacatatgattgcctttaaaggactttggaaagtaggggtattttgctggaatgccaggtggttgatccagggtgaagacatgtatctcctgaagctgaatttggatcaagaaacggaagagccaaatgtatataaatgttcccttgaacagtggtgtatatattagtgtaatttcacaatggtgatgtaaatccgagtataacagagaagtgatgaagcaagaaaatttccccttaactcttgcagaactttaccacagtggaaacttaccagaatctctgatggttttgcctttggtatggggaataaagggcaagagataaatttgaataggcagtgctgttgctcctgcttaaagcactcctggaactcttagccaggtatttgtagccagatgtattcttggatagctctattaaagacttatagtaggaggatatgtgtatggcagggattggggatgggggtcagtgtgttccacaaatccataaccctcctgtaatgctgctgtgctgctcaataaatatttattg

SEQ ID NO: 80301 - DNA, 555 bp, Homo Sapiens
  misc_feature (30)..(30): n is a, c, g, or t
gttccctcctggtaccgcgccccctcccgnccgcctcctgattggcccggcctgaagcccgaggaggccgcgcgcggcaactgcgcaggacgcgcgcccctactggctgccggcgccaggcaccagaacccggatctccgcaagcgcagcctcgcgccacatggagtgcagtttgccgccctccacaaaccttgcacctattcccctctcccttccctggaccggcgagtcttcttgtaaattaacaagtgacaagggagtgcagtcccttgcatataacaggcgcatagaaaatggcttatttctttgtacagctcttttcgcttaatccatctcttgaaatataagtaggttttgaaaaggttctgctttagtttgaggcctgcctctccttaactgtcggcctgtttccagtattggcgttttcaaaaactctgatgtaacaatcagtagttctgggtatctgggttcactttgggggttgctaaagctacatgttcttcaaaggaaccgaataactgatttaaggtgaagcaagtaaaaacaatttaggtg

SEQ ID NO: 80302 - DNA, 1957 bp, Homo Sapiens
  misc_feature (1217)..(1217): n is a, c, g, or t
aaggtagcgaggcctgggtggcgaattcggcacgagggcaagaccaagaagcctcccacgcacatcaccgtggtacacaactaccagttttttgagctggatgtgtaccacagtgacgggacacccctcactgcggatcagatctttgtgcagctggagaagatctggaactcatccctacagaccaacaaggagcctgtgggcatcctcacctccaaccaccgcaactcctgggccaaggcatacaacaccctcatcaaagacaaggtgaaccgggattccgtgcgctccatccagaagagcatcttcaccgtgtgcctagatgcaaccatgcccagggtctcagaagacgtgtaccgcagccacgtggcaggccagatgctgcatgggggcggcagcaggctcaacagcggcaaccgctggttcgacaagacgctgcagttcatcgtggcagaagatggctcctgtgggcttgtgtacgagcatgctgcagcggaggggccccctattgtcacccttctggactatgtcatcgagtacacgaagaaacccgagcttgtgcggtctcccatggtgcccctgcccatgcccaagaagctgcggttcaacatcacccccgagatcaagagcgacatcgagaaggccaagcagaacctcagcatcatgatccaggacctggatatcaccgtgatggtgttccaccattttggaaaagacttccccaagtcggagaagctaagcccagatgccttcatccagatggctttgcagctggcctactacaggatctacggacaggcatgtgccacctatgaaagtgcctccctgcgcatgtttcacctgggccgcaccgacaccatccgctcggcttccatggactcactcacctttgtcaaggccatggatgactccagcgtcacggagcaccagaaggtggagctgctgcggaaggccgtgcaggcccaccgaggctacaccgaccgggccatccgcggggaggcctttgatcgacacctgctgggcctgaagctgcaggccatcgaggacctggtgagcatgcccgacatcttcatggacacctcctacgccatcgccatgcacttccacctctccaccagccaggtccctgccaagacagactgtgtcatgttcttccggcccgtggtccccaacggctacggtgtctgctataaccccatggaggcccacatcaactntctccctggcggcctacaacagctgcgcggagaccaacgccgcccgcctggcgcattacctggagaaggcgctcctggacatgcgtgccctgctgcagagccaccccccgggccaagctctgagcccctaggactcaggcctgccaatgccacaacccaagcccaccctggggatgggccaccccaccagggctcagctcccttggttcccttcttcccttgggttccctctttccctgggccccccccaaatctactgagccacggaccgcatcctccagggggcctgcaggccccagccaagtgccttccgtgggtcatcccagcacctgccagggcccgacctggggctgagtgcagaggctgagcaggacgttaggcccgggcccctggcacgtcctccaccggtgcctcctctggggaagggaaccagccctccagagcaggagactggcaagagctctttgtctcaccagctcagccccggccactccctgccaactccatgaccaggccaccatctgtaccctgcttcccaaactcccaggacctggagacaggattgtctggggccgaggggccagggtgtgaggtttcacctccgttgcggctgtgctcctgtggataacattgctagcgagccgcctctggttccactcagcttggttcctgcccccgccctgctgtatgatattaatgtggaaggtcatcaataaaggggaattgtgttggtgaaaaaa

SEQ ID NO: 80303 - DNA, 1180 bp, Homo Sapiens
tccaaggtagcgaggcctgggtggcgattccggcacgagggccaacctcccgggcaccgttgcccgcccggggcccgctaccggcccaggccccgcctcgcgagtcctcctccccgggtgcctgcccgcagcccgctcggcccagagggtgggcgcggggctgcctctaccggctggcggctgtaactcagcgaccttggcccgaaggctctagcaaggacccaccgaccccagccgcggcggcgcggactttgcccggtgtgtggggcggagcggactgcgtgtccgcggacgggcagcgaagatgttagccttcgctgccaggaccgtggtgaagcctctgggcttcctgaagcccttctccttgatgaaggcttccagccgcttcaaggcacaccaggatgcactgccacggctgcccgtgccccctctccagcagtccctggaccactacctgaaggcgctgcagcccatcgtgagtgaggaggagtgggcccacaccaagcagctggtggatgagtttcaggcctcaggaggtgtaggggagcgcctgcagaaggggctggagcgtcgggccaggaagacggagaactggctgtctgagtggtggctcaagaccgcctacctccagtaccgccagcctgtggtcatctactcgagcccaggcgtgatgctacccaagcaggacttcgtggacctgcagggtcagctccgatttgctgccaaactcattgagggtgtgttggatttcaaggtcatgattgacaacgagaccctgcccgtggagtacctgggggggaagccactgtgcatgaaccagtactatcagatcttgtcctcctgccgagtgccgggccccaagcaggacacagtcagcaacttcagcaagaccaagaagcctcccacgcacatcaccgtggtacacaactaccagttttttgagctggatgtgtaccacagtgacgggacacccctcactgcggatcagatctttgtgcagctggagaagatctggaactcatccctacagaccaacaaggagcctgtgggcatcctcacctccaaccaccgcaactcctgggccaaggcatacaacaccctcatcaaagacaaggtgaaccgggattccgtgcgctccatccagaagagcatcttcaccgtgtgcctagatgcaaccatg

SEQ ID NO: 80304 - DNA, 822 bp, Homo Sapiens
  misc_feature (23)..(23): n is a, c, g, or t
  misc_feature (366)..(401): n is a, c, g, or t
  misc_feature (647)..(710): n is a, c, g, or t
ggaaaaggagagaaaaagatatngaagaaaaaaagaatattgtgaaacaggaaagagagcaactaataagcaaggaaaaaataatattaagagaagatgcaagccaacagctaataataagtagtgcattaaagaagagcggatataataacaaacatttaagtcttgaagatatttcaaatgataagggtgatatagccaaaaatctagtggatgaaaattcaaagaagcaggaagatgttctcctttggctagttgaggaatcaaatatgaaagaaaatgtagatagacagactatattaaaagaatcaatacaagtaaagttaaaagaatctatatcaagccaaacaattctggcagattttnnnnnnnnnnnnnnnnnnnnnnnnnnnnnnnnnnnncgatgttcagaagaattggtcaagcaagaaagaaaatatgaaaatacagataacaaaactgaattgggaaactctgatctaaaaggaaatctgaaagaacagtttccattgcaagaattaaagtctgatgcacaaaaagaagaaaaaatcatgaaacatgtcataaatgagaatacaggacaaaaaacccagataatattaggacataaccaagaaatcagtgaggtgaaaaccaatgaagagcannnnnnnnnnnnnnnnnnnnnnnnnnnnnnnnnnnnnnnnnnnnnnnnnnnnnnnnnnnnnnnncagaatggattattatataaagataaggatactttagttatttcagtgaaacaaagatcactctcactaacatcagaaaattccaaagatgtaagagaaaacgtaatattac

SEQ ID NO: 80305 - DNA, 855 bp, Homo Sapiens
  misc_feature (572)..(655): n is a, c, g, or t
  misc_feature (739)..(798): n is a, c, g, or t
ggtacccccacaaaacttttctaagtgtgtaatctgggtcagggttatttttcctttcaatttttagattccattttaattgtccattaaatttactcaaaacctaaattataacatcttaaaaataaatacacactgttgactgtaacttaatacattgccaccaactgtgaaaataaggcaccatttaggagaactattaacatttacaataaaacaaatactatttgatcactcaactgggaaccaggcactgtgctaggtaagaacttcatttactcattaaaaactgaaaagaatcctgaaaagtatgtattttctatattttacacagtaacatgctcaaggtcaaacaaggaaaaactagaacccaagttcatcttgctgagagtccataacactcgcaatgatctcatttcaactctaaaattctaccactcaaataattccaagatagtatcagaaaaatccatcttctcaaaactgtcttttcagatgcaaaggaaaggaaaataaaaacactgtctctcaaaaggcatggttactaaaaatagtattcttacaatgctgannnnnnnnnnnnnnnnnnnnnnnnnnnnnnnnnnnnnnnnnnnnnnnnnnnnnnnnnnnnnnnnnnnnnnnnnnnnnnnnnnnntaaaaaattaaccaggcatggtggcacatgtctgcagtcttagctactccacagctaaggcgagaggaccacttgagcccacannnnnnnnnnnnnnnnnnnnnnnnnnnnnnnnnnnnnnnnnnnnnnnnnnnnnnnnnnnnagaccttatctctagaaaaaaataacaaattaataataataatagtttacaaatgca

SEQ ID NO: 80306 - DNA, 1120 bp, Homo Sapiens
  misc_feature (68)..(244): n is a, c, g, or t
  misc_feature (248)..(248): n is a, c, g, or t
  misc_feature (251)..(251): n is a, c, g, or t
  misc_feature (254)..(254): n is a, c, g, or t
  misc_feature (263)..(264): n is a, c, g, or t
  misc_feature (267)..(267): n is a, c, g, or t
  misc_feature (272)..(272): n is a, c, g, or t
  misc_feature (344)..(344): n is a, c, g, or t
  misc_feature (386)..(386): n is a, c, g, or t
ggcgaagacgccaatacgcaaccgcctttccccggcgttgccgattcataatgcagctgcacgacagnnnnnnnnnnnnnnnnnnnnnnnnnnnnnnnnnnnnnnnnnnnnnnnnnnnnnnnnnnnnnnnnnnnnnnnnnnnnnnnnnnnnnnnnnnnnnnnnnnnnnnnnnnnnnnnnnnnnnnnnnnnnnnnnnnnnnnnnnnnnnnnnnnnnnnnnnnnnnnnnnnnnnnnnnnnnnnnnnaatntgnccntcgagccanngantcgcnacgagggcgaaacaggaggaagccagctctgtgcctggagggactcgccgccatctcagtctcttggcttgncagggcccaccggagaaaactgacgacccgtttctgtatccntatggggagaccaaccttgtgcctccgggagatccactctcccacctggaaacgcacgggaagccaagcctccaaaaaagcgctgcctcctcgctccgcgttgggattatccggaaggaactcccaacggaggtagtaccactctaccctccgcacctcctcctgcatcagccggcctgaagtcgcaccctcctcctccggagaagtagagaaataaatttctcccaccctaaaccagtctttgagtgattgcagtatgactccatttccctggtgcattcatataatagttcacctggtgaaaacaatgaagattatttacaatgctaccctgctttttctggtgtcctgaacctggaagttgtgctttttaagtcttatgatgtaatcagcacgatttcacttcctgaatttcgatgaattctaagacatgggcaagatcgggttgtaagacctctgagatttaaggccatgccctggatcatggtgaacttaccaaagcaaacaatgcctgtgagatggtcctgcagcagccaaccagtgaactcttttggtgacatcctgttcttgttgtataactttatattcctataaatccattaaggccccaataaagtttgtctctaagcgctgtgttagatctatatgactacatctagtaaattgtgaattttaagtaaatattttataagaactcctatgtaaagcattactaaaattagtgttgaaatatg

SEQ ID NO: 80307 - DNA, 1008 bp, Homo Sapiens
  misc_feature (52)..(90): n is a, c, g, or t
  misc_feature (94)..(128): n is a, c, g, or t
gaaaacagacatcgaaaaagactgtaagatctatggggctgcgcttagatgnnnnnnnnnnnnnnnnnnnnnnnnnnnnnnnnnnnnnnnccgnnnnnnnnnnnnnnnnnnnnnnnnnnnnnnnnnnncagtcgacggtaccggacatatgcccgggaattcggccattacggccggggaggaggaagccagctctgtgcctggaggggactcgccgccatctcaggtctcttggctttgccagggcccaccggagaaaactgacgacccgtttctgtaatccttatgggagaccaaccttgtgcctccgggagatccactctcccacctggaaacgcacgggaagccaagcctccaaaaaagcgctgcctcctcgctccgcgttgggattatccggaaggaactcccaacggaggtagtaccactctaccctccgcacctcctcctgcatcagccggcctgaagtcgcaccctcctcctccggagaagtagagaaataaatttctcccaccctaaaccagtctttgagtgattgcagtatgactccatttccctggtgcattcatataatagttcacctggtgaaaacaatgaagattatttacaatgctaccctgctttttctggtgtcctgaacctggaagttgtgctttttaagtcttatgatgtaatcagcacgatttcacttcctgaatttcgatgaattctaagacatgggcaagatcgggttgtaagacctctgagatttaaggccatgccctggatcatggtgaacttaccaaagcaaacaatgccctgtgagatggtcctgccagcaaccaaccagtgaactcttttgggtgacatcctggttccttgttggataacctttatattccctataaatcccatttaagggcccccaataaaaggtttgtcccccgcaccatcgctcgcccggcatattcttcctccaccccctcgctgttttcccccttcgcgccctccggaaaagtctctctcctaacc

SEQ ID NO: 80308 - DNA, 842 bp, Homo Sapiens
  misc_feature (77)..(111): n is a, c, g, or t
atagatcatcatatagggcctagctctccgcagccgaacgacgagcgcagcgaagtagtgagcgaggaagcggccgnnnnnnnnnnnnnnnnnnnnnnnnnnnnnnnnnnncagtcgacggtaccggacatatgcccgggaattcggccattacggccgggggtgcctggaggggactcgccgccatctcaggtctcttggctttgccagggcccaccggagaaaactgacgacccgtttctgtaatccttatgggagaccaaccttgtgcctccgggagatccactctcccacctggaaacgcacgggaagccaagcctccaaaaaagcgctgcctcctcgctccgcgttgggattatccggaaggaactcccaacggaggtagtaccactctaccctccgcacctcctcctgcatcagccggcctgaagtcgcaccctcctcctccggagaagtagagaaataaatttctcccaccctaaaccagtctttgagtgattgcagtatgactccatttccctggtgcattcatataatagttcacctggtgaaaacaatgaagattatttacaatgctaccctgctttttctggtgtcctgaacctggaagttgtgcttttaaagtcttatgatgtaatcagcacgatttcacttcctgaatttcgatgaattctaagacatgggcaagatcgggtagtaagacctctgagatttaaggccatgccctggatcatggtgaacttaccaaagcaaacaatgcctgtgagatggtcctgcagaagccaaccagtgaactctttggggaaatcctgtgcttgtgaataactataatatacctataa

SEQ ID NO: 80309 - DNA, 750 bp, Homo Sapiens
  misc_feature (21)..(21): n is a, c, g, or t
  misc_feature (43)..(43): n is a, c, g, or t
tgactcagcaaactcctcttntgtgtggtatctgggactcctntgggagggaacattttaaattttccattcaaaggggttccattggcactcttgcactgttattctctgcctaccctgagacttgagttctcctggactcgaatctccagccacagagtccagaagcccatacctccacattctgtgactgttcccaaacaccagggagaatttgcagaaaatatgtataaaaaccttgccattcttcgcaataaaaccccacattacaaactggtgaaaacggaggattttagcttgaacaggtttttcctctatttgaaatcaatcatttcccttttacaattttggagtgaagtttcaaaatcagtacgcacccactcccaggtttatccttatgtaaagtgccccctctgcacatgcaacatttaataaaccttgaaaatatgatgctaagtgaaagaagccagtcacaaaagaccacatgttgtgtaattccatttaaataaaatatccaaaatagaccaatacatagaaacagaaagtagattagtggtggcccggggttaggggagttggggggaactggagggatatggggtttacttcaaggtaatgaaaatgatctaaaacttactgtggtgctgtttgcacaactgtgcaaatatactgaaaaccgttgaattttacactttcaatgggtggcttctgtgatatgttattaatatttctcaataaaacttcaaaaaa

SEQ ID NO: 80310 - DNA, 601 bp, Homo Sapiens
  misc_feature (237)..(282): n is a, c, g, or t
agctaatttacgggggtcatatcagtcatgaatagccttttttaaaaatttaataatccctgaatacaaaaatggaaatggaaaatttataatcataacccccctaattgggagtattataagtttgtaatgctttaagcactgcctcttaagatgataaatttataagatgagaaattctatttaaactattaaactattgttaaataaatgccaattctataagttatattttcnnnnnnnnnnnnnnnnnnnnnnnnnnnnnnnnnnnnnnnnnnnnnnagagtgaaactccatctctaaataaataagtaaataaatagatgaatttttctcctaagcaaattgaaaaagcttcttgtgtactcaaaattgaacagagctaccttttgactaaaaatgtcatttttaatgagcagtattttctgaacacaaaattttgtacaagagtgtctccattgcattaatttaattttgttataattttttcccaatgaaaggaaaaaagtattttgtagctcctcttccttatgtaaattcttaacatatatttttgagaaatttgcattttttaaagtaaaattgttatctttggatactt

SEQ ID NO: 80311 - DNA, 919 bp, Homo Sapiens
ggatttgaagaaacctttatagatatagattccattttacaagaagggaaaattgaggcctggagcagaaggaagcagtggggtagagtcagaaccagcatccttaagccgggcagacttggccttagacagacatgccttacttaggtccagcagatgctaccaggaaggtatggctggcagtacctgcgtctgagctcaggacttcagaccaagatggaagtcccttagaccaataacataaaaatcactttttaactcaggtgctgtgggtagggagcaagggcagctatactgtcctttcagaagctctcctgggctgtggaaagtgcccacgagcctggcagatcacggaggaaggaggcagaagttccaggcccagaacctgggtcccaggctgcattcagagaggattccttgaggccctggcagccaggaaccctgttttatgtgccccgaaggctgtaatgaaaacattgatgaccacagtgaagaagaccaagatggtggctgcgttgttgagctggttgagtcgccactgcttttctacctcattcaggttcagccgtgcaatgaccacgagcaggacaccgatgaccacctgcaggagcagagagaggctgatgagggtgaccagggtggtgtagtagtgagaggatggtccctgctccagcaccgccttcagccgcatggcgttggacatgaacagggccacgtccagcatgctctccgccacgctcttcttggtggcgtaatggttcaggttgatgggctggctcctggggtcggagcttccaggttgaaggtcgatgttttctcttgctaattccatctcgctgccctcaagtcccttcacacgcaccgggtgccgggaacagactgcgtgggctcctccaggctccgccgtctgagtctcccc

SEQ ID NO: 80312 - DNA, 1005 bp, Homo Sapiens
  misc_feature (37)..(37): n is a, c, g, or t
  misc_feature (49)..(478): n is a, c, g, or t
ttttttgatctctcagggggcggacttatgggaaacnccagcacggcgnnnnnnnnnnnnnnnnnnnnnnnnnnnnnnnnnnnnnnnnnnnnnnnnnnnnnnnnnnnnnnnnnnnnnnnnnnnnnnnnnnnnnnnnnnnnnnnnnnnnnnnnnnnnnnnnnnnnnnnnnnnnnnnnnnnnnnnnnnnnnnnnnnnnnnnnnnnnnnnnnnnnnnnnnnnnnnnnnnnnnnnnnnnnnnnnnnnnnnnnnnnnnnnnnnnnnnnnnnnnnnnnnnnnnnnnnnnnnnnnnnnnnnnnnnnnnnnnnnnnnnnnnnnnnnnnnnnnnnnnnnnnnnnnnnnnnnnnnnnnnnnnnnnnnnnnnnnnnnnnnnnnnnnnnnnnnnnnnnnnnnnnnnnnnnnnnnnnnnnnnnnnnnnnnnnnnnnnnnnnnnnnnnnnnnnnnnnnnnnnnnnnnnnnnnnnnnnnnnnnnnnnnnnnnnaagaattcggcacgaggccaatgaccctgctctgtacccttaagagcagactcagttgggaatgagttatccaaatatagggtgtacatgtagtcaggagagagcctcatacagctttgcctttggcagaatccttcaaacctctttgtcttcctacttcttgatattacaaatcatgagcctttcacatgcattgactctaaagaggtgggttcctggatagcagaagtagataggaaggcatcattgacatttactgagatggattgaatcagagggtgtaaattctgctccatcaatgttgaaaaagactagcccaccccaaaggtttatcactgtcaccatgtctaatgtctattctggaagaagctgaagaagtctgcctttgtttagggaaccggttccagaatcagaggggttgaggatataaaagacccttgcacaagagttggtatttaccctgtcagatgctgctaccaagatttggattgtgtacagtcgaggattaaaaatgacttttaagatgc

SEQ ID NO: 80313 - DNA, 1770 bp, Homo Sapiens
tttgatttcattgttactattgttgttcttaaaaatgtcctatcttttacaagagcctttgggaaaaacctccaggggcaaacctctgatgtcttctttgcggccggtagcttgactgcagtactgcattcactcaacgaagtgatggaaaatattgaagtttatcatgaattttggtttgaggaagccacaaatttggcaaccaaacttgatattcaaatgaaactccctgggaaattccgcagagctcaccagggtaacttggaatctcagctaacctctgagagttactataaagaaaccctaagtgtcccaacagtggagcacattattcaggaacttaaagatatattctcagaacagcacctcaaagctcttaaatgcttatctctggtaccctcagtcatgggacaactcaaattcaatacgtcggaggaacaccatgctgacatgtatagaagtgacttacccaatcctgacacgctgtcagctgagcttcattgttggagaatcaaatggaaacacagggggaaagatatagagcttccgtccaccatctatgaagccctccacctgcctgacatcaagttttttcctaatgtgtatgcattgctgaaggtcctgtgtattcttcctgtgatgaaggttgagaatgagcggtatgaaaatggacgaaagcgtcttaaagcatatttgaggaacactttgacagaccaaaggtcaagtaacttggctttgcttaacataaattttgatataaaacacgacctggatttaatggtggacacatatattaaactctatacaagtaagtcagagcttcctacagataattccgaaactgtggaaaatacctaagagacttttaaaaataggctttcttatatttgatatttggaagaaaaagccgtaaggtgtatgtagaccacttaatcactaaatatctttgcctataggactccattgaatacattagccattgataatctacctgtttaaatggcccctggtttgaactctcaagctttggaagacctacctgttcttccagaagagaacgttgaaagtgccatgtttcccttttgcgtgatctctgttgatggcactctggaattgtttcagttaagtcattttagacatagcatttattatcactgtggatctctacttggttgggtgttatgaattctttgaagaaatatattttgaagaggtgtgcgaggaaggaatacattttataaaatgttgtagtgaagcccacaattgacctttgactaataggagttttaagtatgttaaaaatctatactggacagttacaagaaattaccggagaaaagcttgtgagctcaccaaacaaggatttcagtgtagattttgtctttcttgaacttaaagaaacaaatgacaaagtttgaatggaaaagcctgctgttgttccacatctcgttgctgtttacattcctttgtggagcctacatcttcctaagctttttagcaggtatatgttgaacacttctgtttcatggttgagacagaatcagaggccatggatactgacaactgatttgtctgttttttttctctgtctttttccatgactcttatatactgcctcatcttgatttataagcaaaacctggaaaacctacaaaataagtgttgtggtttatctagaaaaatatggaaaatattgctgttatttttggtgaagaaaatcaattttgtatagtttatttcaatctaaataaaatgtgaattttgtttaaa

SEQ ID NO: 80314 - DNA, 754 bp, Homo Sapiens
cagccaacatgatttgactggaccttttacaggaagctagagataaatttctgaagagaactatctgctattatataataatgttttaaattcaaactagtaaattttagtttgtcttcagagtttaaaaggttttcattttgtacataattatacaatatttatcatttgtattttccacttcatttcttttaaaatatctttaatactgaaatgttcttttaattttaaaaagaactgagatattgtcttgtatacttatattggccaaagttttcttttcctccaccatacatgtctatgtgatttaatcagtaaattgtactgtaatgagttgctaagaagacaaatcagaagattggaggaacaaaagatatctttacagatttttcatttgagcatggagtgagaatagaaagaccagtttcaggcttatgcacttacgtggctcatgcactttatgtatatgttccaggaaaatctggcttaaaaatactggtattgtttacatgaagcagtgaaaggtttttgaataactacaaatgtagttctatatgtatataccaaatgaatttctgttctgtgtctctctgttttatgttatgaagccattcgctcatatacaataatctgtcaaggactttaatcatacttgttccaaagagtagtaaccggatggaattctggtatttacaggcattggtgctagatggtacattttatgtgttaaaataaacattgtttttgagaaaaa

SEQ ID NO: 80315 - DNA, 513 bp, Homo Sapiens
  misc_feature (34)..(34): n is a, c, g, or t
  misc_feature (47)..(47): n is a, c, g, or t
gtaaaaataaaataatggtactttcatttataancaaggtgtttttntcaagaaataatccatgctaaaatggatatttgtgatcctgaaatgtttactaagcattgtaaatttatttataactgccatctccaactacatccttatgatgtttttaacaataaaattaaaacaactgttaaactaaaaaccacaccgttttccagtacttgatctctgagctacaatactcactaaatataattttccaatcaaaatattctattctatattctaagggttaatatgtgattatagtgtccacttgccaccatttttttaaatcaatggacttgaaaagtattaatttagatggatgcgcagatataccctcagttcagtcatagattggagtttgcatataataatgtaaatgtatgtcgacactattctaaatagttctattatgactgaaatttaattaaataaaaaaggttgtaaaatgtgatgtgtatgtgtatatactgtatgtgt

SEQ ID NO: 80316 - DNA, 715 bp, Homo Sapiens
atgttaaaaatatatatttatttcaatttttagatgcttcaactgttacaggccatcatgatttaaataaaagaaaaaacatttgagaaagaacaagaaccttttgtttagagaatgaaatataaattgttaataaacaaagtccacaacaatctcttaaaaaaagagttactacagttatttctcttgtgaatatggcctggaagaatcacttttcccccaacttaagggaggtggagatttatctctatccaagctttcagtataagcagataagaagtaattctcattttcttgagactgacttgatgaaagggcatatggtgtccccaaaaatgtctgatgagtgagaacattaaaatgactaaactgatgggacatatttaattgactatgataaacctgaaagttactatatgaatcttgttctgttgaattgctgttctctccttcagagcatactatatcaatagaagttctctcttcagaatcaaggtaagtcttatcttctaataaactgttttgcacatcaggagacgattgcaactcaatttgagtattctttttttgatctgttccacgtgatcctttggtctctttctcccatatttctgaatgaaaattgctgcatacttctatatgtgagatttcatcccctgaatccagagacatatcctcttcatccttttcatcgttttctaaaagagctacattt

SEQ ID NO: 80317 - DNA, 445 bp, Homo Sapiens
tcccagaaattaaatgttttatatttttgccacaagaaaacacgtgcaagtatgaaactttttgtaaggtcctctgagctggctgcactatggtcaagccacggtgacattcccccacccttgtgataatgtactttgtgatactcctgtccttgtgaatgtactttgtaacattcctccccacccttgtgacaatacatcctccctgcccttgtgacgatacaccctccctgcccttgtgaatgtactttgtaacatcctccccacccttgagaatgtactttgtaatatccatcccctgcctgtaaaaaattgctcctgactacaccgcctatcccaaacctataagaaccaatgataatcccaccaccttttgctgacccctttctcggactcagcccactcacacacaagtgaataaacagccatgttgctcaaaaataaa

SEQ ID NO: 80318 - DNA, 750 bp, Homo Sapiens
  misc_feature (60)..(60): n is a, c, g, or t
cccaggacagccccgccgccaacaggccagggggcccagactggcccacgtccccatgcntgggtgctgtgaggcctgatgaccaggctggaaaaacccaaggttggtccagggcagtgccttcaatcaagacctcccattgctgaacccacaaccagggctacccagaggcctgaccctgccagagtccatggctgcactgctgcccagacactagctgaacccaaggacaccagcgcccaaggacagctcctggaggaggccagcccagcaggaaagtctgtgagcaggaccccattcaccctgcggcagacgggcaccgtactggccacgggctgacgccggccacacttcccctccgagggccagctgagcacagcaggcatgaaagcaaacagagatacagcagtgagtcagttccttggagagggcagggactccgcccaccctgtgttcagataagggccagtgtgtgtccctgaaggtcaggccagccgggggaggggtccatgctgcgaaaattcagcctgcaaaggctcctctccccacttgatcaggcccagaccaggtgggggttggcgctggcctgtgttgcaggggacaagggcccacccaggccttggaacataagctctgcccctgcacaccctcatgtcaccacacctgggatggagacatcaggtggcccagcgagagatggaggactgatcctggaacgtgaagcagctttcaataaaccagctcctgggg

SEQ ID NO: 80319 - DNA, 647 bp, Homo Sapiens
  misc_feature (39)..(39): n is a, c, g, or t
gagaccccgaaagcagagtcaaaagacggttcaatttcntatcccccaaaccgccaagatgtgcccctgcctatgccaccgctatgggggccgcctcccgatgcctagcgaccaggcagtgatgccctactgggtgccccaggtcctgaggtctcagcagcagatagtcaggaggcagcagagtttgaaaggcatccaagcacccctgctggatgcatgctgctggcacaactgctggcggatctgcggtgatgagtgcctgttgtccaagttccagcagctccaggccccctaccaggaccagctaccggctcctgcagcgcgtctgctgcccctcggcctcctgaccctcctccaggccatcccgagggtcatcatgcccattcgccagtgttttggggtctgaagttggaatcttcagctactgtcaagaacagccacaaaaatgtgtcacgatcaagatctttgagagtccaccaatcaggaggcgtctgtgacagtcgctgtcttctcagaacagaatccacacccaggattcaactccaaatgatttctcatcaggtgattcttggttgtagcaaagttcatgtgaatgtgggtgagtttctgttatgaatgtggtcaataaatgttatttgtgaaactct

SEQ ID NO: 80320 - DNA, 771 bp, Homo Sapiens
catctgctgtgaatgccagaccagattcgggggccgcctgcctgtgtccagggtggaagcagcactgccttactgggtccctctgtccctgagaccccgaaagcagcacccctgctggatgcatgctgctggcacaactgctggcggatctgcggtgatgagtgcctgttgtccaagttccagcagctccaggccccctaccaggaccagctaccggctcctgcagcgcgtctgctgcccctcggcctcctgaccctcctccaggccatcccgagggtcatcatggccattcgccagtgttttggggtttgaagttggaatcttcagctactgtcaagaacagccacaaaaatgtgtcacgatcaagatctttgagagtccaccaatcaggaggcgtctgtgacagtcgctgtcttctcagaacagaatccacacccaggattcaacccaaatgatttctcatcaggtgattcttggttgtagcaaagttcatgtgaatgtgggtgagtttctgttatgaatgtggtcaataaatgttatttgtgaaactctaaactggccacctcttaaatgatgacctctgatttcccttcattaaggggggacttgtccccatgtccgtgtccctgggggagggcagctatttccgagtgtctcttcagggacagcagacccactggatgagggcccgaaaatggtttcagcacctgtgtcaggtgggtctccctttaagtagcataacattgtatatgtgaattgaattttaaaatc

SEQ ID NO: 80321 - DNA, 1309 bp, Homo Sapiens
  misc_feature (577)..(577): n is a, c, g, or t
  misc_feature (722)..(722): n is a, c, g, or t
  misc_feature (1047)..(1159): n is a, c, g, or t
cgaatgactccccaaatacatacaacagcatagacacactttatgacacctcagggatgggaatcagcccaactgagatagagagtgagcggagggtccccagcgggtgatgaagccacaaggccagtggagatagggtttgcaaagagtctgtgggtccctttcattttcccacagcagatgtgttcttgctgaaaagggaagggcatagccctgagttattctgcagtaaggtatctgtctgtgagtatacaccactctcatcttccccctaaagatagtttaaaatagccctgtctactgtccagcaagttcaaattacccagagccaccgtatacaattgtataggttctagatgtgaaggctctaaaaatgccctaaagctgtgtttctggatgaggcatcattgtgctttgcaaacagcactggactgggaatcagggagatgcattttgtccactagctttgaccatgaaccagtcctccacctctacgagcttcaatttcctctaagaaaatgggttaccagatagtagtttctaataccccatcccattttaaccacctatgattcanactatgattatattcctggagaatctcatggtaccaaaatatttcagaaacatgttttgaatccaacaagtatattccactgaaattgatgacaaggcaaaaatctttatttgcgcattcaattgtccttttaaaatatgtcctntaaatgcattaattggttagtaaataactgaaataatttcacagtctaataagtgcacattagaatccaacacagcttctgagtgttctacttaagaaaagatgaaaccttaacatttttatgattcttagacatttataatattgccagttcattagatgaatatattgccatacttcatgactgttcaaagttttgttatcagcccaaatatttgacattctggaaagtgagagacatctctgtgggctaaccttccttcttgtgttcacacagcatttcatcagacctatataaaaaaatcagcacggcattgtggtttatnnnnnnnnnnnnnnnnnnnnnnnnnnnnnnnnnnnnnnnnnnnnnnnnnnnnnnnnnnnnnnnnnnnnnnnnnnnnnnnnnnnnnnnnnnnnnnnnnnnnnnnnnnnnnnnnntttaaaattcagcctggcatggtggcatacacctttagtcctagctacttgtgaggctgaggtgggagatcacttgagcccacaagtctgagactgcaatgagctatgattgtgcactccaacctgtgcaacacagagagaacctataag

SEQ ID NO: 80322 - DNA, 488 bp, Homo Sapiens
ggtagtgtggaaccatttgtaccgtagaaagaatagctggaaatatggaactccaatgtggcaatacagtaataaacagaaggaatgagtcagtaggataatatattcgagtgatttctgtatatttcagttataatgttttttatatagtgtatatttcagttatttcagttataatgtgttttagaatgtggatttaagccaccttctcaccctttgcaccagtagctttgttaaaacattttattatgatcaaataacaagcctgttgcttttaagtaatctaagtattaacagaaggtaagtcttcaacttctccctgttctcacctgggccaagatcaattttctaaataaaaaatagctttgtaatttgtctccaacaaagaatgggaaatggaagggaacacaaaactgtggtcctgacaatactaattctacccgttttcaaataagaataattaaacttataaagtgatatactgaaaa

SEQ ID NO: 80323 - DNA, 713 bp, Homo Sapiens
  misc_feature (78)..(78): n is a, c, g, or t
  misc_feature (601)..(601): n is a, c, g, or t
aatcaaatactgcagtactgatttaatcagtataaaatcgaaagagctttagatctgtaataaaaatccaaatttggnggaagggcaaactttaaaacagcagccaagtagagaagggttggggaagggagaggtgagtgaacaggcacattggaactgcggggacatgtaactgaccactgtcaaaccagtgtaagtttcttggtttctcatggaaaacattgtatacacctatttttcttccttccatacttaagtccatcagtgtccaaatacgtctgttccatacttcgtacgacttttgtagggatattacaacacagtattgcatttactccagttcctgctacatgtgaaaaaattagatgatttcaaatactttcttcagctccacaataagctgccagtcactcttctgcatttcatctatgaaccagtctttgagtgcatcaatggactgccggctgatcagggataggttctatttttacacaaacttcttgtcctttttttgcaacatccacttgtttatggtttatttcaatacttgttactattccgatgtcaacaaaatttttgcttgggacacacatgggtgtcncctgtttcacctgacctgcttccaccgtcacccccatcactatcggatctcgagaataaaaatgtactgagggaggatttttatcttgcagggaaatactgctatgtgctta

SEQ ID NO: 80324 - DNA, 1374 bp, Homo Sapiens
tgcatgtgacatatagacagtgttaaaaaaagcacgctggtccggtcggaattcccgggatatcgtcgacccacgcgtcgaatttttagtgcagaaattatttatcatttatttgatgcctttacaaaatatagacaagactacaagaaacagaaacaagaagaatttaagcacatagcagtatttccctgcaagataaaaatcctccctcagtacatttttaattctcgagatccgatagtgatgggggtgacggtggaagcaggtcaggtgaaacaggggacacccatgtgtgtcccaagcaaaaattttgttgacatcggaatagtaacaagtattgaaataaaccataaacaagtggatgttgcaaaaaaaggacaagaagtttgtgtaaaaatagaacctatccctggtgagtcacccaaaatgtttggaagacattttgaagctacagatattcttgttagtaagatcagccggcagtccattgatgcactcaaagactggttcagagatgaaatgcagaagagtgactggcagcttattgtggagctgaagaaagtatttgaaatcatctaattttttcacatggagcaggaactggagtaaatgcaatactgtgttgtaatatcccaacaaaaatcagacaaaaaatggaacagacgtatttggacactgatggacttaagtatggaaggaagaaaaataggtgtataaaatgttttccatgagaaaccaagaaacttacactggtttgacagtggtcagttacatgtccccacagttccaatgtgcctgttcactcacctctcccttccccaacccttctctacttggctgctgttttaaagtttgcccttccccaaatttggatttttattacagatctaaagctctttcgattttatactgattaaatcagtactgcagtatttgattaaccaagcttctgcagatttcgtgattcttgggacttttttgacgtaagaaatacttctttatttatgcatattcttcccacagtgatttttccagcattcttctgccatatgcctttagggcttttataaaatagaaaattaggcattctgatatttctttagctgctttgtgtgaaaccatggtgtaaaagcacagctggctgctttttactgcttgtgtagtcacgagtccattgtaatcatcacaattctaaaccaaactaccaataaagaaaacagacatccaccagtaagcaagctctgttaggcttccatgttagtgtagcttctctcccacaagttgtcctcctaggacaagaattatcttacgaaataaactatcattcaaatagcttgtatgccagcacctggtaacagtagagattcttataca

SEQ ID NO: 80325 - DNA, 1089 bp, Homo Sapiens
  misc_feature (173)..(173): n is a, c, g, or t
  misc_feature (180)..(180): n is a, c, g, or t
  misc_feature (193)..(193): n is a, c, g, or t
  misc_feature (262)..(262): n is a, c, g, or t
ctccttaggattgcctgagccagatcgcccgaggcatctatgtaccagatgttgattccttctttgattcccactcactccgaagtgtggatacagcgtgaccacacgcccgccctgtatttctatattaggaataggcacactgtactgtttcatttctatttattattccnccagtantaagcacctagangcataaccaaaatactagaaaccaaaacccaacaggtaatttatatctagttctgaaactttttgagtncatgggtcacatctatcatcttggtttccccattgtgctgtaagcatacagtagatagacaatgttttaaaatttcaactgatcttatcccacccaaacatctccagaaccctaaagttaaaaggagttagcctcctgtaacaatttgatacattaatattaattgttaaatgttgagcttactgtttaaaataattttctggtctcttgcaatagtgagaaaacaaagggaaaagattccgagtcatatcaaactgcagctgggctgctcctccttcattgaagtgattagcaagaattatctgaaacaaagaataattcatataacagttgtctttattatcacagcccaaaaacagtctattcttacttacttcttggtagatgtatacatccagcttctctacaagcatttgccagaaaattttaaataaggagaaacaaagctgctgctccaactgaagtaaatggtctcgtaacgtcagcagcaacgggcaagccgaactggacagggacatcactgcctgctctgactgagatggcaaggacaaccatctggaaaaaacacatttttaccaaaaaattttcatcagtttctatttttcaagtttttaaatcattttaaatttgaggaagtgttctgtcctagggcattttggataagaaaaaatatacagcctaacattaaaagctctatcagaaaataaatgtacctgtatttatattttcactctcaaaatactcttgtaatatggggatatccaaaagtatcccccaaattttaatatgtgaattactgatataaggcaattacaatttaaaatgtc

SEQ ID NO: 80326 - DNA, 361 bp, Homo Sapiens
gaaaaaggtttctttggtttttgtttctaagaaagaggaagccaattggatttcaagttatatgatgaaattctgaattaatgaaactggaaaactttatagaattacttattatcttggatttatggtgttattaaaatgctgaccatatttccttcatcctcttgttcctaaggaaacaaaaacagaaaacgaaacaatgaaaactcaattctatttacaagtataaatgctgagtatgtctgttgaagacgagcagagatattaaattataaccaactttcaatttcctgtgctaattaagggaaattctgttgtggataatcaaacatagccaataaatttttttaaaactccaaaa

SEQ ID NO: 80327 - DNA, 729 bp, Homo Sapiens
  misc_feature (411)..(438): n is a, c, g, or t
  misc_feature (443)..(542): n is a, c, g, or t
  misc_feature (643)..(643): n is a, c, g, or t
  misc_feature (713)..(713): n is a, c, g, or t
aaatgttattagcattttaaaagagtacaggccacttgatttgtacagcattcctcaatctgggctgatctggagttccttcatgactagattcaggtaatacattttttggcatcaatactacataagtgattatgtcattttgttttattattaggattgttaacttttaccacttggataacttagtgtccatttgctttctccactgtgaagttaccatttcattttccaagtaaggaggttattattgtcccaaaatttgggcatcccttgatgactcttgcctcaattaattgtagctatgacagttatggtgattttctgatgttatcattccttttatatttattagattttaatcagctgtaatggtgggcttgaccttgttgtttattacctccttaaaannnnnnnnnnnnnnnnnnnnnnnnnnnnaaaannnnnnnnnnnnnnnnnnnnnnnnnnnnnnnnnnnnnnnnnnnnnnnnnnnnnnnnnnnnnnnnnnnnnnnnnnnnnnnnnnnnnnnnnnnnnnnnnnnntgagctactgtgcccagctgattgttcattatctgaatggactcatggattttattcaatgggttataagccattactatcatatttatttggatgttcanattgtcccagattcagccaatgggaacttcttcaaggtgacatctttcaaggtaagtttaatattctctnggtataagtaaagatg

SEQ ID NO: 80328 - DNA, 1051 bp, Homo Sapiens
  misc_feature (713)..(726): n is a, c, g, or t
  misc_feature (866)..(898): n is a, c, g, or t
gggagcacttccgggttgggagaaaggtggcggtgctttcggagggaataaaatggaaggagaatcaagcagatttgaaatccacactccagtttctgacaagaaaaagaaaaagtgttctatacataaggaaagacctcagaaacattcccacgaaattttcagagactcctccctggtgaatgaacagtctcaaataactaggaggaaaaagaggaaaaaagatttccagcatctcatttcttctcctttgaaaaaatccagaatctgtgatgagactgcaaatgccacttccacactcaaaaagagaaaaaagagaagatatagtgctttggaggtggacgaggaagcaggtgttacagttgtccttgtggataaagaaaatattaacaacacaccaaagcattttagaaaggatgttgatgttgtttgtgttgatatgagcatagaacagaagttaccaagaaagcctaaaacagacaaatttcaggtacttgctaagtcacatgcacataaatcagaagccctgcacagtaaagttagggagaaaaagaataaaaagcatcagaggaaagctgcatcctgggagagccagcgggcaagggacaccctgcctcagtcagaatcccaccaggaggagtcctggctttctgtgggtccagggggtgaaattacagaactaccagcatctgctcataaaaacaagtctaagnnnnnnnnnnnnnngtccagtaaccgggaatatgagacactggccatgcctgaaggatcgcaagcaggcagagaggccgggactgatatgcaggaatcccagcctactgtgggcttggatgatgaaactccacaactactaggacctactcacnnnnnnnnnnnnnnnnnnnnnnnnnnnnnnnnntccaatcaccaggaatttgagtcattggccatgcctgaaggatcacaagtgggcagtgaggttggggctgatatgcaggaatcccggcctgctgtgggcctgcatggtgaaactgcaggaataccagcacctgcttataaaaacaagtctaaa

SEQ ID NO: 80329 - DNA, 558 bp, Homo Sapiens
  misc_feature (43)..(43): n is a, c, g, or t
aaacttagagaaaacaatgaagacgtgacaacaccagaaacangaacatctctctggccagcctgtgctgaccagtacacagtgaatcacacacagaaacgtatgtcattccggtcggtgtctagaagctccaccgcctagaaaacagactgcaaataaataaagtgcatggagaccccatcacgcagcaaggccagagaaggggcgggtcaccgcctacaaacgtcaatgcctttctgctcggggcggggaaagtcaagtcgccgcagcagaattccctccttctggtttccccctcttttgccaatgtgaggcaacaggtagtccgagctcaggtagtttctggagcccaattgtaggggcctgttcagtgcatttctgcgcgatccggggtcccgggctgagaccgcggccagggccagggctgggccttcgtgcccgggcggcgtaggtctagagtccaggggcccgggccgccccacctccgccccccgccgcgatccagctgtccttcatgcccgcgacccggccgggggcgggcggggacactgtcgcccc

SEQ ID NO: 80330 - DNA, 600 bp, Homo Sapiens
  misc_feature (454)..(494): n is a, c, g, or t
atgatcaatttaatctgaaacaaatggttatttcttttataatccatataataaatttaaaatctaaaatgtaaaattttgaacacaacactggaaagggtatccacagcaggaagtccccagttcacctccatgactacagggcagctttgcacagccctctgggcgcactgtgtgcctctgcccagaagggggcctcgccgttccaccagaagctcagctccaggccctggaggggctgctgctcctcagttgcatttcttcagtagattcatttccttgatgcaaagcatctgtatttgttggttctgtcatttgagcgatgtctctgacttgtttgttttgaattacattacaggctggaatgtaattgtggtgaaagtatttttatattgctgagagtagcagctaatcacagttacatgcttcagaggacttataattgcttggtttnnnnnnnnnnnnnnnnnnnnnnnnnnnnnnnnnnnnnnnnnttaactgcatttgaaaagttttatggagaatatgcatgattttaaatctgtgataatgttacatgcaccttcaatttcatccactttaaaaattatcttctcattg

SEQ ID NO: 80331 - DNA, 630 bp, Homo Sapiens
ggcacgaggcgacgaggacgtggccgaagggcgtggagaggagagctcggggctgctgccacagatcatgctgagccgccagcagctccacctgcccttggctttgctcatccgtggaaatgacaacagcgtgaaaacggcagatgatgtacaaggattatgatgaaaatagtcttgacctcacggaccctctgagaggttcttgaccgttgcaccctcaagggcccacagaccgcactttgagaactgctgcttgaatgcaagctattagcagtaggagtgtcaaggacagggcagacttcaggattaactgttccttctcatctttaccagattgtactggttttgtctcaaaatacaaaaatagagtgtttattatgtaaagaaaatcaaatgatagaacagctgagaacagctggatcaagagcacagagcggaagttcctcttcatcccactgctgtcctggagtcttcctcaggacccactgctcctaactgtatctttgtagatcattttctatgtgtttatttatttatattttaaaacctagtttgtgtataagcaatcttttttaatccacaaatgtggaatcttattctagactttgaataagattttcaagtattagt

SEQ ID NO: 80332 - DNA, 731 bp, Homo Sapiens
  misc_feature (41)..(41): n is a, c, g, or t
  misc_feature (71)..(71): n is a, c, g, or t
aaaggtcggaaggaccaagatatgtccgccagcctaagtgngacgaacaaccaagttgtgcgatgcagctntaaaggggctggtgattgacagaatggtgtagtagtagatggggtggagccgctgggtggggtcgagactggcagctgagagataccaaaaggaagaaaaaagaaaaccattgctcttgatattgctaatgccgggggaggtaagctaacgagaaagtagggaaaaggaaggttttagagttcacctccactccttcccctggctaacactctttacactcttctgccttcccttgagataattaaaatagactgtacaccggccctagtcggtgcccattccccctaactcttcactcaactacgtgtgtagtccgagggagtgaggaccccgggtccaagagctcaatcccggccccgccccgtcggcccaggccccggggctgggaggagaggatgccttcggaggcgcagaatccgaaaagatgtggttggagctggaagctgttatcctcagcaaactaatgcaggaggagaaaaccaaatactgcaagttctcacttataagtgggaactgaatgatgagaacatttggacatgaagctgggcagagaaatcgagctgcaaaatgacctacagatattacagttttattcttggaaaatggaggttgtctattagtgtgatggtaacaaccaactaataaaatttggagactag

SEQ ID NO: 80333 - DNA, 1209 bp, Homo Sapiens
  misc_feature (1156)..(1165): n is a, c, g, or t
tttatagtaacactctagctggagtctgggtgacaactggcagcactccagtactgagaagaaaccggatacacagtggcaagcaggttggtgtttatttttatgacaatggacatggagtgctagaagacaatgatatctataatcatatgtattcaggggttcagataaggactggaagcaaccccaaaattagacgcaacaaaatctggggaggacagaatggtggaattctagtttataattctggtctaggctgtatagaagacaatgaaatatttgacaatgcaatggctggagtctggattaagacagatagtaatcctacactaagaagaaataaaatccatgatggaagagatggtggcatctgtatatttaatgggggtcgaggtctccttgaagaaaatgatattttcaggaatgctcaagcaggtgttctcatcagcactaatagtcatccaatcttaaggaaaaacagaatatttgatggatttgccgcaggtattgaaattacaaatcacgcaactgcaacactagaaggcaatcagatttttaacaaccggtttggaggcttatttttagcatctggtcgttaatgtgacaatcgaaagataacaaacataatgaacaatcaagatgccatagaaaaggctgttagtagaggccaatgtttatatacaaatatcaagttataccagctatcccatgcatgatttctacagatgtcatacttgtaacaccacagatcgaaatgccatatgtgtgaactgcattaagaagtgccatcagggacatgatgtagagtttattagacatgataggtttttctgtgactgtggtgctggaacactgtctaatccttgtacattagctggtgagcctacacatgatacagatacactatatgactctgctccacctatagaatctaatacattgcagcacaactgaattcccttccctaaagaaaaagtcctgccattgtaacatcataacttaaaacactttttttggaaaaagatttaaaatatttgcccatgctacagggaagagactgtattaaaattggataaccccagggcagttgacaccatgaagctcaagctacccaaaaagaaagtgggcattatatttgactcaggatcccccaaannnnnnnnnnttttaaccctttactggtggtaaaaaattggaaaggggcaagaa

SEQ ID NO: 80334 - DNA, 610 bp, Homo Sapiens
tatcaagcaagtgtgctacatatattacccaattactttccccctcacttttctaatatttgggtttcattttgctttaggtttttctgtgactgtggtgctggaacactgtctaatccttgtacattagctggtgagcctacacatgatacagatacactatatgactctgctccacctatagaatctaatacattgcagcacaactgaattccttccctaaagaaaaagtcctgccattgtaacatcataacttaaaacacttttttggaagaagatttaaaatatttgcccatgctacaggaagagactgtattaaaaatggatacacaaggtcagttgacactatgaagctcaagctaccaaaaagaaagtggcaatatattgactcaggatctcaaagctgggtgttttagcattactgtgtaaagacttgaagggacagaagtgaagaaaataagctgcaattttgtacagataccaacttctgaaaagctggtgtttttacaactagcattgaatgcagtccaatttgcagtagtaatcttcaatagacaagcagctttgttgctgcctttatggacatgggtaccaattgcttttgtaatat

SEQ ID NO: 80335 - DNA, 1842 bp, Homo Sapiens
  misc_feature (1103)..(1230): n is a, c, g, or t
  misc_feature (1322)..(1330): n is a, c, g, or t
  misc_feature (1562)..(1607): n is a, c, g, or t
  misc_feature (1637)..(1698): n is a, c, g, or t
ctcatgaatgctgtcagtcccctaaaaagtattgtcgcaaattcaaataaaatttatttttccgccattgccaaaacacagaagatttggactgcgtatctcgaggctataatgaaggttgggcagatgcagattctgagacaacagattgccaatgaattaaattattcttgtcggtttgattctaaacatctggcagctgctctggagaatctcaataaggctctcctagcagacattgaagcccactatcaggacccttcacttccttaccccaaagaagataacacacttttatatgaaatcacagcctatctggaggcagctggcattcacaacccactgaataagatatacataacaacaaagccgcttaccctattttccaattgtaaactttctatttttgatcgcccagttgccaaaacttcaatacaacaaaaatctgggaatggtctgccgaaaaccgaccgacccggttgattggccaccacttgtcctgggactgctcactctgctgaagcagttccattcccggtacaccgagcagttcctggcgctgattggccagtttatctgctccacggtggagcagtgtacaagccagaagatacctgaaattcctgcagatgttgtgggtgcccttctgttcctggaggattatgttcggtacacaaagctacccaggagggttgctgaagcacatgtgcctaatttcatttttgatgagttcagaacagtgctgtaactgtttttcctacttcttcaatggaaggattgtccttagatcttcccaccatcacaaatgaatttgaagatgaaaagaaactcagttgctcatacaactgcattttttctggctattatgggaaacatcagacgttctgagtaagatatatctcatggcattagttaatataactgatattgtttaaatcatggtattacatgcaatttatatcagataaaagcagaacacatttttgtactgcctctcttaaatgctgaatgtaactgttatgtataaatccatttagttttatgttctaaagaactatttgtgcaactccagattttcagtaaaatagtattactagtacccnnnnnnnnnnnnnnnnnnnnnnnnnnnnnnnnnnnnnnnnnnnnnnnnnnnnnnnnnnnnnnnnnnnnnnnnnnnnnnnnnnnnnnnnnnnnnnnnnnnnnnnnnnnnnnnnnnnnnnnnnnnnnnnnttttctaaggccttcaggacgaaaaacaaacataaaaatcctttggcgccggccccttcgcccttaacaaacccttaccaggctcttttttnnnnnnnnncccctcccgcaaaggaaaagggggttactttcccctcccaaaaaaaccccgccaaagacacctttggcccttccctcgaaaaaaaccccggggggcccctcccggtgttttacaaaattcacaatggcgtccctttttgtccccccggtcttcttccatgccgatccttttgcgccccttttgaaacattatcgctcaccctgttcgcaaacatatcgatcctcgggggggnnnnnnnnnnnnnnnnnnnnnnnnnnnnnnnnnnnnnnnnnnnnnnacaatggcccgtaattggccgctttttctnnnnnnnnnnnnnnnnnnnnnnnnnnnnnnnnnnnnnnnnnnnnnnnnnnnnnnnnnnnnnngttttgcacaaagtgcgcccaaacacaaacccctcttatctcggcccccccttttttaaacataaaagggggcggaaaacctccccccgtgtattggcctcctcgcccccaaaaataatattttgtgcccacaaacccttcacg

SEQ ID NO: 80336 - DNA, 1259 bp, Homo Sapiens
gggtgggccagggttctgtgtccatccctggtaccatgggggccctctacatcgagcggcctgcagatgtcgaagagggtttctctatccaggcccctctggtgtatcattttggttccaccactcctggcactaacatcaagctttataataagattacatctcgtttagcagatgtgttcaaccaaaggtgtgaggtgaaccgaagggcatctgtgagtggctgtgtcattaacacctgtggctgggtcaagggctctggttaccaggctctggtgcatgcagcctcagcttttgaggtggatgtcgttgttgttctggatcaagaacgactgtacaatgaactgaaacgggacctcccccactttgtacgcactgtgctgctccctaaatctgggggtgtggtggagcgctccaaggacttccggcgggaatgtagggatgagcgtatccgtgagtatttttatggattccgaggctgtttctatcccatgccttcaatgtcaaattttcagatgtgaaaatctacaaagttgggggcacccaccatcccagaactcctgtttaccctttgggcatgtcctcaagaggataatcagctcaagctagtacctgtcacttctgggcgagatatggtgcaccacctactgagtgttagcactgccgagggtacagaggagaacctgtccgagacaagtgtagctggcttcattgtggtgaccagtgtggacctggagcatcaggtgtttactgttctgtctccagcccctcgcccactgcctaagaacttccttctcatcatggatatccggttcatggatctgaagtagagatcagcaggaagccttgctgcctgggacatagagatcatctggccacccctagaggcagatgggctgagataaaagactgttggggccacctgaccagtaaactgtggactagtagaaagttcatattctacctctaaaaacaggtagtggtaacctgactcttctaatcttgaaccaaaaggaaaaccatgagactgtaattggtttcttagaccacctaagatgccactttgaattctctaagaccctggagaattgcatttctttcactgtgctactatgtggtttttaaaaaatcaatgctttatattccatatgtggttcttacccatttatctaggatgaaagtgtgaattagagggactccttccaataaagttcaaacttaaaaaaaatcattttaataaatatttttgccatatcata

SEQ ID NO: 80337 - DNA, 464 bp, Homo Sapiens
aatggcctagcccagcaaatgatcagccttcaaaataatcacagattagctgtaattttaaccaatcagatgacaacaaagattgatagaaatcaggccttgcttgttcctgcattaggggaaagttggggacatgctgctacaatacggctaatctttcattgggaccgaaagcaaaggttggcaacattgtacaagtcacccagccagaaggaatgcacagtactgtttcaaatcaaacctcagggatttagagatactgttgttacttctgcatgttcattgcaaacagaaggttccttgagcacccggaaacggtcacgagacccagaggaagaattataacccagaaacaaatctcaaagtgtacaaatttattgatgttgtgaaatcaatgtgtacaagtggacttgttaccttaaagtataaataaacacactatggcatgaatgaatccagatcat

SEQ ID NO: 80338 - DNA, 923 bp, Homo Sapiens
  misc_feature (469)..(469): n is a, c, g, or t
  misc_feature (606)..(608): n is a, c, g, or t
  misc_feature (610)..(614): n is a, c, g, or t
  misc_feature (617)..(620): n is a, c, g, or t
  misc_feature (623)..(623): n is a, c, g, or t
  misc_feature (625)..(626): n is a, c, g, or t
  misc_feature (628)..(628): n is a, c, g, or t
  misc_feature (664)..(715): n is a, c, g, or t
  misc_feature (739)..(739): n is a, c, g, or t
  misc_feature (750)..(750): n is a, c, g, or t
  misc_feature (755)..(764): n is a, c, g, or t
  misc_feature (844)..(844): n is a, c, g, or t
tagcctcttcaggctttgtaattttcattccaaaaatgcccggtgtgatgctttacactctacaaagtatggtttaaaggcacaaggtcatggcctttgtcatagcagttgaatgtgcattgacatatttttctatgattttttaaaattacaatagaaaaataagctgttgtaacgtgtaaggtcatgacaatttttgtatttatatttgaaatcagatttctataactcgtatttgtgtacagaattctcaatggatttatatattgtgaaatttttatctgagattgggatgtggattatgcttaacagtgagagctgaaatgagaccatttactttgtttaaaatgctgtactgtgcaagtttggaaatgtaaattaatttactgtatataatatcttgagtttgtttatacctccaagtttttacactgaagataaactagctttaattcaaaacttttttttnctttataagggaataagctgttgagctaaacctgtatacttgtgctttttattttctggatgcacaatgaaagtttatacttgtatctcactgcatcatatctgattgcagaaattaaagcacaatttacaagcaannnannnnnacnnnncanannanaaaccaccaaaaacacacaacaccccaaaaacacannnnnnnnnnnnnnnnnnnnnnnnnnnnnnnnnnnnnnnnnnnnnnnnnnnnaccaaaacacccggcgaccccaanacaccccccanacacnnnnnnnnnnttttggggggcccgcccctcgggccctttaaaaaaattctttctaaaacccttctttgtgggggggcccgcggccccccncggggaggagggcaaccggggccaaaaagtggttgttcccaagaagaaaccccggggacaagaaaaaaggggggttggt

SEQ ID NO: 80339 - DNA, 1020 bp, Homo Sapiens
  misc_feature (347)..(363): n is a, c, g, or t
  misc_feature (417)..(463): n is a, c, g, or t
  misc_feature (575)..(594): n is a, c, g, or t
gcggccgccctgatacctgtgaccctctctgtatgctaccctcctgaagtgtccatctccggctatgatgacaactggtacctcggccgtactgatgccaccctgagctgtgacgtccgcagcaacccagagcccacgggctatgactggagcacgacctcaggcaccttcccgacctccgcagtggcccagggctcccagctggtcatccacgcagtggacagtctgttcaataccaccttcgtctgcacagtcaccaatgccgtgggcatgggccgcgctgagcaggtcatctttgtccgagaaacccccagggcctcgccccgagatgtgggcccgctggtgtnnnnnnnnnnnnnnnnnacactgctggtgctgctgcttctggctggggggtccttggccttcatcctgctnnnnnnnnnnnnnnnnnnnnnnnnnnnnnnnnnnnnnnnnnnnnnnnccagtggcgacgggggattctacgatccgaaagctcaggtgttgggaaatggggaacccgttcttctggacaccagtagtccctggtcccatggaaccagatggcaaggatnnnnnnnnnnnnnnnnnnnnagagaaggcagagaaaggcctcatgttgcctccacccccagcactcgaggatgacatggagtcccagctggacggctccctcatctcacggcgggcagtttatgtgtgacctggacacagacagagacagagccaggcccggccctcccgcccccgacctgaccacgccggcctagggttccagactggttggacttgttcgtctggacgacactggagtggaacactgcctcccactttcttgggacttggagggaggtggaacggcacactggacttctcccgtctctagggctgcatggggagcccggggagctgagtagtggggatccagagaggacccccgcccccagagacttggttttggctccagccttcccctggccccgtgacactcaggagttaataaatgccttggaggaaaac

SEQ ID NO: 80340 - DNA, 1723 bp, Homo Sapiens
  misc_feature (247)..(276): n is a, c, g, or t
  misc_feature (1355)..(1355): n is a, c, g, or t
  misc_feature (1658)..(1668): n is a, c, g, or t
tgagcgagaggccgggggtgccgagccgggcggggagagctgggccgggagagcagaacagggaggctagagcgcagcgggaaccggcccggagccggagccggagccccacaggcacctactaaaccgcccagccgatcggcccccacagagtggcccgcgggcctccggccgggcccagtcccctcccgggccctccatggcccgggccgctgccctcctgccgtcgagatcgccgccgacgccnnnnnnnnnnnnnnnnnnnnnnnnnnnnnncctggaaaccggagcccaggatgtgcgagttcaagtgctacccgaggtgcgaggccagctcgggggcaccgtggagctgccgtgccacctgctgccacctgttcctggactgtacatctccctggtgacctggcagcgcccagatgcacctgcgaaccaccagaatgtggccgccttccaccctaagatgggtcccagcttccccagcccgaagcctggcagcgagcggctgtccttcgtctctgccaagcagagcactgggcaagacacagaggcagagctccaggacgccacgctggccctccacgggctcacggtggaggacgagggcaactacacttgcgagtttgccaccttccccaaggggtccgtccgagggatgacctggctcagagtcatagccaagcccaagaaccaagctgaggcccagaaggtcacgttcagccaggaccctacgacagtggccctctgcatctccaaagagggccgcccacctgcccggatctcctggctctcatccctggactgggaagccaaagagactcaggtgtcagggaccctggccggaactgtcactgtcaccagccgcttcaccttggtgccctcgggccgagcagatggtgtcacggtcacctgcaaagtggagcatgagagcttcgaggaaccagccctgatacctgtgaccctctctgtacgctaccctcctgaagtgtccatctccggctatgatgacaactggtacctcggccgtactgatgccaccctgagctgtgacgtccgcagcaacccagagcccacgggctatgactggagcacgacctcaggcaccttcccgacctccgcagtggcccagggctcccagctggtcatccacgcagtggacagtctgttcaataccaccttcgtctgcacagtcaccaatgccgtgggcatgggccgcgctgagcaggtcatctttgtccgagagacccccaacacagcaggcgcaggggccacaggcggcatcatcgggggcatcatcgccgccatcattgctactgctgtggctgccacgggcatccttatccgccggcagcagncggaaggagcagacgctgcagggggcagaagaggacgaagacctggagggaactcccccctacaagccaccgaccccaaaagcgaagctggaggcacaagagatgccctcccagctctttcacctcggggggcctcggaagcacagccccactcaagacccctactttgatgctggcgcctcatgcactgagcaggaaatgctcgatacatgagctgccccttggagaggtcggacctgccctggggcccagctgggtccccctccgtgctccgggcctggtggggacgttcttgtttagatnnnnnnnnnnnaatttggatccctttttttgcttgcctgtttcggagtgttgtcgcttttgtcctg

SEQ ID NO: 80341 - DNA, 627 bp, Homo Sapiens
ggcacgagggggaaggtagttgaatctataccagggatgggcaaatgactgcccatgcatggcctgttttatatgggccgtgagttaagaataaagagctataaataaaacaaaaaaagaataagctgcagcgacatgtggcctgtaaagcctaaaatatttattagctggatctttacagaacaaatctgctgaatcctgttgtataccaatctggatatggatgatgcttgtgtcttctgaatgaaaattggcctaggacctctgaagaaaagctggtttcaattaggcttagtgttgtctgaaagactgagcagatctaagagacaagatttataaaaacagattgctaacactgcatttctatttaatgtttcaatttctcttgcttttgatgcctaccctacgttttataaaacagtagaacactatagttaccatgaaaatacatcttcaaaatattctcttagaatgaaaggaagattcacaataatgcttatgatgtaacactttatgtcaaacttaaatttatatttaaagtatttcaattatcttgaatccccatgtgctataaggaacacagtagttaagcctttcaatctgtaaaataaataaggatttggcaac

SEQ ID NO: 80342 - DNA, 567 bp, Homo Sapiens
aatacatctatatacatatatatatacgcgcacacacttatacagaagttatgttgtggccttggatttgtttttccccttggaaatggttcttaactctgggattttagaaggttagaatattttttcaagagaacagtggtactcaaaagaatgaaaggtggtccctacattttctgtattcatcacttaaaatttttaatttttccgagaactacaagtaacatttgaaccatgctgctgttgtaccttaaacaaaaactcagtgataaccagtatttagtctattaaaaatgctctttttgaagaaaaaagtttggaagtctctgattagccagagtatagtatgagtcttcactgagaaatatggtgacccattttctttgtgaaaacctgggaaaatgcaagtgtgggtatgaagtgtgtgttctgtttgcattgaaacaatgtaattttgtgtcttctttttgctttaactgacttatttcagaaattgtacagtgttgagggggaaagtcttttctgttaatatatttgcaattcattaaaggatatggaaaatccaaa

SEQ ID NO: 80343 - DNA, 1023 bp, Homo Sapiens
  misc_feature (617)..(651): n is a, c, g, or t
  misc_feature (696)..(783): n is a, c, g, or t
  misc_feature (796)..(840): n is a, c, g, or t
tatagttggtatttaaaaattctaaaatatttaataattaatattgatgggaagactgatatacaatgcaattatttattttacaaggagattctatacatcagggaggcatcttgaagtacaatacaccaggctttcatttcttctttacattatgattgtgagtttccatataagttggtacttacatggaaagggaacacaaaatccatttttatatacataaaaacaaaacacccaaagagacttgacccccaaaatgtcttgtttcacttgaaaataacatgaatgagacgaaagatgaaccagattacttggtgacgcacagaaggcgaacaagtagctcaggaaatcaaatcctgtttcaagcttggcacattaagggtaagaaaggtagtgaaagaagggttcgaaaatatcatctcaagccacaaaaaatctggcagaagacagcctccaaatcaataagatagaatggttagaagtcaagttagagttattgtgtggctaccttatatccagacctctaatagactgagtggaattgtcacttctcttccctcagttatcccaattgttagtaaacttcaaggaggctgggcatgatgactcacacnnnnnnnnnnnnnnnnnnnnnnnnnnnnnnnnnnnagattccttgagccccggtgttcaagacgagcctgggcaatatgnnnnnnnnnnnnnnnnnnnnnnnnnnnnnnnnnnnnnnnnnnnnnnnnnnnnnnnnnnnnnnnnnnnnnnnnnnnnnnnnnnnnnnnngattgcttgagcnnnnnnnnnnnnnnnnnnnnnnnnnnnnnnnnnnnnnnnnnnnnnggcgcgatcccactactgatcagcacgggagttttgacctgctccgtttccgacctgggccggttcacccctccttaggcacctggtggtcccccgctcccgggaggtcaccatattgatgccgaacttagtgcggaccctcgtgccgaattcaccacccagcctcgctacctagcctaagtt

SEQ ID NO: 80344 - DNA, 320 bp, Homo Sapiens
  misc_feature (297)..(297): n is a, c, g, or t
actagtccacggttggctactagtccacggttggccactagtccacggttggctactagtccacggttggctactagtccacggttggctactagtccacggttggctactagtccacggttggctactaagagcagaagaggtgggggctgcaattgtacttcgagcaacagaagaaacagtggtaggtgatggaggcagaggaagctctgctatggatactattgcagtagtttcagatgtctggccttcttgttcttctcgttgctctccacgtgacgggactatgcccaaccnggtggcactagctgtggtaccgg

SEQ ID NO: 80345 - DNA, 730 bp, Homo Sapiens
agctgggcatggtggtgtgtgcccgtgataccaacgctactcgggaggctgaggtgggaggatcgcttgagcccaggagttctgggctgtagtgcgctatgccgatcgggtgtccgcactaagttcggcatcaatatggtgacctcccgggagcgggggaccaccaggttgcctaaggaggggtgaaccggcccaggtcggaaacggagcaggtcaaaactcccgtgctgatcagtagtgggatcgcgcctgtgaatagccactgcactagagccaaccgtggactagtagccaaccgtggactagtagccaaccgtggactagtagccaaccgtggactagtagccaaccgtggactagtagccaaccgtggactagtagccaaccgtggactagtagccaaccgtggactagtagccaaccgtggactagtagccaaccgtggactagtagccaaccgtggactagtagccaaccgtggactagtagccaaccgtggactagtagccaaccgtggactagtagccaaccgtggactagtagccaaccgtggactagtagccaaccgtggactagtagccaaccgtggactagtagccaaccgtggactagtagccaaccgtggaactagtagccaaccgtggactagtagccaaccgtggaatagtagacaaccgtggactagagccaaccgtgactagtagccaaccgggggacacacaaggaacag

SEQ ID NO: 80346 - DNA, 1208 bp, Homo Sapiens
  misc_feature (171)..(172): n is a, c, g, or t
  misc_feature (185)..(185): n is a, c, g, or t
  misc_feature (203)..(203): n is a, c, g, or t
  misc_feature (237)..(237): n is a, c, g, or t
ctgccagtcattcaaacagtatgaagcacgctaacactacccatatgtccactgattgaacaattgatacaagtactaccgtatagcagagaaatgagtatatgtagattctgtactctgatatccatcaaagtgcataacatagtactcatgatgcaagtactgtgacanncaacatacttgcncactctgaacagatatcncaggagaggtatcagtatgtcgactgtggaaganacacaacgtatcagttggggcagtctgaatatgtaaatgtacttcagccacaacagtaaaaactggaagagatggatttaaagaagaaatatctattgatatttcctatactctcaatgaagaggtatttcctaataggagaccttaaagtgaacaaacctaaagtttacacttctaagagtacagttaaaagtatgtggacctgcagttcttgtaactctccactctgtgttaatgatatatttgtactaggatcttttacttgaatctaaatttactggttgatttccttctccagcctatcccctacagggaaaagctgatacttcccctatagtacaataaataattatttaaaagtcatagctccagtcactactgaaaacataattttggtgataaacataatttgagaaacttaatttctgaatgtttttatagaaaattactgaaagtctattactcatggaagacttttaaagaataaccttttttcctgttttataaattcccattgttatatggtagtatttcagctacacaatattttagcttttagctagacatttatagcttttcatttgttgaaatggtaatcatctgcatgtttttgtcacttatttcaggttagtgattgcctaacacttataagccaaaataatctttgcaaaattccatacctaaaattttgaaagcccctaatgttttcacacatctttctgtattagttatagttttgtgaaatctttgtgtgatcttcaaacattatcatttaatgtacaatactgtaaataaactgtgcatggcttttatacagctttagtaaatgtcaaataaagtggtacagactcattacaacaagtttctcataaaaatacaataaataggaaaatgaaattcagaaacccatagactgggaataggttccagttacagcttggatctggcataaaataaatttgaaataaaat

SEQ ID NO: 80347 - DNA, 1475 bp, Homo Sapiens
gaaactaacggctaggtagcgaggccgggtggtgaattcggcacgagggggaattccaaatctcccaaaaaaggactgaagactcctaaaaccaaaatgaagcagatgactttgttggatatggccaaaggcacgcagaagatgacacgagccccacggaattctgggggtacacctaggacctctagtaaacctcataaacatctgcctcctgcagccctacacctcattgcatactacaaagaaaacaaagacagggaggacaagaggagcgccctgtcctgtgttatctccaaaacagctcgtcttctctctagtgaagatagagctcgtctcccagaagaattgcgaagtcttgttcaaaaacgctatgaacttctagagcacaaaaagaggtgggcttctatgtctgaagaacaacggaaagaatatttgaaaaagaaacgggaggagctgaaaaagaagttgaaggaaaaagccaaagaacgaagagagaaagaaatgcttgagagattagaaaaacagaagcggtatgaggaccaagagttaactggcaaaaaccttccagcattcagattggtggatacccctgaagggctgcccaacacgctgtttggggatgtggccatggtggtggaattcttgagctgttattctgggctacttttaccagatgctcagcatcctattactgctgtgtcccttatggaagccttgagtgcagataagggtggctttttataccttaacagggtgttggtcatcctcttacagaccctcctacaagatgagatagcagaagactatggtgaattgggaatgaagctgtcagaaatccccttgactctgcattctgtttcagagctggtgcggctctgcttgcgcagatctgatgttcagcaggaaagcgagggctcagacacagatgacaataaagattcagctgcatttgaggataatgaggtacaagatgagttcctagaaaagctggagacctctgaattttttgagctgacgtcagaggagaagcctacagatcttgacagcactgtgccaccggatcctcatgacatactcagtgcaagaccacatggagaccagacagcagatgtctgcaaagttgtggaaggaacggcttgctgcgttgaaagaacaaattgataagaagagagcagagaaaccgaaacctcctgatcgctccacctacctacaatgtcggccggcctcggccctcgaaaaattttccaaaaccatttcgtttggcccccggggcccacctaggacagggaaccatggccataccttgttttccaaaggaaatcccggggcaggcaataggccttggaattccccccaattaaaaaacggcccgggggaaaaccgaagcgttcctgaaccaattccgaatgggcggttcctgaaggcatttacttgggatttttcaaaccgggattcccaagcgggactgcgaaatt

SEQ ID NO: 80348 - DNA, 801 bp, Homo Sapiens
  misc_feature (25)..(25): n is a, c, g, or t
caagaattcggcacgaggagtttcnagtatgtgtgatgtcctttggggttatttatcttgctggtccataggagggtacactaccccaagaatcaagacatctgagttctagttctagttctagctctgccactgaagagccaccttacctggggcaagttagccattgtctcccagtcatgtttaccacccatgaaaggactcgtcggtttgatgtttccattaagctcaatgagtaactctaatagttactcttgaatctggattgaaaaacaccatgcatctgatgagataattcataaatgttgccccttttttaaatgatacaaccctaaaagtgactgaattgcccaagtgcttgaacatggcagaggtagttactcttattttgcagtttgtgcacttaaaaattcctacagtgattgttactttactggggaaaaaagatgaggtgaaacttcctcccaaggaattaaaatatctgtagaagccatggcttgcttttataatgtggaaatcatttgatttgctgtaattcacgcagatccctccttttgtcagggggaaatgatttgcatcatgttcttttttcataatgcttttacttcctgtttggatcagttgtatgtaaatgtacatttttgttactttggctgtgcccgttagaatttatcttccataaagtatttctcccattgagtctaatgatgtatactttgcctaggtctttccaaaattaaatttatgtaaatgtctattttatataaaatatgattaaaataagtatgtctggtttcaaaa

SEQ ID NO: 80349 - DNA, 837 bp, Homo Sapiens
  misc_feature (50)..(50): n is a, c, g, or t
  misc_feature (64)..(64): n is a, c, g, or t
  misc_feature (105)..(106): n is a, c, g, or t
tcagtgtttggctttagatgatatactctgccaatttagccttagaaatnacaagagaatatcnctgtctgaaacattagggtattctaaaagaatacagataannaaattaggatactcttttagaatacctattattttaaacttaagcttggtgaacatatgaaaaaaagccaaaagaagcttaccttaaaagctaaagaaactggatgtgacagaggccaaaataaacatgaattatgccacctacagcccaaacaaccagatcttatggaatgaaggtccagaaaaagggggagagaggtggactcaaatgtgaattttcttttctattggtccttcctctcaagctggggtgagtcagtcccacgcaagaatggcggacgggtcatcctcctgtcaagagggggcggttctttcacacactaccttggagaggaatgtggcttctacatcctcacttcttttagcttcagttccagatttctgaccttcttcctgtgatactgtggagcatgcctagttgactggtagctgagtggaacaaaacttgtagatgtaattcaaagaaaactgattgaaagggtcagttgcattggttaaaaaaatccaagagcctcttattactcatctgttccttagccccaccttagacaggctcagaatttattcctctactaagtcttcagtcactctctgcatgtattcaagctctcagcagtcatacatcaaacaatagtagttgtgtggtacataataattataagctattttgtaagtggctcttgttctaggaaggcacctcagtaagaacaatgatcaaaaagaataaaaaaa

SEQ ID NO: 80350 - DNA, 389 bp, Homo Sapiens
  misc_feature (276)..(289): n is a, c, g, or t
ttgttatcaaaatgtcattctggtctttatttttggacacgtagcatgttttaacaaatcagtttttcataggcaaccttttgaaacatcaaaagaaatacaatatatttttcacaaatttctcatcactgtaaattcactttaaaatcaactaagtagcagggtagagcaatgtgtttccatataccgaccagtgcaaactgacagttacaattaaggtatccagaaaggttgaaaattaagatttacgtgaaacaaatttacttccatttgttnnnnnnnnnnnnnntaataatttgcaaatcacatgttttacaggcaaaggcaactaactttagatcttatttccatctcaaataaatgacagtttaagaattaaatgacaattt

SEQ ID NO: 80351 - DNA, 588 bp, Homo Sapiens
tttttaaagagacagtcttacctcattctgtcacccagaatggaatgactttctaaaattgcagaaagcagaacatattccttgctgtttataatattatagtcgtatcaaagggaaagagtatttctccttaaataaaattacaaataagaaatgtatgttttactcttactcataaaaggtattgtagaatacaaaaggtttttcaaactggttttgtctttgattggcttttataatccacacttcaaagaagaaatgcatttaacttttaataacttagtcaaaaagtataatgttgccttgccttgcataacctttaactattgcaaatgatgttttgtccttcccctttgtccagtattttccaaatggtcaacagtttaaacatttaagcttgcactgagaaaccttgccacatttcagcagttttgttttgcttttggtggagagcacctgatctcgactttacagccaatgtatttactctaaattacacttttatagatacaaggtaaagtgtagctgggtgaaggcactcaggagcgcataaaatgtggtcaaccacaataaattaaaatgtaagct

SEQ ID NO: 80352 - DNA, 1118 bp, Homo Sapiens
atagctagtacgaggctgggtgtcgaattcggcacgaggcagatcgcgagcaggactggaacgcgcgggcctgcggcagcgggaggtgagcacccggcccctgccctgtccccacggtcacccgtgcactctccccctgtgccttagcgtccccgggttgtcgggagcctggggcacgcgcagcaccccggggaagagggggcgttcctcgccggtctccatccttccaccctccagttagagcagcagctgcacgcccaggctgcggagcacctggaggcacaggcccagaactcccagctgtggcgggcgcacgaggcgctgcgaacgcagctggagggggcgcaggagcagatccgcaggctggagagcgaagcacgaggccgccaggagcaaacccaacggtgccgtgggacggggctgggcgggccccggtgcgtgtcccgggggcggggccgacgggcgctcaggtctgggccactttcatccccatttcaagtcccaggcccgccccgtgggaaggaggatcttctagggggtccgggggctccccaaggagccttcctgcagccgggtcaccacctcccatccacagagacgtggtcgccgtctccaggaacatgcagaaagagaaagtcagcctgctacggcaactggagctgctcagggagctgaatacacggctgcgggatgacagggacgcctgcgaggccaggcgggcgggcagcagctgcaggaaggctctgacaacagcccgcctgcctgggcccacctgctgctgctgctgttgctgggctcggccccccagacgcggctctggccaccttcccagtgcccggtgaccagccccgagtgactcacggaccatgagctagaagctgcccttgcaggaggcttgtcatgggtcgggggtgcccactcaggatgcaggctctccccagggggccccaggctcgcctgactgaagacatgaaggacctagcctaggagtggtcagggtcccgggagtggccagggtcccgtgtgtgccctctgccagtcttcgctctgtccccgttcaatcaaccccatctcagttcagcagaaaaccccctcgtcaaataaaacccactgactgc

SEQ ID NO: 80353 - DNA, 2168 bp, Homo Sapiens
  misc_feature (1325)..(1342): n is a, c, g, or t
  misc_feature (1375)..(2116): n is a, c, g, or t
attcccgggatccacgctcagctcagcttcaccctgtctgcaaagaaaagttttactaagaccagaagttaaatatgacatttcctaggtagttgtaactctaacatagtttaaaaagtatgtggcttcagattgcctatactttgttcacaaacgtgtgatttagatatgactgatttagaagtgaacaacttggtaacatccctagactccactcatgaacgcagaattattacctgctgtttgctttctgaaagaatttcagaaatcagagcaaatgtgtctttaggcagattcagctccttttaatatttttctcttggcccactctctttgcctcccctgaatctgtgtggtactatagcagctctactctgtgcaccatgctaggaagcttcctttttggcagaatatgtttggcagcaaagctatagagacaggtgcattcagaacatcctgggcaccagtcatgagtcttactgtgtcaaaaatctgaaaacacttgctgagaaccaaatttattccattggaaaaaccctctgtggagctataagcctcttggactcttcttcctagattaaggcttgcatttccctccctgtttcagtaaaagatgatgaaagccactatcaatcctcactgctgagtggcagggagaagcagcaccactctcagctcttttctaatcttgtaacttagtgctagaagtctctccaggctattaccatgggcatttgttctctgttggagctgtaagcagatgaacccaagtagagaagatagatcttggaaggagagatccattgagtccagaagccagatcagcaaatggaggaacctcggaggtgaccagaaagatctccatcggttgcccaaggctgtaagtagtgatggttttagcgatgaataacgtaattggctatgaagtactgtggcagagctgctgttttctgaaggtgagaagccatttttagctcagagcaacccttaagagaacttttggcagattttgttggcattattgaaatatatatagaaaagttgctgattgcaatggttatgggaatggaatttaatgacatttgtaatttattacactcattggtttttattgattatagtattgtctgactttttattttctactatggttcctttagcagaaaagtaacttttgtgcatatattgaagtggtttttcagctatgaattctttagggtagaaatttatttagcaaatgtgaattcttttgagaaagtatgaagttttgcagaaattgactgtgaaatgtcagagaaaaataaaagtcacttacttgaaacctnnnnnnnnnnnnnnnnnngcctacagccgcggccctcgtgccgaattcttnnnnnnnnnnnnnnnnnnnnnnnnnnnnnnnnnnnnnnnnnnnnnnnnnnnnnnnnnnnnnnnnnnnnnnnnnnnnnnnnnnnnnnnnnnnnnnnnnnnnnnnnnnnnnnnnnnnnnnnnnnnnnnnnnnnnnnnnnnnnnnnnnnnnnnnnnnnnnnnnnnnnnnnnnnnnnnnnnnnnnnnnnnnnnnnnnnnnnnnnnnnnnnnnnnnnnnnnnnnnnnnnnnnnnnnnnnnnnnnnnnnnnnnnnnnnnnnnnnnnnnnnnnnnnnnnnnnnnnnnnnnnnnnnnnnnnnnnnnnnnnnnnnnnnnnnnnnnnnnnnnnnnnnnnnnnnnnnnnnnnnnnnnnnnnnnnnnnnnnnnnnnnnnnnnnnnnnnnnnnnnnnnnnnnnnnnnnnnnnnnnnnnnnnnnnnnnnnnnnnnnnnnnnnnnnnnnnnnnnnnnnnnnnnnnnnnnnnnnnnnnnnnnnnnnnnnnnnnnnnnnnnnnnnnnnnnnnnnnnnnnnnnnnnnnnnnnnnnnnnnnnnnnnnnnnnnnnnnnnnnnnnnnnnnnnnnnnnnnnnnnnnnnnnnnnnnnnnnnnnnnnnnnnnnnnnnnnnnnnnnnnnnnnnnnnnnnnnnnnnnnnnnnnnnnnnnnnnnnnnnnnnnnnnnnnnnnnnnnnnnnnnnnnnnnnnnnnnnnnnnnnnnnnnnnnnnnnnnnnnnnnnnnnnnnnnnnnnnnnnnnnnnnnnnnnnnnnnnnnnnnggtacatcgtcttgagtcaacccggtagacagactatcgcactggaagagca

SEQ ID NO: 80354 - DNA, 766 bp, Homo Sapiens
  misc_feature (51)..(51): n is a, c, g, or t
  misc_feature (60)..(60): n is a, c, g, or t
  misc_feature (624)..(669): n is a, c, g, or t
aggagcatcttttcttcttttagttccaagttccagggtatttttcattcntagtaggtntatatgactcacagaatgtggacttttttcctgtttggagtatttttgtaatgtaagtatcggatagctgcaccacagcatgcataaattgcacattttgttttactttctttatagaatatttaatttcaaaaatataatttatgccaaaaaaagcatacctttcaattttgctacttggttgatttagcacaaaatgcaaagtcttggggcagagagggggagtgaaaaaaattttataggtaattgttacaaaaatacctgtcagaaaccctaaagctgcattgtaaaacaaatggtgtaaactagttttgaaaagtggtaaggaattgtgaaaaaaatctcagacttaatgctctctaaccacatgagtttcttcttttttatttagtaatacgctgctacatatttggaggttctggtgtttgtaggtcactgaacagacattgaaatctgatttatattgtataactgtaacatagaaagaaaaagtatttatattttttctgtaagaatatttcattgagttgtgtataatttaaataagatttgtccccaaatggnnnnnnnnnnnnnnnnnnnnnnnnnnnnnnnnnnnnnnnnnnnnnntaatgtgtatagtttatgtcaagggcattaaaagcctcctgaagcataatcttatcaaagggatacattgttaataaaatgtacttaaaattcttaa

SEQ ID NO: 80355 - DNA, 878 bp, Homo Sapiens
accaaatcacaagactcagaagagcatgattccacctttccactgatagactcaagttcccagaaccagattagaaaacgcatcgtacttgaaaagttgagtaaagtgttgcctgggcttctggttcctcttcagattacattgggagatatttacacacaacttaaaaatcttgttcgaactttcaggttaacaaatagaaatattatacacaaacctgcggaatggactttaattgctatggtgttgctgtcattactgaccccaattcttggcattcagaaacattctcaggaaggtatggtgtttacacggtttctagacaccctccttgaagaattacatctaaaaaatgaagaccttgaaagtctaaccatcatatttagaaccagctgtttaccagagtgatatattccatgaagacaaaatagaagatgaacttctattcaccgtttctggaattctagccgccatgatggtctggtggtgactgataactagttttattccaagacatacctttacctctttaagtttcaatctcccatctcccagtccttcagtccccaactgcagaggatgacctccccagatagaggagaatcattactccaacaagaataaccaagtctttgtatccctagtacaagacatagtatttttattcgaaaatgaatgtttaagtattaaattgaaacttgaatgaatattcaagaaaatataatgatctctactttttctggatgattccagccatcatatcagtttgccaaaaaaattgagaaagttatgattttgacctcccaacctaaactgtaaattctaaagatcagtaaaccccccggtcaataaatacatacaatttaaaatgaaaaaaa

SEQ ID NO: 80356 - DNA, 415 bp, Homo Sapiens
caaaatcttattgttgtaactgaaaatgttgggttcttcccactccctcattgaaaaatggacaaaacaagctgcccttccagaagttgagagtaggtcattcaatgtcctaatcatcttacaccaagaaagtaatttcttttaggggaagtgtcaagataacaagtaaccctgtccagaaagccatttccaggctcgtctgtgtgtgtaggcatgtggttttattcttgtaaaaatgcattgaccaaactctggaacacagatctgacactggaaggcaacccactcgcatgtggatgctgaagggcactttattttgtatcctgaaaagggcctacagaggccagtacaaaactctcaaacaaaaggaagttgactctgctttgaggggaaggtggcatgccagcactagctt

SEQ ID NO: 80357 - DNA, 744 bp, Homo Sapiens
agaattcggcacgaggattgaattaaattcagttcatcatctatgcagatctgtttcttttaagcacatccttccctcctgctgttgccctcctcccattaacttttctttttaatcttgaaattgtttaaaatattccatctttctttctctagcaaagtgtttgtattccaaataaggcctctgtgaaatgtctgaattacttttcccgtctttgttatggtcagcttcattatttggatgtattgcattcaaagcagcagttccaaacataacacacatctattttcttagagttttgtaaatacagactaacctgatgacattaaaaattgtggatcctacatgttcctatgttcattctctaaaaacctgagtaactttatgaaaacacacaaacctggaaaaacatcacatttttgtcacatttttactgacaaatgtatattcatatgatggtacggcagcagggagtggcccccagttaacatggctgtgagtggacacagtgtctcgcaggatcactgcatgttatgatggcttgtaagtgcgttgttaagacttttgtttcagtgtttgtctcccagtatttgaacctaatttaaagaaaaagacgtttccaagttgtatttattaaatgtgtttttccttaccttttgtgctgctactttgctaatctcattagcttagctgtgtttgtgcataggttatatttggtaataaatttatagagtgttggttgtc

SEQ ID NO: 80358 - DNA, 970 bp, Homo Sapiens
ggcacgaggcgggattacactggctgcagtacatcagagagtttgtcaccagttaagcaggctcctcggaagtccccctccgacactgagggtcttgtaaagagtctgccttctggatctcaccagggcccagtctgtggtgtatgcggatatccgaaagaattaagagaatacctagaacatatcctcagcaagaaacaaaaccaaactggactctcgtgcagaaaatgtagcccattaccacatgtagccttggagacccaggcaaggacaagtacacgtgtactcacagagggagagaaagatgtgtacaaaggatatgtataaatattctatttagtcatcctgatatgaggagccagtgttgcatgatgaaaagatggtatgattctacatatgtacccattgtcttgctgtttttgtactttcttttcaggtcatttacaattgggagatttcagaaacattcctttcaccatcatttagaaatggtttgccttaatggagacaatagcagatcctgtagtatttccagtagacatggccttttaatctaagggcttaagactgattagtcttagcatttactgtagttggaggatggagatgctatgatggaagcatacccagggtggcctttagcacagtatcagtaccatttatttgtctgccgcttttaaaaaatacccattggctatgccacttgaaaacaatttgagaagtttttttgaagtttttctcactaaaatatggggcaattgttagccttacatgttgtgtagacttactttaagtttgcacccttgaaatgtgtcatatcaatttctggattcataatagcaagattagcaaaggataaatgccgaaggtcacttcattctggacacagttggatcaatactgattaagtagaaaatccaagctttgcttgagaacttttgtaacgtggagagtaaaaagtatcggtttt

SEQ ID NO: 80359 - DNA, 1592 bp, Homo Sapiens
  misc_feature (1465)..(1521): n is a, c, g, or t
tgcggccgccgaggcctgggtggaagttggcgctgctgccgccgccctgcagcccactcgctgcctcggcagcgcgctgctcttctaagatggctgccgctaccggtgcggtggcagcctcggccgcctcgggtcaggcggaaggtaaaaagatcaccgatctgcgggtcatcgatctgaagtccgagctgaagcggcggaacttagacatcaccggagtcaagaccgtgctcatctcccgactcaagcaggctattgaagaggaaggaggcgatccagataatattgaattaactgtttcaactgatactccaaacaagaaaccaactaaaggcaaaggtaaaaaacatgaagcagatgagttgagtggagatgcttctgtggaagatgatgcttttatcaaggactgtgaattggagaatcaagaggcacatgagcaagatggaaatgatgaactaaaggactctgaagaatttggtgaaaatgaagaagaaaatgtgcattccaaggagttactctctgcagaagaaaacaagagagctcatgaattaatagaggcagaaggaatagaagatatagaaaaagaggacatcgaaagtcaggaaattgaagctcaagaaggtgaagatgatacctttctaacagcccaagatggtgaggaagaagaaaatgagaaagatatagcaggttctggtgatggtacacaagaagtatctaaacctcttccttcagaagggagcctagctgaggctgatcacacagctcatgaagagatggaagctcatacgactgtgaaagaagctgaggatgacaacatctcggtcacaatccaggctgaagatgccatcactctggattttgatggtgatgacctcctagaaacaggtaaaaatgtgaaaattacagattctgaagcaagtaagccaaaagatgggcaggacgccattgcacagagcccggagaaggaaagcaaggattatgagatgaatgcgaaccataaagatggtaagaaggaagactgcgtgaagggtgaccctgtcgagaaggaagccagagaaagttctaagaaagcagaatctcaagaaaaagaaaaggatacctttcaagaaagggcccaagactactgaggaagaagaaaaagaaaagagctcttcaaaggaatctaaagacagcaagacatcatctaaagatgacaaaggaagtacaagtagcactaagtggtagcagtggaagcctcaactaaaaatatctgggttagtggactttcatctaataccaaagctgctgatttgaagaacctctttggcaaatatggaaaggttctgagtgcaaaagtagttacaaatgctcgaagtcctggggcaaaatgctatggcattgtaactatgtcttcaagcacagaggtgtccaggtgtattgcacatcttcatcgcactgagctgcatggacagctgatttctgttgnnnnnnnnnnnnnnnnnnnnnnnnnnnnnnnnnnnnnnnnnnnnnnnnnnnnnnnnngtagttcaagaagttctggagataaaaaaaatacgagtgatagaagtagcaagacacaagcctctgtcaaa

SEQ ID NO: 80360 - DNA, 1822 bp, Homo Sapiens
  misc_feature (445)..(491): n is a, c, g, or t
  misc_feature (1757)..(1757): n is a, c, g, or t
gaaagctcttctcaggaatctatagacagcaagacatcatctaaagatgacaaagtaagcactagtagtactagtggtaccagtggaagctcaactaaaaacatctgggttagtggactttcatctaataccaaagctgctgatctgaagaacctctttggcaaatatggaaaggttctgagtgcaaaagtagttacaaatgctcgaagtcctggggcaaaatgctatggcattgtaactatgtcttcaagcacagaggtgtccaggtgtattgcacatcttcatcgcactgagctgcatggacagctgatttctgttgaaaaagtaaaaggtgatccctctaagaaagaaatgaagaaagaaaatgatgaaaagagtagttcaagaagttctggagataaaaaaaatacgagtgatagaagtagcaagacacaagcctctgtcnnnnnnnnnnnnnnnnnnnnnnnnnnnnnnnnnnnnnnnnnnnnnnncaaggatactaagaaaatagaaggtaaagatgagaagaatgataatggagcaagtggccaaacatcagaatcgattaaaaaaagtgaagaaaagaagcgaataagttccaagagtccaggacatatggtaatactagaccaaactaaaggagatcattgtagaccatcaagaagaggaagatatgagaaaattcatggaagaagtaaggaaaaggagagagctagtctagataaaaaaagagataaagactacagaaggaaagagatcttgccttttgaaaagatgaaggaacaaaggttgagagaacatttagttcgttttgaaaggctgcgacgagcaatggaacttcgaaggaacgtcgtaaggaagctgaacggattgctcgagaaagagaggaactcagaaggcaacaacagcagcttcgttatgaacaagaaaaaaggaattccttgaaacgcccacgtgatgtagatcataggcgagatgatccttactggagcgagaataaaaagttgtctctagatacagatgcacgatttggccatggatccgactactctcgccaacagaacagatttaatgactttgatcaccgagagaggggcaggtttcctgagagttcagcagtacagtcttcatcttttgaaaggcgggatcgctttgttggtcaaagtgaggggaaaaaagcacgacctactgcacgaagggaagatccaagcttcgaaagatatcccaaaaatttcagtgactccagaagaaatgagcctccaccaccaagaaatgaacttagagaatcagacaggcgagaagtacgaggggagcgagacgaaaggagaacggtgattattcatgacaggcctgatatcactcatcctagacatcctcgagaggcagggcccaatccttccagacccaccagctggaaaagtgaaggaagcatgtccactgacaaacgggaaacaagagttgaaaggccagaacgatctgggagagaagtatcagggcacagtgtgagaggcgctccccctgggaatcgtaacagcgcaacgggatacgggagcagagagggagacagaggagtcatcacagaccgaggaggtggatcacagcactatcctgaggagcgacatgtggttgaacgccatgagacgggacacaagcggaccaaggaaagagtggcatggtccacccctctcaagggcctagctatcatgatacgagggcgaatgggtgacgggcgggcaggagcaggcatgataacccancatttcagtaacgcatcccccattaaatagaatgtacaaatcagtggccaattcatgtccagagg

SEQ ID NO: 80361 - DNA, 802 bp, Homo Sapiens
  misc_feature (163)..(176): n is a, c, g, or t
  misc_feature (480)..(494): n is a, c, g, or t
tttttcacattttcccaaatctttggctgtattgcaatggttgtttcaatttgtaatctccaactaaacatttcctaaccatggattaacaatatagttactgactggtttcttttaacagtatttatccaacataacaaaataaactgcaatttgttatagnnnnnnnnnnnnnnacaaaacattttataaatatttttacaaaatgtatacaaagcaatttcaagtgagacgtactatacaaatgaaggtatttaagcaaataaagcccacaccacactgacagcgagtgacgcgtcctctttaagtaaagtcagtctgtaaggcctccctaatctaacagaatctactaaatccttcagagctaaaatatttctttttcataattgccagattaaaattttgcttcatcttcaggaagtacttaaggacacagaaaatcaaatgcttaataacaaattcacgcttttccacaacagnnnnnnnnnnnnnnngaaaatgatttttgttactgagtacaaatagttctaaaacttaactttgacgaatgaacctgaacaactgaatgttggccatccgaggctgagctctcctacccttcactaaagggggctcgacatgcgagttatgacccatgtgcgtagaacctaatcacaggagtgaaatacatgtcataatcttcatttgtcattatctagaatccttcctccataaaaagtaaacttacatacaatgacacaaaaatttacaagtttcattttggtaaattaggctctccatttgctagacaagtgttagggct

SEQ ID NO: 80362 - DNA, 765 bp, Homo Sapiens
tctcagttattgactggctgggtgtgacttagtacataagtactcaatattataaaaacctcaaataattgacttgattttacacaacatccttcccttttctacaagttaatttttttacaaatcatttgggttatctcctaaataggttatattttattgcttctagaaacaatgtttcaaaatatatgtgcattatcagtaataatttgtataaatatttcccacaacaattttcataattttcaaagactaatttcttgactgaagatattttgctagggaagtgaaactttaaaattttgtagattttaaaaaatattgttgaatggtgtcatgcaaaggatttatatagtgtgctcccactaactgtacagatcaggacacatatttttagacatctaagtctgtagcttaaatggaggttactcttccatcatctagaattgtttacttagtaattgttgtttcttttattattatagacttactatcagttttattttgccaagtatgcaacaggcatatcactagtatatgaaaatgtaaatatcacttgtgtactcaaacaaaagttggtcttaagcttccaccttgagcagccttggaaacctaacctgcctcttttagcataatcacattttctaaatgattttctttgttcctgaaaaagtgatttgtattagttttacatttgttttttggaagattatatttgtatatgtatcatcataaaatatttaaataaaaagtatctttagagtg

SEQ ID NO: 80363 - DNA, 384 bp, Homo Sapiens
ggcacgagggtcgctcatacccctctagccccaggccccacccctgcccagtgccttccgcctgtgtgcccagagcttctcgaagctctgtgggtagggattaggatcagagggacacaagtaggtctgagattctggggtctcaggagaaactaagggatgacagatcagcttaaaaacaggaaaagggcttcaggcaagacgggcaggattcactacccagggtaccagaaagccccatcttctgaccattgtccccagcccccagatcagttcaagaagacgtcactgctgggacacacaggctgagttgtgccagctcattgccagctgagagtttcttttctctccccctcgctttggagtacattgtaagaatcttaa

SEQ ID NO: 80364 - DNA, 679 bp, Homo Sapiens
tttttttaaatgcagaaagcccctttaatgtctgtggaacagaagaaccatgttggatggggaaagcaggggcaggacacacgtgtcgcgtatctatggggtgttatcagggttatatctgtgacaggatcaactaacttactggctctcatttcacctgataacataagaccctccccgctgactacacacagtttaggttatcactccttatgactcctgctccctgccctgcaccctagattctctgggactcaccgcagttttcctgactctgatggaatgtgctggagtctattacgagccctgcttttcagaaggtgctcaacaggccctgaagatgtgcatctggccgatggtgggtcaaaaccagagttctgcaggctgagatttttccttttattattattaaacttggctgtgttttccttcggtggctctggcatcctatgcagtagtgctggacatttgcaggcagttaaggcccagtacagcaggaagaatgatttctgtgactgctggtctgtgcaagccctccagctgcgggagcaacctcccttgaggagaagttgtgggggtgggcctggtggggagggcgataggctgggacagaaggaaggatggaatactggacctggtggccaggggtcaatgggatgtccttctcaccagaagcaac

SEQ ID NO: 80365 - DNA, 620 bp, Homo Sapiens
tgaagctacaagacctaattcagcaagcaaggttgtaggatacacaatcaatattaaaaattgacattatattagcaatgaacgataccttcaaaagtaaactcagaatagcgtcaaaaagaatataataatacatttatttaattgaaaaaatattgccgagagaaatcaaaggatctaaatgagaacttccatgctcatggattagagaattcaacagtgttatgatggcaattctccccaaattgttctatagattcaactcaatccctagcgatattccagaaaggtttttctttaaattcacaagctgatcctaaaacttaacatggaaatgcaaaatgtctaaaagatcctaaatgattttgaaatgcacaaaattggaggaattgccttacccagtttcaaaacttactgtaaagcaacaataatcaagactgtttattgacacaaggatagtcagtcatatacagcaacaggacagaattaagagtccagaaataagccctcacagacgaccaacggactttcaagatatgtgcaaagataattcaacaggagaaaagacagtcatttcaataaatggtgctgagacaattggatatctgtattttaaaagg

SEQ ID NO: 80366 - DNA, 1744 bp, Homo Sapiens
  misc_feature (1649)..(1658): n is a, c, g, or t
cagtcgacggtaccggacatatgcccgggaattcggccattacggccgggagagaaggatgttcttatcaaagatacaacagccttgtcctttttccacatgctaaatggcgcagctttaagaggtgaaattgaaacagtaaaacagttgcatgaagccatcgtgactctagggttagcagaaccatccaccaacataagtttcccattggtcactgtacacttggaaaagggcgacctatctactgctcttgaggtcgccattgactgctatgaaaagtataaagtattaccaaggattcatgatgtcttgtgtaaactggtagagaaaggcgagactgatctaattcagaaagcaatggactttgtgagccaagaacaaggtgaaatggtgatgctctatgatctcttctttgccttcctacaaacaggaaattacaaagaggccaagaagatcattgagactccagggattagagctcgatctgcaaggcttcagtggttttgtgacagatgtgttgcaaataatcaggttgaaactctggaaaaattagtggagctgacacagaagctatttgaatgtgatagagaccagatgtactacaatctgctaaaactgtataaaataaacggtgactggcaaagagctgatgcagtctggaataaaatccaagaagaaaatgttattcctcgtgaaaagacattaagattattagcagaaatccttagagagggtaaccaggaagttccgtttgacgtacctgagttgtggtatgaagatgaaaaacattccctgaattcttcgtcagcctcaaccacagaacctgatttccagaaagatatattgattgcctgccgattgaaccaaaaaaaaggggcatatgatattttcctgaatgcaaaagagcaaaacattgtgtttaatgctgaaacctacagcaatctcattaaattactgatgtcagaagattattttacacaagcaatggaagtgaaagcattcgcggagacccacatcaagggcttcacactgaacgatgctgccaacagccgcctcatcataacgcaagttaggcgggattatttgaaagaggctgtgacaacactgaaaacagtattggatcagcagcagaccccttctaggttagcagtgacccgtgtcatccaggcattggccatgaagggtgatgttgaaaacatagaagtagttcagaagatgttaaatggactcgaagactccattggactttcaaaaatgggtttcatcaataacattgctttggctcaaataaagaaataataacataagatgcccgcaatagaaaaacatttgaaaatatggctttacttttcagaaggaattaaaggtcaatttgaaaacccccaaaataactttccgggcctttggggccattaccctttaattccccggaaaaaaagtaaattaagaaggggaagctcaggtctggggaaaccccagccgaggttgggaaaaaagaaattaagccccttccttggggcggggaaacaaaaattgggccccccaatcccagattttgtgccaaatttttattaaaaaccctgggttcaccttgaaaattattttttcccctcttccaacttttgttggggcaatgcccaggggccaannnnnnnnnnaaagtggatgggcccaaaaaaaccttcttccccttaccagaaaaaattgtcgggggggcacaaattctggcctggaaaaacaaaaa

SEQ ID NO: 80367 - DNA, 558 bp, Homo Sapiens
gaactctaccattcagctgccattcataatcatcaatacaagcagaaaaacagtcatagattgcagcatctccagtgacaagtttgagtatcttttcaattttgacaacacctttgagatccatgatgacatagaagtactaaagcggatgggaatgtcgtttggcctggagtcaggcaaatgctctctggaggatctgaaacttgcgaaatccctggtgccaaaggctttagaaggttatatcacagatatctccacaggaccttcttggttaaatcagggactacttctgaactctacccaatcagtttcaaatttagacctgaccactggtgccaccttaccccagtcaagtgtaaaccaaggattatgcttggatgcagaagtggccttagcaactgggcagttcctggccccaaacagtcaccagtccagcagtgcggcctctcactgctccgagtcccgaggcgagaccccctgctcgttcaatgatgaagatgaggaagatgatgaggaggattcctcctccccagaataaagacaagagaaagcctaaaa

SEQ ID NO: 80368 - DNA, 1376 bp, Homo Sapiens
  misc_feature (971)..(971): n is a, c, g, or t
tactgaggatctccgaggtaaaactggttgtcccatcttacgaagaggagctagctgccattttttaatttcattatctctacagtctgatgaatttctgccttcaccagactcccgttttaaaattttgaccttgtgcttcactgtatcatctatatatttggttctatcatttgttgtgtgttttgataatccaagcttttcacactccattgttttatctccactatggaattcaactgtagcttggttttccaaagtatctggatctagtatttcagtctttttgtcttcttcagcacaacattttacacagacatattctttgtcttcctcgcccatctgctgtgcttgagaaagacttaacccaacacaatcaccatgaaaccagtcatcacatctcccacagccaaccataaacctgttgccatgtggttttttgcaaaacccacactgcttgctgggagtccacatatatttgctttcaaatgaggagctatgatcagagccttctcttcttatggtagctatgttatctggaatgaacaatggtggctcatctaaagaaaaacttttgctgcttcttctttggcggggttgtaggttcttctcaggttttttcagtttcagtttatcctcttccttaaaatgctcaacgcctgggtgttcaagctcttccttcacgtgactattggttttcattgctggggcctgttgctgaggcttatgacactgtttctggctagaatgtgatacatgtccagtttgtgcaggatgatgaggttctttcaagcaaccaggatgagcgtgtgacttatcactcaaagaatgagttaagggcttgaaaatttgtactaaagtttgatcctgtaatgtttttttcagtacagaatgagcttggtttttcacagatttaaccccagaattgcaactctgaatctttggctccttatcaatttgtttttttctgnctttgactggcctatgaaaattttgctgagattctggtacatcagtatttcgtttcacacttttgacattaactttagttttgctatgtattacttcatactttgctgcaacaattttcttcggagcatctgtggtcatgttttgcttagaatgaattacaggttttgtatgtttggattttacactttttgactctaagtaagaaacgctacttgactggctgtttctgtcatcctgaaggtttgctgtttcatgggactctattttagtactttctatagcattcaactgttttgaatttgggtcaggcacatcacaaatagcattttccaagatattactttccggtccaaaagtactagtatcaaccacctctaagtttgatttattaaactcagtgctct

SEQ ID NO: 80369 - DNA, 1185 bp, Homo Sapiens
acaaataaaaagaatcatttcattgacataatttctatcaaagcatgaataaaatttcacctattaattgaaaaatggaattgaattagaaagtttaaaagacgtaagcagaaaccagacatctacatcatgaactctgaagtagtatgtgctgctatgtccagtttgcacaacacttaactgtgttcttcagtatagtcacttgtgcccgtagcagccatgtgataaagaaaaaatgagtatcaaaaccaactccatcgtaacagaaaggtaaattgattttcatttcaaaactgcctgtgtaaagcattacagaatcctggaccactgaataccaccattctctgttatcctgagtatgtcaattaaacagtaatttttaattaagagcggaaaaattttataatacaaagaaacatccatattgcaatttctgtttacaattgcacacagaagtacagtgtacgtaagaaatacatgtctgcatataacaaggtatgtacattggcaagtgatgtctccaatgttgaggtggtcgagcctcctagccttgattggcagttgaaaaaaatatatttatttcaatttgtggtaaaagtttattgagagccaagtttgcctgcaagtgaagaaaatgcagcaacgaagaacagggaacacggggcacataataatattctaagactttgtgccattaagttaaaaatatctgttcataagaaaattgggttccttttccacctcccacccccaaattggaattttcaggctttaaaatttaagtaattccacctggtctgaggatatgatctcttgccattttttcttcaactgttacttgtgagggtttagtttggagatgatgacttaataggtttctctttggagtgaagttttcccattgtaggcactaggaagaaccaaggcaaaagctgcagttagcgtctcatgtgtcccatttgataactctctcggggccgctgacgctggggttgctgaatgggctgtggaggtctcctcctctttaaagtgcctggaagtggtttaggaggaggcaactttggattactacttggagtatgaacactgcatatcttaataaatccagccattagcatgatcagagcaattcccataagtaatactgcccaccaatgagcctagaaataaacagatttttccact

SEQ ID NO: 80370 - DNA, 806 bp, Homo Sapiens
  misc_feature (16)..(16): n is a, c, g, or t
  misc_feature (61)..(61): n is a, c, g, or t
tgacagtgccactttnatatttaatgtcaatctcattagacaaaaaatgaaatatagttcntagggtttccaattaaaaaagtgaaataataaatatattcactcaaacattttctcagtgccatatgcaagttaccatgtcccagaagctgatacagttttaagaaggaaatatataagtactgtaagcctgtgataactaaaagcaacatactaaaaagtgaaggtacagataattggaacaaatttaatagcgtttaaaagtgtatttggtaatttctccaggaggtggcactgttgagttgttttttcttttcagacagtaagacaatagaccattcatctttgtgtcacccaaacaaagaaatattcctttataaccccctttcctccccccacctaatcacatgctactggaactgactgtcttgtgatctactcccatagttggcatagatttaaaaataatcttttttaaattaatctgatagtagttatggaaaggaacaaattgttcaccaattttcatcagctttatcttttcagtccagtaactgagaacttaaaaagactattctagtgattttactatcctgctcagatggcattcaaaaacatttttcacttctcacgtcttggaaaaatttgtaaattcgttaagtctttttgtttgaaagttaatgtgactggaaatattttaatgtaaatatcgggttgggtgcattgtatcattttgctctacaatgactatatcctcatttgggtttatggccagtttataattaaaagtaatctttacttgcaaa

SEQ ID NO: 80371 - DNA, 1014 bp, Homo Sapiens
  misc_feature (125)..(126): n is a, c, g, or t
  misc_feature (128)..(128): n is a, c, g, or t
  misc_feature (131)..(714): n is a, c, g, or t
  misc_feature (747)..(758): n is a, c, g, or t
taccgtagcgcacgtcgatgacggggtcgtcaacagccagctgaggacgactacacgactggatactacagctgagcatgagaagcccacgctcccgaaggagaagcgggacagtatccgtagcnngncannnnnnnnnnnnnnnnnnnnnnnnnnnnnnnnnnnnnnnnnnnnnnnnnnnnnnnnnnnnnnnnnnnnnnnnnnnnnnnnnnnnnnnnnnnnnnnnnnnnnnnnnnnnnnnnnnnnnnnnnnnnnnnnnnnnnnnnnnnnnnnnnnnnnnnnnnnnnnnnnnnnnnnnnnnnnnnnnnnnnnnnnnnnnnnnnnnnnnnnnnnnnnnnnnnnnnnnnnnnnnnnnnnnnnnnnnnnnnnnnnnnnnnnnnnnnnnnnnnnnnnnnnnnnnnnnnnnnnnnnnnnnnnnnnnnnnnnnnnnnnnnnnnnnnnnnnnnnnnnnnnnnnnnnnnnnnnnnnnnnnnnnnnnnnnnnnnnnnnnnnnnnnnnnnnnnnnnnnnnnnnnnnnnnnnnnnnnnnnnnnnnnnnnnnnnnnnnnnnnnnnnnnnnnnnnnnnnnnnnnnnnnnnnnnnnnnnnnnnnnnnnnnnnnnnnnnnnnnnnnnnnnnnnnnnnnnnnnnnnnnnnnnnnnnnnnnnnnnnnnnnnnnnnnnnnnnnnnnnnnnnnnnnnnnnnnnnnnnnnnnnnnnnnnnnnnnnnnnnnnnnnaagctgatgttggagcggccgcggctgtaggcnnnnnnnnnnnnattcttgctgctgggaataattctctttctgtgggttcatagagaactttgaatacattttatgatagggatcaaattctatgctttcattaactgcattcatatcccaccagcaattaagtataaattccctgtggataagctgtttattactcatcttgtggataagctgtttattcccaatccatcatagaatttatgtatggcagatgttcaataaatacttgctcaatgaatgaataaatatattaaccat

SEQ ID NO: 80372 - DNA, 640 bp, Homo Sapiens
gggccggggaactagcaaggactcacaagagcacagagggcaaggagtttgggaaagcaacccttcaaggtggttatgaaatcctggctccccgtgagctgcacacgaatgaatgtgattctaatcagcacacaaaggactttgagaactgaagtaacagacagaccaccgtctagggtccaggcagtcactgagtagcacatttgtggacagatgtaaacaacactgcaaaggccctgaaaattgaactgaccttgaaaccacagaccaaagatggcgggttggaacttaagcctgaacctacctggattttattgtctgctaagacaaaaataccaacatttcccataggatttaaacaagaccccattcataacataatagtcgaactgtctaggacacaacccaaaattacttggcatgggaagaattagacaaatctcaactcagatggcaaaaagcaatcaacagacactattaagatgacacagactttggaattaaatgacaaagatattagaggcactattattaatattaaaatgttctaaaaagcaattgtggacactcttaaaatagatggaaagataactttagttaccccactctgccgaactaaaaaataaaataactggaattt

SEQ ID NO: 80373 - DNA, 894 bp, Homo Sapiens
cctgtttcgagttgatatctgattgtgaggaaggactgtgtcattggagcttgtttctgctgcaacgtgctgtagactatgaataatgaaatcacaccacattaccatcagatttcttgttttagttgtcaaattaatatttatgattgttatcttgggcgaaaagttcagagcagagatgacaaatcattagaacaacgatgaatttcagtattacggctaaaaagttcttctgtctgaatattaactcactctccttccagtgtacttcacagtaattggtatgcctttttatttaatgcttaaatcaaactttataaaaatcttagaccagatctttaatatggtatgccatttccccagtctaccaatggaatagtatgggtttctaatcctaggcttgtacaatggattggagttgagccatgccagcctccacactgccactaacttctgtaatgtaagattgagtcactgccaagcatttgaaatatgcagttgtgttttaattataatttatgtatagttagatgtatgtagtgcattgtgtggtattatttggtttgtaagaatttatttttaagggtcaaggtcatttgtaacattttgtgtgtgtcaattcaatgcaatgttggctgacttttgaagtctttgatatattggtgaatattcttctgatctataatacaaagctatgtaattgttacctctttgactcgcttttgacaggaagacaaattgttagctagatattgagttttcccctcagaattatgtgaatttctgatatatggctttagataatgtgaatctgtgtccaatttagtgcagttatctgctttaattgttcagaactatattctaacgaagcataagtctgatgggtcttccagt

SEQ ID NO: 80374 - DNA, 709 bp, Homo Sapiens
tgatgagctcattgagagaaccatgatggtcaattgccatgcacacttctggaccactaaggcttttcttcctacgatgctggagattaatcatggtcatattgtgacagttgcaagttccttgggattgttcagtactgccggagttgaggattactgtgccagtaaatttggagttgtgggttttcatgaatccctgagccatgaactaaaggctgctgaaaaggatggaattaaaacaaccttggtttgcccttatcttgtagacactggcatgttcagaggctgccgaatcaggaaagaaattgagccttttctgccacctctgaagcctgattactgtgtgaagcaggccatgaaggccatcctcactgaccagcccatgatctgcactccccgcctcatgtacatcgtgaccttcatgaagagcatcctaccatttgaagcagttgtgtgcatgtatcggttcctaggagcggacaagtgtatgtacccctttattgctcaaagaaagcaagccacaaacaataatgaagcaaaaaatggaatctaagaatctttttgtatggaatattacttctatcagaagatgatcaagatgtttcagtccagtgcacatcagcattgctgacattttatggattctaaacttgtgttgtttcttttttaaatcaacttttttaaaaaaataaagtgtaaattaaccgac

SEQ ID NO: 80375 - DNA, 1087 bp, Homo Sapiens
  misc_feature (186)..(204): n is a, c, g, or t
gtctttatggcactttattctttcgaaatattactaacaatattactttcaaaatattactaacaatatagtctcaagaagttaataatcacatgttcatataataacatacatcagtcagctaagaaaaaaatcatattcccccttatatctaaaattttggttaagagcctgaaggaatattgnnnnnnnnnnnnnnnnnnnccccacatacatacacattacatacattgtaaacttagtagctgaaatgttgattcttttcttttggctgagcaattaataggcaatggatgaaatcagcattttccaacacccctcttccccacgcacattgatgatgcacaggcagctcatttggacgaattcccaaatctttttacctggccgtgtggttagtgattggtactattagcaatcagctaactacactgcctagtaactagactcatagaaaaaattgcagtctcaagttggtaccccaacacgttgtgacaggcaggcaattcattggttgagttggagctcaactgagttgctagcttggtgaatactctactagacgatggcaaatagacacagtgaatcacagcatacagtattaactgttacatggatggaggggcttcacctccagggattttgctttcctggcatgagactgtttcatcttctgtgactcctagagagagctaacagtttaactgtatctggagaaaccgcgggtttcctcgcacttgcagcgggcgctcgcggggcaggctgcgcaggacccacgccgacgccgcgcttctcaggcatcttctctcgaaggctgcgggctgcccgagccggcgtcttcttcccggccgggcggcggtgatgctgtgcctgagctggattgctgccatccaaggcaatggttgggtcagatgccttgaaaagtaggtttctacagacttttcttcaaaagtaataaaaaataaaactcatatgtaaaagtcatgaagatgcattgcctactgaaataactttttaaaatgagtttattttctatgtagtacaactaaaaatttaaataacgacaaaaaatatgtgtggcctgtcc

SEQ ID NO: 80376 - DNA, 2010 bp, Homo Sapiens
gggtccggaattcccgggatgccgcggctggcgggccttgggcttcccctgaagcatgagccctctcgcccgcagccaccctcaccgcgtggcccgcggacagtgcgcgccggggtcccgggtgcacagcctcaggataccccgtgcccgcagctcgggcgcccgcggcaggcgatcagtgggtgaccgcggctgcgagggactttgtcatccgtcctccaggatctggggagaaagagccccatcccttctctctctgccaccatttcggacaccccgcagggactcgttttgggattcgcactgacttcaaggaaggacgcgaacccttctctgaccccagctcgggcggccacctgtctttgccgcggtgacccttctctcatgaccctgcggtgccttgagccctccgggaatggcggggaagggacgcggagccagtgggggaccgcggggtcggcggaggagccatccccgcaggcggcgcgtctggcgaaggccctgcgggagctcggtcagacaggatggtactggggaagtatgactgttaatgaagccaaagagaaattaaaagaggcaccagaaggaactttcttgattagagatagctcgcattcagactacctactaacaatatctgttaaaacatcagctggaccaactaatcttcgaatcgaataccaagacggaaaattcagattggactctatcatatgtgtcaaatccaagcttaaacaatttgacagtgtggttcatctgatcgactactatgttcagatgtgcaaggataagcggacaggtccagaagccccccggaacggcactgttcacctttatctgaccaaaccgctctacacgtcagcaccatctctgcagcatctctgtaggctcaccattaacaaatgtaccggtgccatctggggactgcctttaccaacaagactaaaagattacttggaagaatataaattccaggtataaatgtttctctttttttaaacatgtctcacatagagtatctccgaatgcagctatgtaaaagagaaccaaaacttgagtgctctggataactatatggaatgctttctaagaacagctgaagctaatctaatttaaatttaacagcttgaagaggtagctaggtgtttaaagttcctccagatacttttacctgagtgatgcttcccttcctaaggctgaccaagacctgttgatccttttagattacaaataaaatgtcgcatgtaaaggctgaagtcgcgttttatcagaatgccttgccttcttaggttcttttccattatgtcaaaggtccaggctccagtaggagagaaagaactcctcataggaatactgaagaagtgggaaggaaccaagctgacacaggcctcactgcaatttgatatgcctgctgatcagagtctcttgggcattttatattttgcattctgatgtacctaggagttttgttaaacagatgatgtatgtgagtatttatcccattttatgcaattaaccaaatcaaccaaaaaaagtgaccatgaagtcctgtatttgtctttttactacatgtaggaactctcatgtgaatgagtactgtagtaatccattctatgggagccttatttcagaaatatttcaaactggtgcaaatggaaaagactttctcttttcctttaaagctaaagacaagaatatcatgctatacaggtgcaactcaatccccgttaataaaaaccaatgtaggtataggcattctaccctttgaaatagctgtgtcccaacctgttgccattgattttttggaaatggctttagaaatatccaagttgtccttgaattgtctaaccatggacataaacagttgtctcccttctactgtgtagaatactttgacttaattttcttccagatacagggggatacctgcctgtttttcaaagtgtttatttactgctgttactatttgattagaatgtattaaataaaaaaaacctgatttctaaaaaa

SEQ ID NO: 80377 - DNA, 1109 bp, Homo Sapiens
tatgaccggcgaaaaaaagaaaagaaggagagcacgaaggaaagattggtgaactgggaagaaagcaacaaagatagagaagccatgtactcaagtaccaccaagggatctgccatggggaccctccagtgctggatttgatgagttaactgtgaaataccacaagcctgagaactgaatttggggacttctacccagatggaaaaataacaactattttggtggtggtggttggtaaatgcctcttaaattatatatttatttaattctatgtatgtaaatttatttagtttttaacaatctaacaataatatttcaagtgcctagactgttacttgggcaatttcctggccctccactcctcatcaccacaatctggcttagtgccacccaccttggccacaaagctaggatggttctgtgacccatctgtagtaatttattgtctgtctacatttctgcagatcttccgtggtcagagtgccactgcgggagctctgtatggtcaggatgtaggggttaacttggtcagagccactctatgagttggacttcagtcttgcctaggcgattttgtctaccatttgtgttttgaaagcccaaggtgctgatgtcaaagtgtaacagatatcagtgtctccccgtgtcctctccctgccaagtctcagaagaggttgggcttccatgcctgtagctttcctggtccctcacccccatggccccaggcccacagcgtgggaactcactttcccttgtgtcaagacatttctctaactcctgccattcttctggtgctactccatgcaggggtcagtgcagcagaggacagtctggagaaggtattagcaaagcaaaaggctgagaaggaacagggaacattggagctgactgttcttggtaactgattacctgccaattgctaccgagaaggttggaggtggggaaggctttgtataatcccacccacctcaccaaaacgatgaaggtatgctgtcatggtcctttctggaagtttctggtgccatttctgaactgttacaacttgtatttccaaacctggttcatatttatactttgcaatccaaataaagataacccttattccataa

SEQ ID NO: 80378 - DNA, 2298 bp, Homo Sapiens
  misc_feature (468)..(478): n is a, c, g, or t
  misc_feature (1273)..(1296): n is a, c, g, or t
  misc_feature (1323)..(1352): n is a, c, g, or t
  misc_feature (1403)..(1434): n is a, c, g, or t
  misc_feature (1471)..(1510): n is a, c, g, or t
  misc_feature (1622)..(1665): n is a, c, g, or t
  misc_feature (1756)..(1756): n is a, c, g, or t
  misc_feature (1844)..(1852): n is a, c, g, or t
cctgctcctcaaaatgttgtcttgttccggcaatcacttttgccttccctctttcctgagcctgtagtgacaaagcccggcgatttgggatgaaatctgttgtaacaccagagctttgattacacatcctctggttttgagttattctacagaatcagaaaggctggaaggtgggcttcacactcaggattgtgctttgagaaccagctaatagaccagccgagggaaggttgaattggctgtctttacttttcccgataagccctacttaaatgcagcctgtaattgtataaaggagatgagaaacatcaagagaaatgacatacatgtagctctggggtagcaagaactagacttcctcaatttggattccatttccttctgccatttgcttttaggcaattgagtgtgggtagtgatgagatatcaaatcccttagtgtttccattttgggaaatgaggcactannnnnnnnnnnaaaagacaacttacccacctgagtcctgaaacagtttgtctctccagttttctggcctatactctagttagctctgatccaagtttacaggacaacagccttgctttaagccatgtcctgttgtgggcacgataatagcaactgagctgtcacagcctaccagcaggctggtaacacctccagggtctcttggctagagcagatttcttagcagctgactaggacttcagtcattgggaagcctatgaggcctttacatttttggtgtgagatggggaagaaacataaaatgccactttacaacttcaataatagcctgtaatttatatttactgtgtgaatttttagtcctatattttaataatttgtaaattgatctcttattccaagaatcctttgaacttgtagaacatctgggagtccacttccctgtcctcttcctgatccctgctttctggactgtttaaatcctctttgggatggatcagagagtctagagaggccactcataggtccagctgctggcctcctgactctccaaagccttcactggaattgggacatttgctccagccctagctgtgaacatgaccagagacattatttataattcagccatttaagatatacctgtactcaaaaagtcctgtatatttttaaaaagttttatttttcaggtgaacaaaaatacatcctaagaactctgcctacaaacaaaacaaaaaacaccccccctctcctcacgattaccatattccccgcgaacctctaaaaaagaaatacactctcctactnnnnnnnnnnnnnnnnnnnnnnnngccttttcataccccgctctgtttctnnnnnnnnnnnnnnnnnnnnnnnnnnnnnntctttctcattacgcccgcgcttttaattccctagtttcccataccctttnnnnnnnnnnnnnnnnnnnnnnnnnnnnnnnnttacctaagaccaactcgcgcgaccgccttcagactnnnnnnnnnnnnnnnnnnnnnnnnnnnnnnnnnnnnnnnngactccatttaaagcctccctaataaacccaacaaaaaacccagcgaatgcccgtccctccccagatcccccatatacgcccccttcgacaccccctcccgtataatttatnnnnnnnnnnnnnnnnnnnnnnnnnnnnnnnnnnnnnnnnnnnncttgccatctacctctcgccttttgattcacgccatcttgccgcattaataattcccaattttcgcagcggctctttactattgtccaccnccataattccgctcgactactcttgatgtatggcccgcgcgcgctccgcgccctaaaagcgaacagtcaccgcgccaatacataatgnnnnnnnnnttctgcttatcgccattaattcccccgtaccggtcgcgccctttcatcgacctattatatttgattataggccccccggcccactaaagttatgtggtattattcccccatattctaccctcgtccccctcaaccttaccccttatgccaatgcctctatttacaggcggtcacccaactattcacctctgcctcttgggtcaccccctgcacttttgtccacttctcacgacgaattccccgcacaccccgcacattctgcgccgccgcacacctctgctttccttacccacggaatgtccgccctcacgagacaaccactaagaccagtcgacataagagacacgccagtgtcccccccaccaaccccgcgacttgcgcgtttgtacacacccggtaaatgtttgttcttgtacatgcacgcgcgtcctcttttgcgcccgata

SEQ ID NO: 80379 - DNA, 885 bp, Homo Sapiens
gagggcaccaaaagtagtggagctcaggtacgtcaacctagttgcagtggccagagatgcattaaatttctagatccttgtatatagttgttgacatatgcactagaagctataatcacatagaattctatgtatatcctcccacaccctgggtagctactgactgaaggggtcaagcaagggctatttgctgtcccccaaaaagtacacctggccagaagggcacaaacacggcttcttaaatcactcactttctcctgttcccctcctgtttctgaaatataagtttatgacgttctttcacaaaagagtataatcattcttagactgttgacatggctgtggaaagccttaggagaagtagaaacaatttagggagggtggggaatgtactcatcccctcttctttccatcctagtgcccccaccaaagaggcttcttgttgcagccctcagtatctggatatgggccagggaggaaggaagggaaagagcaatgctgctgtgcttcaatcctggccttcccctcacagaattcttttaggaagagcaagcttttaatcctttgaacttgtagaacatctgggagtccacttccctgtcctcttcctgatccctgctttctggactgtttaaatcctctttgggatggatcagagagtctagagaggccactcataggtccagctgctggcctcctgactctccaaagccttcactggaattgggacatttgctccagccctagctgtgaacatgaccagagacattatttataattcagccatttaagatatacctgtactcaaaaagtcctgtatatttttaaaaagttttatttttcaggtgaacaaaaatacatcctaagaactctgcctaaaaaaaa

SEQ ID NO: 80380 - DNA, 1764 bp, Homo Sapiens
  misc_feature (44)..(45): n is a, c, g, or t
  misc_feature (60)..(61): n is a, c, g, or t
  misc_feature (88)..(88): n is a, c, g, or t
  misc_feature (117)..(119): n is a, c, g, or t
  misc_feature (130)..(130): n is a, c, g, or t
  misc_feature (138)..(138): n is a, c, g, or t
  misc_feature (153)..(153): n is a, c, g, or t
  misc_feature (213)..(213): n is a, c, g, or t
  misc_feature (221)..(221): n is a, c, g, or t
  misc_feature (225)..(225): n is a, c, g, or t
  misc_feature (227)..(227): n is a, c, g, or t
  misc_feature (231)..(231): n is a, c, g, or t
  misc_feature (236)..(291): n is a, c, g, or t
  misc_feature (396)..(396): n is a, c, g, or t
  misc_feature (556)..(564): n is a, c, g, or t
  misc_feature (988)..(1050): n is a, c, g, or t
  misc_feature (1097)..(1603): n is a, c, g, or t
ctcgaattccgctgctgcttagagaccagtgcagaaactacatnnttagtcaatgcatgnncaagcggagtcctcatcttgagtgatnaagccgctgaaaatccgaggaaacaacannncgatgatgacngacacacncatgtccaagtcccntaaaatatacccacttgtcttggtctacgcagaaaagagacgcaaagtgtcaaaaaggancaaaagancaanancgantagcnnnnnnnnnnnnnnnnnnnnnnnnnnnnnnnnnnnnnnnnnnnnnnnnnnnnnnnngaagcgaagataagaaagaagccctcatatccaattacctcactcattcacatgtgagcgacacgcagacatccgcgagggccagcgtcaccagaccagctgcgngacaaaccactcagactgcttgtaggacaaatacttctgacattttcgtttaagcaaatacaggtgcatgtaaaacacgactttgggggtgatttgtgtgtagcgcctggggaggggggataaaagaggaggagtgagcactggaaatactttttaaagnnnnnnnnncatgagggaataaaagaaattcctatcaaaaatcaaagtgaaataataccatccagcacttaactctcaggtcccaactaagtctggcctgagctaatttatttgagcgcagagtgtaaaatttaattcaaaatggtggctataatcactacagataaatttcatactcttttgtctttggagattccattgtggacagtaatacgcagttacagggtgtagtctgtttagattccgtagttcgtgggtatcagtttcggtagaggtgcagcatcgtgacacttttgctaacaggtaccacttctgatcaccctgtacatacatgagccgaaaggcacaatcactgtttcagatttaaaattattagtgtgtttgtttggtccagaaactgagacaatcacatgacagtcaccacgaggagagnnnnnnnnnnnnnnnnnnnnnnnnnnnnnnnnnnnnnnnnnnnnnnnnnnnnnnnnnnnnnnngcctacagccgcggccgctccaacatcggcctcgtgccgaattcttnnnnnnnnnnnnnnnnnnnnnnnnnnnnnnnnnnnnnnnnnnnnnnnnnnnnnnnnnnnnnnnnnnnnnnnnnnnnnnnnnnnnnnnnnnnnnnnnnnnnnnnnnnnnnnnnnnnnnnnnnnnnnnnnnnnnnnnnnnnnnnnnnnnnnnnnnnnnnnnnnnnnnnnnnnnnnnnnnnnnnnnnnnnnnnnnnnnnnnnnnnnnnnnnnnnnnnnnnnnnnnnnnnnnnnnnnnnnnnnnnnnnnnnnnnnnnnnnnnnnnnnnnnnnnnnnnnnnnnnnnnnnnnnnnnnnnnnnnnnnnnnnnnnnnnnnnnnnnnnnnnnnnnnnnnnnnnnnnnnnnnnnnnnnnnnnnnnnnnnnnnnnnnnnnnnnnnnnnnnnnnnnnnnnnnnnnnnnnnnnnnnnnnnnnnnnnnnnnnnnnnnnnnnnnnnnnnnnnnnnnnnnnnnnnnnnnnnnnnnnnnnnnnnnnnnnnnnnnnnnnnnnnnnnnnnnnnnnnnnnnnnnnnnggaaccgacagactataaaataccaagcgttcccctgtgactccccgtgcgtctctgttccgacctgcgcttacgggaactggtcgctttctccctcgggagctgggcttctcaaaccacgcgtggtaccattcggttaggcttcgcccagctggcgttga

SEQ ID NO: 80381 - DNA, 1090 bp, Homo Sapiens
  misc_feature (46)..(46): n is a, c, g, or t
  misc_feature (92)..(101): n is a, c, g, or t
  misc_feature (155)..(172): n is a, c, g, or t
tttaactgaaaaacaaacacccttagagtttttcagttcacctttntgttaaggagcagagcctgcatatatatgtaaatgtctcaatgatnnnnnnnnnntgtaaacatggattggcattaatttgcaagcagaatcttaatagcctgatgggnnnnnnnnnnnnnnnnnncttctagatgaagttaaacgttcgttttcaccttacgatgggaacaactgtaatgcaggcggctctgcctctatttgccactcttggccctcttgctattaagggaaaggctttgaagagcacagcactgacagggctgtaaagatggaaggagctggtatttttaccatgcgtagattcccaagagaacttgtactaaaaagcagaaagttacaaggaagcagaattaggccaacatttccagcaattaaaacaatgatgggaaactccaatccatgaggaggctggtcagtcacctcaaggatactggcctaaagaagtctgaagtggctgatgtccataacttctgagtctgtttccaaaagaaagactcttgttaatgctgttaccagagagtagagatttgaccagcctctccctaaaatgtaagcttctcaacaacagtacaggaagaagtgcaagagtagactagaacctttaaggaatttggggctggaacggagctatgttgcatctgttgttatacaggtagattataagttctacatgcaccagccaaaacttaggacaggatgtccccaaattaagatactacagattaccaaatcagaaataaccagctggatttaggccagctcacatttatttggaaattaccctccctgattaacaggcttctgagttgtacgtggaggactaatgagacttgtacaagacaccacggggcttggggtccaggtcccagttggatatcggaacagacacagataagtgtgtttcctcattaaggtggtgagagtgtgccttttggcattcagaaaagggtttagccaccctaagagttggaaataaagattcccaactggaaatgttgcagaatccctacaagtgtctcaataaaaaaaattttaaaagaaa

SEQ ID NO: 80382 - DNA, 1383 bp, Homo Sapiens
  misc_feature (848)..(951): n is a, c, g, or t
tggccatacctctctgagtatttagctattgttctatatactggatacatctattatgggaacttaaatagataaattactactaaacacaaagaaccaagtagcctagtaaataagaattaaatccagaataatcattcacttctcatttttaaatcacgttgtactgatcccaggttttttactttctgagtagttgtccatcactttgaggacttgtgtatgggcttgtaccaatttactgacactgtcttaaatcctaaatctgtttttatgaggttttgccaagcaagaactcttgattactaagaggcagttagagacaaaccaatttaattccatgtcttcaattgtcacgcatttcttcttttactctttgaaactattctttgagtcaattttatggttctcagaagccaaaatacacaacttttagcacataaacaccaacgatggcctctttttgaggagttatgcatagacccactctagagtaatgatggtccctgtggtatatactttctcctactctagcaaacatgtagtttaatcttaatgtgttgtttccataagtgacatgaagtggatagattctcaattgttatgtccacttattcactaggtaaattttcagttttaatacttttctccttaccccttcctttgatcatttcatgtgaatattctatttgtatgatacactgtatttcaataaattccttgttgatgtacccttaaattgaagaaatttaagctgcaaaaccaaatctcattgtataagacttttttgaagtatcttgtatcgactacatatgtatttgaccctgtgggaggatggtacttttctnnnnnnnnnnnnnnnnnnnnnnnnnnnnnnnnnnnnnnnnnnnnnnnnnnnnnnnnnnnnnnnnnnnnnnnnnnnnnnnnnnnnnnnnnnnnnnnnnnnnnnnnggtacttttctttaaaaatactgtaagatcattgacgtatcagtctgcagcaactttcctacatgaggggaatacagcggtgtaatgaaacacatacttggtgcacactaggcgctctccggggctggtgcaccaaattctcctgtgagcatgctaccaagcatgctctgcttacctttgctggagtgtgtgctcatgcagccatactaattgaaaacaggcattcacaacaggatctgcctcacttgtgggatcaaaattttgaggcattgtagaactggcatatagaaaatctgaaaggagtttctgacccagatactgatatgtttgcagggtaattactgtgattggcagcttgataaattcccaattccctgtgggggcaatttccttatatatttgaatctgtcattaaaaatgtcattagtcttc

SEQ ID NO: 80383 - DNA, 965 bp, Homo Sapiens
  misc_feature (436)..(821): n is a, c, g, or t
  misc_feature (834)..(834): n is a, c, g, or t
  misc_feature (843)..(843): n is a, c, g, or t
  misc_feature (857)..(858): n is a, c, g, or t
  misc_feature (901)..(901): n is a, c, g, or t
  misc_feature (915)..(915): n is a, c, g, or t
cagaaggatgcatctggggctctggaagaacacttagtcctggacttggcagcagcccagaggcccaggcacccctgagacacagaggcatggggcatccgggaggcggaaaccacagaggcccacaccccgttcttgatcagctctctcaagactccatctgtgaagtggggcagccatcccgcagggctcctggggtgactgaggtgacactgaagctatccccactcgtgcccaggcagcagccaggcccagcatgctccagaccttctgcccaatcgatgattgaggcaggaggagttccaggacccagccacaggagccgtcacagccgcgggtgcccaggagcagatttcttgctcaggccacccagagcccagactcagaactcagccccctcgggcagctgtgggcagtccctcgtgccgaattcttnnnnnnnnnnnnnnnnnnnnnnnnnnnnnnnnnnnnnnnnnnnnnnnnnnnnnnnnnnnnnnnnnnnnnnnnnnnnnnnnnnnnnnnnnnnnnnnnnnnnnnnnnnnnnnnnnnnnnnnnnnnnnnnnnnnnnnnnnnnnnnnnnnnnnnnnnnnnnnnnnnnnnnnnnnnnnnnnnnnnnnnnnnnnnnnnnnnnnnnnnnnnnnnnnnnnnnnnnnnnnnnnnnnnnnnnnnnnnnnnnnnnnnnnnnnnnnnnnnnnnnnnnnnnnnnnnnnnnnnnnnnnnnnnnnnnnnnnnnnnnnnnnnnnnnnnnnnnnnnnnnnnnnnnnnnnnnnnnnnnnnnnnnnnnnnnnnnnnnnnnnnnnnnnnnnnnnnnnnnnnnnnnngacatgtgagcanaggcagcanaggggcagacgtannaggcgcgtgctgcgttttcatagctcgcccctgacagcacaanaatcagctaatcanagtgcgacccgcagacatagatcagcgttccctggactcctcgggtctcg

SEQ ID NO: 80384 - DNA, 1001 bp, Homo Sapiens
  misc_feature (967)..(967): n is a, c, g, or t
ggcggaggccctgcagctcccaatggactatgtccagcgggtcaagcggacccactctcagggcggctacggctcacaggggtacaagtataactggaagctggacgaggcccggaaaaacctactgcgaacccacaccacatcagccagcgcccgtgcgctctaccgccttgcccagaagaagcccttcactccggtcaagtacttctccatcgaccgccgtattccggaatgagaccctggacgccacgcacctggctgagttccaccagatcgagggcgtggtggcggatcatggtctcaccttgggccacctcatgggcgttctgcgggagttcttcaccaagctgggtatcacgcaactccgcttcaagccagcctacaacccatacacagagcccagcatggaggtgttcagctaccaccaaggcctgaagaagtgggtggaggtcggaaactcgggggtcttccgtccagagatgctgctgcccatggggcttcccgagaacgtgtcggtcattgcctggggcctctccctggagcgcccaacgatgatcaaatatggcatcaacaatatccgggagctggtgggccacaaggtgaacctgcagatggtgtatgacagtcccctgtgccgcctggatgccgagccgaggccccctcccacacaggaggctgcgtgacatgggccactctaggacaggtcatcctccccgagtccctgctgctgcgctcctttgcatccctggccagtgaccttgtatttatgaggcctctgtgaggccagcccccaccttcctctttcccacctgtcccaggaccagaatcccagggacagaggactgggtagcaggttccttctgttgtcctgtgtggtgtgtctactgtgagggtgggccctgaggagacctgtgggccacctattgtctaataaagtgggcagttgcccccatctggtggctttccnccttaacgcgcctctaaactataatccccttgtc

SEQ ID NO: 80385 - DNA, 650 bp, Homo Sapiens
attcctaattaaatggggagacaagtctttccagaggaacttctactttactttttacaattcctcctcttatttcataattcttcttcaaacttgtttaatatgttttgacttaattgctttgtttgtccttttaagagaagtaatttttctgaataaggtggaggagagttaggagttaactctgtaagcatggcagagacaggtttttgtgtaaaacttcgacggtagggaataatataacagcctacaagaataagtacaccaataacaacagcaaatgagctgttcgtggcagtacattgcggagcatagaacgaaaccgggtgtggaacactgagtcccaaggatagccatcttcagagatacggctcatgacccaggtacatggtaagcagagagcatcacacctgagcagcattcttactcagctcaacagcaatatctgagcccaagtttcccattccaatcaccaggatgcgttttccctcaaatccatctggatgcttgtattggcggctatggaaatattggcctttgaacctctccataccttcagggggaagaagagagaagtctgtgagctccagagcaactatgtcaagctaatttcaataaaactgcattgccagcttttcctttctggagtt

SEQ ID NO: 80386 - DNA, 1294 bp, Homo Sapiens
  misc_feature (383)..(391): n is a, c, g, or t
ggaatctgtgtggcggccgtgtggccccagcccctgatgcaagcgtgccagtgcacagctctaacacagatacattcaacaatcagtaacctttcggtgtctaatcaacaactgtcagtattcaagtagtgatattaatccacgaacttaaaattcttaaaaacaaatgaaatcttgagaacatataaacttattgctgtatttgaagtgatacaatatttttcaaagtatccatgaaataatttaaagatgcacaccttttaccagagcgtgtcatgcaaagctgctcaaaagagcaacttcagggcttctagaaatcatgacataaccccacactgacacagccaatttgtctcttcaattctcacagctttccatagcannnnnnnnnaagagaaaggtactgcatctttatcatacaggtacagcagttttaaagggacaaaattcaagtcaagacagttaccaactctaatcaatacgattaccaaagcacgacagaggattaacaagaagcacaatcgtcagagaaccacagcaggagtcggccatggctatgctatgtgcgtaccaccagtctagagccagccttcggtggagagcctgcactggattggctgaagatgccgctgtccctgcaccaaagcgcttggacagcagaggagaagtcttagtcacttaccctcagaggctacccatgaggtctggaccaggtgttggttacgctcacactctaacaccctgaaggtacataacgattatcttatgaggatgcttcacatggacgcagaaacccaactctttgagaactcgttctttccgcctttataatttggttctttaaattaacataatcttgatccagtagtagaggcacgggcttctttttgtctctcagctgtcgaaggcggtgaaacacattgatgacgtcccgtatgcgtcttggggcctcttctatcttggaagccaggtggacacaggccattgacacatgctccatggagtgcttcacgaaggacttggtataaaagaaccgctggaacaacacctgcccggtagccatggccacctagagtagaagaaagtttccgtattttcaaacgcaccattcaaagccttcgcggccgaaagtcatcgagtaacgtgggactccccacgcagaaccaaacactgaaacgcttcccacgtccacaaaggctacttcgcgtcccgccgtctcgggatccagcgcactggcgggcggggaggccccgggtcaggggcatgggctggctagggaatgtcgcgcgaggct

SEQ ID NO: 80387 - DNA, 1154 bp, Homo Sapiens
  misc_feature (84)..(118): n is a, c, g, or t
aaaaggatgtatagatcatatagggcgctagctcgttgcagccgaacgacgagcgcagcgaagtagtgagcgaggaagcggcgnnnnnnnnnnnnnnnnnnnnnnnnnnnnnnnnnnncagtcgacggtaccggacatatgcccgggaattcggccattacggccgggggtagtcgccgccgtcgctgccgctgccgctgccgccgtcgttgttgttgtgctcggtgcgctgagctccgcggctccgcgagccggttccgtccccttcccgccgccgccatgaagtggatgttcaaggaggaccactcgctggaacacagatgcgtggagtccgcgaagattcgagcgaaatatcccgacagggttccggtgattgtggaaaaggtctcaggctctcagattgttgacattgacaaacggaagtacttggttccatctgatatcactgtggctcagttcatgtggatcatcaggaaaaggatccagcttccttctgaaaaggcgatcttcctgtttgtggataagacagtcccacagtccagcctaactatgggacagctttacgagaaggaaaaagatgaagatggattcttatatgtggcctacagcggagagaacacttttggcttctgagggccattgctgggctaggtgcaccgtaactgcttgtgtatcttgtaaatagccagccattttcagttattataccagaacctcttcacatagacctattagtgcatttgtaactggatttatttcttaatatattggaaggttttgtttccttagactagtaaattatcatacagagttttattttgagtttttctttttgtgcattgtcctcatgcctgtattctccaggaaacttgtccttctggaaatcatattgaatgatatttctatatcgaagtgaggtaggtgcggtattaaagtgaaagggaaggtgatgcatttattctgggttatgcttgaagtgttagatggctaagtattaaaattatccaaattaaatccttagcagtcagaacacttgcttcactagaatatgccaactgccaatcatgttggactgagctaatttgttcctctttctgaaactattaaggtaaataattaacaataaaaattctcttataaaggcaaaaaaagaa

SEQ ID NO: 80388 - DNA, 863 bp, Homo Sapiens
  misc_feature (68)..(130): n is a, c, g, or t
  misc_feature (143)..(143): n is a, c, g, or t
  misc_feature (242)..(277): n is a, c, g, or t
ggtccggcgttcccaattaagcccggggcttccccgggtgccgggatccaagggccccccgggccggnnnnnnnnnnnnnnnnnnnnnnnnnnnnnnnnnnnnnnnnnnnnnnnnnnnnnnnnnnnnnnngccgggccaaccnccttgcgggacccggaagccgccgccccggttgggccccctcgagctccagctgctctgctggcacctgcaggactggggagatctccttggcgctgcnnnnnnnnnnnnnnnnnnnnnnnnnnnnnnnnnnnntcgacggtttcccatccccctctggcaaccctaatcttccttctccatctgggccctggggcgtcttccaccacccaggccggatgctttaaaaaaaattgctttttaaagtgtctgtcgttgaaagaaattagtcttacccttgaagtcaggggcgcgtcctcgcaatacacatcttgttagggaaagtgttcggctccagctagggttctacaaggcgtttcttgttcaccgccggagggaagcaggctccggagtgactgccttctgaaagtcggtcttgtaacaattggatggatgcctttgaagagcccctgtccctattctatgcttgaaaacagcgtgcagtcctaatgttcaagaaccacgaccacataaaaacattgctccccttctgctgctttgaaaacgacccctaaattccgtgtagaagttgccaggtcgtcttgacgtacacttcgtttgtatgatgtttgtctgtcaaatactgtgatggaagagtgtatgcgggggaggagcagggaatttttaaaagcattttccggtcacctcagactgggagatcatgttctttcctgaaaaaaaa

SEQ ID NO: 80389 - DNA, 919 bp, Homo Sapiens
  misc_feature (153)..(221): n is a, c, g, or t
ctatgaatattaatataattcagtggttaagagcagaggccctaaagtcacaaatggatttgaatcccagctcttccatttattagctttgtggtttggagcaagttccactgactgcctcaagtcttagtttctgtttagataaatccagannnnnnnnnnnnnnnnnnnnnnnnnnnnnnnnnnnnnnnnnnnnnnnnnnnnnnnnnnnnnnnnnnnnnaacagaatggttattgttactactactacaatgcctccaatcttttgtccttctaatatatccatcagaatgcaccagtcactctccaacagaaagactggatgatattatcatctcttcagaacactttcactggctcctcattgctgaaaggataaagacaaaacatcttataatttccaaggtgatacggtttggctatgtgtccccacccaaatctcatgtcaaattctacttcccaatttcggtagggggacctggtgggaggtgactgaatcatggaggtggatttcccccttgctgttctcaagagagtgagtgagttctcacgagatctggctgtctaaaagtgtgtagcacttcccccttcacattctctctctcctgctccaccatagtaagatgtgcttgctccctcttcgccttccgccatgattctagccatgattccgcctcccagccatgtttcctgtacaggctgcagaaatgtgagtcaactaaacctcttctttataaattacccagtctcgagtagttctttatagttatgtgagaacggattaatgcgtgaagctttccagaaaataaaccaatcctaactctccctcaaggtactgaaaggatacttccttctacaagatgacctttaaaaatgttactagagtcttatttcctttcctctaatggctatgtatgcc

SEQ ID NO: 80390 - DNA, 525 bp, Homo Sapiens
atgaagtggactgtggtttgtgtgcagtggatgaagtaattggagtgagtgcttctccctagagacagaatcaatcactgtggtagaagatggtgacattttagaaagaaactctgaggaaaatgtcatgcttaaaaaattagatttaaacacactggctccagattgatttttattacactcaaatggataccctgattgattatcagtcttacaaatgtttagcacatttctcacttctctaataatcagaataatctaattttcaatgtcatttaatgtactctattcaaggttataatagatcatatttctaataaaacacagcaattatgtaatgaataatacaggaggaccagcattcagattcccttgattttaaggcagtgccaagggaaggtcttagacaaacccatttctttaaatgtgatgcacattccaagtctttgcctgcattatagaggatgtttttttcctgctgatgatctgaatggaactttgccagaaaacttgacctcccccgac

SEQ ID NO: 80391 - DNA, 1594 bp, Homo Sapiens
  misc_feature (415)..(426): n is a, c, g, or t
  misc_feature (665)..(674): n is a, c, g, or t
  misc_feature (688)..(688): n is a, c, g, or t
ttatttccgcggggggttttcgcaatcccacacaggccccccctttttttgggggagaaaaagggggcctctttcccccaatagttcttgcgggccccaagaaaaaaacccctctttttataatggggaaatttttttgccagaacccacggtcttttttgttgtccgaaattttaaaagttggtgcccccagggcgggacccgggggggccccctttaaaattctcccgagtattattcgggagaggcttcttcgccccttttgagggcgttccccccctggtcttggaattaaagaggattcccccccggtttaaaattggagcccccctccccacggaaaattctcccccccttttgtcgggggaatttttggttttcccaagaaaaaacccggttttcccggggtttttgnnnnnnnnnnnngcggggggcccggcttttttttcgctatattttcggggtgggagaggaaaatttccccaagagcccccctttacggtctcaagtgaacccccaggggtttttttctcttagggggaaaaaccaggttaatgggtcccatggtttccccttttcccttaacgggggccccggcggcgcccaaaaaggaatgggttttagaaaagcttcttcgaggggccgagggcggcccgaccaagggnnnnnnnnnnccttctagggttcnacgtttggagatcataaatacttttaatatcagataaatcattaagaaattgcattctgtacttgatgaccacacgggaaccttgctagagtcaagagaacttgtcactagtaattatgaagacacctttacggtgagcgttattaaaaccctactagaggttttgggtgggactcaagagcaaggggtggccacctgtggacgagggttccctgttgttaacagaacacgttgcccacctcgcaagtatgcagcccaatcagtccccagggtctcggttcccgttgcgcccttccccatggccactgcgctcattcatgagcctagggtgatcaggcctccggcctataaagaactgcaggatcagtgcggctcttttctcgagatggtaggtggctctgaaaagagcctttatgtccatcaaaggggccccgggggcggcgggcggcctcacttgcccttggccttgtggtggctctccgtcttcttgggcagcagtacggcctggatgttgggcaggacgccaccctgcgcgatggtcacgcggcccagcagcttgttgagctcctcgtcgttgcggatggccagctgcaggtggcgcgggatgatgcgcgtcttcttgttgtcgcgcgccgcgttgccggcaagctccaggatctcggcagtcaagtactcgagcaccgcggccagatagaccggggcgccggcgcccacgcgctccgaatagttgcccttgcggagcaaccggtgcacgcggcccacggggaactgcagccccgcgcgcgacgagcgcgacttagccttggcgcgcgccttgccaccctgcttaccacgaccggacatttccgagtcaaggaaaaaagacaacggcaaccgaaaagcgagactaaaaacaagagcggccgc

SEQ ID NO: 80392 - DNA, 901 bp, Homo Sapiens
  misc_feature (80)..(114): n is a, c, g, or t
tgtatacgatcactatagggcgctagcgtcggttttatccgaacgacgagcgcagcgagtagtgagcgaggaagcggcgnnnnnnnnnnnnnnnnnnnnnnnnnnnnnnnnnnncagtcgacggtaccggacatatgcccgggaattcggccattacggccgggggactttcccgatcgccaggcaggagtttctctcggtgactactatcgctgtcatgtctggtcgtggcaagcaaggaggcaaggcccgcgccaaggccaagtcgcgctcgtcccgcgctggccttcagttcccggtagggcgagtgcatcgcttgctgcgcaaaggcaactacgcggagcgagtgggggccggcgcgcccgtctacatggctgcggtcctcgagtatctgaccgccgagatcctggagctggcgggcaacgcggctcgggacaacaagaagacgcgcatcatccctcgtcacctccagctggccatccgcaacgacgaggaactgaacaagctgctgggcaaagtcaccatcgcccagggcggcgtcttgcctaacatccaggccgtactgctccctaagaagacggagagtcaccacaaggcaaagggcaagtgaggctgacgtccggcccaagtgggcccagcccggcccgcgtctcgaaggggcacctgtgaactcaaaaggctcttttcagagccacccacgttttcaaataaaagagttgttaatgctggcaaaggcatcacctggaagctacatacataaagtaggcaagatccatggaacgagcatggaatctgctgaatctagtacgaggatactatgtggatgtctcagacaaagtggacacggaaccagcatcagcccccagttgctcaggtgcttgaccaagtactcccagatccc

SEQ ID NO: 80393 - DNA, 1140 bp, Homo Sapiens
  misc_feature (1027)..(1061): n is a, c, g, or t
tattggcggatttcagcaggaatgaatccgggccagaaacccaaggaaaagaaaagtgaccacctgggtaaattgagggatggatttgttaaagataatctctgtacgttcaaatagtttgaagcctgtgaatgtaatacgtgatgtagaaaagtgagcacatttggtattcagaagaacttccccgtgaatgatattcggttgctcgtcagtgtgtagcctccggtatctccccacacatgaagtagaatgtttttaataaaaccatttgcggatgcagaatcaatcagtaatgtaggaatcagtaatgccatccatccacttattccttagaattggtaagtttggcaggcacttaggatcctggcatctctctgaaatgagaagcttttgcaaccttagtgccttttttccttctacctacaagcagtgaggttagctcttcctttgaaacggtaggggggctctgaaaagagcctttgggtttgatagcgtttccgggagctcagatacctgtcaaatcacttgcccttggccttgtggtgactctcggtcttcttaggcagaagcacggcctggatgttaggaaggacgccgccctgagcaatggtcacccggcctagcagtttgttgagctcctcgtcgttgcggatggccagctgcaagtggcgcgggatgatgcgagtcttcttgttgtcgcgagccgcgttgccggccagctccaggatctcggcggtcaggtactctaacaccgccgccaggtacaccggcgcgcctgccccaacccgctctgcgtagttgcctttacggagcaggcggtgcactcggcccaccgggaactggagaccagcgcgagaagagcgggatttcgctttggcgcgagctttgcctccttgcttaccacgtccagacattgcaatcagacaaaaatcaccaaaaccagcggcctaagctcacgagaaaacaaacaaaatcccccggccgtaatggccgaattcccgggcatatgtccggtaccgtcgactgnnnnnnnnnnnnnnnnnnnnnnnnnnnnnnnnnnncggccgcttcctcgctcacagactcgctgcgctcgtcgttcggctatagcggagcccctatatgagtctatacaatctt

SEQ ID NO: 80394 - DNA, 1126 bp, Homo Sapiens
acacttacggctaggtacgaggctggggtggaattcggcacgaggctgcggcgggcgttgttctagtgtttgagccgtcgtgcttcaccggtctacctcgctagcatgtcgggccgcggcaagactggcggcaaggcccgcgccaaggccaagtcgcgctcgtcgcgcgccggcctccagttcccagtgggccgtgtacaccggctgctgcggaagggccactacgccgagcgcgttggcgccggcgcgccagtgtacctggcggcagtgctggagtacctcaccgctgagatcctggagctggcgggcaatgcggcccgcgacaacaagaagacgcgaatcatcccccgccacctgcagctggccatccgcaacgacgaggagctcaacaagctgctgggcggcgtgacgatcgcccagggaggcgtcctgcccaacatccaggccgtgctgctgcccaagaagaccagcgccaccgtggggccgaaggcgccctcgggcggcaagaaggccacccaggcctcccaggagtactaagagggcccgcgccgcggccggccgccaggcctccccatgccaccacaaaggcccttttaagggccaccaccgccctcatggaaagagctgagccgcttcagactgcggggcaagcgggccgcggctcccttcccctcccctcccctcgcccgccttcgccgcccggcctcgagtccccgcccgcccccgctcccgtcccgcaccgcctgccgcgtcggcctcgggccctgccctgtccgccgtccgccctccggtagggttcgggccttccggatgcggcttgggcgctcttcggggacctccgtggcgcggaagacccgagcctgccggggggaggccggcggcgccgcacctgcccgcctcggcgttcgtgactcagccgccccatcccgagtcgctaaggggctgcggggaggccgcagcaccttctggaagacttggccttccgctctgacgcagggccgaggtgggcagtccaggccgagaggccggcggccctgaaggtgagtgaggccctcggcagctgcagccggggtgtctggtacccccccggcgtggtgcttagcccaggactttcagacgcggccgc

SEQ ID NO: 80395 - DNA, 537 bp, Homo Sapiens
  misc_feature (193)..(193): n is a, c, g, or t
  misc_feature (357)..(357): n is a, c, g, or t
gccccaaagccattggcttggatctgagggtctgagttggcagcaaggacccccagctctcactgggctctgtgggctccccctgggctctgtgggctccccgtgctccacaggtagactgttgtgggctctttttgcctgggcctcttctgaggcaggagctttcttgagggatgccacaaacagccttccntactccctgccagagcagttccctccctgatgagctggagaagggccctctggcctcctgacagtacagggagggcaccagctagatcctcccttgtggtgtgagatgttcctggaactcagccaggccctcctcctcctgggcttgcccagagcccccacccntattcccagcattgcccgaaggaccaaccagtttgggtgaacagtggcctcctcagcttcctccccatctgggtgccccaccggcggcggagggagctgtggcgatggtggggtgtggggagggacgaggagggaagcctctgtgctgctcacctgcccaaagcccagctcagcgggtac

SEQ ID NO: 80396 - DNA, 739 bp, Homo Sapiens
  misc_feature (44)..(44): n is a, c, g, or t
cagtgatcgtaaacaggctgcttcaccaagggcagagattgctntgcccaacattatatccccagtgcttagctcagtgccaggcacatagcaagcactcaagaaataccaaagaaataagtgatacatttcacaataataactctgtgctttatgactatatggtacgaagaagaattcagagactcgttctgagcaccaggagtgctgctgtcgatgaatggtgtatgggtggttgtaggcaagggcactggggatagttgaataggttttgccatccatgctctagatgatccatctgagatggcccctgatgcactgcaaccctcagagaagacagtccagaagagcttcaactgtcaagtttcattgttggaagctttcagacattaggatatattcatgtaactagcaggtcttggtgtgggtgcactgctgaggacctgcctgccagttctggggaaagcctcccatgtggacatcccctgagagctctcactaagaaatggctacaagcgggttagaaacaggcagatgaaataatagtgttagcagtcaggctataggagcccatagtgaggagacagtgcctagaagcggatggaaggttgatttcacgttctgctaattgggctgaatgccagttacactaagtgtgttttatattgtgaagattcatcattataccgctaggacttacacttttcaatatgtgtgctatacctcaacagtttacctt

SEQ ID NO: 80397 - DNA, 1591 bp, Homo Sapiens
  misc_feature (1515)..(1516): n is a, c, g, or t
  misc_feature (1574)..(1574): n is a, c, g, or t
ctccggcagtggcagcggaggcctgtgtttgcggccttcggcaagcgactgagatggcgagcgcaactgcacctgcagccgcagtccccaccctggcttcgcctttggagcagctccggcacttggcggaggagctgcggttgctcctgcctcgagtgcgggtcggcgaagcccaggagaccaccgaggagtttaatcgagagatgttctggagaagactcaatgaggcagctgtgactgtgtcaagggaagccacgactctgaccatagtcttctctcagcttccactgccgtctccacaggaaacccagaagttctgtgaacaagtccatgctgccatcaaggcatttattgcagtgtactatttgcttccaaaggatcaggggatcaccctgagaaagctggtacggggcgccaccctggacatcgtggatggcatggctcagctcatggaagtactttccgtcactccaactcagagccctgagaacaatgaccttatttcctacaacagtgtctgggttgcgtgccagcagatgcctcagataccaagagataacaaagctgcagctcttttgatgctgaccaagaatgtggattttgtgaaggatgcacatgaagaaatggagcaggctgtggaagaatgtgacccttactctggcctcttgaatgatactgaggagaacaactctgacaaccacaatcatgaggatgatgtgttggggtttcccagcaatcaggacttgtattggtcagaggacgatcaagagctcataatcccatgccttgcgctggtgagagcatccaaagcctgcctgaagaaaattcggatgttagtggcagagaatgggaagaaggatcaggtggcacagctggatgacattgtggatatttctgatgaaatcagccctagtgtggatgatttggctctgagcatatatccacctatgtgtcacctgaccgtgcgaatcaattctgcgaaacttgtatctgttttaaagaaggcacttgaaattacaaaagcaagtcatgtgacccctcagccagaagatagttggatccctttacttattaatgccattgatcattgcatgaatagaatcaaggagctcactcagagtgaacttgaattatgacttttcaggctcatttgtactctcttcccctctcatcgtcatggtcaggctctgatacctgcttttaaaatggagctagaatgcttgctggattgaaagggagtgcctatctatatttagcaagagacactattaccaaagattgttggttaggccagattgacacctatttataaaccatatgcgtatatttttctgtgctatatatgaaaaataattgcatgatttctcattcctgagtcatttctcagagattcctaggaaagctgccttattctctttttgcagtaaagtatgttgttttcattgtaaagatgttgatggtctcaataaaatgctaacttgccagtgattaaaaaaaagagagagaagagctgtnncggccgcgagcttattacctttaatgcgtcttctcataacatacacttccataggggngagggaaggaaagagag

SEQ ID NO: 80398 - DNA, 828 bp, Homo Sapiens
  misc_feature (690)..(690): n is a, c, g, or t
ggggctgtggcccggaagtggagcggctgtcgcagtgcggctccggcagtggcagcggaggcctgtgtttgcggccttcggcaagcgactgagatggcgagcgcaactgcacctgcagccgcagtccccaccctggcttcgcctttggagcagctccggcacttggcggaggagctgcggttgctcctgcctcgagtgcggggaaacccagaagttctgtgaacaagtccatgctgccatcaaggcatttattgcagtgtactatttgcttccaaaggatcaggccctgagaacaatgaccttaatttcctacaacagtgtctgggttgcgtgccagcagatgcctcagataccaagagataacaaagctgcagctcttttgatgctgaccaagaatgtggattttgtgaaggatgcacatgaagaaatggagcaggctgtggaagaatgtgacccttactctggcctcttgaatgatactgaggagaacaactctgacaaccacaatcatgaggatgatgtgttggggtttcccagcaatcaggacttgtattggtcagaggacgatcaagagctcataatcccatgccttgcgctggtgagagcatccaaagcctgcctgaagaaaattcggatgttagtggcagagaatgggaagaaggatcaggtggcacagctgggatgacattngtggataatttctgaatgaaatcagcccctaagtgtgggattgattttggccttctggagcaatataattccacccctagtgtggtccaccctgaaccgttggcggaaatctcaattcctggcgaaaaactcttggta

SEQ ID NO: 80399 - DNA, 473 bp, Homo Sapiens
ggcacgagggagatgcccagcagacaccgtcttcaccaagtggtcaaatgcacatcatcagtaatgggcactttgaaagtacgtgccacccaagagtgtcagtgctgtcacactcctgccaaagatgcttagcctgaatccagtgctgaggaaacaccaggcaaacacaaactgaggaacattctacaaattcagaacacttcaaaagtatccacgtcttggaagtcaaaaagcttccaatcagaaggagaccaaagagatgacaaccaagtgcagctcctgctcctgaactggatccttttcctagaggacatgactgggcctgaggacccgctaggagtactgcgtccatgctgacttcctgttcagtgtctgtatcgtgggcgggtagcagactctcagcaactgactcacacggttcaggaaacaaaattctttgtaacgcacttgcatcttttcctaagtttgagatt

SEQ ID NO: 80400 - DNA, 424 bp, Homo Sapiens
  misc_feature (26)..(26): n is a, c, g, or t
cccagtgtcacactctcctccagctntgagccctccctctccaaggagcagcaggaaatggtgcaggctttctctgcccagtctgggatgaaactggagtggtctcagaagtgccttcaggacaatgagtggaactacactagagctggccaggccttcactatgctccagaccgagggcaagatccccgcagaggccttcaagcaaatctcctaaaaggagccctccgatgtcttctttgtcttcgttcacatcctctttgtttcctcttttcaccagcctaaggcctggctgaccaggaagccaacgttaacttgcaggccacgtgacataaccacccaaagagccagttgctctgtgtattcgccccactcatgatcaccattttattttcataataaagagtgacgttacacgttgtaaa

SEQ ID NO: 80401 - DNA, 975 bp, Homo Sapiens
  misc_feature (751)..(824): n is a, c, g, or t
  misc_feature (919)..(934): n is a, c, g, or t
ggcctgggtggcgaattcggcacgagggttaatttacaagtttaaaaatattaggtactattaataatggttaaaaatagaaaaatgcatatttttgtatgataatcaaatgtaaaatacttttatttttgctggacagttgttatatcatgattattgtgctacagtttattgtgcataatatgaaaaacaactatgacagccttcagtcgggccagggtgaagctgcttataccacctctgccgtcagagggacatgtggtgacagcagtggtgtggctgcacagggcgcactagagagagctcagcacccctgctgcccgccagcagagcccgtgctgagggaatgccgcacagatgctgatgcactgggtgaaatttctagtattgaacgtaaaggtgtacagtgtcttgctgttattttatgatggaaactgattttgaaaccaaaaatagctaactaactttatttaaggaaaggatattaatttgtactaacagagggtgaaagctgttcacatttgtcaacaaaatctgcttgctgcagtagtaacctcaagtggttaaaacttgatttcccgagaaaactaaaacctttgtgcctaaaactgatgacttgagttcaagtgggatgagcaagaagatgtgttatcttgttgttcaacagtattgagtgtgaaggaaattttgatggcttaataaaattccccagcgaccaccaaacacgagatctctgccccttcctattcannnnnnnnnnnnnnnnnnnnnnnnnnnnnnnnnnnnnnnnnnnnnnnnnnnnnnnnnnnnnnnnnnnnnnnnnntctctttcctcgcccgttcatactgtccctttgtcgggcccagtgttacaagcgtgcctctaaacaccattttctccttatcaaaaggttccaannnnnnnnnnnnnnnntttatgtgggtgctaatttaattcccaccgagcccccttca

SEQ ID NO: 80402 - DNA, 531 bp, Homo Sapiens
ggcacgagggatatttataaatttaataaactgtaccatgctgctgcatgttttcaagtacatgttgaacagtaaggattggggagttgttttttaatggtcacctaaagcagctgctatagaaatgttgaactaaaattttgcatctggtcataccttcatgcatttatcatttgcagatatttttccatcattattaaaaaacaggaacttttaggctctgaagatcatgtggaccagagcaaattaaagttcagtttgtgtcacaattcattgccagacttcattggaatgctttgtttgatgatgtatgttcattctcagctttattttcagatgcttaactgggcaatgaagtctaacttcaggttgaactttctcatgtttaatctcaggctaaatgtaaatgatatttgtaaagtttgaataaaattctgtttactcattttgagttagtatgaaaaaaagtgattgtatgtttaagaattgaaattgttcattttgtgataaatgattacattccaaaaaaaa

SEQ ID NO: 80403 - DNA, 842 bp, Homo Sapiens
gtaaaggatgcttactccacttcgcttctctgcggcaggttcactttggatatgatctttcttttcccaacatatgccctcagaaaagtgacagtggtcccagaacctattccctttcttgagggagttcaaaacattcataggcagtaatgttcctcccagggtttccagggaaacaacatgaaaaacaggtgacatgaactacagactaaagattgcagcatttatgttagagaatgcttgaattagagaattttctgcattatctttgtctgttcactttctatcttatatacttatcagggccatactggtaagcttgcgtaggaggagttagagggaagttgaaagccaacatctggatcaatgtaatgtcaagatcacaaagacagagactgcaggggtccactgtgagaggtgacactgttggggaccttcctgattcattcttcttgggctttgctagcctgtacaacctacatgtcttttcttccactgcctgaaagacttgggttgaactataactgttggagagagatgttcctctttaatcatgaaacaccttaagaagtctataatgcaatccttagtcctaccctgaacctatgtgtcctctaagtcaggccctgatctagtgcagtaaagggaagggtgggcttaatgggagctttgcctgggacctgaacctggagcacttaccgcattaggaagaaaggagctccccgtaatcgttcctgacccttgtgtctcatataccctatcctggtggaaatgaccctatttgatatgctgtcccttaaaataacttgtatcaatattaaaatgactatttctacccttta

SEQ ID NO: 80404 - DNA, 1042 bp, Homo Sapiens
  misc_feature (187)..(195): n is a, c, g, or t
  misc_feature (699)..(699): n is a, c, g, or t
  misc_feature (753)..(770): n is a, c, g, or t
  misc_feature (884)..(892): n is a, c, g, or t
tattaacgacccagtcaatgaaaactgaatcaagaaatgatgctccatgaaatgcacgaagtctgttttaatgacaaggtgatatggtagcaacactgtgaagacaatcatgggattttactagaattaaacaacaaacaaaacgcaaaacccagtatatgctattcaatgatcttagaagtactgnnnnnnnnngacgtttttaaaacgtagaggatttatattcaaggatctcaaagaaagcattttcatttcactgcacatctagagaaaaacaaaaatagaaaattttctagtccatcctaatctgaatggtgctgtttctatattggtcattgccttgccaaacaggagctccagcaaaagcgcaggaagagagactggcctccttggctgaaagagtcctttcaggaaggtggagctgcattggtttgatatgtttaaagttgactttaacaaggggttaattgaaatcctgggtctcttggcctgtcctgtagctggtttattttttactttgccccctccccactttttttgagatccatcctttatcaagaagtctgaagcgactataaaggtttttgaattcagatttaaaaaccaacttataaagcattgcaacaaggttacctctattttgccacaagcgtctcgggattgtgtttgacttgtgtctgtccaagaacttttcccccnaaagatgtgtatagttattggttaaaatgactgttttctctctctatggaaatnnnnnnnnnnnnnnnnnnggaaactttttttgtttgctcttgcattgcaaaaattataaagtaattttttatttattgtcggaagacttgccacttttcatgtcatttgacattttttgtttgctgaagtgnnnnnnnnngataaaggttgtacggtggtctttgaattatatgtctaattctatgtgttttgtccttttcttaaatattatgtgaaatcaaagccccatatgtagaattatatcttcaggactatttcactaataaacatttggcatagataaataaat

SEQ ID NO: 80405 - DNA, 752 bp, Homo Sapiens
ttcattgaccattgagttgaagaccaaggaacaactttaaacaagttcaaatggtttccttcacaggaatcctttgtccaggtagttatccacataggacagtttgggattatccaaaactgggatgagcagcttgggataattcacacactaaagcctgagttcaaggtttctcagttgacaggtaggtatgtaaatcagggttctctggagtatttgtaggacctgccatatttgagtcctaacttggtgcaagtctggcagctaggtagaaaaggcactctagcaggtgtggtaggagcacgccccagaaggtagaatgtggtggggtgtgatggaacaggccagttggcctaagaattagtacttgctctaataatgggtttcatctattttcatgagttgcagcatctgcatatacaaggcctggatcactttaggatcaatattttgacacgggagaaggcagctcagaaaggattaaggaagatagctcaaagccaaagcagaccctccgtgtgaactttatactgctcacttccgtgtttcccaagtaaatggggaaactgtccaaccttgtcatgtgttgggacttactgcttgaggcaaagcatccatcctacatcataaaaaatctccaaagatctctttaagggctgggcatggtggctcactttgggagatggattgcttgagctcgggaagagaccagttcggtctctacaaaaaaatacaaacacaaatatactttc

SEQ ID NO: 80406 - DNA, 958 bp, Homo Sapiens
atgtgtataatcgagatggatacctgtgtctttaaattacgtagggaattttgtatgtttaaataattgtactgggttccataatgcttatcttagaaactttagtaaaagaaaatatatgaaccgtgcatttgtgaatgccccccttagagcattcatccaagttcagtgtgtagtgtgatggttattatagatatttaaagtatagtaagtggctgtgtaacaggagagactgctgtttacctacgtactgaagggtaactgctgcccgcgtaattaaatcagtattgtcctttcctgtcggtttgatcaattgcggtaccggtagcttcctgcttgtgactgttacctaattgtgtcaatgtacatctgtagtatgtacatgtgaaagtgcctttctattttagaggagttttagccttgctcttgtaccgttgccccgctctgtgccccacccccacctcctcctcccaattcctgctgcccactcgagtgattcgaagcttcctccctgtcccccaccttccccatccccgccttcctgtgcctcggtgctcagtaatgtcccatctcacctccctgtcggtcctcagactgtctcgttttccttgtagacgtgattgtgcctttctcacccctgtgtcctcccatcccaccgcatccgtcccccgctcatgtgctgctgacagcatcgcattcgcccgtgctctgtactgcctctcaccatttcattccctcctctctgaggtgaaaataaagggggatgcttttacagtctggaaagaaaaaaaatgttttgttaatctgttgtgacaatgcacttttatgtatagtactgtacatttttggcatgtaccattacaggcttcagtatacagtcaggtttgttcttcccggtgtatctttataataaataagatagttctggctgcctttgtctgcttccagtttgatgtgc

SEQ ID NO: 80407 - DNA, 797 bp, Homo Sapiens
  misc_feature (582)..(599): n is a, c, g, or t
ggggccgcacgctgtccctgcaggtggcctccaaccccatcgaatgctcccagcgctcagctcaggagctgcctctggtggagaagcagagcacggacagctatccggtcgtgggcgggaagaagatggtcctgtctggccacaacttcctgcaggactccaaggtcattttcgtggagaaagccccagatggccaccatgtctgggagatggaagcgaaaactgaccgggacctgtgcaagccgaattctctggtggttgagatcccgccatttcggaatcagaggataaccagccccgttcacgtcagtttctacgtctgcaacgggaagagaaagcgaagccagtaccagcgtttcacctaccttcccgccaacggtaacgccatctttctaaccgtaagccgtgaacatgagcgcgtggggtgctttttctaaagacgcagaaacgacgtcgccgtaaagcagcgtggcgtgttgcacatttaactgtgtgatgtcccgttagtgagaccgagccatcgatgccctgaaaaggaaaggaaaagggaagcttcggatgcattttccttgatccctgttnnnnnnnnnnnnnnnnnnttgcatactcagatagtcacggttattttgcttcttgcgaatgtataacagccaaggggaaaacatggctcttctgctccaaaaaactgagggggtcctggtgtgcatttgcaccctaaagctgcttacggtgaaaaggcaaataggtatagctattttgcaggcacctttaggaataaactttgcttttaagcctgt

SEQ ID NO: 80408 - DNA, 554 bp, Homo Sapiens
gcggccgcacgctgtccctgcaggtggcctccaaccccatcgaatgctcccagcgctcagctcaggagctgcctctggtggagaagcagagcacggacagctatccggtcgtgggcgggaagaagatggtcctgtctggccacaacttcctgcaggactccaaggtcattttcgtggagaaagccccacatggccaccatgtctgggagatggaagcgaaaactgaccgggacctgtgcaagccgaattctctggtggttgagatcccaccatttcggaatcagaggataaccagccccgttcacgtcagtttctacgtctgcaacgggaagagaaagcgaagccagtaccagcgtttcacctaccttaccgccaacgttccaattataaaaacagaacccactgatgattatgagcctgctccaacctgtggaccggtgagccaggggttaagtcctctcccaagaccatactacagccagcagctcgcgatgccacccgaccccagctcctgcctcgtgggcggcttcccgccctgttcgtagagaagcaca

SEQ ID NO: 80409 - DNA, 1962 bp, Homo Sapiens
ttgaaattctgctgaggcaaaatttatcctgaatattttatccagtattacttttcccagtttggttttaactaagaagggcaccttctacaacctctgaagacgaatccttttactttctagcagtctttacagggtatgtttcattatattcaaactaaattactttggctcaagaacaatcataattcctttaccaccctaaatagctccgcctcaccgtggtgtccacgaccttgtatgagtgtctggagggcaacatggtcaatctttttgtgtctcagtgctactataatcagtctattcaattgcaagtttattttcccttcttttcatgtacagaaagatccttcacataatcagacaaaatttttctataaccaaagttacttctgttagtgagaatttaatgtcttcacaattgtttcttttccaaatgaaaaggggataaggggaaattactattttcaaaaacagtcaatgtattctgatctctgtctcattcgcttttataatacacaaaatacaaaactggaatatatttagtgccattaagcagttgcattaacaattattttactttaagttataaaattaatagttgattcaaatttagtttccttatacttatttccaattcatacaagagaaacacatttttaaaaatatataatgacataaattattatccaagtttgcagtcctccatgcattcttcattcatcatcaactctaaaaaatgaacttcatatgcttaattccataagttttgaagaaaaccatgataataagtgcccataatcccagaataaagcccccaggaggatgccagtctttcagcttcggtttctggtgtattatctgaggctacaggaagttgtgtcagcatatgtcagaggttccataagtttctcatccatctggtcttccgtatagctgctttgccatgatttctgaatcctgttgcaatttaatagtgctctgttgtaatttgccactttccgtacacttccaaagaaatcagttatcagtacatttttaggatccctctgaaaaagatcagtgcgatgtccaggagtagacacacacagacttttgggacatacctgaaaaaggtcattcatattagtttggctagctgggttaatttcttccaaaaattccaagacataaaatgtgtatctatccataagatggactccaatggcaggatcaggttgatgcgagagtgaatcttctcccacttgactactagctagagccattatgttaggagaataaaatcgttcatacatggatgctccttggcaagtatcaataataaacagtagctcattgtagcgtcttttctgccacatttgttcaaaagcatccgcgagttctatgttggtaatttcttcagaatcttgaaattttaagaaaccatttccaccatgccctgtcatataaattagaatattgcttctgtcatcagaaagaagacgttttgaccgaggagtactaggtgggatcctcccagttaatacccgtaaaaaattctccacagttacctcataacttctataatccacttccacatcatctccatacacatttagttccatattcttgtgactaaacactgtagctggtttgggatttctaggattacaggccatatcatctgcaagcattaggacaatgtgactgtcaggaatacctagcctcttgacacttctataaacagaaagggtatttgcaacatgtcgataattaaaccagaatcgggatgtacacaccagaacagcccagttgtttgtatggccacttctaaagaattgttctgcttgatcctcgatatgactagcggccacgctgccgaaggacaagagcaacacagttgccaagacagtcgcagcccggctgaggctgtcggtgacggccatcggacgcgtgggtcgacgatatccggggaatccgacc

SEQ ID NO: 80410 - DNA, 740 bp, Homo Sapiens
tttcccagtctgagccacaggaagagcctagcggggaatgtcatgaatcgacctccatcctgagctctccaggcctgggacaatggaaagtggatagggggctgtcttcccagaaggaagctgggtcagaggttggtgccccatgggctccacccagagccccatggcagtctccatccattggtgccaggacctgctgggaacaggctgagagggtggttggcccagtgcacagtgcctggcactaacaacctgatcgtgggccaggtgtctgcctcgaaactgcctgaaggcaggcagggtaggacaatgtctggaggctcacggttttatagactaggggtccccaacccctgggctacagaccggtaccagaaccgggccacacagcaggaggtgagcagcaggcgagcaagggaagcttcatctgtatttacagccacccccccattgatcccacagcagcctgagctccgcctcctgtcagatcagtggcggctggagattgtcataggagctggaaccctatggtgaactgcgcatgtgaggaggttgcgcgcttcttttgaaaacctaatgcctgatctgtcgttgttgcccatcacctccagataggactgtctagttgcaggaaaacaagctcagggctcccacggatcctacattactgtgagttgtatatttcactatatgttacaatgtaataataatagaaataaaatgtacataaatgtaaaaaa

SEQ ID NO: 80411 - DNA, 609 bp, Homo Sapiens
gatttcattttatgtgaggaattattttaataaaaaaaagagggtttatgctctatagtaataaaatttaccagtaacacccaatcagaaaattttggttccttagtatttagggaagacttttgtttaaatctcttatggaattttacatgttttgatttagaaaagtagatgcaatataatatatttcaagttttatacatattagatgaattgcatggtattttaggcaacttaactataaacaaatttattcatagaagcattgttgccaacaatttagatgacctcgatgaaaaaacacaccaattgacaaaactggctcaaaaggaaataaaaaatccaaacagacctgtaacaagtaaagagattgaaccagtaatcaaaaatctcccaacaaagaaagtccaggactaaatgagtttactggcaaactatgccaaacatataaagaagaattaacactaatccttctcgaactctcccaaaaaatggaagagaaaggagcaccctgtgacattctataaggcggacattaccttaacaccaaagccagacaaagacctcacagggaagctacagaccaatatcccttatgaatataaaagc

SEQ ID NO: 80412 - DNA, 1511 bp, Homo Sapiens
  misc_feature (1176)..(1197): n is a, c, g, or t
ctggtaccggtccggaattcccgggatatcgtcgacccacgcgtccggacagcaggaagcaggatttcggggggaaggaactctgagggaggatgtttgtgccgatgggctattaggggaggaacagatgatagagcaggttaatgatgaaaagggagaacagaagcaaaaacaggaacaggtacaagatgtgatgcttgggagacaaggagaaagaatggggctcactggggagccagagggtctgaatgacggtgagtgggagcaggaggatatggagaggaaggctcagggtcagggaggtccagaacagggagaagagaggaagagggagctgcaggtgccagaagagaacagggcggactctcaggacgaaaagagtcaaacctttttgggaaaatcagaggaagtaactggaaagcaagaagatcatggtataaaggagaaaggggtcccagtcagcgggcaggaggcgaaagagccagagagttgggatgggggcaggctgggggcagtgggaagagcgaggagcagggaagaggagaatgagcatcatgggccttcaatgcccgctctgatagcccctgaggactctcctcactgtgacctgtttccaggtgcctcatatctcgtgactcagattcccgggactcagacagagtccagggctgaggaactgtcccccgcagctctgtctcccttgctagagcccatcagatgctctcaccagcccatttctctactgggctcctttttgactgaggagtcacctgacaaggaaaaacttctatcagtactttgatatgtcacagtttcatgtttatccagttcaatgtatttttaaatttttccttgagacttctttgactgatagattattgtgaagtgtgtttttaaatttccaaatgtttagggattttcatatctttcttatgctgatttccaattggattccctacaatgatttctggttttcatctgctctggatgattactatctcttttaaatttgttgtggcgagttttagggcctaggacagctctatcttgccatgtgtttcatcagcactcaaaaaaaatatgtgtattctgctgttactgtgtggaatattctgtaaatgccaaatagattcttttggttaatggcattttgagttgttttatattcttgttgannnnnnnnnnnnnnnnnnnnnnaaaaacatgaaatgcttcacaaaatttctaactataattgtggattcatctatatctcctttcagttttctttttttaaaaaaaatcaatgaaaatttattaaattaagcataaagttactttcacatttatctacaaccacagtgaatacagttcttggcatgaagacaccacaacctttagaatttaaagcctcctcacctgcaagattacatatataaaactcccactattgtttctctaagagtggattagttcaccaagttaaaagttatatgatctagaatataataaaatggaaatgatttactcat

SEQ ID NO: 80413 - DNA, 733 bp, Homo Sapiens
  misc_feature (717)..(717): n is a, c, g, or t
ctgtgaatcttgttcaagacatcctgtagtttagatatatgggctgcttcttttttaccctcaagcttttaggtgacacttataaaggtgagcatatcattctataaaatgaaagatgctcttggcatcctgttcttaaacagattagaactttggtaaataagacagattaaagatgtactaaaatgtttgaattaattttggtgatcatgatgctattacaaaattagaatcgcccaaagcaaccatagtataaaagttctcatctgcctacaaatttaaaactttagttcaagcttctggcttccctagttaatttctctacctacaattcacacagttctccaaacatggtatgactcaaagggaaaggcgtaaatgaatctactacacattagaaaagtgaccatttttaaagggtagggcaggtgggaaaaagaatatctcatcaatgtgagaattcacatttctgtcaaaatgtaagtatgtatgagtgctattttgaaaatgtgccataaagtctttgcttgctataaaaaccattattttccaaaaactggtcagcatattttgcaaagctattaaaatatctcagaaacagaataaaaaagcttagaatcaaataagcattgggacacagtcaattttatcattagaaaatctagccatgtattaggaatgacataatgatgtggttatatgcctctggttcttcanagaatgtatttagcct

SEQ ID NO: 80414 - DNA, 1152 bp, Homo Sapiens
  misc_feature (35)..(35): n is a, c, g, or t
  misc_feature (74)..(359): n is a, c, g, or t
cccataaaccagtggtgggagtggccatggagtanatggcaggggcttgttgaagggattgaaagctctcctannnnnnnnnnnnnnnnnnnnnnnnnnnnnnnnnnnnnnnnnnnnnnnnnnnnnnnnnnnnnnnnnnnnnnnnnnnnnnnnnnnnnnnnnnnnnnnnnnnnnnnnnnnnnnnnnnnnnnnnnnnnnnnnnnnnnnnnnnnnnnnnnnnnnnnnnnnnnnnnnnnnnnnnnnnnnnnnnnnnnnnnnnnnnnnnnnnnnnnnnnnnnnnnnnnnnnnnnnnnnnnnnnnnnnnnnnnnnnnnnnnnnnnnnnnnnnnnnnnnnnnnnnnnnnnnnnnnnnnnnnnnnnggctctccaaagtgtcatgttcagcaccaaaagggaataggcacagggtgaccccagaagttcatgtgtgacacttaaatctccagatatttatcccacgtgggtctgatgcgggctcagcactaaattaactgtatgtggaaagtgtcaattgcagagccttctgtatcgatgaggcttccgccacttgtccatgcttagcccccttgcctcttccttgggagcatgctttctattcctatgtgaaacagcctgacataagtgaaaggatttgggctcaagcaaacatgagatgtgggttcatatcttggcaccactcctgatagctgtgtgatcatggcaaacctcgttttcatcgtctgtcaggtggagatgaagagaaatggtgcatgtaaagtgctcagcatctgtgcttagcaggccatagtctccctgcctcctttttcttgagtaagcctttagaactttctgactcctctagagaaggcagagaaacgaatatattttgggtgccatttggagtctgggtcttttgttaaaattgtcctgtattatgttgaaaagtgtcggttacccccaggctctgggggcatctgtgatcatagaatactgccatgcttattttgcctttctatgttgagattaattcactgacgcctcattttccacgtgcatctgtcatagtctgggtaccagattgtatttagagaatggctcttgccactgttatgtacacacagatcgtgtgtgtaaacaagcaaattaaagtaaactgagataatgaaatcccaaa

SEQ ID NO: 80415 - DNA, 797 bp, Homo Sapiens
  misc_feature (18)..(18): n is a, c, g, or t
  misc_feature (576)..(588): n is a, c, g, or t
  misc_feature (673)..(683): n is a, c, g, or t
tgattgtgctaatcgtanatgattcagaattatataccttatggtatatatttacttggggcattttaatttgtaataaacattgcaaaatattaattgttaaatcatcatttttccccttctgtttaatatatagtttttcttttgtttgtctcatattcttggcaggctatgtccaagcatcaaagagagacaaaaaattttttgcctgtgctccaaattactcgtatgcagccctttgtgagtgccttcgtcgagtattcatctatcgtcagcctgctcccatgtccactgtactttacaacagaaaggaaggcaggcaagtaggacaggttgctaagcagcaagtagcaagcctagaaaccaatgatcctattttaggatttcaggcaacaaatgagagattatttgttcttactaccaaaaacctctttttaataaaagtaaatacagagaattaattattctaacatattggcctctttgtactggaaaagtattcagtggtacctggaggtctggacagttatactgtaacctcttaagttttaatgtgctaaatatatcttgtatgannnnnnnnnnnnnaataacattggaaatatattcaagagattatgattctgtaaagctgtggaatgaagctgcagatttagagaacattggcttctgnnnnnnnnnnngagtgaagatagtactagcaagtatacttattttttaaaacaggctagaatctcatgttttatatgaaagatgtacaattcagtgtttaaaaataaaaatatttattgtgtaaa

SEQ ID NO: 80416 - DNA, 939 bp, Homo Sapiens
  misc_feature (706)..(706): n is a, c, g, or t
  misc_feature (722)..(722): n is a, c, g, or t
  misc_feature (811)..(812): n is a, c, g, or t
  misc_feature (814)..(814): n is a, c, g, or t
  misc_feature (867)..(867): n is a, c, g, or t
  misc_feature (869)..(871): n is a, c, g, or t
  misc_feature (891)..(891): n is a, c, g, or t
ctatacacgtgattgattaacaatataattaatgggatgtcattttataccctgacaagtttaaatgtaaataaattggcaccacctttaatcagactgatgtcctgacttgcacaggaaacacgcacctaacctcaccaacctcaagccctccctcctcaagtctccatgcaaagactgtgccagtcagagtggagctgtccccccgacgagcccccagaagcacccggccggccatggctgtcattttgagggcggaaaataactggatttctggttaattggtgacatcctcaagagctgtggcaagccatgtctcggccgcgtgatggggcagacatggtgggtcctgacggccttgtcttcaccaagtgctcctaactctcagcaaacttggggttcatgaccgtcgtggtggcgctcttgaaaaggggattatcattgttccactgggacttgagcttctccttctcaaagcgcctgtactcccggaggtcgctcaggtggatcagagccttccagatgaccagcaggagaatgccgatcagcacgatgcctgccacggtgcccccgacgatggcggcgatgttggggcctgccacacactctcggctctcatccacatagatgaggtagcggtccatcccgtcctgctgctccagcgtgtaggccacccagcagccctctgagtccctctcctggcagngtcctgccctacacgnggggttgttcgacagctgcaggcccggacacgccgcgctgcaagttcttcccaaaggggccccttttcgaacttcaggcactgcgcagnnanaaagtactgcaccaaaggggaggggggcagccggggcactcctggacgaggcnannntgggagcctgatggcatccnaatatccttggcaggggaccggccaggacacttcactaaccccgcggg

SEQ ID NO: 80417 - DNA, 1508 bp, Homo Sapiens
  misc_feature (330)..(380): n is a, c, g, or t
  misc_feature (1406)..(1441): n is a, c, g, or t
gagagggggcccgagaggcgcggcccccacacaagaggttatatttaacacataaagtggggtccggtcgtctttttggccccatcccaaattatttttaatttttagttaataagaattatttttaaaaattttgggaaaaattacaaattgtggccagaaaaacccagcttccataccaaaaaatacactttcaattactttatcaggcaaataaaaccaatcttcatttatgtgctctttccagaattactatacagtaaaaattcaatactgtatatgaccgacacgtattaagcatacatacaaaatgaacggattgaatgttcnnnnnnnnnnnnnnnnnnnnnnnnnnnnnnnnnnnnnnnnnnnnnnnnnnngcacattttagttgtggaaaatatggttcttatatatacatagtttatacttaatagaaagccatctctttaaaattgcacaaaacatgggaccaataaagcatagtattttatggcatgtaatactataatcctaaggaaatttgttccttgactctaggatataaaacacttaggtttgtaatataataaaaggtatgtagtattgtttgagaaagactgtcttcctcaactcacattaacctgtagtaatcctacaaaaggctgtacaggaaatttcacaaaaagaaatattaaaaaattatcatgcccacttcatgctgactaaacagccaaaaatgggcttcaaagtaaacttggtggccatttaatatttcaataccttttttctgttaaagactgtttcttcattctataaaaacactttgtgtttaaccgtgattggcaatctcagcacaacaaaatcctggcaaaatggagttggtttttgcttaccttattttcatgaataaaatatttcaggacaggaatttatacaaaagaaacattaatgctcaattcacttataaccagagttgtatcaggagtgttactacattatttaaaaatcctatttaaactcctttataagaaaatcaaaggtaacatttccatttgtattatggcatagccctcgacttagagaaaaatacactttggggaaccagaaaaaattgcacaaagcttaggggcaacctgaaaagctcttggtgaaaaacacttgagtactctagggcaataaaaaaatatgtgcaggcttaattacaaatatttacattcaaaacagagtcatgagttagcttcagctgctcaatgccaacaattcacaggtatttcaaaacataagataatgtgtccacaatatttgtgaccacatttgaatgcatagaatacagtaaagattatggttttcagtctgttgcctatcatatctatcccggccgtaatggccgaattcccgggcatatgtccggtaccgtcgactgnnnnnnnnnnnnnnnnnnnnnnnnnnnnnnnnnnnnccgcttcctcgctcactacttcgctgcgctcgtcgttcggctgcgccgagctagcgccctatatgat

SEQ ID NO: 80418 - DNA, 562 bp, Homo Sapiens
agtgtgatgcttcaaggggagcctttgtcattgtattagtccaggacctcttagaagcagatgccaagatgggattaagcacataagacatttgttaggtgaaatgcttgtgaggggggaaaaggaaggagacagggagagttgtcagactgatgaaagtctgactccaagttaaaagagaggtaaggaaggaaggaactttgagtgaaagtgtcttagactgtagtgcaatactaaggaaagtttgcaaggcctcagaaagtctttgagtgaaaggtgcctgttggaaaaatgatgtgtctcccgggaacaggcctgccatgctcagtcagtgactgggaggagctagtgagaaactggcctcgacacaaacacagtgatggatttgagtgcagctgctgcagcactcagtctattatccttcctgtagtcagagatctgagaggctcgttctcatgatcaattagggtcatctctggctatgaattgcctaattcgggataaagtacagtttttccccatttcaggtgggtaatttgttcccaaaaaaacccctgtattt

SEQ ID NO: 80419 - DNA, 989 bp, Homo Sapiens
  misc_feature (98)..(98): n is a, c, g, or t
  misc_feature (130)..(130): n is a, c, g, or t
atgtagaaattgttcaaaatcatactctaacccttagtgagggcaaagtgtagttggtagaagaaattgctaaatacctatctaatgtgctatgtgantcaaatcgtgtactaaaatggaaagctagttntgagaaattattcagaagccttgttattttaaaaatgaaatatttcaaagactgaatattttcaaagaaaatgaataattcattgcccttgtgatttagaagattataacagctgtatttcatatttgcctccttatatatatcaaagaccaaggtatttccttctgcttcaaaagaacaaaattgggaaagaaaactcacttgagtcttgatcaaacaagtgtcttttacttaagaagaaacttggtaatcattgtggcacccacagcaagcagttgccttaccagtgaaaaaggtgcactgaggtaacatctaaaacagagatgtggttcttaatgtttaacagaacagttctaatcctgccacgtgttatcattatagattttatagttgcctttctaactacttagcacagtttgagaatacgttaattgctatttactatttaaaaagttttactgaaatcagtccataacattaagatgagccctaatatgtaagattttcctctggaatggatgtgagaaatgtaaattttataacagcagtatttatcctggtttaattctaatacgatgtcatgttaatttcatgttgtgattaataaaagcattttttcttcactcaaaatggcaagccgtccccaaaaaacccccccttgtcgggcccgcctcggccctcaagaaagttttctaacacctctcgttctggccccgggggccccagtaaggctaaggggaaacagtggccccttaaccttgtttcccctagggaaaatcccctgtgcctcttgcacctaaattggtttgtgggaatttcctcacccccaactacctaataaaacgcccccccgcgcgcg

SEQ ID NO: 80420 - DNA, 696 bp, Homo Sapiens
aaattcggcacgagggtgagcatagagcctgcctgtgcccagttccttctggccctcaggtggccaagcccatctcttcatccttcagatagggtcccactcccagaagaagctgctggggtgggggtgggaggctgcctaagcctgtctgtgcttcagaggcccctccagtccctggctgtggggtaactgggggtatgagctgtggccacaggtgagcaaggcagggaactgcaatccagccctggccgcgggaggggccatctctggccaatgctgctgtgccttcaaggactgacaagttacgtaggggcagaggtcgccagctagccagtgtctcctccatctggggggcgtctgtccacttgtcaccttaggttttcactcatttgtcaccttggggttttgctctgtgtgtttcatatccaacggcaatacttgcagggggacagagtcctctaaatactccaatcctgcggtttttacaaacataaagggggagaccccaagtggaggaccctgggcctggagctccctcccaaactttgtccagcatccagcctgttccctgggctcactggggagggagttgtcttcatagcacacccagagccagggatccctttgtagttttttgacaacggagcatttctcttctgtacaggacccaataaaaacttccttatgatttgcaaa

SEQ ID NO: 80421 - DNA, 1521 bp, Homo Sapiens
  misc_feature (47)..(47): n is a, c, g, or t
  misc_feature (200)..(200): n is a, c, g, or t
  misc_feature (212)..(212): n is a, c, g, or t
  misc_feature (218)..(219): n is a, c, g, or t
  misc_feature (991)..(1058): n is a, c, g, or t
  misc_feature (1297)..(1306): n is a, c, g, or t
tgaatcagagagccccagttaagaacgttgccatcaccgggcggacntggaccccatgttggcgcttgtccgtaccagtcacgcctgcctcctccgcctgagcaagtgggacccaccgtggagtcacagtggggagacagcctgtcaacaactcccgcatgatcgagagcactactcccgcacccagtactccaaaagcntcgactcccatntggctnntgcatccccagcagcaagaacacctgcgagcacattacggacttcccccctctctcccgagagctgatcagcgagatgatccgccacccgtatgagacccagtctgacagcttctacttcgtggatgaccggctggtgatgcacaataaagcagactattcctacagcgggacaccctgaccccacggctgccctgaccccaggaggctccagttctgggctgggagctgtgacctccccaacgctcacccctcaaccccaagtcctctgcttggggagttctccaggagctccggaccctgagtcaatgttgggaggaagggtacctggtgtccccagtcaagcccatgaaagcccatgcggcctgctacatggggtggggtcgtagggaggctgtttgcctccacgtctaggaaggcctgtgagaggagcagtcaggacttccggacaacttagctgggccctacttgggcccaagtttcagaatagtgttcccctatcaaggctgtgactagatcaggcagggatccattccctgtcccctgcccactaccttcaggccatttagagttgtaaatttacaaagatccacggtgggctccagctgccaagccacccaagggagtctgggccctaggcctagccccatccctccccatgaggggccaagacactgcctaaggtgtgggagggactggctgagattgcagcccatggtaggagctggaccaactgtatatagttttcaataaactttttccttttctgttcnnnnnnnnnnnnnnnnnnnnnnnnnnnnnnnnnnnnnnnnnnnnnnnnnnnnnnnnnnnnnnnnnnnngagaggaggggcgcgcgcgccccacaaatactatccccgcgggggggcccacaaagctagagccgcgcaccccgcctttttttgaacaaggggggcgccccaatgggaggggctttatataaaaagagcgagagcgacgagcgagcgcggcgcgggtataaaacacagcgggcgcgcgcgggagacaaacacgcgcgccagggaggaaatcattgggatcagagaacaccccctacacnnnnnnnnnnacaacaaatatggggaaaaaacccccgccccaccaaggagaatcagaaacgcacccaccaagaggagaaggataaaactaacaacattcgcggcgtgttataatgtcgcggtgatcacaaacacacccggataattctggcgggccgcgctaagaaaacatcgtatgcgctacacagtagcactttgtacccgaaacaaaatttttaacacaggg

SEQ ID NO: 80422 - DNA, 1027 bp, Homo Sapiens
  misc_feature (43)..(43): n is a, c, g, or t
  misc_feature (45)..(45): n is a, c, g, or t
  misc_feature (48)..(48): n is a, c, g, or t
  misc_feature (63)..(63): n is a, c, g, or t
  misc_feature (87)..(87): n is a, c, g, or t
  misc_feature (138)..(138): n is a, c, g, or t
  misc_feature (186)..(187): n is a, c, g, or t
  misc_feature (235)..(235): n is a, c, g, or t
  misc_feature (270)..(271): n is a, c, g, or t
  misc_feature (290)..(291): n is a, c, g, or t
  misc_feature (297)..(297): n is a, c, g, or t
  misc_feature (331)..(331): n is a, c, g, or t
  misc_feature (688)..(707): n is a, c, g, or t
  misc_feature (936)..(944): n is a, c, g, or t
accggagtacctttaccatttgggatcttcctcacctagttantnatntatgcagttcccttntgaggacaaaaggagaggacttcngggaagagagaagacttgtgacagggtaggagtagacagggtcatgcttgnaacgtgtgacgatgctgattcccttcttggacttgagctgatgagggnnaatgttgtgcagctcctctgtcagagcctcaggtgcagacgcactgtnttgccccctcagcctcagcctggcccacttgtccnncagtgccctctctctgctnngggcanggaggacctgccggacatagccagatgtattacnggatgactgcagtcagctccccccaggctcctgcttctcttgcctcctgcttttttccccagagctgtctccttatctccattcacttgtctatgggttactcctggaccctggggttaggagttggaatcaggctgttagcgataaaagggttcaagttgactcattttccttatcaggcttagtagttgaagtgacttgctgagcttcataattcttagagaacctgccatgaacccagctccctttctatgactcaccctgccaccctgtgacacatagagtctgaatggcaggtctggggctagaacccacgtcatctggacttggagtccagtgaccctttgggttaagcannnnnnnnnnnnnnnnnnnnccatgatgcgggaggaaggtccctgctctctgtagctgttttcttcatcctttgctctacaagccctaacagccgattctgtcatccctagtctgcccctctcctgtttctccatctcctctgaccatgatttttttctgtccctggagggatgatggtctcattctcacctcctccacgaaacgtgttagcttttcatattcctagatccactcacttctcatcatcnnnnnnnnnaaacaaaattttattgaaaaatgtaatatgacgtgtcaaagttgtaaagttattgagtaaataagcatgtatcctaaatattg

SEQ ID NO: 80423 - DNA, 1033 bp, Homo Sapiens
ccacgcgtccgcccacgcgtccgggtacttcaaagagatcctcagaaaagattgacttggacaaggctactgcagcattcattttggaagaaagcttttgctggagcagatcaggaatcaagcgtcgaagatctcagtctcagcagaaacactatggagtgttctgggccacaagattccaaggagcttttgcagaactctcagagtagacaagcaaaagggcacaagagtggtcaaccactaggtcactctttcagactagaaaatccaactgagtgtcggcctaagagtactcttgagggtcaattgaatgaatccatgtttcttctcagttctcgtcctactcccagaactagcactgcagtggaagtaagtcctggtgaggatatgactcactgttcaccacagaagacttctcctctgaccaagattacaagtggacacctgagtcagcaggacctggaatcccagatgagagagcttatctacacggactcagatcttgttgtcacccccattatcgacaatccaaagataatgaaacagccaccagttaaatttgatgcaaaaatattgcatctaccaacatattcagtggataagttattatttctgaaagatcaagattggaatgactttttgcaacaagtgtgctcgcagatcgactccactgagaagagcatgggggcctcccgagccaagctgaatctcctttgctatttgtgcgtggtggctggtcaccaggaggtggccaccaggctcctccattcccccctgttccaattgctaatccagcatttgcggatagctccaaactgggatatacgggccaaggttgctcacgtgattggtttactggcttcgcacacaactgagctccaggaaaatacacctgttgttgagactacaagctccattggaatcgggattttgaactgtcttgttcaacactccactccagtgcctagacagtgccttgtgtatgtataaacacccacaaatatttcaaaataaataaaaataaaacagcaaa

SEQ ID NO: 80424 - DNA, 404 bp, Homo Sapiens
  misc_feature (204)..(213): n is a, c, g, or t
aaactgggatatacgggccaaggttgctcacgtgattggtttactggcttcgcacacaactgagctccaggaaaatacacctgttgttgaggcaattgttctcttaactgaattaattagggaaaacttcaggaacagcaaattaaaacagtgccttttaccaacccttggggagctgatctatcttgtagccccccaggaagnnnnnnnnnngaaccctagagagtgctgggctgttcccttggctgcatacacagtgctaatgaggtgccttcgggaaggggaactctgaatcctctacagcctattattataaaatgtttcaaagattagaaaagaaaagaaagctgtaataatcacctttgtttccatcacctagattaaccagtaaacatttaaaaaaa

SEQ ID NO: 80425 - DNA, 507 bp, Homo Sapiens
ccaaaaatttcacaggtcagattatgtgtgacaacactgcaaagtgaaccagctctatcacttgatatattgcccttagtttaaaatggctgcttttaaaaacatatggctcccagctgaagttttatcactgctgtttttcttcccagaagattctataccaatttgataaatttcatcagtgggaaaatattttctcctcaacttaggaatgattttctgtaattggagatgtttctcacatgtaaaatactgaatcagagcatgttcttttaatgtcaggaatgtctttagccagcagttattagtacaccaagaattgcaaggcaacatgttaatagactgtcatagaacttgtacaaaactagagttgccttgtctttccagtgggtgacctgggccaacaggccagatatcagcagcgagtgtgtgcgacggtactctgcctgccggcccacgtgtctaggacaaaaggtgacaagagaactttgcagctcacctcgtgcc

SEQ ID NO: 80426 - DNA, 1021 bp, Homo Sapiens
  misc_feature (121)..(121): n is a, c, g, or t
  misc_feature (172)..(172): n is a, c, g, or t
  misc_feature (251)..(251): n is a, c, g, or t
  misc_feature (301)..(301): n is a, c, g, or t
  misc_feature (325)..(337): n is a, c, g, or t
ttacattaaaactgctttacttccagttgacagatgttatcccgtggcagatgattaatggaaaggtgttgcactgtgcttgagacctggattgagtcttgtgctatcatcacggtctgtnttgagcaagcatttggctgctgtagcttatgctcatcctgtaagcgttgcntgtaatcctgatttcccacctcacagtgatgtgtggggatccagtgagatagaatacatgtaagtgtggtcctgtaatntaaaaagtgctatcctcaggaaagaatttgaggaattaactgcatacgtnttgtgttgcttttcaaatgtttgnnnnnnnnnnnnntgttaagaaatggtttcttgccttaaccagtctctcaagtgatgagacagtgaagtaaaattgagtgcactaaacgaataagattctgaggaagtcttatcttctgcagtgagtatggcccgatgctttctgtggctaaacagatgtaatgggaagaaataaaagcctacgtgttggtaaatccaacagcaagggagatttttgaatcataataactcataaggtgctatctgttcagtgatgccctcagagctcttgctgttagctggcagctgacgctgctaggatagttagtttggaaatggtacttcataataaactacacaaggaaagtcagccaccgtgtcttatgaggaattggacctaataaattttagtgtgccttccaaacctgagaatatatgcttttggaagttaaaatttaaatggcttttgccacatacatagatcttcatgatgtgtgagtgtaattccatgtggatatcagttaccaaacattacaaaaaaattttatggcccaaaatgaccaacgaaattgttacaatagaatttatccaattttgatctttttatattcttctaccacacctggaaacagaccaatagacattttggggttttataatgggaatttgtataaagcattactctttttcaataaattgttttttaatttaaaaacag

SEQ ID NO: 80427 - DNA, 1038 bp, Homo Sapiens
  misc_feature (515)..(532): n is a, c, g, or t
  misc_feature (573)..(803): n is a, c, g, or t
  misc_feature (811)..(811): n is a, c, g, or t
  misc_feature (878)..(878): n is a, c, g, or t
  misc_feature (888)..(888): n is a, c, g, or t
  misc_feature (929)..(929): n is a, c, g, or t
  misc_feature (975)..(975): n is a, c, g, or t
cccaatcgcagctactttattttcgttttaattttttggaaggatatacaccacatatcccatgggcaataaagcgcattcaatgtgtttataagccaaacagtcactttgtttaagcaaacacaagtacaaagtaaaatagaaccacaaaataatgaactgcatgttcataacatacaaaaatcgccgcctactcagtaggtaactacaacattccaactcctgaatatatttataaatttacattttcagttaaaaaaatagacttttgagagttcagattttgttttagattttgttttcttacattctggagaaccgaagctcagctcagccctcttccttattttgctcccaaagcctcccccaaatcatcactccctgccccccttaaggctagaggtgagcatgtccctcacaattgcacatgtcaagccatcagcaaggcgcatcacacaaaaggcaccaagacgtgaaactttttaaaccaaaaggacgaagaaaaaacactttcnnnnnnnnnnnnnnnnnngcctacagccgcgccgctccaaccctcgtgccgaattcttnnnnnnnnnnnnnnnnnnnnnnnnnnnnnnnnnnnnnnnnnnnnnnnnnnnnnnnnnnnnnnnnnnnnnnnnnnnnnnnnnnnnnnnnnnnnnnnnnnnnnnnnnnnnnnnnnnnnnnnnnnnnnnnnnnnnnnnnnnnnnnnnnnnnnnnnnnnnnnnnnnnnnnnnnnnnnnnnnnnnnnnnnnnnnnnnnnnnnnnnnnnnnnnnnnnnnnnnnnnnnnnnnnnnnnnacgcgcgngagaggggtttgcgtatggcgctctccgcttctcgctactgaccgctgcgccggtcgttcggtgcgngagcgtacanctcactcaagcggtatacggtatccagatcagggatacgcngaagacatgtgagcaaggcagcaagggcagacgtaaggccgtgcgngttttccaagtccccctgacacacaaaatcagctagtaaagtggatcgaagatataatcagtg

SEQ ID NO: 80428 - DNA, 436 bp, Homo Sapiens
  misc_feature (30)..(30): n is a, c, g, or t
  misc_feature (84)..(84): n is a, c, g, or t
acagttcactttggtttaaggcaaaacacnaggtaccaaagtaaaatggaacccacaaaataatgaaactggcatggttccatnaacatacaaaaatcggccgccctaccccagtaggtaactaacaacattcccaactcctgaatatattttataaatttacattttcagttaaaaaaatagacttttgagagttcagattttgttttagattttgttttcttacattctggagaaccgaagctcagctcagccctcttccttattttgctcccaaagcctcccccaaatcatcactccctgccccccttaaggctagaggtgagcatgtccctcacaattgcacatgtcaagccatcagcaaggcgcatcacacaaaaggcaccaagacgtgaaactttttaaaccaaaaggacgaagaaaaaacactttcaaa

SEQ ID NO: 80429 - DNA, 798 bp, Homo Sapiens
  misc_feature (22)..(22): n is a, c, g, or t
  misc_feature (29)..(29): n is a, c, g, or t
  misc_feature (83)..(83): n is a, c, g, or t
  misc_feature (119)..(119): n is a, c, g, or t
tattaagaaaaccatatcacantacatcntaagcaaatgaatcaaaactcagtgtgctaaagagaaaaagacaagtctacacnagagaagaaaaacaaggatgataccagacttctttntggaagcaatgcaaggggaagggcagtggagcaacatctttcatgcttccagtgaaacatcttccaaccaaaagcagaaaactgtctctcctaggtttctatacccagcaaaaccgtctttcaagaaaggatgaaacaaagatatttttcagacataaaaaagttaaaagtaatatattatcagcaaacctggactatgagaacagtgtaaaagcctttcaggaagaaggaaaataaagaataatatctttgtgcagatagaaacatggatccacacaaagaaatgaagagcactggcaatagtaacaccataagtaaatatacaatacctgcccttattacttaaatatcttttaaagataattggctgtttagaaataatagcagtgtcatgtgagttctgcagcatgagtaaaagtaaaatatatgacaacaataacctagagagactaaatggaaatatagtttgtaaggttcttagactgtgtgtaaagttgtataatgcctattaaaagttggctattacaagttatctttaagttaaaacatctgtatggtgtaatccctaaagcaaatgctagagtaacaaaaacagtgataatattacaatattacacaataatatacaatgcagcgatgaaatagaataaattttcaaatgcttgaaagtagacaaaaa

SEQ ID NO: 80430 - DNA, 510 bp, Homo Sapiens
aacacggcttcatgcgtgccaggatcagagtacaaatcaggctgtggcaggcctcactggtaatggaaaagtgagggaggcttcacggaggaggtgtcataggagctcagcctcaacggctgctcggaaccctccgagtccacaagatgggaagcaagtccacaagatgggaagcgtgctctatacagaagggagggcctgtgcacaggctcaggtgtcagtaagccagaaatccagggacagagtcaggatggctggagcatggactgcggggggaacagagaagggggtggagcaaaaggttgggaccatgtgaccagggaagatgctggatggaggattctgaacctcatttgtggacggtcaggagtcaacaaagggaggagagaggactcactggtcaagagtgtcggctgtgacacaagggccatcatccctgaatgcccaccatgtgccccgcactgtgctgatgatgataataataactacgtccattgagcactctccaaa

SEQ ID NO: 80431 - DNA, 674 bp, Homo Sapiens
  misc_feature (20)..(20): n is a, c, g, or t
  misc_feature (177)..(285): n is a, c, g, or t
agcatccactgaaggactanattctacacatgaaggcaaacgtccgtggttgacagaaattacactggccagaatccccagtccccatgaggcttgtccagacgcagtgaaccagtcgcagctgataacacacagaccattcccgatcccagaggtgcatttcaggattcattctannnnnnnnnnnnnnnnnnnnnnnnnnnnnnnnnnnnnnnnnnnnnnnnnnnnnnnnnnnnnnnnnnnnnnnnnnnnnnnnnnnnnnnnnnnnnnnnnnnnnnnnnnnnngtgtgtcctggaaccctggctgcacccacagatacagccactcctgggcccatgtggatgtaaccttcgagtgccggaatgcctcgtctccatggagaccaaactcaagggcctgactggcccagtctaccgagaccatgagacctgctgtgcccctcggccaggccaacccaaattcttttaaataaaaggcacaagccacagccacaccagcaggaagtgggatacaggataaggggcagggctcgcatctcatcctcatcagcctttgaccaggcgacggagtctgtgatagctagcttatctgctctatgctccagggacctggctggaacgagccgagttgctgtccttcattggaactctcatcctagtggggcagagacaag

SEQ ID NO: 80432 - DNA, 1010 bp, Homo Sapiens
  misc_feature (55)..(85): n is a, c, g, or t
  misc_feature (139)..(165): n is a, c, g, or t
atgctagtaaaaaaaatcactgtttattagaaactttgccttacacaatgaagannnnnnnnnnnnnnnnnnnnnnnnnnnnnnngagagggaatcttgctctatcgcccaggctgaagtgcaatgacaccatctcagnnnnnnnnnnnnnnnnnnnnnnnnnnntcacaagccatcctgagtgatgaaatctcatgatctcctgctctgtcctgcctgggatgtgaatcacccctttgtcctgcttatccacactgtatactacctgccccttagtcacttagtagccgccttggttgtcagactgaaaaaacatagttgataaagggttcagtactatctgaggtttcaggcatccactaggggtcttggaatgtatctcttacagataaggggagactactgtattacatttcagcttccataaaactttactaatttggattaagaacacaagcctgatttagtaaaaagtatccataaatattcagaggtatagttttgtttcatcaagtaaaaagagcaactaattccaactgttgaagtagtaacaagtaaaggcttcaccaggctttccttgatgaatagttaagacatatttttaggtcatcagcacaagattattgaataacttgtatgctacaaacatgccgcttccactcatcgaaacaagccaataatccttactattccaacttgctgagaaccatgtcagatgctgcgttcaagaatgaaatgttcctcaaaactgttctatcaaatgtagtagctattggacataaaacaagtaatttatttcagactttagttttcatgaagtatttatcaacaacttcaatttattccaacattaatttatgataggacagttattaaaattaaccatttctgagactgtaactttgaaattgtaagaaatggacaattaagctcactagtcaaaatcttgattcaagtgatgatccaatagcttacaaatgtcttcaataaactgagctttgaggcagaac

SEQ ID NO: 80433 - DNA, 926 bp, Homo Sapiens
  misc_feature (842)..(842): n is a, c, g, or t
agaattcggcacgaggagtatgtcaagtgagaaaaaaataatgtctgacctcctaacatatacaaaaaatatacatccagagactgtcagtaagctggaagaagaggatatcaaagatgtttttaacagtaataatgaggctccagttgttcattcattgtccaatggtgaagtaacaaaaatggttctgaatcaagatgatcatgatgataatgataatgaagatgatgttaacactgcagaaaaagtgcctatagacgacatggtaaaaatgtgtgatgggcttattaaaggactagagcagcatgcattcataacagagcaagaaatcatgtcagtttataaaatcaaagagagacttctaagacaaaaagcatcattaatgaggcagatgactctgaaagaaacatttaaaaaagccatccagaggaatgcttcttcctctctacaggacccacttcttggtccctcaactgcttctgatgcttcttctcacctaaaaataaaataaaatacagtgtacagtaaccttttagtcaaaacagcatcatacttggaaactgaaagcctactgttatttgttattgttgcttaacagctgatacaggtattctggtgacactactgtgctggcttacttaacctgaatacactatttttttcgttgtattactggtatgtcattttttttactgttaagtacttatgtgtgaataagtgtaaaaaaatgattgcttatcggtaacatataaattcagaatcaggaatgatggtgatgccaaacaatcacagatcgtccacatgggtggcggagatgttaacaccttttgctttctgatggntcagtgtatcccacactttgtttcatgccaaaaattatttaaaatattggtatggaaattaccctttcaggcctatgtggtatc

SEQ ID NO: 80434 - DNA, 490 bp, Homo Sapiens
aacttcactgcaattctgagctgtaattgactttaataagctccaacagcactgaaagacgtttggattattttcagtttgggataatactactatgaacattcctgtacatgtcttttgagaacacgcatgtgtacatttgtgatgggtatgtaatggggtggaattactggttcatagaatatgtgcatattcacctttagatatagaggctgccaaccatttttctgaagtgattatactaatttatattctcactatctgtaaatgaacatttctgttgctccacatccttgctggcacttggtattgattgatttctcttttaattttaggctttttaatacgtgtgtagtgatatctcacttgctgtttggttgctttttggtaaattttttattgaagtataatttacatacagaaaatcacacaaattgtgtacaggtgtgatttttcacaccgtgaatacatgcaaaaactagtatgaaat

SEQ ID NO: 80435 - DNA, 492 bp, Homo Sapiens
  misc_feature (195)..(208): n is a, c, g, or t
  misc_feature (408)..(416): n is a, c, g, or t
gataaagacagaagattgcaaatggtttgctctttaacagtcaataaaatcatatctactaatcaatacatttgaagtttactagattctcaaactttccataagatttgagttcattagtttaatgggatcgatctgagaaaaattagatttatgtgcagattttagctacccttgtccttggaatgtgtatgnnnnnnnnnnnnnntctgtgagaatgattattttctacttgatacagtgtgcatcaaataaaagtttactatattggaatatgggaataaattcatttataattagttgaaattgtccagacacatattttagaaaagtatgttatttttgttttaagtttggaagaacctgaatgattaaacctgatttaagtccctctaacaattatgaagnnnnnnnnngactagattttatatcaacttaattgtcttttggtttaaaattatgtatccaataaagacatttaaaaagtaaaaa

SEQ ID NO: 80436 - DNA, 961 bp, Homo Sapiens
cctgccactttcacagtgtacgaataccacagaccagataaacagtgtaccatgttttatagcacttccaatatcaaaattcagaaagtctgtgaaggagccgcgtgcaagtgtgtagaagctgattgtgggcaaatgcaggaagaattggatctgacaatctctgcagagacaagaaaacaaacagcatgtaaaccagagattgcatatgcttataaagttagcatcacatccatcactgtagaaaatgtttttgtcaagtacaaggcaacccttctggatatctacaaaactggggaagctgttgctgagaaagactctgagattaccttcattaaaaaggtaacctgtactaacgctgagctggtaaaaggaagacagtacttaattatgggtaaagaagccctccagataaaatacaatttcagtttcaggtacatctaccctttagattccttgacctggattgaatactggcctagagacacaacatgttcatcgtgtcaagcatttttagctaatttagatgaatttgccgaagatatctttttaaatggatgctaaaattcctgaagttcagctgcatacagttgcacttatggactcctgttgttgaagttcgttttgttttcttctttttttaaacattcatagctggtcttatttgtaaagctcactttacttagaattagtggcacttgcttttattagagaatgatttcaaatgctgtaactttctgaaataacatggccttggagggcatgaagacagatactcctccaaggttattggacaccggaaacaataaattggaacacctcctcaaacctaccactcaggaatgtttgctggggccgaaagaacagtccattgaaagggagtattacaaaaacatggcctttgtttgaaagaaaataccaaggaacaggaaactgatcattaaagcctgagtttgctttc

SEQ ID NO: 80437 - DNA, 1006 bp, Homo Sapiens
  misc_feature (24)..(24): n is a, c, g, or t
  misc_feature (107)..(107): n is a, c, g, or t
  misc_feature (184)..(184): n is a, c, g, or t
  misc_feature (194)..(194): n is a, c, g, or t
  misc_feature (203)..(203): n is a, c, g, or t
aacaattcacaccagaaacagctntgacatgataccgatttatcgcgactccttaagggaattgcccctcgagcccaagaatccgcacgagcccagaatgtagctgnatccagacgatgtataccagtcattgagtaattctctatgctgataaaataagacataatctcccataaatgctccntgatatcctntaagttgtntactcgaacgagattaagatgggagaaatatagcagacatctaaatgcaggaccacctgcaggttgagtctcagaagtctgatgagtagagatactttagtcaggtgtctgatgcaaaacatcacatttctatcatcattttcaactggaaagggcttcttggaggtaatctaggactgtatggtagtcagaatgaaaagtaacataatacaaatttcatctgtatatttgaactattaaaatttactttaaaaaattattggatatttagtcatcttgccaaaatcacttaaagtatattaagttattttatgcactctttggaaacatttttacctatgtaatcaaagtggtagaataagaaacattatataaaaattcaaaagttgaatccactttgtctgtattcattatattgacagctggataaaataaaataattaaagaacttatgcctttcagaacattaactaacagtttctaactgcttcagttattcaagataagttctggatatctatacagcatagtgaccataggtagcaatactattttattgttaaaatttattaagatagtaggtcttatgttaattctttctaacacacaaacacacacagattaataaaaaggaagtgggaagaaactttgggaggtgatggatatttataaccttgaagatggtgatgcgtcatggatgtatacttactgctaaacttatgaagttgtatatgctaaatacgtacagcgttttacatgtcaatcatatgtcaataaagtggtttaaaacaaaaacagaaaaa

SEQ ID NO: 80438 - DNA, 1377 bp, Homo Sapiens
aaaaagaggtttaattggcttatggttctgtaggtcgtataggaaacatggctgggggagcctcaggaaacttacaatcatggtggaaggtgaagaggaaggggggatttctcacatggccagagcaggaggaagagagaggcgggaggtgccacacacttttcaacacccagatctcctgagaacttagtatcgtgagaacaagggggaagccggcctccgtgatccagtcagctcccagcaggcctctcctccaatgctggggattgcaatttgacatgagatttgggtgggggcacaaattccaatcatatcagaaattaagaatcgactaccatgcaatcaagggacatggtcacatttgatactctagatgccagccagcaccactctaattagagaccagagagctttcattcagggcagttcctccttttgtttcaactccttgtagtgacttgggattggggagcaaaggctggaaaacctgtagacggggtttagcttaaacattgcacccattgagctgtcctcatgaataatttcagttagtctgtctccttgtagataagatgcaatcatgtcacccatggtgtcaccactctcattaggttgttagaaatatcaaaataaaattaagtgtgggaaaactcttgggaatctacaaagggctaagcagaatgaggtgttggcatcctccctgagaaggaaggtgaggtaatgataggaagatgagaggggcaggacataagctaaagggtctcaggactggcttatcccagctaagccccagcaggcagtacagggcagtctcaggctccctgcaccctcctcctgctcacaggggcagtttgtgatctctgagagacatgagaccttctttctttccatatcaaagaatgagaaattagatttctgactcactgccttccttttaggggagaagagggctctacgatgcggttgggcttagaggaaaatagcagctcctctgctgtgattctaggtctcctccctcccagagtctcaggatgtgcctccagagtagccaccatggaaatgacatgtgttcttctgcttagctaagcatgtgtatgtgattctatttaattaattattgatatttattaaaatacaacgtgtagatttctattttcattttgctgccaatacactgaaaaaagacatagttaagttccaatgacagaaacatatgtcaatatacaaatcaactatttgttgagttgagtattacatgaagacctaccgtgttgcagtgtgtggcagagaaaccatactttcctgaatatcatcacaaacctgtgaatcggatagattgctcctctaggcagatgcagtatctgatgaagtcaaagg

SEQ ID NO: 80439 - DNA, 824 bp, Homo Sapiens
  misc_feature (316)..(327): n is a, c, g, or t
  misc_feature (725)..(727): n is a, c, g, or t
  misc_feature (729)..(732): n is a, c, g, or t
  misc_feature (735)..(738): n is a, c, g, or t
  misc_feature (740)..(740): n is a, c, g, or t
  misc_feature (746)..(746): n is a, c, g, or t
  misc_feature (748)..(752): n is a, c, g, or t
  misc_feature (772)..(772): n is a, c, g, or t
  misc_feature (782)..(782): n is a, c, g, or t
ggttcagggaaaaatgagtaaatctccaacaggtggctttcaattcaagcataaatactgtcttcaacttaaagaaagaagatttgaggtgcagtattggggagttaaccagcaaaagcacattagacaagggtaaggttcattatacagacttaagtccatgcattctccattgataagactctttagtgatttagttatccttctcttcttggtgtcgagagaggtagcttttaaatggtgatttcctttatagatgtaaattttccttacacaagtgtaacttctctgttttcacaacttcctttgttagcannnnnnnnnnnncaaaataattagcttggaataattcttaagccaaagggacatattttggggttgcatattctggtttcctaccattatattttggggtggcatattttggtcttatacactgtgttccaccggcaatgaaaagagttcttgtttttcctccagcaatttgtcatttgttaaagagtttagcagttctaagagatatagaccagctgtgctatctttttgtggttttcagttctctagtatgttgagcatctttttgtaagtgtacttgccatctgtagatcttctttggtgaggcgtctgttcagatctgtgtgcatttttaatggggctgtttaacctaatggttagttttaacaattttttatgtatttttgaataacaaattctcagatcccaannnannnnaannnnanaaacanannnnnccattgtcgggccgccttcnggcccttcgnaggaagctttcctaaaacccatttcgttttgcccgccgcggg

SEQ ID NO: 80440 - DNA, 644 bp, Homo Sapiens
tgggcttaggtggtcttcccctcaagcctccacagcagctgaaattacaggtacacaccaccatgcccggctagtgttttattttttgtagagatgggggtctcgctatgtttctgatgttgctctcgaactcctggcctcaagcagtcctgctgccttgcctccaaaagcgattacaggtgtgagccacaacacccagacttctcctgggttatctacataaaataaccatttacaaataatagctattatttgttctaagttcagacaacaaccccatgaagcagtaatattattaactccatttcacaactgagggctctgaaacatgagatttgttcagggccaatgagctaataagtagcagaataaaattcaaaaccaaatccaagacttccagctccagagttcatgtcctcaccaccagacaataatagctctatactgattatgttaactccttttttatctacttttatttctgtttgaagactgagtatcttgacaaatgtctccaatgtttcatttttaggaatgatgatggctgcagcttaaccagaaaaccttttgtagcatgagagtattaataataatgtatattttccctaagaaagaatcaaatcaatttttgcctcgtgccgaat

SEQ ID NO: 80441 - DNA, 1315 bp, Homo Sapiens
ggtgagagaaagaagaaaaagaggagaagacatccaaagggagaagaaggatctgatgatgatgaaacagaaaatggccccaaaccaaaaaaacgacgtccaccaaaagcagagaagaaaaaggctcccaagccagaacgtctgcctccatcaatgaagggaaaaataaaatccaaagccataatttcatcaagtgatgactcttcggatgaggataaacttaaaattgctgatgaaggacatcccaggaacagcaacagcaacagtgactcagacgaggacgaacaacgaaagaaatgtgcctcatcagagagtgattccgatgagaaccagaacaagtctggcagcgaggccggcagtccccggaggccacgaagacagcggtcagatcaggactcagacagtgaccagccatccagaaagagaaggccctccggttctgagcagtctgacaatgaatctgtgcagtcagggagaagccactcaggagtttctgagaacgactctcgcccagcttctccaagtgccgaatcagatcacgaatcggagagaggatctgataatgagggttctggccaaggctctggaaatgaatcggaaccagagggatccaacaatgaggcctcagatagaggctcagaacatgggtcagatgatagtgactaggttttatttcatcaataagcttcatctctggaggaaacttttttaatatatgaaagctgtgataaaaatgtttcagatgtttagtcaattgtgaaatttttcttaaggcaattttcttttctatcagtttgtatattactaagccccaagagacatttcctgtgctagagtccaatatttgagtctctcgtgcaaatgagactattctttgtggtacaattccacctatcatatgtgaaaactgcagtaaaaataaacccagatgctaaatcattcctacaaaggtttgactgaaactgtggcagatgtctcatcttctttatatgttaagcagcatactcttctgatttttattgcaatcttttaccaagtggtgcacaaacttggtattgatgtctttattccattttgagtttagattgagaatatttttattttctgaaggcagagatatctactgtataattgcaccaaagtacatttgaaaggaaggttttcaatagtgtaatactgcagcgatgtagataaaatcacaaatgtataatgtgttaggttgaataaggtgtggaaaatgcttttctgttagtagaatgcaaaaacctacctaagccacataataataaaattcttttaccaactttaaaaaaaa

SEQ ID NO: 80442 - DNA, 2265 bp, Homo Sapiens
  misc_feature (1895)..(1991): n is a, c, g, or t
  misc_feature (2078)..(2108): n is a, c, g, or t
gataacataaccattagcagagaggctcagggtgaggtccctgcctcggactcaaagaccgaatgcacggccttgtaggggacgccccagattgtcagggatggggggatggtccttgagttttgcatgctctcctccctcccacttctgcaccctttcaccacctcgaggagatttgctccccattagcgaatgaaattgatgcagtcctacctaactcgattccctttggcttggtgggtaggcctgcagggcacttttattccaacccctggtcactcagtaatcttttactccaggaaggcacaggatggtacctaaagagaattagagaatgaacctggcgggacggatgtctaatcctgcacctagctgggttggtcagtagaacctattttcagactcaaaaaccatcttcagaaagaaaaggcccagggaaggaatgtatgagaggctctcccagatgaggaagtgtactctctatgactatcaagctcaggcctctccctttttttaaaccaaagtctggcaaccaagagcagcagctccatggcctccttgccccagatcagcctgggtcaggggacatagtgtcattgtttggaaactgcagaccacaaggtgtgggtctatcccacttcctagtgctccccacattccccatcagggcttcctcacgtggacaggtgtgctagtccaggcagttcacttgcagtttccttgtcctcatgcttcggggatgggagccacgcctgaactagagttcaggctggatacatgtgctcacctgctgctcttgtcttcctaagagacagagagtggggcagatggaggagaagaaagtgaggaatgagtagcatagcattctgccaaaagggccccagattcttaatttagcaaactaagaagcccaattcaaaagcattgtggctaaagtctaacgctcctctcttggtcagataacaaaagccctccctgttggatcttttgaaataaaacgtgcaagttatccaggctcgtagcctgcatgctgccaccttgaatcccagggagtatctgcacctggaatagctctccacccctctctgcctccttactttctgtgcaagatgacttcctgggttaacttccttctttccatccacccacccactggaatctctttccaaacatttttccattttcccacagatgggctttgattagctgtcctctctccatgcctgcaaagctccagatttttggggaaagctgtacccaactggactgcccagtgaactgggatcattgagtacagtcgagcacacgtgtgtgcatgggtcaaaggggtgtgttccttctcatcctagatgccttctctgtgccttccacagcctcctgcctgattacaccactgcccccgccccaccctcagccatcccaattcttcctggccagtgcgctccagccttatctaggaaaggaggagtgggtgtagccgtgcagcaagattggggcctcccccatcccagcttctccaccatcccagcaagtcaggatatcagacagtcctcccctgaccctcccccttgtagatatcaattcccaaacagagccaaatactctatatctatagtcacagccctgtacagcatttttcataagttatatagtaaatggtctgcatgatttgtgcttctagtgctctcatttggaaatgaggcaggcttcttctatgaaatgtaaagaaagaaaccactttgtatattttgtaataccacctctgtggccatgcctgccccgcccactctgtatatatgtaagttaaacccgggcaggggctgtggccgtctttgtactctggtgatttttaaaaattgaatctttgtacttgcattgattgtataataattttnnnnnnnnnnnnnnnnnnnnnnnnnnnnnnnnnnnnnnnnnnnnnnnnnnnnnnnnnnnnnnnnnnnnnnnnnnnnnnnnnnnnnnnnnnnnnnnnntgagccacaccaggcctgattgtaaatttataaaagtagtttcaccgggaatggaaacgcggacacatacactccatgacacccggnnnnnnnnnnnnnnnnnnnnnnnnnnnnnnncgcggcacggccaccaacgaggccccccagaaacacggtaaaaagaacaaatagaggagaacgcggggacacacaagactgaaaatgaaaccatggccaaaaaggggacaccaaagaacacggggcaaacaaaagcaggggaactccacgaaatacg

SEQ ID NO: 80443 - DNA, 1049 bp, Homo Sapiens
  misc_feature (69)..(69): n is a, c, g, or t
  misc_feature (98)..(99): n is a, c, g, or t
  misc_feature (105)..(105): n is a, c, g, or t
  misc_feature (114)..(114): n is a, c, g, or t
  misc_feature (124)..(124): n is a, c, g, or t
  misc_feature (127)..(511): n is a, c, g, or t
  misc_feature (903)..(968): n is a, c, g, or t
ggatccagggacgctgatttatgcgtcgttccccctttattagctgatttggtctgtcgggggcggacnttgaaaacgcaacacgcgcctttacgtcnntgcctntgctgcctntgctcacatntcnnnnnnnnnnnnnnnnnnnnnnnnnnnnnnnnnnnnnnnnnnnnnnnnnnnnnnnnnnnnnnnnnnnnnnnnnnnnnnnnnnnnnnnnnnnnnnnnnnnnnnnnnnnnnnnnnnnnnnnnnnnnnnnnnnnnnnnnnnnnnnnnnnnnnnnnnnnnnnnnnnnnnnnnnnnnnnnnnnnnnnnnnnnnnnnnnnnnnnnnnnnnnnnnnnnnnnnnnnnnnnnnnnnnnnnnnnnnnnnnnnnnnnnnnnnnnnnnnnnnnnnnnnnnnnnnnnnnnnnnnnnnnnnnnnnnnnnnnnnnnnnnnnnnnnnnnnnnnnnnnnnnnnnnnnnnnnnnnnnnnnnnnnnnnnnnnnnnnnnnnnnnnnnnnnnnnnnnnnnnnnnnnaagaattcggcacgaggtttttactgactttattgtcgaatgagtgttaaaattgcaaagaggcaagcatctgaacctgagtactaggttaatcaaatctcaaatccaatccaatactgaaaaggaactagaaatctagagggggaaaagctaaatacaaagcaattccttcaaggcaaaaaccactatcactatcatggggttggggggcaggatacaacagcatctctgagactgtaggattagaattatgtcagaaggaggccaagaagggtctaggatttatctctggaatgacaatgcattatactgatttaagatttgatccttacttacatcctcaattattagaaatataactactagaagttagtctgactatactcctaagnnnnnnnnnnnnnnnnnnnnnnnnnnnnnnnnnnnnnnnnnnnnnnnnnnnnnnnnnnnnnnnnnnggcctgagcccaagagtttgaagctgcagtgagctatgatcagctgcaatccaccctgggtaacacagcaagactctatct

SEQ ID NO: 80444 - DNA, 1053 bp, Homo Sapiens
  misc_feature (127)..(127): n is a, c, g, or t
  misc_feature (221)..(398): n is a, c, g, or t
  misc_feature (993)..(1011): n is a, c, g, or t
ctactgattgtcttcaggcgacttgaacccacaccgctttacgtctgcttgtgccttgccctgtctctgcgttcccgatcttgatacgtatcgccttgagagtgtacgtcccgcaccgacgacgggnaggatcatggcgagagcgagagcccatactcaacgctctcccgcgcgtgccgatcataatgcactgcacgacagttcccgactgaagcgggcannnnnnnnnnnnnnnnnnnnnnnnnnnnnnnnnnnnnnnnnnnnnnnnnnnnnnnnnnnnnnnnnnnnnnnnnnnnnnnnnnnnnnnnnnnnnnnnnnnnnnnnnnnnnnnnnnnnnnnnnnnnnnnnnnnnnnnnnnnnnnnnnnnnnnnnnnnnnnnnnnnnnnnnnnnnnnnnnnaagaattcggcacgaggagataaagcacttcttcccaaagggaattatcacctagtgaaaaattatgcatttcatctactcagttaccgactgcaagtctctcctcgctctagctctcaagctttgggtgaatattcctgtgaaatatatcttcaacttgaaagttcatactccaatcaaaaactccttttactgagtttgcagtactgtatttgcactgtttgtattcctctgggcccttattgctacttttgctttcctttgttacacagattttgtgttgcactttttctccagaggggtgttgtagagccttggttgtatgaataataccagtggtagtgtccacggctctaatgtaagcccatttggcatcactcctctcctctctcttgagaggatttcttgtgcacagagtatgaagcagttgtggagcgctgtgcctttgtcaagataccatcttgtttgatgacttctttctttgctgttttttcttcaaaatgttagtaagctctgtcatgcttctagcaaattgtaagactaattatttgtttccacctcataacctgttgcaataaatattacttctcatacnnnnnnnnnnnnnnnnnnngcctacagccgcggccgcaagctttttccctttagttgaggg

SEQ ID NO: 80445 - DNA, 1002 bp, Homo Sapiens
  misc_feature (692)..(844): n is a, c, g, or t
  misc_feature (883)..(917): n is a, c, g, or t
agtgcaaatacagtactgcaaactcagtaaaaggagtttttgattggagtatgaactttcaagttgaagatatatttcacaggaatattcacccaaagcttgagagctagagcgaggagagacttgcagtcggtaactgagtagatgaaatgcataatttttcactaggtgataattccctttgggaagaagtgctttatctttaattattccactttttgttaaatggttcatgcttttaaactgcgattgtctcaaacttgcttgctattgaattgtgtaacatcagataatggcaagttgtcaaaagataaccccagtggataattgaagctgcttttacgagaagcatggtgctgagctgccttacacagtctttttacagtaaccataaaaaactgagtttatttgatcatgtattatcccttctcacataaagtcatattagaggaattctttttaaaagaagctttcaaactagtcctttgggcatttaaaaaatcattatataaaagtacacttcttcaatacataagaacaaatattttttctttaccaaaagaacctcatttttaggccaaaataagttacaacttgctgaaaaccttttatggctcagtgctcattctagatatatgaagctatatttttttgtacatcttcagaaatcagatactgagagtggtccttcnnnnnnnnnnnnnnnnnnnnnnnnnnnnnnnnnnnnnnnnnnnnnnnnnnnnnnnnnnnnnnnnnnnnnnnnnnnnnnnnnnnnnnnnnnnnnnnnnnnnnnnnnnnnnnnnnnnnnnnnnnnnnnnnnnnnnnnnnnnnnnnnnnnnnnnnnggccgaattcccgggcatatgtccggtaccgtcgactgnnnnnnnnnnnnnnnnnnnnnnnnnnnnnnnnnnncggccgcttcctcgctcacctacttcgctgcgctcggtcgttcgtctcggcgagctagcgccctatagtgagtctatacatcttt

SEQ ID NO: 80446 - DNA, 931 bp, Homo Sapiens
  misc_feature (249)..(260): n is a, c, g, or t
cacactttgctttttttcagtgagagaaacacaactgtcaggccagttttagagcatgccagtgacttcaatgagcgcctcccccatagaagatgctcattgcacactttccatgcccctcagccacagcaagaagttttaaagcaaaatccaacaagttcaatcattttcagtttcataaaggcagaaaaatactcagctacattcgtctttgtgggatagtacctttagagtatgcttaaggtgtcnnnnnnnnnnnnacagaatcctgtttgcatctgatctgctcactgcaatataacacgtgcataaaacagtgcaaccgtgtttgttttaataaggccattctgagcagctgtttaatgatccatgatgttaaatgaaaactacaggtgttccaaatgcaaaccttatggcccagggccccccttattaccgttctacaattagcagccaactgctcttaggctgtgcaaagaattaccaccatcatcattacattatttcttaatttcattctctgcctaagtgtcttcccccaaaggaaaaacctgcttggcatgggaaagcataagagtgaaaaaatgaaaagggaaggagaacacaaaacactccctgtccaaccacaaggaggcctcagtgaagggggaaagagccagccaaaaggctcagccccctaaggaatcttccagagtgactttctggccaaacttaacaaagtcttgctgaaactattggtgttcataaggattgcattaaccctttcttcttcatgattccctaagcttaatactgtgctaagccaaattgccagaaagctgcatagctggattccatcgctctgtcttgtagagggctaattttatgcaagtataattttaacatcacaacagttttcacttaaggtacatataataaactgcaaagaagg

SEQ ID NO: 80447 - DNA, 1046 bp, Homo Sapiens
  misc_feature (262)..(262): n is a, c, g, or t
  misc_feature (274)..(274): n is a, c, g, or t
  misc_feature (335)..(335): n is a, c, g, or t
ctcacctattcccccagcggtgaggataatccgcattgggtccgttatgatgatgccctaaatcccaagattgaagaacgtcccttttccggtgccggccaaatcatgagatccccttgtgctgccggctcagagctttagttgaacccatttcctggcccccagatgaaatgcaggttccagataagcgttccccaccactgaagcaccctgagcgggagattttctttttcaccagacgctgggtaccctcaccctgcgntgccctccctcntgtgatcagcatgcagcaaacctgtccttgctcctgtccagagcagagaggaaccggcgcntgcatggggactatgcataccacccgctgcaggagatgaacggggagcctctggccgcagagaaagagcagccagggggcgcccacacaccccctcaaggactgaagcctcaagctgcccggggtggcacgtcgcgaaagcttgtttccccacggtctggcttctgcaggggaaatttcaaggccactggcgtggaccatctgggtgtcctcagcccctgtggggcagccaagttcctgatagcacttgtgcctcagcccctcacctggccacctgccagggcacctgcaaccctagcaataccatgctcgctggagaggctcagctgcctgcttttcgcctgcctgtgtctgctgctgagaagcccgtgcccccgggagggctgccgcactgccaaagagtctccctcctcctggggaaggggctgccaacgaaccagactcagtgaccacgtcatgacagaacagcacatcctggccagcacccctggctggagtgggttaaagggacgagtctgccttcctggctgtgacacgggaccccttttctacagacctcatcactggatttgccaactagaattcgatttcctgtcataggaagctccttggaagaagggatggggggatgaaatcatgtttacagacctgttttgtcatcctgctgccaagaagttttttaatcacttgaataaattgatataataaaagg

SEQ ID NO: 80448 - DNA, 103 bp, Homo Sapiens
cagcaatcacctttaaacatgaaaaacatgaaaggttttaaatgatatttcccaattttctaagtaaacatatgaattatagaatcattgggaagcataagag

SEQ ID NO: 80449 - DNA, 295 bp, Homo Sapiens
aaattgagacagggtctcactatgttgctcaggttggtctgagtaatgatattatcttgcatttatgtggtgctttactttttgttacacattcacagtaattaacctcatttgattttcaacatctctacaacagaggtttggcaaatattttttgagtggctgctaagtggcaatcattccacaaggtatttttacatttgttacttcacttaatcctttcaacaatcctgagaggtaagcatttgctttacttaacagaggaggagacggagactcaaggaacttaaatctt

SEQ ID NO: 80450 - DNA, 1344 bp, Homo Sapiens
  misc_feature (41)..(79): n is a, c, g, or t
  misc_feature (83)..(117): n is a, c, g, or t
  misc_feature (1051)..(1059): n is a, c, g, or t
  misc_feature (1245)..(1263): n is a, c, g, or t
aagtcgatacagtcactatagggcgctagctcgtctagagnnnnnnnnnnnnnnnnnnnnnnnnnnnnnnnnnnnnnnnccgnnnnnnnnnnnnnnnnnnnnnnnnnnnnnnnnnnncagtcgacggtaccggacatatgcccgggaattcggccattacggccggggaaacatggaacattttatcctacctgaaagtaaacgagtaattgtgaagcataagacactgaggctaatacaactctgtcttcatgtgttgactgcctggcacatagtattcattctcttccctttaacatagaagtgtccagctgcgtacagtctagtaaccagcaactgtaaacgaacctgtgcctctaacaagcgattctaaaccacctatgagtatttcttttagggctcacttaaatacatgtttgtatatactgtattctagccagaataattttagatctgatcaggtagtagctaaaattagaaaaaaacaaaatagatgcttaaagaatttgcatccatttttgagtctaaatcttttaaaatatactgagatccacatctagtgaaatgtcagtgtcaaaatattatagattatagctaaaatccagattaatactcatttggggttttttatagtggaacttcatagtaatacaaaaagcagattgtcttcctgtctccgctgctcccacagtaggtattgaaactggtaaaatcagttttttgatagtgtgtgtatataagaaaaaatagatacacacattcttttttctcagtcaacacattgattgaacactctggcaaagatgctgtggtggatgaggttggagttcgaaagaagaagcaagcgctggccatggccttgaaagaaccgaagtctttcccattcaattctctagaaagctgccaagacagaggcagaaagaaatggatgatagttctgtcaagcacacttctgttctcttagaacttagaagtgtttctaagagaacagaagtaataagagaaacagttacgtgtggaattcaacatctttggttggaacgcattggcnnnnnnnnncttgttttgatagaaatggaattaagcaaaagtagtttttgtcttttctgttgtcttcaaattttatgccttttatttttaatttaatcccgttcaattatttaattgttatacattgacattaactgctgtattttgactttgttcaataattttgttctttcagggctagaaataaactttttnnnnnnnnnnnnnnnnnnncctgagcaggcggccgcaagctttttccctttagtgagggttaatttgagcaatggcacttggcccgttcgttaaccaacc

SEQ ID NO: 80451 - DNA, 2503 bp, Homo Sapiens
acttcattgcacgtttaatgcttcatgcagtattcagagcagagataaggggggggatggctcacaggtccacagggacgtcacaggcacaggcgggacacggcgacgtggccggggctgggtggggagggggaccccacgcatcgtaaccgccagcaggggaggggctgcaacgagcagcctcggaccaaggacagcctccccgggacgcacgggacaggagcaacatcgggtgaactgcaatgacctcgcttgtctttcgggggaacccaggaatcccctgggaagcttctctgcactggcctcaccctttcgggcctggctggctcacgtcatcactgcgggatccaagacacatttaagggacaagtcggttgagcgggtcggggcgtgtggggcccgcggctggcttgacttctgctttcccccaacatcaacttgccctgggtggactttctaagaaaggtgaggacggcctgctggagtcccgccagcccctcccaaaggaacttcgagcccggccccccaaaatggggtctacctgcggccgcggccctggctcccaaggcaggagccccgtgtgtcttggcgcccggcttcctctccaattaggggcaagatcaatctcacagctcagagactctcccactccggcatccgcagcagggcccccgggggaggtgggggtgcggcggggtgcagtggcgcgggcaggggtacacatttgcgggaggggccttgacttcttcggcctcaactccctgctctcagcctcatctcccctggggggcagccccttttgacacacttgcccacactcagacctcaatctgggggacctgacctcacagggtcaccaggccccaggggcaacgtcctggcctggttctggggaggaccgatcctcaagcatctccaggagactggcaggggtggggtgggccccccaggagaagcccacagaggcagccggggaggcgtgtggggaggaagctggcctgtcccttccttgatcttgggatgcattttgtccgcttgtcctttgatttggaaatgcacaaggtgatcatttattccaaaaagtgagtccggggaaggggcagtcctcacgctgccgggacccagccccacccggcccacacctcaacacagcggctcccgggcccccgacacagacgagcagggcacggccaccacactggggagctggggctgcagggcgggagctgtgctcagacggtgagggagatgaagctgttgtaacgctgaatgttcctcttgaggatctcagagcagggccccagcacacgctcgaagcggggccggtccagcttcacacactttgaggggcccccgggccacgacagtggccgcccggggccggttcagcagcagtgcaatctccccgaagtagtcagagggtcccaggcgccccacctccacgtactcctcattgggggaccggcgctgcagcacggacgcggtgccctccgtgatgatgtaaaagtcgtccccaggctctccctggaccacaattttctctccatcttcaaactggacgggctccagcgcatccgccacggtcagacgctcccacttctccagggactctaggatggagaccttgctgaggaactcctcgtacatcttgcgtttcctcagcgtgctgcccataaggatgcgccggtagctgtcccggtcgatcccccagagcttgaggtccgtcttggctttcacggtcgcagccctgggggtgccgtagatgagcgccagctccccgaagctgcctccctcgctgatgttggtcacccactctccgttcacgtacacatccacttccccttgatcaacgacatagaagttgtctccttcattcccttgctgtataacagtctccccagcgatgtgagtgacagggaacatggcatcgaatatgtcactcctctcgttgtcatccaggtgagcgaagagcacgttcttggagatggccttggccagcgcagtcatggttttgtagtccttgggaatcaccttcctgacgtaggacacggcgtcctcctcggtgtacacctcggcactcacgcctcctcgccggcggcgggccttcaccacagggttcgggggggtgggcgacacctcctcatcatgggagtccgactgtgagtttgacttttgccgcgccaaaatctgcctgttttcttccttctccagcttctcgaagtgctcccggaggaacttcatggggcgttcgggcttggagatgcagaggtggacgatacagtctttgaggacctgctggatcccgtgcagctgcacgtacagctcacagcccttcaggctctcgtcctcctccgaggggcaggcgggcggggaggccatggcgagggtggctgcttccttcctggatgcgcggcgcccgaggccaggaggcggctgcgcgggacgcggggcgcggggacggctggcgagcgagcgagatccagggaattccggaccggtccac

SEQ ID NO: 80452 - DNA, 954 bp, Homo Sapiens
ggacctcttcctcacggctttccgggctgccatatagaggttgcactgactgaccaaggcccgcatctcttccatgacggtgcgggtgtcaacattgtcacagagggctttgtgaattgctgtcttcttgtcataaaagttcttattcagttctgcttcttcttctccccacttctcaaactgaccagtgatgtcaacaggagcgcgaaggatatctttcacatttaagaaaaactcattcaagaacttctcatattgaagcgctgactccatggtgttgctggagtagtccagggtgtccttccacgagtgcatgaggaaggccagccgcaactgccgtgctgagtgctttttcaaggcatctttaatggtgatgaagttttttagtgactttgacattttgcagcctgcaatggtcaggtggcctgtgtgcaggaagtacctgacccagcagtcgttttcaaagtaggcctccgactgtgccagctcattgtcatggtgggggaaccggaggtcgaacccacctccgtgaatgtccatcgaagcccctaggagggtgcctgccatggccgagcactcgatatgccagcccggacgaccctttccccaagggcacggccaggacggttctccgggcttagaggccttccataaggcaaagtcgttgggagagcgcttctcactcagcggtctgcagagatgctcaggtcaccttccccttcttgaagggctttctgatctccaacggcctcaggcaccagcttcccataggagtgctcctttccctccagctctgtctatcctaccaaggatgaggagaacaatccccttgagacagaatatggcctttctgtctacaaggatcaccagaccatctcctggatggtgatgcctcgtgccgaattcgccacccaggcctcgctaccttaagaccgttagtagttactggcacgt

SEQ ID NO: 80453 - DNA, 3342 bp, Homo Sapiens
  misc_feature (2835)..(2871): n is a, c, g, or t
  misc_feature (3074)..(3076): n is a, c, g, or t
  misc_feature (3078)..(3081): n is a, c, g, or t
  misc_feature (3086)..(3086): n is a, c, g, or t
  misc_feature (3209)..(3210): n is a, c, g, or t
  misc_feature (3265)..(3274): n is a, c, g, or t
ggggcgccggggtggagtcatcctgggaacctccacgcgactttggtggaggtagttctttggcagcgggcatggcgggtaccgtggtgctggacgatgtggagctgcgggaggctcagagagattacctggacttcctggacgacgaggaagaccagggaatttatcagagcaaagttcgggagctgatcagtgacaaccaataccggctgattgtcaatgtgaatgacctgcgcaggaaaaacgagaagagggctaaccggcttctgaacaatgcctttgaggagctggttgccttccagcgggccttaaaggattttgtggcctccattgatgctacctatgccaagcagtatgaggagttctacgtaggactggaaggcagctttggctccaagcacgtctccccgcggactcttacctcctgcttcctcagctgtgtggtctgtgtggagggcattgtcactaaatgttctctagttcgtcccaaagtcgtccgcagtgtccactactgtcctgctactaagaagaccatagagcgacgttattctgatctcaccaccctggtggcctttccctccagctctgtctatcctaccaaggatgaggagaacaatccccttgagacagaatatggcctttctgtctacaaggatcaccagaccatcaccatccaggagatgccggagaaggccccagccggccagctcccccgctctgtggacgtcattctggatgatgacttggtggataaagcgaagcctggtgaccgggttcaggtggtgggaacctaccgttgccttcctggaaagaagggaggctacacctctgggaccttcaggactgtcctgattgcctgtaatgttaagcagatgagcaaggatgctcagccctctttctctgctgaggatatagccaagatcaagaagttcagtaaaacccgatccaaggatatctttgaccagctggccaagtcattggccccaagtatccatgggcatgactatgtcaagaaagcaatcctctgcttgctcttgggaggggtggaacgagacctagaaaatggcagccacatccgtggggacatcaatattcttctaataggagacccatccgttgccaagtctcagcttctgcggtatgtgctttgcactgcaccccgagctatccccaccactggccggggctcctctggagtgggtctgacggctgctgtcaccacagaccaggaaacaggagagcgccgtctggaagcaggggccatggtcctggctgaccgaggcgtggtttgcattgatgaatttgacaaaatgtctgacatggatcgcacagccatccatgaagtgatggagcagggtcgagtgaccattgccaaggctggcatccatgctcggctgaatgcccgctgcagtgttttggcagctgccaaccctgtctacggcaggtatgaccagtataagactccaatggagaacattgggctacaggactcactgctgtcacgatttgacttgctcttcatcatgctggatcagatggatcctgagcaggatcgggagatctcagaccatgtccttcggatgcaccgttacagagcacctggggagcaggatggcgatgctatgcccttgggtagtgctgtggatatcctggccacagatgatcccaactttagccaggaagatcagcaggacacccagatttatgagaagcatgacaaccttctacatgggaccaagaagaaaaaggagaagatggtgagtgcagcattcatgaagaagtacatccatgtggccaaaatcatcaagcctgtcctgacacaggagtcggccacctacattgcagaagagtattcacgcctgcgcagccaggatagcatgagctcagacaccgccaggacatctccagttacagcccgaacactggaaactctgattcgactggccacagcccatgcgaaggcccgcatgagcaagactgtggacctgcaggatgcagaggaagctgtggagttggtccagtatgcttactttaagaaggttctggagaaggagaagaaacgtaagaagcgaagtgaggatgaatcagagacagaagatgaagaggagaaaagccaagaggaccaggagcagaagaggaagagaaggaagactcgccagccagatgccaaagatggggattcatacgacccctatgacttcagtgacacagaggaggaaatgcctcaagtacacactccaaagacggcagactcacaggagaccaaggaatcccagaaagtggagttgagtgaatccaggttgaaggcattcaaggtggccctcttggatgtgttccgggaagctcatgcgcagtcaatcggcatgaatcgcctcacagaatccatcaaccgggacagcaaagagcccttctcttcagttgagatccaggctgctctgagcaagatgcaggatgacaatcaggtcatggtgtctgagggcatcatcttcctcatctgaggaggcctcgtctctgaacttgggttgtgccgagagagtttgttctgtgtttcccaccctctccctgacccaagtctttgcctctactcccttaacagtgttgaattcaactgaaggcgaggaatgttggtgatgaagctgagttcaggactcggtggaccctttgggaatgggtcatgaaagctgccatggggtgaggaaagaggagacagtgggagaggacaatgactattgcatcttcattgcaaaagcactggctcatccgccctacttcccatcccacacaaacccaatcgtaaataacatatgacttctgagtacttttgggggcacaacnnnnnnnnnnnnnnnnnnnnnnnnnnnnnnnnnnnnnctccagagcactttggtctagactaggctttgggtggttccaattggtggagagaagctctgaggcacgtcatgcaggtcaagaaagctttctttgcagtagcaccagttaaggtgaatatgtattgtatcacaaaacaaacccaatatccagatgaatatccgagatgttgaataaacttagccatttcgtacacatggtannncnnnnccccnttacaccctaccgccgccacaaggccctaacctctgttaacagtccataacaccttacgtcctaataccccctgccctaacgcaacccgaccttttttttcccctacccccttttaagcgaanntgctttttgggggggcccccggccccaagaaaagttttcataaaaattttctttnnnnnnnnnncgccccaagggaaaaagaaacggggcgcccaccgtttttttaccaaaaaacccgggcacgtaaaacgg

SEQ ID NO: 80454 - DNA, 647 bp, Homo Sapiens
  misc_feature (1)..(1): n is a, c, g, or t
  misc_feature (587)..(600): n is a, c, g, or t
ncaaaataacaatctgaagaggcatttggtacagatatgaattctcttacatttatttactggttgtactaaataatgatgacctctgctggatttctgtttacaatccagaaaacaatgttaaggatgtatttattcccctaccctgaagaaagtctaggatagaattgtttttagcattctaaatttaaatgcttaaaacgtcaatcaacaaaactttgttttaaatattgtaattgtggagaaaagtaaacttataagcagaacttttacaattttttcatctaaaagtattttaagatatttttaaaatccaagagcttctctatacttttcagaaatatccagatgcagtgaactgccagaaggtaaccagtctcaaacatgcttatcccattatcaaccctgaaagtttgcttgtcctttaagataaaaatgtaatgttgtgatattccttccagtaatgccactgtattttgtctccaaataaaagaagcttattgtagtatgtttgcagaaaaattctaaacaaaaattatacagcttattagagtgtgggaatagggatctaaattttaaataaaatnnnnnnnnnnnnnnaattggtgctgattttatacttgcgcagtttgtttagttttttcttc

SEQ ID NO: 80455 - DNA, 817 bp, Homo Sapiens
acatacccaaagacacaagccaactgaagaaacatatcaccttgctctgcgatagattatccaaaggtggccgtctctgcctaagtaccgatgcagcagccccacagaccatggtcatgccaggtggttgtactacaatcccagagtcagacctagaagaaagatcagtagaacaagactctacagaactgtttaccaaccacagacatctcactgcagagacacccaggcctgaagtttcacccctccaaggagtctcggaataattcaagtagagttgtttggttgagaggaacatccccatctcaaggccgaacctgtgtgaacctcatgccaagcacagatatagggctggcgcaggtgcttcctaaagctcaccttcctggagatgacatgcatagaaagaggggttgggactttttacttcactaggagaacttgtaacaccatggggaagtcagctgaaacttgtcttgttttgccaggaaaggaagtagttgcctttggtcatccatctgctaatagtcacagaatacagtgaaatgacatagttttgggttagattttataatgcaaagattcagatccaaaataatttcataccccattttttcacagaattcttatatagtaaatgtatcaagtttaataaagcatctcattgtcaaataatatcttggattttatttataattagagggatttatgagtgattgctctaccttatttcttcaaaggaaaggaaaggaattgaagactttgctactctctggtaagacttgaatgtgactcttttataaataaaagaacccctatg

SEQ ID NO: 80456 - DNA, 849 bp, Homo Sapiens
  misc_feature (236)..(245): n is a, c, g, or t
  misc_feature (434)..(451): n is a, c, g, or t
tctcgcaagagatttagacattcagatacaggagatttagggatccccaggcagatacaatatgtaaaaaattcttcctcaagatggagtcagactgtttaaaatcaaagataaagaatgaatcataaaaacaagcaagagaaaagcacatagtcacctatagagaaaactccattttcagcagacattttatagaccagaagaaaatgtaatgatgtattcaaagtgctgaaagnnnnnnnnnnctgtcagccataattacaaagattttttccagcaaagaaatctttcataaatgaagaagagtttttctcagacaagcaaatgatgaaagaatttgttaccacaaggccagccatagaaaaatgctcaagggagtcctaaacctggaaatgaagggactacttttgccatcatgaaaacacatcaaagtnnnnnnnnnnnnnnnnnngctcactggtaaagtaatcacacaaaggaagaagagaaaggatgcaaatggtgccactacagaaatctatcagaacaacaatcaatgtgaaattgaaaggaacaaagaatatataaaacaagcagaaaacaatatgacagaagcaaagactcatatatcaataatagccttgcatgtaaacagattgtgtgctccaattaaaaggtatagaattgctggatggattataaaacctgatccaactatatgctgcttacaggaaactcattttaccagtaaaatgcatatagactagaagtaaagggatggaaaaagatactccacacatgcagaaaccaaaagcaagcaggagtagcaatacttgtaacagataagacagaatttaagtcaagaacagt

SEQ ID NO: 80457 - DNA, 1666 bp, Homo Sapiens
  misc_feature (858)..(929): n is a, c, g, or t
gggtccggaattcccgggatctcagccccaacacagaggtgagaccaggaataaggccacaagtatctcactttctctgcagaaatcaatctttacttcatcagagagacctaaagcgattcttacaaggagcttgctgcaagaaacacggtcattcaatcacattgcaggagggtccacatggcattgagagggtgctgcccgctcaatgcccagcagcagctctggaaggcagtgctcagccccatcaccactgtcccgaggatgcctgtgtacctcttgccttttctgggcttgcgtttctctcctctagtgggtggggatgactttcaatgactttcaatacttcccctgaaggaacaatgataaggagaaatgtctgttttgaggaaagggctttgaattccccagatactgaacaatttgtgtttgtgactgatggagaatttcaggaatgaatgagaaagcctttgcgaaactatgcaacagtttacatcagtcatgtgaagtatttgtctaaaacagagcaaactgaagaccaaattattctcctgttgaggtccgtggatggcagatttaaagggaagaaccacaaaggcttgcaaagataggagaggctccatctctaatgcatgtagaagctccttacgggtgcccatcaagagcatagcttggaagccaccatgctgtgcggaactgcgtcagggcaaatgtcacagcaggatttccccaacccagctccatcatcacagacacagagagctgcaggggaggcctgcccactgttttgtcgactctgccctcctctggcagcatagatccttaggtgctcaataaaggtgtgctgtattgaactgnnnnnnnnnnnnnnnnnnnnnnnnnnnnnnnnnnnnnnnnnnnnnnnnnnnnnnnnnnnnnnnnnnnnnnnntgtctgtccgcccgctccctcccatttaatcagccttaacaacaccactcggctcggccgcgcgcgcccccccagtgcgctgaccgagcaatgaggagaacgcgttgttttcggtaagaacacccccttttactaaatccccacggtctttgttacccccaaccaatacaaacgaaacacggtccgcctgtgtgccacatacggaacacgtcgtctcatactaccacacccctctacccgtctacaccaccacgaagcgccctattttaccgtcgaaatattataacgcgagacgccgggacgaacactcccaggtccgcaccctctataatcaatatatgcagtggccagctcccgccgccgcccctttcttcctctactcactcacgaccctatgttgcctgcgcgctgccacacacaattatataaaccgcgctccctccgaccccctcgcctattggcacgacctcccatcatcccgccaggtgccgatctctaatgttataaacctgcgctgcactccgccctctaggtcactcacccccactactgtgtctttcctcggcgcgccggatgcacaaaattaaagactctcccgcgcgatgtagcgcacaaaaaagcgcccggcatgccatcatctatcactatcttctcccactagatacatgccacccccccgctctacttatatcatacgcgcgatggaatagcctcaactgtactacctctggggggcc

SEQ ID NO: 80458 - DNA, 1049 bp, Homo Sapiens
  misc_feature (94)..(94): n is a, c, g, or t
  misc_feature (106)..(106): n is a, c, g, or t
  misc_feature (116)..(116): n is a, c, g, or t
  misc_feature (123)..(123): n is a, c, g, or t
  misc_feature (129)..(129): n is a, c, g, or t
  misc_feature (175)..(175): n is a, c, g, or t
  misc_feature (204)..(204): n is a, c, g, or t
  misc_feature (223)..(223): n is a, c, g, or t
  misc_feature (280)..(280): n is a, c, g, or t
  misc_feature (303)..(303): n is a, c, g, or t
  misc_feature (935)..(944): n is a, c, g, or t
cccagcagcagcaggaggtgtcaggaggacgcttgcaaagcattcagtcatgcatcaatcttcagtgggagccagttccacagcagcatccaanggtcatagcccntatgtaacangcagcanaatgcnaaccaaacagttatcattatggctaagtatgctttctcctgaaacnttagcatgtggtgcaatattcagtatgtntctcggagtccaaagggtntaagccagggcacaaccagaaaagtgctctctttgtaggggagagggctccaatatntcgtctcgtccccatgggcactngacagagaaatgaaatagttttatctggaaaattccagagctattatgtactccttaccaagggaagtacttcttgtaaaaacttgtaagccatttatcaacaagttcgtgttgactcagggcataatgagttcctgagacatgctcttttgggggctggggctttaggtagaagaatttcaaggaaaagaattctcagcagagctcaagattgtagaaactcagcagaagctggtaaaaacatggggagcccggaggacaggctgctgtccagggcagaggccatgaagaagtgcttccgtggccgacagtctggaaatgaatccatcatacattagtgccatagagtttagtaaccgtccagcaagtgtcatcacttttacagaaaacaaggtccagtaatagcaagtcttagtacatcctcacttttattataaatgggtgttttttcataatttttactgacgctcagtaaccatgcaaaattgtgtatagcattaatgtatctacatacctacacctatctatatataagctcatggtagaaaaccatagctaagtagcatcgcagacttaagcgtacaaagtgatcttgttcacaagtaatctgttgacagtgccaataaatgatnnnnnnnnnnttaacatgtcacaatgtaacggatgaccatatgcacaattccatgaattaaatctgtttcctgtgttagtcagtattcttaaataaaatttataattgaaacatg

SEQ ID NO: 80459 - DNA, 1477 bp, Homo Sapiens
  misc_feature (840)..(854): n is a, c, g, or t
  misc_feature (872)..(1302): n is a, c, g, or t
  misc_feature (1325)..(1325): n is a, c, g, or t
  misc_feature (1346)..(1346): n is a, c, g, or t
  misc_feature (1380)..(1380): n is a, c, g, or t
  misc_feature (1465)..(1465): n is a, c, g, or t
gggacaggctccctggctggcgtcagctaaagtggctgttgggtgtccgcaggcttctgcctggccgccgccgcctataagctaccaggaggagctttacgacttcccgtcctgcgggaagtggcgggcacgatcgcaaggtagcgcagaagcttctcaatggccagcgccagctgcagccccggcggcgcactcgcctcacctgagcctgggaggaaaattcttccaaggatgatctcccactcagagctgaggaagcttttctactcagcagatgctgtgtgttttgatgttgacagcacggtcatcagtgaagaaggaatcggatgctttcattggctttggaggaaatgtgatcaggcaacaagtcaaggataacgccaaatggtatatcactgattttgtagagctgctgggagaaccggaagaataacatccattgtcatacagctccaaacaacttcagatgaatttttacaagttacacagattgatactgtttgcttacaattgcctattacaacttgctatagaaagttggtacagatgatctgcactgtcaagtaaactacagttaggaatcctcaaagattggtttgtttgtttttaactgtagttccagtattatatgatcactattgatttcctggagagttttgtaatctgaattctttatgtatattcctagctatatttcatacaaagtgttttaagagtggagagtcaattaaacacctttactcttaggaatatagattcggcagccttcagtgaatattggtttttttccctttggtatgtcaataaaagtttatccgtatgtcagaacggatttgtggnnnnnnnnnnnnnnncctcgtgccgaattcttnnnnnnnnnnnnnnnnnnnnnnnnnnnnnnnnnnnnnnnnnnnnnnnnnnnnnnnnnnnnnnnnnnnnnnnnnnnnnnnnnnnnnnnnnnnnnnnnnnnnnnnnnnnnnnnnnnnnnnnnnnnnnnnnnnnnnnnnnnnnnnnnnnnnnnnnnnnnnnnnnnnnnnnnnnnnnnnnnnnnnnnnnnnnnnnnnnnnnnnnnnnnnnnnnnnnnnnnnnnnnnnnnnnnnnnnnnnnnnnnnnnnnnnnnnnnnnnnnnnnnnnnnnnnnnnnnnnnnnnnnnnnnnnnnnnnnnnnnnnnnnnnnnnnnnnnnnnnnnnnnnnnnnnnnnnnnnnnnnnnnnnnnnnnnnnnnnnnnnnnnnnnnnnnnnnnnnnnnnnnnnnnnnnnnnnnnnnnnnnnnnnnnnnnnnnnnnnnnnnnnnnnnnnnnnnggcgcgttgcggcgttttcatangctcgcccctgacagcacaanaatcacgccagtcagagtgggaaccgacagctanagatcagggttccctggagtcctcgggcctctgtcgactgcgctacgaactgtcgctccctcgggactgggctccaagtagcgtngaccatcgggag

SEQ ID NO: 80460 - DNA, 1957 bp, Homo Sapiens
  misc_feature (618)..(618): n is a, c, g, or t
  misc_feature (1241)..(1251): n is a, c, g, or t
tttttggaggaataagcattttttaatttcttatataaaatgctaacttcttgtcaggacatactacagactatgcattgaattttttgacaaacttcctgtaatctttttattaatttacactgagggaatatagcacctttcatccgaagaactgaaggtgctttacaaacattagcatttaaaaaacaattacatttaaaaatctggattcttgatgtcaaatctcttcgactccagatacacaatttcctggaagctgatggaaagtgattctatttctgacaatgaaagaggctcagaaagagtcctaatttgctttcacagtacaggcattttccaaaacctggttctgggcttacaaagcacacacacacaaatcttaatgcaatgaacaatatttcaaaccttatttcccaaagcaaaacctagggcttaagacgtcaaaatcttccaacagttctagacatccagacagaataggagctgatgcagattgcatatgagatgtactgttgatccaggtgttttaggatcacactcaaatgaatataaagtagtgaaactttttggggaaacacattcaacttataaaaagctagccaagagcatatcgcncaaaggaggaaagggagtaaatggcaattcaaagtagacagttctcactagagcctagggcactttattagaaaccaagtatatcataggcaaataaaaatagtttttacccccattgatacaacataagggattttacattcagcctagatatagggagtaacaaatcctcctgcccataaatctatgacttgcaagtatcttccaccacatgataactctatatagtacatatagtacatagcccttatttattggagggatccaaaatattccttgtaggctcacaaagtccaatacattagctctctcttccctttacacgtctaatagtaaaaactattttttccatgcaaaaagccattattcagttgaagagaaatcaggcaaaacagagatggcagataaggaatggagagaatattattggcacgtgcccaactagtgacaaacaaatgcagtacacaatgacttaaaaataaaagtcacattatagggataacaaaaacaactacatcaatctaagctaaggagtgtcaaacagggagggctgggagttaccggttctattagtacaacttaagtggaaagcaagcacttaaatacaatttatggtaacaggnnnnnnnnnnntactgcagagagctgttcaaagaccacaccaagttgtctgcatcattaatttccagtgtttcacaattagtaaaatacatagctacatatccctgtgagataaaaatacctttccacctgaattacactgggatcagggcagtaacacgaagatactgacccaacattagttcaagtgtgtgcagcaaatgtcttagccacctctttcagatagctatataattaaaaactatgtaaggagctgggtggtttgagggaaaaaaattaaatcaaaacagtattgtgctcaattaataaaagaaaaccctgatgaaaaattatatgccaagaagcttagactataaagatttttattgcatttttaggtaacctggaagttcttatcctgaaggggaaaagtgggttttcaaaactacctgaacagatgctaaagtgctttattaattggctggcttcacaagtatttcctggaataacaaaaattaatcatagtaaagggataccaactatttcacaaaatgtacattccaacatcatttatgactacagtcataagagatactggaatacttgtccttattaagtggacagttgcatattcagaactgatcatcacaaccctttggatattcaaattacttacacaaagctgaaatcccggccgtaatggccgaattcccgggcatatgtccggtaccgtcgactg

SEQ ID NO: 80461 - DNA, 1006 bp, Homo Sapiens
  misc_feature (205)..(259): n is a, c, g, or t
  misc_feature (679)..(821): n is a, c, g, or t
cagtcgacggtaccggacatatgcccgggaattcggccattacggccgggatgtgaatttaaaaatgagagcagtcccctcaccctaccacagttccacaccctcaaggtaaacttataacttataatttgatatgtaaacttccagatcttttttctatgcgtaatcagacatacatatatactgcagtgtatctcacgtattnnnnnnnnnnnnnnnnnnnnnnnnnnnnnnnnnnnnnnnnnnnnnnnnnnnnnnnccgtttgatctattaaggaagaacaaggaagggaatgatctttactcaagaatctcagaaagtcagcactgaagtcctgacctatcagtagacacatttgtccctttcagatattttaggatattctagcaaagcaggccatttctcccacctgaaagtacataacttctatcacttgccacataattaaaagaactcacattaagcggttactcagacagttaatcatagaaacagattatttgcttcatcagttcatagaacaagattatttgcttccatcagttaacttgtctctcataaatcagggctgtgttcatacacagaaggggcctgagatttctgcactttaaacaagctcctcctaggtgaggatgctgtggctgttctaattacattttgagtagtaaggtctacagnnnnnnnnnnnnnnnnnnnnnnnnnnnnnnnnnnnnnnnnnnnnnnnnnnnnnnnnnnnnnnnnnnnnnnnnnnnnnnnnnnnnnnnnnnnnnnnnnnnnnnnnnnnnnnnnnnnnnnnnnnnnnnnnnnnnnnnnnnnnnnngaacttgtgcagcaaagtttgggagctactgatggacatgtgaaaagtaagtataaatggaataaaattaattaggctaataggcttaacccaggaaatcctaagttccttgaatatccagtttgcatttggactcctcatcatatacttggtatataatactctaataaaagctgcctgagttg

SEQ ID NO: 80462 - DNA, 1074 bp, Homo Sapiens
  misc_feature (526)..(536): n is a, c, g, or t
cagtcgacggtaccggacatatgcccgggaattcggccattacggccgggagctattgtaacttctaaaaatggtatggccattagatctgtgctttttatctctgctctttgaatttctcatattatatagtaaatatattcctacgtaaacctttgatacctagatcaggaatactcttccaggagtacaaaattacattattgatagttaagctcttaattgtgtagcttgcaaaagacagcactttttagttacagatgttttgactttgatgaggatatttagctatcaatctaatagtcacctaaaatatcttttttgttggaaaaaagtttataataaaaaagtttgtcatctctagtgacttcaataaagaaaaaactagaagaggagaaaaaggatttcctcaaattttaaatatgtaacttcagggattcaatccccaaatgtttattaagtagctagaaataattatgtggaaaaaaatgaataatggaaaatagtgagtctcaaattgttctcnnnnnnnnnnnaactaaaacaaatctgcaatgaatctagatgcaattaattttattccttccaactaaaattacaatattttcaggttaaaattattgagatataaagcagccatgtgggaaattgggagaaatgataaacaactggaaaacagaagatgtccctaacctacacccatagattaccaaggtttcagtgtactagtttggaatctgttctgaatggagtctttataccctcaatttctggccttgggctattttagcatttcaaagtgacttctatgaagctttcttctaaatgtgaaatctccagaatgtggtatttttcatgtagatactccaggcagagtcaagcactgcttacagtttaaatatccaccttgaggggtcgctgcttgagggctctatatccaggggacttttaaactcggatgtcccttaatgtggctcctctaatgtacagtcctctgattcaccgacatacacaatcattgtagcatcaagtattacgtggaaaagtaccatgtgactaactttcccatactca

SEQ ID NO: 80463 - DNA, 417 bp, Homo Sapiens
ggcacgaggtgcgtatttcccttcagagttaacccctttaaaggatctttaataccttgctctactgttctgactaaatgtttccacatttttttccagttaggctcactgtttcacttctggaaaatattgtgtaattatttcccgatggagtgaaaaccccacgaagtccccagtgccttggtgacttcaactttattctcccagatcgagttgcatttaattttgtcattctatttaattaattaatattaaaaagatagttaccaacgtatgatttctggtctggccagctgaaaagtcttcactttcaaattaatcatatattcctctgataagttgcacaattgtcattgcttcccatctttctcagttttggttttgaaacaggatctggattaagatgatgttaaagta

SEQ ID NO: 80464 - DNA, 1153 bp, Homo Sapiens
  misc_feature (21)..(21): n is a, c, g, or t
  misc_feature (875)..(1087): n is a, c, g, or t
ctttcagaaaataaaagcctntaaagtgaagaagataattcattctgaagacaaacattacaaatattaagagggttgtagtaccattacttgcatcacagatcttattgtacacattttgtactaaagaaaaccctgaagcagttgctcaaatactgttcaacatcagaaaatttatattggaaaaaacccctggaaaatgtaataaatttgtaaaaacagttttgaaaaactacagcttataaaacatgagggtctataatgcttggttgatagtacaaagtttattcaacatcagggaatttatattggagaaaaaccctacaaatgtaatcagtttggaaaaacatttttaaaaaaaccacagcatagaaaacaccacagggttcatactaaaatatgtttttgcagatgcagtaaaaatgaaaaaaatttaatccgaaattaagtttatgtaaatatctgagaattcacagtagaaatatctaaggcgcggacacttcagacattacactaaatcagtgctaagtacagaaaacaacacaaaataaaacttggtggataaattatttgtatataacattaaaagaagtagaagattttcagttataattacaattaaagtatacttttatcttgaaaaaattactgatttttaaattagtgaataatgatgtaattaaactctcaaataactttatgctcttttttcattcctgatatattgacatgtgaaagcatgtgaccaattgttgctgcaccaaagatatgagagattcttttattaggtgggcattatttaaaacattttttatggaacagtaaggatattaaagtgtaagatgcagccaggcatggtggctcatgcctataannnnnnnnnnnnnnnnnnnnnnnnnnnnnnnnnnnnnnnnnnnnnnnnnnnnnnnnnnnnnnnnnnnnnnnnnnnnnnnnnnnnnnnnnnnnnnnnnnnnnnnnnnnnnnnnnnnnnnnnnnnnnnnnnnnnnnnnnnnnnnnnnnnnnnnnnnnnnnnnnnnnnnnnnnnnnnnnnnnnnnnnnnnnnnnnnnnnnnnnnnnnnnnnnnnnnggtcattttaattataaaaattatatagaagtataaataaagtccatacattcctgagtcatgaat

SEQ ID NO: 80465 - DNA, 749 bp, Homo Sapiens
attcggcacgaggtttgtttttgagctttataatatgctatcgtactgtgcataaagtgctgttttaatttacctctaagagtcatctatgttattgcattatgtctgttacagtatttctgatcctcctgacagccctgcagttggctttggatatggtaaacctaaggaaagtaaagctcagcgagctggggtggctcacccagtccaagggcagattgcagggactcctcttcaccacatcttgtccattcccttactcgtgagggtctcctgagcactggtagtgagcaggtgctggacatgccacagggaacacggcagatcctccgccgtcccgaagcacacatcatggtgctccccttgactttcaccaggatgactccgggtatgggccagttacctgaacatcctgggggggcccacgtcccttctacttgtcctcaagaatgacttaaagagtctggtctgaccctcccacaggtttctgcccatggaggggcaactggacagcagctatcaccacggcatatgtagccaccgctaactcattaatgctgcttccaggaacttatcttctagaagtgcttgaatatgtacagaggggcactagcctaataatatttattgcagcattgtttgtaatataaaagtagtaaaaacaactcaaatttccaccaatagggatctcactgcaggtcattaacatttgttatgggaaacatacacaatggaataccactagctgt

SEQ ID NO: 80466 - DNA, 1046 bp, Homo Sapiens
  misc_feature (123)..(123): n is a, c, g, or t
  misc_feature (197)..(197): n is a, c, g, or t
  misc_feature (450)..(450): n is a, c, g, or t
  misc_feature (987)..(1006): n is a, c, g, or t
tggtatttttacccccagattttggaccctccccccggatgtccaagatccaaagcttgttgcactggattagctttgcctgtaggtaaagacaagtttagtcgaggactgcccctaggctgntgtgtgaccctgtcccatgtgctgtttgcctgtccgggactcttcgattgcccaggggagcgtgtcctgttctnccctgccgtcctgcagtcctatctgctcgcctgagggaggagtagctgtagctacaaggaagcctgcctggaagagccgagcacctgtgcccatggcttctggtcatgaaacgagttaatgatggcagagggagcttccttccccacttcgcagcgccacattatccatcctctgagataagtaggctggtttaaccattggaatggacctttcagtggaaaccctgagagtctgagaaccccccagaccaancccttccctccctttccccacctcttacagtgtttggacaggagggtatggtgctgctctgtgtagcaagtactttggcttatgaaagaggcagccacgcattttgcactaggaagaatcagtaatcacttttcagaagacttctatggaccacaaatatattacggaggaacagattttgctaagacataatctagttttataactcaatcatgaatgaaccatgtgtggcaaacttgcagtttaaaggggtcccatcagtgaaagaaactgattttttttaacggactgcttttagttaaattgaagaaagtcagctcttgtcaaaaggtctaaactttcccgcctcaatcctaaaagcatgtcaacaatccacatcagatgccataaatatgaactgcaggataaaatggtacaatcttagtgaatgggaattggaatcaaaagagtttgctgtccttcttagaatgttctaaaatgtcaaggcagttgcttgtgtttaactgtgaacaaataaaaatttattgttttgcactnnnnnnnnnnnnnnnnnnnncctgagcaggcggccgcaagcttattccctttagtgaggg

SEQ ID NO: 80467 - DNA, 651 bp, Homo Sapiens
  misc_feature (506)..(514): n is a, c, g, or t
atgagtatgctgacttttcaagattggctggtgcatgtttagacttaaatgtcatatccttcatgtctcaaagccaaaatagtaacatctcatctcagaacagagctgtgaccacatgccaatatatgtgtcacaaagtctacatatgttacattccttggaagtctccttaaatgtttcacaaaatgtcaacaagcttgttttgttattgatatttccgagattgggcacatttaagacagtaaacgggaaaggtggtgaagatgctataagaagatgctgtatcttgagaattgaaaaatgagaatctgacatggtttgaaaaatcatgaagggtatatataaaggatgcatgtgtaggagccattaaaattcataacagtatgtgccccttcagcgttttaatcttatgaagtggttaagagataagtcttcggagttggacaaaaggatttgaatttaggttctgtggattattatgggtccttgataaattctcaaagccnnnnnnnnngttcatctctaaaataggaatataggattacctaccacattgactcgtaaggactatatgagaccatgtatatagaatgtttaacatagtaccaggctttacaaagaactcaagtaaatgtttaccattatggaaaa

SEQ ID NO: 80468 - DNA, 657 bp, Homo Sapiens
  misc_feature (42)..(42): n is a, c, g, or t
  misc_feature (46)..(46): n is a, c, g, or t
  misc_feature (73)..(73): n is a, c, g, or t
  misc_feature (94)..(94): n is a, c, g, or t
  misc_feature (112)..(112): n is a, c, g, or t
  misc_feature (131)..(183): n is a, c, g, or t
aggacacctgtgcaggtcccagacccaggccccagagcagcncagnccatgaccctgccgagcacgagtcccnccgtgcagccaagaacgttcncaggcagaactccgctcncctgctccaaactgctttnnnnnnnnnnnnnnnnnnnnnnnnnnnnnnnnnnnnnnnnnnnnnnnnnnnnnatgtccagttcaaatctctcgaggacctcaaggcctcccctccactgcaccccctctgatggcccctttatgtgaccctcaactgtacacaggtccctccccggcttcctccggaggcccggcccggccggaggatgttcagcacctctgccttgcagggtgcccaggggggtgccagggctttgcttggaggctactcccaagcctacgggactgtctgccactcggcactgggccacctgcccctgctggaggggcaccatgtgtgagccgccctactcccttcacctggccctctgttcctgccccagccccttccccagacccctctccagtctcctgcaccccttagccctccctgctttgcctggcccgttgaagttccagggagcttgcccgggtctcctcgggggagcagatgagggccctgcccccgccccactgacttcctccaataaagtcatgtctgccccc

SEQ ID NO: 80469 - DNA, 1038 bp, Homo Sapiens
  misc_feature (131)..(141): n is a, c, g, or t
  misc_feature (779)..(799): n is a, c, g, or t
gcaagaggtaagtaaaagattcaatttgattcttctacactagagaataatattccagtctgaagaatatcaaatagttttgatattcaactgactttttaaataaagaattctacctgtaaacacaagtnnnnnnnnnnntttcaatccttgaggcaaatgctagaaaatacataaatttttaaaattactcttatttcttaaatatagcctctatcagcctatttctcagacttgatcctttatccaacataataatttatattctgtataaacttaacagccactgagaattgcagatctattacccctccaactattgccctctagacactcaactctgaaaaaagaaggttcgacgtattcctgacagctttgactgaggcctctgtaatttccagtttattaatctctatccattcttctgttttttacttaatccattaagatagctttaaaagatagcattaattgaccacattaattaaacgccaatttatatgatactcctaaagaaaatgttctgaataactgaattaatacatatactcaaaatctagggtggctgagtattcaccttcctccttgagcttgctaacacttttctaccaaagtactacaaaattctaaacagaaaataaattattatccttcattgctatttgcttgttgtcatcatttacccacataatctctcctactctcccctaatgcctagtaaaacttgttcctcctttttaggaactcaaatatactagtttctcttctatatttgttcnnnnnnnnnnnnnnnnnnnnnaacatcctttgctaatgcttcaaacatggaaaaattttaggattctcaagaatagatcttgaaattctatatcacattagcaatttgtcaacctccctccttctacagaaaaccaagttcaggccaggagtactggctcacacctgtaatcccaacaccttgggagactaaggtgggagactgcttgagcccaggatttcaggaccagccccagcatgatggcaagacactgtctctac

SEQ ID NO: 80470 - DNA, 655 bp, Homo Sapiens
  misc_feature (297)..(313): n is a, c, g, or t
ccactctcactttaggggagcatttgcaccctaaagtatgggggccatcttagtatatttcatgtcaaatacataaagtgcttacagggagcagcaggactggcccccttagaatacagtgttccccttccccttagattagtgcctgagtcctcaatctcttctccactccacggccgacctccagaccctcctacacctcacaggccatcctaaaaaccctctgacctggcctgcctttctcttatttcccatgccattcatattccctcttctttctctctctgtcatacgtgnnnnnnnnnnnnnnnnncaacaacaaccctccacctctccattctccatgctgcatgctagtccacttatctttccaaaagcagccatgatttcatctctcccctgtttcctcactgctcattgctcatctgatagagcttagcaagtcactcctccacaataacctgtcttcctggtttcataagctgctcatctcattccaactcatcctctctcgcagccataagaaagcccagtactccaaggcccttcataccttctggtgccctcgcacttgcttgcttcccagaataacccatcccataagcagcctccttcatgtttcaaatcagccatttcacagaccacatcctccata

SEQ ID NO: 80471 - DNA, 1232 bp, Homo Sapiens
  misc_feature (107)..(169): n is a, c, g, or t
  misc_feature (612)..(636): n is a, c, g, or t
  misc_feature (707)..(809): n is a, c, g, or t
  misc_feature (816)..(855): n is a, c, g, or t
  misc_feature (899)..(1050): n is a, c, g, or t
  misc_feature (1064)..(1077): n is a, c, g, or t
  misc_feature (1100)..(1109): n is a, c, g, or t
  misc_feature (1160)..(1160): n is a, c, g, or t
  misc_feature (1164)..(1172): n is a, c, g, or t
gcccccctaaaagattaagtccagaaatgtactttctggcacataaagaaatcttgaggactttgtttaaaccttccataaaaaaacaattttcggtttctcgggtnnnnnnnnnnnnnnnnnnnnnnnnnnnnnnnnnnnnnnnnnnnnnnnnnnnnnnnnnnnnnnnttctttctttgtgtattttattcaagatgagttggacccattgccagtgagtctgaatgtcactgacagccctgtgttgtgctcaggactcactctgctgctggtggaaactcaaggcttctctctctctttgatcccataaagctacgagggggacgggagagggcagtgcaatgggaagtaaagagatattttccagtaggaaaagcaatgctttcttgtctttagactcaaatgcttagggaacgtttcatttctcattcatggggaaaggcagcctccttaaatgttttctgaagagcggtaaaatctagaagcttaagaatttacagttccttcaataaccatgatgacctgaagttcacctatcccattttagcatctacttgtttttcccatctcttcctttccaattttgcttatactgctgtaatatttttgtnnnnnnnnnnnnnnnnnnnnnnnnngaccagctaaaattttcgacttgactttttaacttaactcatgaattaattaaagcaaatgaaaaaattannnnnnnnnnnnnnnnnnnnnnnnnnnnnnnnnnnnnnnnnnnnnnnnnnnnnnnnnnnnnnnnnnnnnnnnnnnnnnnnnnnnnnnnnnnnnnnnnnnnnnntttgggnnnnnnnnnnnnnnnnnnnnnnnnnnnnnnnnnnnnnnnnggggcgcgggcccccaaaggaaaagaaacggggccaaagttttnnnnnnnnnnnnnnnnnnnnnnnnnnnnnnnnnnnnnnnnnnnnnnnnnnnnnnnnnnnnnnnnnnnnnnnnnnnnnnnnnnnnnnnnnnnnnnnnnnnnnnnnnnnnnnnnnnnnnnnnnnnnnnnnnnnnnnnnnnnnnnnnnnnnnnnnaaataaaaaaatannnnnnnnnnnnnnggggaatttttattagaaagaannnnnnnnnnaaaattcctaaaaaccccttttccccccccaatggggaaaaccccctccanaaannnnnnnnntaaaaacacccgaaataccccccccggggggaacaaaaccccttttggcccccttggtgg

SEQ ID NO: 80472 - DNA, 716 bp, Homo Sapiens
agtgtatacgtggaatcattcagaaaaatgttcagttgtgtgtaggccatgagaagtcctgagtcaccctcatttgcttgccttttgttcatagggaacagtatgagaagacacgcctttcctctgtcacagaccaaggtcagatgcaccaatgaatggaatacatatttacccaatttatcgtggggttctagaaatcgggagtgggggtggggactgttttaactccttcagtgccactggttaggcctctgacagcaatggtactacaatcaaataaaaattacgggtgtgactttccagattacaaactctatagatcccttgttgctgtttctcttgacagcctgcattttccttaatatgtctgaacccctcactgtaacttaaaaagcacacaaatagacaatttataaattactcgttaagcggttagaagatagaaaatgggtagatttatggattatctgtggattcctccattaatcctcagataaatccataatttgtcagggatacccacactacccctagttattacattaatttatacctaatttaacagtgaacattgttttaactcattaggtgtgtcatctgctccctccccatgtcaatacaacttaacttaaaatgcttgatttgaaacagctctctgattgtttgatttgaagtgtaacttgtctctttaaaagattatagaatatgaagtctgt

SEQ ID NO: 80473 - DNA, 954 bp, Homo Sapiens
ctcatttatgcattcaaattcaacaggtgagcttctggaggcttctttcagttttgtcatgggggtctgaaatgttccaatgagatcatgtgacccatcattgtcataatcataacactccaccttaatggttttgtccatatctccgtaacacagggagttaagagagatcttgaaaggcctccaaacaggattcaagttgtttttaacaacctctgtccgatgaaccattagccagtttccatcagatgtctgcttgtggaattccaggtatgggtctgactttccaaatagatccttattatccagttttctggcttccatttcaaacaagaccactctattatcttttatttcttcagctgaaatcgtaatgctcccttttcctgcaggtctgccagttttcatcaccagtggtcgagttagcttcttgctggaaacaatttgtccaagggtacattcacattcccctaagaagtcatcatcactcagctcaatagttttgttgtcgatgtcataaaccccaaatttcaatttctgaaccacttcaaagtagtaatcaataataaatgtcttggaaaattggggattcaagcaattcttaatcctttctgtgcgctcaacctcataccactgttgaccacttgtattcaaaaacaacacacataaagggtctgactttgaccctatatctttatccaaaagattggcacaggaaacattcagcgccacctttgtgacacactgggcagccatgtcttgagttcagttgtgtaatttgatgaattattcaacctgagtttcgtgggagtcttagaggtggaagtcgagcgacggtggagaacaggttggcagcgtccggagcgacgctgggaccgcagggattcaggagaacctagggctccccggccgtaatggccgaattcccgggcatatgtccggtaccgtcgactg

SEQ ID NO: 80474 - DNA, 689 bp, Homo Sapiens
  misc_feature (12)..(12): n is a, c, g, or t
  misc_feature (39)..(39): n is a, c, g, or t
gaatggtggagngaggcagtggggagaaaggtctcaccnggacaggttgggagaatgaggtcagcggtgctggggaacagatggagggggcagtggggacagggcttgggcagacaccagcaggaataatttgaaatgtgtgaggtgactccccggagggccttgggcttgggcatttgggaaaagaatgatgtctggaagggcttaagggacacagtggacgaggggagagtcctcatctgctggcattttgtggggtgttagtgccaaacttgaataggggctggggtgctgtcttccactgacacccaaatccagaatccctggtcttgagtccccagaactttgcctcttgactgtcccttctcttcctacctccatccatggaaaattagttattttctgatcctttcccctgcctggtctagctcctctccaaacagccatgccctccaaatgctagagacctgggccctgaaccctgtagacagatgccctcagaattggggcatgggaggggggctgggggaccccatgattcagccacggactccaatgcccagctcctctccccaaaacaatcccgacaatcccttatccctaccccaaccctttgcggctctgtacacatttttaaacctggcaaaagatgaagagaatattgtaaatataaaagtttaactgttaaa

SEQ ID NO: 80475 - DNA, 259 bp, Homo Sapiens
atgtagtaaaacaagacacatttatttaaacggttttttacacccccaaaatcatcacaattaattcccaaataaatgcaaacaagaagctaaaggaaataaagacagatatgtggggacaaaaaatagcagcaaatttaaagtcaggagacccaggttcaaaatgtctgataataaggaaatgatcatgtaaacaaaggcgcatccagcccaagaactgcatatgcacccatttaaaataaataaaaagcctacagcc

SEQ ID NO: 80476 - DNA, 800 bp, Homo Sapiens
  misc_feature (70)..(70): n is a, c, g, or t
attaatattataaaacaggtacactccaaagtcagggagctagctgcttagactcagagcctgtttcccntggaaccacagaaacggtgatcctcagaatgagtggtaaaagtctgaactgtggaccctcaaaacaaggagtcaggagaatgacagaaaaacaggatgaaaagaagaatcacctcccttttctaaggcaaagcattagatgtttctgcatggacattaattgtttttagcaccctgccttcattcagtgtctctccttcattctattttatgcttttctttgaggcattagagccaggctgtctgtgacccaagtaaatggtacaaacttcaacatcacctttcctccttaaaataaaaacttctactcttagtgcaagtgataccagttagttgttaggagaaaagcaatctgactgaagggtttcaagtggtataaaaaactgaaaatccataaacctatctggaagtatttatattttttcaaagacagttcctaggaaattaaggtagatttgttaactggctataactgcatgttattattttttaaaagaaaaaaggatgtgaacaaattcagatgatgtaggaaaatgttttttatgcttccgtgcatgtgttaagtgtgtatagtcacgctctatttctctatggctcaggacagtagtgctggagaatctgccccagtctttgtcaagggcaggtatttttgtctgttactcttcactgatgtaataccaagaatgaatccaggaatacagtaggtattcaataaatatgtgttgaatgag

SEQ ID NO: 80477 - DNA, 1059 bp, Homo Sapiens
  misc_feature (354)..(362): n is a, c, g, or t
gtgaggcactttaacaaatctactttaattctaaaagaaattaatctagaactgtcagtaatacacaacatacttttatgtttcttttataggtatctatctaataaaagtttatttgtgtatgtgcaatgcataactctatcttagatatgaatcctaacaggatgaaaatactttcttgcaactactttatgcttatgaaaggtgtgaacttgcaatgtcctcctgtcttaaacccaagttgacagtgccctctcaaaacttttcataaataatgacctaatttcatttaaaaaatggtttcagcaaatatgaaaatagaaagtccgttatttgtccatttgtaatatgagnnnnnnnnngatgatacattcctctacagaaaaagtgggtttagagaacagttctggtagtatttcacatggtaaagtatcaaaagatctaatgagcagcccccttgctcagggaaagacagtgatttcaatgtgtttctcttccgaattgcttagtaactccaagtgattttcaaattggggggcagattactggcactgagttcatcaaatttagatctatcttgaatagggacattatagaaatcaagaacatctctaaccctgcacatctggtggagtctggagttagggactacatgacccaagtcatcagctaaatgagccagaagattgaactttagacgactatcttccagggagatgtcttgccaattactaggaagagatgaaccaaaaacttctttaacgtaagattccaaacgactctggagatcttcaggtggtgtgtatgctcggcttcgtaaaggtggacacactaggataggttcctttttctcttctactgtctcaacaaccactggctctttctcttttctgaatcgagaccaaaattctctacatggtgtccctgagactgtccacatgaagactcttctggtaatgcccgacacagatcgcgccgccatcttcgatcccatccacgggcctgagcccccggccgtaatggccgaattcccgggcatatgtccggtaccgtcgactg

SEQ ID NO: 80478 - DNA, 1077 bp, Homo Sapiens
gcactcaagatttccaatttatttaacatcctccaacacattctaaagaaactaagtagctgcaggagggtccctacttgttatctcatgcagcagaagattcttcactcctgatttataaggcctctgatggaaaagttactaggacagcatacaattgtataaaacacattgcggccttcctggtgtaccttccagtctctcagttccctgagtcccattagatcccagcctgttattaccatatcatatccatcatggaagaataccttgtacttttccaccgaaatcactggataccacaacacaacaaaagattggtggaacgagaatgcctacacgcagccacaggaatccagtttccatggaaaccaaaagcagttgcttgcctgctcagcaagttgaaactgaaggagtggctccacataaaagaaaaataacttgaggactgtaccatggaaaactaaatttaaaaaaacagttataacagtgtttaatttagataagtttgagggaaaataatcagtaggcaagaggaacatttttcctgtagtagctagagtgccttgaaaaaatgtgttggctatgtgaaggaatatttcaactaaaatggaatggtatgcttttcacccttaaagtttgaggaggatcttgatatgttttaacattatcatggcagggaaatatataaagaagaaaaatatttttacattaaaccttttctaaaaattgtaaatagaaaaataatttggttttttatcaagaacaacacttatcgttatgtattgtgttagttatattgccagtctgttgcgactgactcaaaaagttaaatgttgccactgctgaagatgattatgagcatcgcaaactttgtttctgacccattttgacagtttttatatactcctttaaaatgatgaatgttacaggttaataaagttaatacctttaaaaacttggtgaaattccattacagaagccaaaaataaaaactccctgcctctgaaaagtcagattactgacttcttgtttggcaaccatcagtttgtttaataaaagaaaaaatttggtggt

SEQ ID NO: 80479 - DNA, 1007 bp, Homo Sapiens
  misc_feature (760)..(902): n is a, c, g, or t
gagaagacgacagaaggggagcaaaataatgtttcagaggctgctcaagcagtggttagaggaaaactgagacgtgcacccccatgggatggagacccgaagggactcagacggagccgccgtgttggcagcgcctgggtgtgggcccattttggggaccaaacagcaagctgtggtcggatgagtgccaggacctgtgtaccgggacacgtgggagtcctcccagcatgatgcttgactgacccgaggaaggtcctcatgtttcgtgcctgtcattctcggatggctgtgaggcattccttggcaagggacgctgcgtaccagcggtcctcaccgcatctcacatggctcctgtgatgcatgttgtcgctttcccacccgggatctccatctctcttcccttcctgctgtcagtaagagatcacatgtctgtgtagtgtgaatgccttgtcgctgtcctgtgcttttgcaccattgagttgactgcctctgagaagcagcactaggcctgttgaaatgcaatgtgctgccctgagatccagtttcaagaatgggcaggtaaacgcagtgtgggaaaggaatgtggaatgagaacttggtggttcaccgctgtactatttgtgtaaatgtttacgtatgtgataagctacatgtatgtaaatgttgcaatacccctaacagtcgagtagtagtctcccttacaggaatttttgacggggttcctcatcatcaataccaaataaatatatgtaggaatggnnnnnnnnnnnnnnnnnnnnnnnnnnnnnnnnnnnnnnnnnnnnnnnnnnnnnnnnnnnnnnnnnnnnnnnnnnnnnnnnnnnnnnnnnnnnnnnnnnnnnnnnnnnnnnnnnnnnnnnnnnnnnnnnnnnnnnnnnnnnnnngcgacaacgcccgcacggcaccccgacgagccacgcacgaccagcgggcgacgacagcaccacggcgagtcgaaaccagaagaggcgccaagcacgaggccaacc

SEQ ID NO: 80480 - DNA, 678 bp, Homo Sapiens
  misc_feature (55)..(73): n is a, c, g, or t
gacattttgtttcattggtgtgctgtatattttccatgccctcactcctttaagnnnnnnnnnnnnnnnnnnngcaacacaatcctgtccttgctgttgtgattatagtcttggtttacctgtggtgacaaccgggtgttggggacacatgtcaaatgcccctctgagatgggccctaaattccagtaactggggaaagaaccagctgctgtgtcctgagagcctggccctgtgctgtggtctctgctgcaagcccagatttctgggagtaactagtgttaggtctgctgacctttacctaagcagcccctgcctggtaagaaggtgcccattgttcagaggcaaagagaagcctgcggttggcatgaggatgcctgacaacaaaggctggagaagggccctgagttccagcctctccccaagggtccccgccccagtggctgcctctgtcttgacctgtgtaatgaattagtgtgctgtgtcactgtggcttgaagtcactgtggatcgagctcacagggggcacccatcctgtagtcaacagagtctgaagcagtcagggtgttggattcctctgttgttgtcatcaattcctgctgaggggtttctggggttttgtttttaataaatgactcctttgtagcctttgtcacataatcttcactttggttgttggta

SEQ ID NO: 80481 - DNA, 458 bp, Homo Sapiens
  misc_feature (1)..(1): n is a, c, g, or t
  misc_feature (14)..(14): n is a, c, g, or t
ngcacacaattgtnggggcacctcctcaattctgggcctgcacaagataaaagggaagggatctctgtcccaaaggcaggcccaagggtgtgcgccccagtggacacaacagtcagtgctgaatgaatgtcatttcagtgagggggtgttgtggagctggtggagccctgaggcagtctccatcgctgtggaccagtaaggaacctcatccctctacccagcctgtgaggtcatcctccttcctcagcccacctccctcaggagacactcaggcttggcttcatgcacgtgtggctgcgcactcacctggatgccaggaaaatgctcctgggccagtggctaccagcaccaaagcagggctggaaacgtgtgcacctaccccacgacctcatagctttgccgcctcatcccacatcaagtggagtgggagggggcactcagacccaccaaccaagctc

SEQ ID NO: 80482 - DNA, 985 bp, Homo Sapiens
  misc_feature (162)..(162): n is a, c, g, or t
  misc_feature (184)..(184): n is a, c, g, or t
  misc_feature (260)..(260): n is a, c, g, or t
  misc_feature (280)..(280): n is a, c, g, or t
  misc_feature (294)..(294): n is a, c, g, or t
ccacgttcgatgaggcgtacgaccatagtatctctctgcccccgttaatttgtcggtgtttgttgattgcgaaacatcacacagaaagtagatgtacgattatcgctccttaggattgcctgagcaagatcgcacgagtaccagcccagtaccgagagtgcntgtgtgaggtttctctgggctnaggggcagaagtggacgatgagatgccatcattctgaagcatagacactctgcaggccagctggaagaccgccttntcttgttgagtcaaaacctnagcacagtggcaanaaatgggacagaatgatgaccagcacctcagaaacttccagagggaggagaggatttgatggctaccaaaattgtatctgttgccttttttctgactttttcacctgaccaggctggggtttggagtggctgtggggagacccgtcctggctggctggctggctcccttgctcccttgctgcagctgggaaaggggttctgggtgtaaagaggtgtgcgtcttgtgggccaaagggaaaaacaggcaggggtcagagccagcctgccagaggcaaatgcaaaagaggtccccagaacacagccagctgggcagccccttaaagccaaaccccacctgaagcagaaccactttggcctcccctgcccaaaatgggtagtgtctacacgtccccgggctcaggctcaggcccagccctgggctgacctgagaggaaggctccttcctggactgccctctgaaatgtgtatagattgattctaaaatctcttgtttcacttgactttagagtgtctgggacgctgctgtattctgaaagtcacatagcacacagtaatgttatctggaagctctgtttttgtttacatttctgtatccctgggttgactgccaatccgaggccgtcatgaagctctgtgttgtctgttttattttataaccttcctctcaactattaaaattagagatctaaaa

SEQ ID NO: 80483 - DNA, 1059 bp, Homo Sapiens
gaagttgaaagattctggggatgtttcaaatgtaatcgagaaagttaaatgcattttaaaaacaccaggaaagattaattgcctaaggaattgcaaaacctatcaagccagaaaacctttgtggttttataacacttccctcaagtttttccttaataagccgatgcttgccgatgttgtcttcgaaattcaaggtacgacagtgccagcccacagggccatcctggtggcccgttgtgaagtgatggcagccatgtttaatggtaattacatggaagcaaaagagtgtcctgattcccgtttatggtgtttccaaagagactttcttgtcatttttagaatacctgtacacagactcctgctgcccagctggcatattccaggccatgtgtctcctgatctgtgccgagatgtaccaagtgtccagactgcagcacatctgtgagctgttcatcattacccagctgcagagcatgccaagcagggaactggcatccatgaaccttgatatagttgacctgcttaaaaaggccaagtttcaccactctgattgcctttcaacctggctacttcatttcattgctactaactacctcatcttcagtcaaaagcctgaatttcaggatctttcagtggaagaacgcagttttgttgaaaagcacagatggccgtcgaatatgtacttgaagcagcttgcggaatacaggaagtatattcactcccggaaatgtcgttgcttagtaatgtaacctggagcttttatacactacatttcttttttattattatgaagaatgggatacctccaggttccagtaaaattcttctgaccgaaaccaatgtgggtgttagaaaaattaccatatagcttaatatgtttattagttctctttggaaaaaaactaccactgtggtcttaaaagggaacaaaatataccataggctaaaactaaggctttcactctagaatgcaaagctgttttgcagctgttttcccttaaagatgtcctgttgctttagtgatatttagacccctctcagttaagaaatgcttagatt

SEQ ID NO: 80484 - DNA, 490 bp, Homo Sapiens
ggcacgagggtcacttaaggatggagatatgttctgagaaatgtgtcattaggcgattttgtcattaaacatcatagcatgtacttccacaaacctagatggtatagcctactacacacctaggctatttggtatagcctgttggtcctggggtacaaatctgtacaacatgttactgtattgaatacagtaggcaattgtaacacaatggtaagtatctaaacatagaaaagggacagtaaaaatatggttttataatcttctgggaccaccattgtatatgcggtacatcattgaccaaaacatcgttatccagcatatgactgtatttggttatgaaagccaactgttacttgattctgcttttagttcttaagaggatcaggcttttaaatactcatttacaagttttctatcctccttcagtgttaaagtagaaagtaaaaagagtatcttatacatgcatgaaattaaagcatataccaaatgc

SEQ ID NO: 80485 - DNA, 1069 bp, Homo Sapiens
  misc_feature (61)..(61): n is a, c, g, or t
  misc_feature (66)..(440): n is a, c, g, or t
tgaaaacgcagcacgcgccttttacgtctgcccctttgtgccctttgctcacatgtcttcntgcgnnnnnnnnnnnnnnnnnnnnnnnnnnnnnnnnnnnnnnnnnnnnnnnnnnnnnnnnnnnnnnnnnnnnnnnnnnnnnnnnnnnnnnnnnnnnnnnnnnnnnnnnnnnnnnnnnnnnnnnnnnnnnnnnnnnnnnnnnnnnnnnnnnnnnnnnnnnnnnnnnnnnnnnnnnnnnnnnnnnnnnnnnnnnnnnnnnnnnnnnnnnnnnnnnnnnnnnnnnnnnnnnnnnnnnnnnnnnnnnnnnnnnnnnnnnnnnnnnnnnnnnnnnnnnnnnnnnnnnnnnnnnnnnnnnnnnnnnnnnnnnnnnnnnnnnnnnnnnnnnnnnnnnnnnnnnnnnnnnnnnnnnnnnnnnnnnnnnnnnnnnnnnnnnnnnnnnnaagaattcggcacgagggctctggccctgccctgtattcctcttccccttggtagcagttccctgaccaagggcaaggtgtgtctcaggaaggtggttctgtgcatgcctgggtgtggttaaggcgtggcccagaaggcttccctggtgctctcagtccaggcaaagcccagagcatctgagcacgtctctgacttccagtggcaacacagtttgaacgtggtgaaacagggtgtagttcttttccacattctgtgtcatctagtcgtgcaggtagggaaaaagttggtctaattgaagattgtgcatttcctagtgacaggtgccaagaggttatgatacgggtttcttgggtctgatgtacagtgtgaataaatgcttgcagctcttagctcttttttgatcgatgaagcacttttttattaatattttcctttgttaaaggaggaaccgtaactctccatagctgtacatataacccttttctcctaaagaggagtcagtcagtgctcctatatttttcattttttgtcaaagcaagaagtaaatactttagaattgttaaatatataaataaagcaaataaagttgagtgttccacatggtagcatttgctaacacaacctaaaa

SEQ ID NO: 80486 - DNA, 1055 bp, Homo Sapiens
  misc_feature (544)..(594): n is a, c, g, or t
  misc_feature (631)..(634): n is a, c, g, or t
  misc_feature (636)..(640): n is a, c, g, or t
  misc_feature (645)..(647): n is a, c, g, or t
  misc_feature (649)..(660): n is a, c, g, or t
  misc_feature (662)..(666): n is a, c, g, or t
  misc_feature (668)..(669): n is a, c, g, or t
ggcgcacacacatgggcacaacacgacatcccacgatggctcgacaacaacacaagcaacaacacaccacaccgcgagtctacaacccatcatcaaggaggcacaaatcaacaacacaccaaaacgtacagagggtttagagcacgtcatcagacaagtgtccaaagtctcaggggcaaaggccggaacaagccagcaatgagctcagtttctagacaaggtgaaaagctgcacaaggaacaaaaggggtgggaaaaggagtgtacaaaaggacaacaggtgcaaaaaaaacacaaacacacgagtcaaagggaccaccagggcaagggtgccacaaggcaaaaacgaaaaacacacaaaggcaagacaacaccggccacaccacgccgcgccccgacaagccaagcacccgcaaccaacgccccacaaaccgccggcccggacaccgggaggggacaacaccggggagagcgacgcaccccgcgcgcaacaaacaaaaacaaacgaaacacgagccaggacagaaaaacagacgcccgcggcnnnnnnnnnnnnnnnnnnnnnnnnnnnnnnnnnnnnnnnnnnnnnnnnnnnacagggaagaggggacgcaacaacaaaagaggaggcnnnngnnnnncgacnnnannnnnnnnnnnngnnnnngnncagtgacactttccaaaaatgacaagaaaggaaaggccaacaccgccaaagcaaatgtgacccctcagagtagctctgagctcagaccaaccaccacggctgccctggcctctggtgtggaagccaagaaaggtattgaacttatccctcaagtaaggatagaagacttaaagcagatgaaggcttacttgaagcatttaaagaaacagcagaaggagctaaattctttaaagaagaaacatgcaaaggaacacagtaccatgcagaagttacactgcacgcaagttgacaaaattgtggcacagtatgacaaagagaagtcgactcatgagaaaatcctagagaaggcaatgaagaagaaggggggaagtaattgtctcgaaatg

SEQ ID NO: 80487 - DNA, 467 bp, Homo Sapiens
tttgaacaaatttaaagatgtaaatggcttttattagcaatttatgaatctggcagcatctcaactaaaaatttagaaacggtgttctgattagctgagcagaggtgggctgaaaacggttgaagaagcaaaaagagaataaaagacagattggtcatttcaaagttaaactttcctcacagagaccaaatggaggagagacttctttatcatgctggctcaggtaaatcaggcctccttgactccttgctgtgtatcttctggattttttgacaactggcccatttctaagttgtttgattatgtgacacctagcaccagcaactccattctgatttggcctggtctgttgggcctagtgcaggggtttaatctaaaacaatagcttcctatacatttcatttaacaatactaataaaataccgcttttattttatttgtttacattggagtcctgctgttaagca

SEQ ID NO: 80488 - DNA, 867 bp, Homo Sapiens
ttttaaaaaactgattcagagcttgcagtggctgcttacttactctggctatctttcagaaatttagctgccttatctatagctcatttaactaacagtgaattaggtactagtttataggtataaagaaatagttacttagttgagaattcaatatatgagaacatactagagtaagtttcctgaggtaaaagtatgccttaaagaatgatgtgcaatctataaaactgtagcattttctcttgggtagcaacacaatgacccccaagtctggatttttaaattaacaggctaagaaaactaaggacacattgatatagagaaataaaataacaatgctgaagtcaaagaaatattgacagctgagatatcaattcaaaaggaggcatgaaggggaacagaggaacagaaggaggctgtattttaaagtgcttaggtaggttagaagatgaatttgaaatgcctccagggatttctaacaagtttaaaaagtgttacttcttggtgactcagatgttgaagacatggcttttctttaataatagctattcaaactttttattcttttttgaaaaacaagattctctataaaaacgttttagccattgtaattattctgctagctgttactctcactaatgtattttgaaatcctaactggctgaagaatttttaataaggttgaactacaaagcacacatttgcaccaagaatttaaattaatgcatagatgtctgtgaaattctgcatgaagttagtgccaaaaaaacctttccattgcagatcatgctttatttcttaatattctgctgaaggattatagaaatcagaaaaattctaggaccctgaagcttaacttgcttattt

SEQ ID NO: 80489 - DNA, 1499 bp, Homo Sapiens
  misc_feature (16)..(16): n is a, c, g, or t
ctaggagcgagcctgngtggcgactcgagacgaggcgtgcctagacagatccccacatcgagtggtcggcagactcgctcttcatcctgtgcgccatgtacaagcgagggctggtgcaggtctggtctttagagcagcccgaatggcactgcaaaatagacgagggctcagccgggctggtggcctcgtgctggagcccggacgggcgccacattctcaacaccacggaattccatctgcggataaccgtctggtccttgtgcacaaaatccgtgtcttacatcaaatacccgaaagcttgtctgcagggaatcaccttcaccagggacggccgctacatggcgctggcagaacggcgcgactgcaaagattacgtgagcatcttcgtctgcagtgattggcagctcctgcggcattttgatacgggacacccaggatctcacagggattgagtgggccccaaacggctgtgtgctggcagtgtgggacacctgcttggagtacaagattctgctgtacctcattggatggccggtttgttgtccacgtacagcgcttacgagtggtcccttgggcatcaagtctgtggcctggagccccagccagtcagttcctggcaattgggagcctatgatggaaaggtgcgcatccttaatccacgtgacttggaaaaatgatcaccggagttttgggcatccctgcagccatttaatgatcccaaaatagtggtgtataaggaggccgagaagagcccacagctgggactgggctgcctctccttcccgccgccccgggccggggccggccctctcccgagctcagagagtaaatatgagatcgcctctgtcccagtctccttacagacactgaaacctgttaccgacagagcaaacccgaaaatcggcataggaatgctggcatttagtcctgacagctacttcctggcgacaaggaacgacaacattcccaatgccgtctgggtctgggacattcagaagctgaggctgttcgcggtgctcgagcagctgtccccagtgcgcgcgtttcagtgggacccgcagcagccgcggctggccatctgcacgggaggcagcaggctctacctgtggtccccagcgggctgcatgtcggtgcaggtgcctggggaaggcgactttgcagtgctctctctgtgctggcatttaagcggagactcgatggccctcctcagcaaggatcacttctgcctctgcttcctggagacagaggcagtggtcggcacagcctgcagacagctgggcggccacacgtagcagcggtgcactaacgtgtgcagaaacagggctactctgtgtttccagtgtgggaaaaaacacagcttcaccaggaggttctccactgtggtggtctggattcagtgattgattctatttttctatagcaaagcatttttgtaaatatgtatggtataaaactgtagttttattatttaaaataaatacttgctgatttatacaact

SEQ ID NO: 80490 - DNA, 476 bp, Homo Sapiens
  misc_feature (23)..(23): n is a, c, g, or t
gggtgacaatggcgtgttcttcntgttggtgttctagatgagatcgcctctgtcccagtctccttacagacactgaaacctgttaccgacagagcaaacccgaaaatcggcataggaatgctggcatttagtcctgacagctacttcctggcgacaaggaacggtcagttgtgctgacgcaggtgctgtctcaccctttactgtgtcctgtggccccaggtgtagaagcgactggaaaagaaaatgaagttgggggtttccgacacgtcacctcctttcacgtttctgcagtagccgaggtgctcacagaagctccttggaggcgctgggcctttgtcctgcagcagccgcaggtccgcgcatgagtcaggaggcctccaccctgctcacttgctccactctgctgagtagaaagcagggctgggcacactgcagcccgccttttgttaagggtttctccatttgtaaagggctaa

SEQ ID NO: 80491 - DNA, 867 bp, Homo Sapiens
gggggacattcagaagctgaggctgttcgcggtgctcgagcagctgtccccagtgcgcgcgtttcagtgggacccgcagcagccgcggctggccatctgcacgggaggcagcaggctctacctgtggtccccagcgggctgcatgtcggtgcaggtgcctggggaaggtaagcacatccccgaggccacggacgtggcagccttgctgtgtgcagtctggcatcacacgggctgaactgttgaagcccagctgctgtctccggcagcactccagggaaactgccctcagagtctttgcgtaaacctcaagacggacacacaggggacccgctgccctcagctttatgggctagaagcagcctctccctgacttgaggcagctctggggctccaccctggctctgcctatgtgggtcactccaggcactgtgctggcctgcaggacaagggggtgcccatccccccagaatctgggcctcccctgctgcaatcctctggccaccctgtctctctctaggcgactttgccagtgctctctctgtgctggcatttaagcggagactccgatggccctcctcagcaaaggatcacttctgcctctgcttccctggagaaagaagcagtggtcggcacagcctgcagacagctgggcggccacacgtagcagcggtgcactaacgtgtgcagaaacagggctactctgtgtttccagtgtgggaaaaaacacagcttcaccaggaggttctccactgtggtggtctggattcagtgattgattctatttttctatagcaaagcatttttgtaaatatgtatggtataaaactgtagttttattatttaaaataaatacttgctgatttatac

SEQ ID NO: 80492 - DNA, 556 bp, Homo Sapiens
aaacataaggaacatccgaagtttatctggacaacgaggaatcttgcattaaaaaaggaaaacaaatgacatcacatgtgctacttacatttactctctgagctcgggagagggccggccccgacgcggggcgatggaaaggagaggcagcccagtcccagctgtgggctcttctcggcctccttatacaccactatcttgggatcattaatggctgcaggatgcccaaactccgtgatcattttccaagtcacgtgattaaggatgcgcacctttccatcatagctcccaactgccaggaactgactgctggggctccaggccacagacttgatgcccagggaccactcgtaagcgctgtacgtggacaacaaccggccatccaatgagtacagcagaatcttgtactgcagatgagacatttcagttaataatgaatacacccccgtcgccaggaacacaccacagacgcgggtgctgcagagtgacattggtgcagatagcaaaagctggcatgactgtccgcgtggcgtgtaaagctggactgcagctagta

SEQ ID NO: 80493 - DNA, 1050 bp, Homo Sapiens
cggtcctaggtagcgaggcctgggtggcgaattccgcacgagggtcggctgttgcagcctgctgcgcgcccaggggtcccgcgggttttcgggcgcagggtggcgcccgcggcaggcggcggccatgaacttctccgaggtattcaagctctccagcttactctgcaagttctccccggacggcaagtacctggcttcctgtgtccagtaccggttagtggtccgggatgtgaacacccttcagatccttcagctgtacacgtgcctagaccagatccagcacatcgagtggtcggcagactcgctcttcatcctgtgcgccatgtacaagcgagggctggtgcaggtctggtctttagagcagcccgaatggcactgcaaaatagacgagggctcagccgggctggtggcctcgtgctggagcccggacgggcgccacattctcaacaccacggaattccatctgcggataaccgtctggtccttgtgcacaaaatccgtgtcttacatcaaatacccgaaagcttgtctgcagggaatcaccttcaccagggacggccgctacatggcgctggcagaacggcgcgactgcaaagattacgtgagcatcttcgtctgcagtgattggcagctcctgcggcattttgatacggacacccaggatctcacagggattgagtgggccccaaacggctgtgtgctggcagtgtgggacacctgcttggagtacaagattctgctgtactcattggatggccggttgttgtccacgtacagcgctttacgagtggtccctggggcatcaagtctgtgggcctggaagcccccagcagtcagtttcctgggcagttgggaagcttatgaatgcgaaaggtgcggcattcctttaaatcacgttgacttgtgaaaatggatccagggagttctgggcatacaggcagcccatttaatgatccccagataggggtgtatacaggggcccaaaagaacccacattggaactggttgcctatacttccgacagcccgggacgggccgggcctatacaga

SEQ ID NO: 80494 - DNA, 1100 bp, Homo Sapiens
  misc_feature (512)..(512): n is a, c, g, or t
  misc_feature (734)..(774): n is a, c, g, or t
  misc_feature (781)..(832): n is a, c, g, or t
cctcttggcccccttgggcagtgatgttgagggacaagaggggtggatcttagtgtgtgctggtctgcatagaggccaagatagaggcctggatgagacagctccttaaggaggattctcggttcttttgcctcccccaagaggggagtcctctcctgactcactggcacaattagtcttgagaattcaaatacaaggcaagcctgaccttgcgggtaaaaagatgacaccactgacccagtatctgccagccacctgcttgcactgttctctgtcgagcagcgctgggtttgtctcaatgccctcggacccttagctggccctgctctgcgaggcagctggcatgcttgggcagcagcctctgcccatggaacacacggtaaaccaataccctcccgagtgaatgtgcctttggtgctctgtaatctctgccatcgggtgcaggctggaaggccggagccacgctcagagccagccggagctctgggcacagtctgctctcttgtgctcanatatccaaatcgaggcagggggtcaggggagtgtgtactctttccccctcagcctccctccctgtttcctctcctgccagacctgtagacaagtgcaagctatccggacccatcaagaccccaagataccgactctaattatatccaataaaaggaatttaagcttctatcaatcaaatactttttcttactcacctaaagctgctttgcacccatcattannnnnnnnnnnnnnnnnnnnnnnnnnnnnnnnnnnnnnnnnagttacnnnnnnnnnnnnnnnnnnnnnnnnnnnnnnnnnnnnnnnnnnnnnnnnnnnnaaagctgtgccctggggttgtctggagacggggtaggggtgtcagcccagtgctgtatccactctgccctgcagcccgtgggtaaggggctcgggcaagtgccctgtcttctggggatgattatgatcagaggggctggctttgcagagggtctgcatttgaagggcccctgggaggataaatggcattgaaggcagaattgtttttcagattaaaaagtggcataacaacgttgttcaaagtctggaaagtaaaaggaacgagaaac

SEQ ID NO: 80495 - DNA, 801 bp, Homo Sapiens
ctagctcatatttctccttcaagagtcagactaatctgccaagttactggaaagttctgcctgggtgaaccagcagcacctcaaaaatagcatttccaaaactgaacccagcattatttccgccagtgtggttcttcttctttttcgtatatgttggtgatgagaccagtgcccccattttcaagccattttgggcattagggtaacttgaatggaggcaaaaactatctaatagaattgggagattttctttatgtcataatgtcagactgggtgtcctgaaaacaaagataaatgtcttcttagctccaaaagtttcccaagctgaacaaaaccaaggaaaggccttgtcctagaagtctcctttgatattcacttggactctcagcatcttgtaacttccgctcagcatcttcaagcttggctgtctcctccttgtctagacacaaatggtcaggtcagtagcagccaatgagagaaagaagtccatatccttattcacagggatccataactcaccccaagcaaagataccttcagctaagaaacaggggaaaaaaggatatgtagctaggattttaataaatgaagattacataagaagatctgagaagcaaaacacttaaaagtctgatcaggacataataggctttcaaagaacagattaactgcttcaaaatatgtaacctagaaagcagaagtttcccccacatctcacccttcccccaggttaatcactgctgactgtgccgtgtgtatttcagcaatttttataaaaacaaattaggggctggacatgat

SEQ ID NO: 80496 - DNA, 1176 bp, Homo Sapiens
gcggccgcccagacatggcggacggcagcggctggcagccgccgcgcccctgcgaggcctaccgcgccgagtggaagctctgccgcagcgccaggcacttcctacaccactactacgtccacggcgagcggccggcctgcgaacagtggcagcgcgacctggccagctgccgcgactgggaggagcgccggaacgccgaggcccagcaatccctctgtgagagcgagcgggcacgagtccgggctgcacggaagcacatcctggtgtgggccccgaggcagagcccccctccagactggcatctccctctgccacaggagaaggacgagtgacaagcatccctgccattggcctgtgcagcttcctcagtctgtttcaagttgctgttgcacagccctggggactgtgaccagcctacacagtctggtgggtccctgtgagctcttgctcacaggaacatggagcaggacattgctagccctacttgcccacccctcacctgcatgcaggataccctgacactgcgatgttctgcaggacaattgcaccgctttagagcttccaggaggccaagcattatggcaggtacttgtgagcagccaggtcaggctgggcatggtagcataggagatggccggtcctgaggtctaggccttctcaagtaaactgaaaggtagccctgaccctgtgtggacacacaggtggggtcataatggaggtagctaaacggttgtgccactgggaatgtctttcctagtccctgggaaaatggcctgccacgttcccaggtttggtgagcattgtgagtgctcacactctgctccactcgctcagttccactgcacatgcaggcaggtgtgccgagcaggtagggcttgctggcccctctgcaccagcaggcttcacttcttaggctcccaggtcggcccctggagactctggtttttaagaaatgcacacagctacagaacacacaaccttgcataaagagggtttgtggactcagctgaagaaatccaagtccaagacatatggaattaagcactccttccctcaaaatttcccctggtggttaatgtatcaaaagccatttcatctgatttcaaatagaagctgaaaattaagttcacacttgttagattttgtgtgtaacagtgttgtacctggacagtatta

SEQ ID NO: 80497 - DNA, 579 bp, Homo Sapiens
gtagtagaaaaagaatttaatagacacgaggccggccacgccacatgggcgatgaagttcgtactcatcttattcaaagctcataggttagggatttttcaaaggcagtttgggggaaggggtgggggtggacaggtaacaggtgcttgctgctgagtggttggggcagagatgaaatcgtaatgggttgaagctgtcctcctgttgggctgaattgcttctgggtggagccataaggtccaggtggagtcatgggtgtcagacatgcaaaaaacctggaaagatatttcaaaaggccaatctgtaatagtagtgttattcacaggagcaattgggaaagttgcatatattataaccttcggaataatgtctgcagcttagtaggattcaggctcttctcctccccgcaccctcatgggcccctaacagctttacaaaagtggctgagttttgggcaaggcctattatcatttaaactgtagcctaaatgtcttccaaagttagcttgacccaatagcccaggaataattaagagaaaagcaagatggaggttgggttggcttagcttaccctcgtgcc

SEQ ID NO: 80498 - DNA, 1089 bp, Homo Sapiens
  misc_feature (80)..(80): n is a, c, g, or t
  misc_feature (90)..(90): n is a, c, g, or t
  misc_feature (138)..(138): n is a, c, g, or t
  misc_feature (140)..(140): n is a, c, g, or t
  misc_feature (142)..(142): n is a, c, g, or t
  misc_feature (147)..(526): n is a, c, g, or t
gaagggagcccaggggacgtttgattaatgccgtcggttcccactttaattactcgattttggtctcgagggggccgacntttgaaaacncacaccgcgcctttacgttctgcctttgctgcctttgctcacatgtcntncntgcgnnnnnnnnnnnnnnnnnnnnnnnnnnnnnnnnnnnnnnnnnnnnnnnnnnnnnnnnnnnnnnnnnnnnnnnnnnnnnnnnnnnnnnnnnnnnnnnnnnnnnnnnnnnnnnnnnnnnnnnnnnnnnnnnnnnnnnnnnnnnnnnnnnnnnnnnnnnnnnnnnnnnnnnnnnnnnnnnnnnnnnnnnnnnnnnnnnnnnnnnnnnnnnnnnnnnnnnnnnnnnnnnnnnnnnnnnnnnnnnnnnnnnnnnnnnnnnnnnnnnnnnnnnnnnnnnnnnnnnnnnnnnnnnnnnnnnnnnnnnnnnnnnnnnnnnnnnnnnnnnnnnnnnnnnnnnnnnnnnnnnnnnnnnnnnnnnnnnnnnnnnnnnnnnnnnnnnnnnnnnaagaattcggcacgaggttcttgcttgaaagcgttgtgccctctgagtgtctggctgatcacatcagagaggtctgcgtggcagtttggggctgtcacgtgaccagtgacccacactctctgctgcccagtactgccaagtggggagggtcctgcctttttctctgccccaggtctgggacgcaggtgatgccagccaggcccaggagtgcccagcatcccccaactgatgacacagtagcactgattctgtcttttcctcagaatctggcctttttccatggcaatgaggtggggcccagcctcctctaaagtgactttgtttctgcacagttgtaactgctcttggggatgtcagtgaggctgggagcagggagccacgggatgctgagagaggaggcccgagaggacaccccaccctccagcgtggcctttgatccagacttagggacgaggctgtcactggtgggcaccctctgttcctgtttgtgtgtttgaatagtctgaaatgctgtgactttttttgtgtgaataaagatatgaaacttctgaatctcaaaaaaa

SEQ ID NO: 80499 - DNA, 813 bp, Homo Sapiens
gcatggactatgacagtggtcaaaaagcagctgtaccggtccggaatcccgggatatcgtcgaccacgcgtccgtttgtgtctcttggtttctaaccttggcggacctgctcccctctgtactgtccccagtggtatgtatgtatgtgctaggcagtctggggaccccctgtgtctctgaccacccccctgacccccgccattactttcttttctggagtgccatgctggcgaggatccggatgcggcagcaccctctttcgggctgcatccacagagtttgtgtccacactttctctccgagcatgtgggtctcgctgagcagtcatggaatgcggtagagccaggggaccctgtctgccccgaataactttcagtagtatggcagatggcacagagaaagggaaggggctctggggacttctccttctatgaaagcctcctcgagccaggtgctcctgggcaccttcagaagtgatgtcctgtgtgctccacagctcacctgcttgccaaggtacgtctgggtagtagtttctggaaatgactgcagactgtgccaaatgtcttttgagcttctgacctgaccatgcccagatggcataacttttccctaggaccctcagtctccttgtttctctgtatctgtagcatagcatagaacccggtatacaggggtttctgctgacacatcaacgtctacacacctatgcgccacattttacagctgtaaagtgttagatgaactgccgtcctcagtaaaagcagccaccccttcaagagtcacaggcatccatccagtcgtatctttcagaga

SEQ ID NO: 80500 - DNA, 1068 bp, Homo Sapiens
  misc_feature (1002)..(1002): n is a, c, g, or t
taagggcgagagagtatgaagtcgaggcgcgccgaattcggcacgagggctgatcctggccccctgtgaagaagtgttctggtcaaaactaaaggaactccctccccacctgcaggactccgaagacagtgcgacttctggctgcagaataccttttcagaaacctgctttcatttgcttagccagtattagaacagatctttacaacagcagctgggctgggttcccagtcggagcctttcggggatctgggggatgagggcggaaggcctagctccttggaaatggcctgtactttaaggacgctggagccaagaggattgttcccgtgccgtgccatggtttcaccctatgtgtgccacaatggacgttagcagctgcttcggaacaccgtccctcctatgcaccctccaagacctgcagcagatgcaaagggttctagctgcagtttgtcgaattgaggttataggtaaagcatagagttgccagagtaccccgcattcccatgaatagagcctccaaggaaagggaggatggggtgtcctttgttgtggttggaggttggtgatcattgctctggatttggggctcccggctgccaccacatgcagctttgcctcacctttctccagcagccgggaccctctggagagcttgttttccctccaagaagaggtttgagacaggcggcatcctgcactgagtcagacagacaagtgggagctgtaggaactgcacctgcagcctcttcttactccccattgaccctgtcttccttccctggctttttcaactggaccaaagatgaaggcacttatggaccctttgatggcttggagtggggaaggctgtttctttgaaagttgccacatgtgttacgttgtgtctcagagagagttatttctgtgactctcttagaaatgccttgactgaatgtgcaatatttgtgtctctttggtttcaaaccttgggggacctgctcccctctgtactgtccccagngggaaatgtatggtatggggctagggaagtcctggggaacccccctgtgttcttcggacccccccc

SEQ ID NO: 80501 - DNA, 1387 bp, Homo Sapiens
  misc_feature (88)..(96): n is a, c, g, or t
  misc_feature (1228)..(1228): n is a, c, g, or t
catgttccactttcattcattactgtacaatcatactaagaaatcattttattcaaatacagttgctgccaattattttgtaaagacnnnnnnnnngacagagacatcgacatcacatatgtattacctctgcacatttgtagccaatacaaagcaaacatcaaggaataataatctctttagacttaaccaattagattaagcttgacaaactcactaactggatctgtgcatatgtatgcaggcagtgattatatcatgagacttgtactaattggccaaaccttcaaattttatattcatactaataaaaacagtgaaagtttggaggattagtgtttattgtgtatgtttaaaatgtaagctaaagaaaaccttcacaaatggttaagtgtgttaaaaaggtgaatttgtcaaaaatttgtctgcatatatcagttgtttgcaaaaaaagatcctgtagggatttttcctcattgagttagtaactaagtaagaagtaatccagtctgaataagtgaaaataacaagagcatcaccatctacctaacagaacagacttaaaaattccattaagtgttcatttccagtgagtttgctaaacaaagatccagttggcaagtttttaggatctttagactgtctgatccacactcctgagcttcaggcacagaccccctcaaagcattgtagtgtttgcagcttcaaaaacctaacaaagttataaaggaaatcaaataacagaaaaagttatccctcctcttccagtggcattataaatagacaaaaggcacataaatatgggaaggtgcaagaaataggaacaaagctaaaggaagaggtttaggctttcattcctatcccacctaaggaactgggcttccaaattacttttgtcccagtaattaatcttgtgaaaaaacatctttataaaatgtctaccattgtccttataggaagtgatcagctttgtaaaactgtagctcattaaccaagattgacacaatcccatctactttttaaaaaggtagaaaccataatttctgaatgcctttcccattaatattttctccctcccccaaacccttcaaatactacagactgttcttcaaagaacaacaacaaaaaagtcttctgtatgaaaagttcaattaattttagatatgtcccgagactgctgtaacaccaaatgttcccacggtgatctctttgtttcctttgattatgncatgcaggctcggcaatgatcccgacttagtctgtattagagtttttatcaattttccttggtcttggactttagatcgtcttcgttttaaagccctcttctcagtttttgtcttttgagactgtccattgcacagacttgtgcaagctgaaatgccac

SEQ ID NO: 80502 - DNA, 1006 bp, Homo Sapiens
  misc_feature (504)..(512): n is a, c, g, or t
  misc_feature (683)..(911): n is a, c, g, or t
  misc_feature (940)..(940): n is a, c, g, or t
taataaattcaagtgttcagatttatttggaaattcacagtttctaatggcactacagctccgtagttacatattgaaaattctcttcccacaacacacagatcacataatttctcactgtatctctgctctcatctggacctcttttcaaggggcttctataaaatcaggccctcttgctctgaatagctaattgtgcagacaggaaagaaatttaaatcttctaaaacacgctgttaacctaaagcagcaacttaaacaaacaaaaaaggcgttaaataagtcacattacaaacaatacccaagaaaggtattaggcaagtttaaaaacagttatcactactaaaagtgctcaataagttataacttaaacatcacaacaataaatggtcaattctctccctttcaaaaagaaacatgttccactttcattcattactgtacaatcatactaagaaatcattttattcaaatacagttgctgccaattattttttaaagacnnnnnnnnngacagagacatcgacatcacatatgtattacctctgcacatttgtagccaatacaaagcaaacatcaaggaataataatctctttagacttaaccaattagattaagcttgacaaactcactaactggatctgtgcatatgtatgcaggcagtcctcgtgccgaattcttnnnnnnnnnnnnnnnnnnnnnnnnnnnnnnnnnnnnnnnnnnnnnnnnnnnnnnnnnnnnnnnnnnnnnnnnnnnnnnnnnnnnnnnnnnnnnnnnnnnnnnnnnnnnnnnnnnnnnnnnnnnnnnnnnnnnnnnnnnnnnnnnnnnnnnnnnnnnnnnnnnnnnnnnnnnnnnnnnnnnnnnnnnnnnnnnnnnnnnnnnnnnnnnnnnnnnnnnnnnnnnnnnnnnncacgcgcggggagaggggtttgcgtatgngcgctcttcgcttctcgctaatgactcctcgctcggtcgtcggctgcgggagcgtatcagtcatca

SEQ ID NO: 80503 - DNA, 759 bp, Homo Sapiens
  misc_feature (14)..(14): n is a, c, g, or t
  misc_feature (54)..(55): n is a, c, g, or t
gcaggctgtatgcntggtagaagtcatcgccattctccattctcgataaccagnngacacaatgcacagcagaaagccgcagggacctctgcccaagaaagcctgggtattgtccaaggtttcccccccactgagacagcctgagatatggcctcatgggaagggaaagacctgactgtcccccagcccgacacctgtaaagggtcggtgctgaggaggaatagtgaaggagggaggcctctttgcagttgagataagaggaaggcttctgtctcctgctcgtccctgggaatggaatgtctcagtgtaaagccgaccattcccattcgttctattctaagataggagaaaaccgccctgtggctagaggcaagatatgctggcagcaatactgctctgttactccttgctacactgagatgtttgggtaaagagaaacataaatctagcctacgtgcacatctgggcacagtacctttccttgaacttattcatgataaagattcctttgctcacatgtttccctgctgaccttcttcccacctgttgccctgctacactcccctcgctaagacagtaaaaataatgatcaataaatactgagggaactcagaggccagcgccggtgcgggtcctccacatgctgagcgccggtcctgggcccactgttctttctctatactttgtctctgtgtcgtatttcttttctcacaaaaaatttttcttttcttaactgcaataaagtaggtcgttacccct

SEQ ID NO: 80504 - DNA, 775 bp, Homo Sapiens
agaacagtgggcccaggggaccggcacactcagcatgcgaggacctgcaccagtgccggtctctgagttccttcagtatttattgatcattatttttactgtcttggcgaggtgagtgtagcagggcaacaggtggcgagaaggtcagcagggaaacgtgagcaaaggaatctgtatcatgaataagttcaaggaaaggtactgtgcctggatgtgcacataggctagatttatgtttcactttacacaaatatctaactagcagagagcaacaaagcagtattgctgccagcatatctcgcctccagccacagggcggttttctcctatctcagaatagaacgaatgggaatggtcgactttacactaagacattccattcccagggacgagcaggagacagaagccttcatcttatctcaactgcaaagaggcctccctctttcactactcctcctcagcacagaccctttacaggtgtcgggctgggggatgtaaggtctttcctttcccacgaggccatatctcaggctgtctcagttgggggaaacctggacaatacccaggcttttctgggcaggggtccctgcggccttccgcagtgcatgtgtctctggttaatcgagaatggagaatggcgatggcttttaccaagcatactgcctgcaaacatattgttaacaaggcacatcctgcacagcctaaatccattaaaccttgattcaatatagcacatgtttctgggggcacagagttggggctaaattacagatta

SEQ ID NO: 80505 - DNA, 1028 bp, Homo Sapiens
  misc_feature (413)..(480): n is a, c, g, or t
ggagagcggaatcctgctccgccgtcgcagcagcagcggcagccccggcagcctcgggcgacagcggcggcgcgcgagcccccgggcggaccgtaccaccgctcgccagcacgcagggggagccgcccgtctcgccgcgcacgcctcggcgaccccgcggggctgaggcgtcgccgcgcccggcagcgtgagcgcagagccggcctcgaccccgagctcggagccccgcgggccgcgcccgccgccggccccacccatccgggtcgaggaggccgaggccatggctgagacggaggagcggagcctggacaacttctttgccaagagggacaagaagaagaagaaggagcggagcaaccgggcggcgagtgccgcgggcgcagcgggcagcgccggcggaagcagtggagccnnnnnnnnnnnnnnnnnnnnnnnnnnnnnnnnnnnnnnnnnnnnnnnnnnnnnnnnnnnnnnnnnnnnggctgcgggcccaggggccgccaccaaggctgtgacgaaggacgaagatgaatggaaagaattggagcaaaaagaggttgattacagcggcctcagggttcaggcaatgcaaataagcagtgaaaaggaagaagacgataatgaaaagagacaagatccaggtgataactgggaagaaggtggaggtggtggtggaggtatggaaaaatcttcaggtccctggaataaaacagctccagtacaagcacctcctgctccagtaattgttacagaaaccccagaaccagcgatgactagtggtgtgtataggcctcctggggccaggttaaccacaacaaggaaaacaccacaaggaccaccagaaatctacagtgatacacagttcccatccctgcagtcaactgccaagcatgtagaaagccggaacaggtacttaaaatgaatgctacctggaattaaatgactacatatggcacatctacatcttactttagggacatgaattttttaaaataaataaaatgggaagaaatgtaaatgacaaaaaa

SEQ ID NO: 80506 - DNA, 658 bp, Homo Sapiens
  misc_feature (64)..(77): n is a, c, g, or t
  misc_feature (79)..(340): n is a, c, g, or t
gaatccagaatgtgccagaaggcacattctgcagatttcgtgcaaacatttatacacagcttcnnnnnnnnnnnnnngnnnnnnnnnnnnnnnnnnnnnnnnnnnnnnnnnnnnnnnnnnnnnnnnnnnnnnnnnnnnnnnnnnnnnnnnnnnnnnnnnnnnnnnnnnnnnnnnnnnnnnnnnnnnnnnnnnnnnnnnnnnnnnnnnnnnnnnnnnnnnnnnnnnnnnnnnnnnnnnnnnnnnnnnnnnnnnnnnnnnnnnnnnnnnnnnnnnnnnnnnnnnnnnnnnnnnnnnnnnnnnnnnnnnnnnnnnnnnnnnnnnnnnnnnnnnnnnnnnnnnngtgtgagccaccacggccggcctatacaaagtttcttattgagaaaagtggttccaatcatgttttttgccccctttagctgctatctcttgaacagaaaagtttgttaggaaggtaaaagttgctgactaggaccttacccacagggtggcactctgtccttgggaaatataaatgcaagtaaaacaggtttgaacttcttaacttccagaagataggaggatgggacctgtgatactgtgctgctggtgggaggacccttccacatcaacatttgtgtgtatccttgcaataaacttccattgtgaatcctcgtgc

SEQ ID NO: 80507 - DNA, 971 bp, Homo Sapiens
tttccatatgatatgggaagtagatgaaggacctttaaacaggtatttacgtggtcaggggtccctgaaggagatggacttgagtggccagtaagagaaggctgtcaccaatacagcttaacaatagaacagttgaaacaaaaagcagataagagagtcagaagtgttcgctataaagtaatagaagattatagtggtgcctgctgccctctgaataaaggaatcaaaaccttcttcacaagtccctgcaccgaagagcctcgaatacagctgcaaaaaggggaattcattttagccacaagaggtttacgatactggttatatggagacaaaattcttgatgattcctttatagaaggtgtttcaagaataaggggttggttccctagaaaatgtgtggaaaagtgtccctgtgatgctgaaacagatcaagccccagagggggagaagaaaaatagatagctgctgttaaaacaaaattatcctttaagtctgcttaattacttgaaaattgtacatattactaaagaattatgcaatgagcctactctggttaagatgttcttttcctcacaaggtgccctagtgccatgatttaaatatttttattaccattttgaaatggagaagccattctgcatatgcctttgaattcctgcccctctttaccacctcttcctccccctcaaaggaaaaacatttcatccaagtaagttaacggcattttctgtaggattttcttatgcactgcacactctggacctcacctgcagatacagttccccccttgccaggagcatctgcatgtggtacttctcttttccctcagttgatatttcttatatgatattctagatactatagaactcaatttgtcagattcagtataacctcagattttgttacctgtcttttaaaaatgcagattttgtcaaatcaaataaagatcaatggatgttgggtataaaaaa

SEQ ID NO: 80508 - DNA, 636 bp, Homo Sapiens
ttagcaatggcggttcccggcgtggggctcttgacccgtttgaacctgtgtgcccggagaagaactcgagtccagcggcctatcgtcaggcttttgagttgcccaggaactgtggccaaagaccttaggagagacgagcagccttcagggagcgtggagacaggctttgaagacaagattcccaaaaggagattctctgagatgcaaaatgaaagacgagaacaggcacagcggactgttttaatacattgcccagagaaaatcagtgaaaacaagtttcttaaatatttatcccaatttggacctattaataatcatttcttctatgaaagctttggtctctatgctgtcgtagaattttgccaaaaggaaagcataggttcactgcagaatgggactcatactccaagcacggccatggagactgcaattccattcagatcacgtttcttcaatctgaagttgaaaaaccagacttctgaacggtcacgcgtacggtcaagtaatcagttgccacgttcaaacaagcagctttttgaattactttgttatgcagaaagtgtaagtttttaggtgtacctcaacttttagaactatgtatttttttatgaacaataaagattcctgtaaaatatt

SEQ ID NO: 80509 - DNA, 934 bp, Homo Sapiens
cgctggaaggatcataataccttgtgcagggaagcccgagcctcgaggggccactgcccagctaaagatgactggacaccagccatgcaccatcaggaaccagcacctgtcctcacccctgagaagagccccgggggtatcattatatccatcgcagacatctggtttgcagcaaatgtggctacacgccatcaggattatcctgccctgtggactgggctagctagttttgagatagagtcaacctccccatttttgtttgtcatgaaaacaccagctcctgcacccctggggtgctacctgacacctgtgcaaagaaaaggaggaaaacttagaagaaaaggcagagacaggcaagacagcatctcacagcttgtcaggatcagggcattaccgactattttttcttaccaaaagagcactgaatttcctaggggaaggtgagccacctttacacctcctgtcctccctcccagcccgtcaagcgatcccatcacccagcctcatcactcagcttcttcctagtacaaaactgccatcggttgtacgtcctgagctgtgggacgtcagctttaaccctagcctgtctcagggcctcgccctccagccccccgccccttagggtgatcgtgggtttcttcccttcctcctgcacaatcgcttcccttcactgaattcccttcaaagccaaagtttcttgagcactttttcttgtgtgcagtcttgtgtgtttgggtgttggtgtttttaaatttgctttctattcccccctgcctctctccatgtcgttacgcagctgagcactggttgggatgcattcgaatgacttcagcaagatcctgctttcctcagcccccgctctgttttatttattgtttaatatttccaatgatccaaatcaaagtgaataaacaaagagctattttattgttaa

SEQ ID NO: 80510 - DNA, 811 bp, Homo Sapiens
ccaagaccctggagtgcaccatgcgtggtgtcctacgggaacagtacctgcagaagtacatctcacccccagcactgggaaagtctcatgaatggacccagtgcaggatagtgaatggatttgcttcccagcactggaagcattcccatgatgctggagtggctaggtcttggtgtcggttctttcacgcaaagtgtttctccagcaggacctgagaatacagcccaggcagaaggggatgaggaggaagaaggggaggaggagagttcgctgatagagatcgcagaggaagctgacctgattcaagcagaccgggtgattgaggaggaagaggtggtgaggccccagcggcggaagaaggaagagagtggagcagaccaggagttcgatatttgtggttctggccatgaggctagaccattgtggcactgggacagcagctggacaggagcaagccacaggagagtggcagacccagcgcaaccagaaaaagaaaatgaaaaaaagagtgaaggatgagcttcgcaaactgaacaccatgactgcagccgaggccaacgagatcgaggatgtttggcacctggacctcagttctcgctggcagctttataggctctggctacagttgtaccaggctgacacccgccggaagatcctcagctatgaacgccagtaccgcacatcagcagaaagaatggccgagctgagactccaggaagacctgcacattcttaaagatgcccaggttgtaggaatgacaaccacaggtgctgccaaataccgccagaaccacaaatatcggggtgcgagc

SEQ ID NO: 80511 - DNA, 390 bp, Homo Sapiens
  misc_feature (373)..(373): n is a, c, g, or t
gatcccccgatatttgtggctctggcatctcagtagagggatgtgcagagcacccattcactgaattaatacttaacatctaaagttctgcagaaatcagggattgcaatttggtgacaaaaatatcttaaaattctttaataggatggcggtaataaagtttccaatcaacatggtgagctgaggtgacagggaagggctctccctgtttcaaacacgtggaaaaactgagggagagatcattaacaactaagaaaatactaagaaaaaaagagtgaaggatgagcttcgcaaactgaacaccatgactgcagccgaggccaacgagatcgaggatgtttggcacctggacctcagttctcgcttgcagctntataggctctggctaca

SEQ ID NO: 80512 - DNA, 929 bp, Homo Sapiens
  misc_feature (185)..(364): n is a, c, g, or t
  misc_feature (409)..(429): n is a, c, g, or t
tgaaccgcacgcttacgtctgcttgtgcttgccacttttctggttcctgttgtgatcgtatacgcttgatagtgtacgtccgcacgagacgagccaggatcatggcgagagcgagacgccatacgcaacgctctcccgcggttgccgatcataatgcactgcacgacagttcccgactgaaagcnnnnnnnnnnnnnnnnnnnnnnnnnnnnnnnnnnnnnnnnnnnnnnnnnnnnnnnnnnnnnnnnnnnnnnnnnnnnnnnnnnnnnnnnnnnnnnnnnnnnnnnnnnnnnnnnnnnnnnnnnnnnnnnnnnnnnnnnnnnnnnnnnnnnnnnnnnnnnnnnnnnnnnnnnnnnnnnnnnnnaagaattcggcacgagggatgttggagcggccgcggctgtaggcnnnnnnnnnnnnnnnnnnnnnaaagaatgagccgatattggcttagtgctcactaggggacatgcacatggaagctcacctctaagaaagggctgggcagatggatttattttttcccacctgtgaatatgtaaaacaaaaccattatctttgagggagtttttaataccaatgacagaacagagatttgtgtgctcatcttaagagccagagccatataagcatcttgggaaagcaagtttgaaccagctgctggtgtaatgtacagttatatttgtctataaatggagctgtttatggcaatttaataccattctctttgtaaagtgaatggtttttaataccaatgacagaacagagatttgtgtgctcatcttaagagccagagccatataagcatcttgggaaagcaagtttgaaccagctgctggtgtaatgtacagttatatttgtctataaatggagctgtttatggcaatttaataccattctctttgtaaagtgaataaatattcatcttt

SEQ ID NO: 80513 - DNA, 980 bp, Homo Sapiens
tattataagactcttgaccaagcaataatgaaatttcacagtatgaaaatggaagaaatcaataaaattatacgtgacctgtggcgaagtacctatcgtggacaagatattgaatacatagaaatacggtctgatgccgatgaaaatgtatcagcttctgataaaaggcggaattataactaccgagtggtgatgctgaagggagacacagccttggatatgcgaggacgatgcagtgctggacaaaaggtattagcctcactcatcattcgcctggccctggctgaaacgttctgcctcaactgtggcatcattgccttggatgagccaacaacaaatcttgaccgagaaaacattgaatctcttgcacatgctctggttgagataataaaaagtcgctcacagcagcgtaacttccagcttctggtaatcactcatgatgaagattttgtggagcttttaggacgttctgaatatgtggagaaattctacaggattaaaaagaacatcgatcagtgctcagagattgtgaaatgcagtgttagctccctgggattcaatgttcattaaaaatatccaagatttaaatgccatagaaatgtaggtcctcagaaagtgtataataagaaacttatttctcatatcaacttagtcaataagaaaatatattctttcaaaggaacattgtgtctaggattttggatgttgagaggttctaaaatcatgaaacttgtttcactgaaaattggacagattgcctgtttctgatttgctgctcttcatcccattccaggcagcctctgtcaggccttcagggttcagcagtacagccgagactcgactctgtgcctccctccccagtgcaaatgcatgcttcttctcaaagcactgttgagaaggagataattactgccttgaaaatttatggttttggtatttttttaaatcatagttaaatgttacctctgaatttaaaaaaa

SEQ ID NO: 80514 - DNA, 1195 bp, Homo Sapiens
  misc_feature (1083)..(1091): n is a, c, g, or t
attacatacacgcacatttctatatatttttcactcgccagatgcaacaattgcaatattttaccaagttttgtttctaccctttgttgtcatttgtcctggaatatttcagtgattctcagacattgtgtcatttcgactgtaaataattcagtgtgcatctctgagcgattgagatatcatctgtagatctagttatgtatctatctatgaatgctacgttcccttccatccacctctctggccttgtcctctgtgttgaccctggggaagaactacctggactacctgggtctttcttcctgggattacacacctgccagctcaccccagctcactctgtgttgctaccacaggaatttgctggaacacagatcattcaacttccttggttgaaatggttcagtaattttctgttacctccagaaacacccccaatgcttccctgtgccatgcaaatcatttcgtgatttgacgcccacaagtcatccgctggcactcgatgccaaacgaggtgcgttcacggtgctgcgctcctgcgcgccgcttttcctgccttctcagaggctccggttgaggggagcggcccgggagccttggccgactctgactcctcctcctgcctctcccacgccagaggaggctgggttcccgcctctcccctgtactccccccagctctctggacatcctggcgtgctattgcaccagtcacaacatctgaaactaaacagaccctctctgcctcctcccactgagctgagcttggcagtgcttgaggcagacacaccgcactgcatttctgtggctgtaccaaagccaggcccgtggctctccgtgtgtatgtttcgtaaatgaacacatggtgatgagtgcgtgcctcagtttccacagctgtgcagtgggaatggccatctcccagtattggtgttactgtggcaaacgatatatgggctgcattttgtcaactttaatgcgatatgtaaatgtaagttggaattacttccaagaaatttgagtgacaatgttttttcaagtcccataaagttgtctttaaataagcatggtctctagacaccagcannnnnnnnnctttcttaaactatattgcgtttatgaatctggaaatttctgttacctatgacacacaagatgtaagtcattttcccttgttcaataaatttttttaactaggt

SEQ ID NO: 80515 - DNA, 681 bp, Homo Sapiens
  misc_feature (125)..(125): n is a, c, g, or t
  misc_feature (357)..(383): n is a, c, g, or t
gggccgaggagcagcttcatgccccggaaggagggggcagctctgaagagactgggtggaggaggcagcagcctagaggatggaggagccagagtacagtgtcctcagggaccagcccaggatgngactccagagacctctactgctgacacctacccagaggagatcctcaaggactctggacatgatgcccaaacctgcagtagggagcatcagggccaggctgctgccaactcaggccgcaccacgtggggcgccactgcccagcagatggacagcttggaggagacgctccgggagctggaagccaccctgagcaacatgggcacaggccctgccatggggtcccctggcagnnnnnnnnnnnnnnnnnnnnnnnnnnnaggtggctgcccgcttttcatcctcctctgctgccttcctcctccatttccagagtcagacagagtagggggcagcagaaatgccaggccagccccctcctcccaccggccttctctcagctcttaccactctcctgggagcctggtgccagagcagggtttgcaggcagagtccgggggaggctgggaagccggcctacccaggggccggccaatccccagccttggcaagaaccagggcctcccccttctgctctgtatctgtaaaccaacaaataaagttctctccccaccttcc

SEQ ID NO: 80516 - DNA, 446 bp, Homo Sapiens
tttttttaatttttgtttcctgaagtagaatccatagctcaaaacaagttttaagcctgagaaaatataatttgaggtgttttttatgctcctaatgaaaagatgaatgaatgcatcattaaaccttaacagtagagcagaatttcactgttacaaaccacatgggttctcctggttgtgctgctgttctctacctgtgtgtcactgagtttgagcatcattattgtttgaatcagaggacccactggaatcaaggcttcttggaattgcgcaagaatctgagaaaacttcaatctttaccagcatttcttaatgctttccatgacttttgtgcaattatataagttcagtttagacaaaatgctgttactttttaaggcattactaataactgaaaatagttacgtcattgcccatcaagggaaaagcacttgtaactgtcattt

SEQ ID NO: 80517 - DNA, 994 bp, Homo Sapiens
  misc_feature (63)..(63): n is a, c, g, or t
  misc_feature (101)..(101): n is a, c, g, or t
  misc_feature (104)..(104): n is a, c, g, or t
  misc_feature (115)..(509): n is a, c, g, or t
  misc_feature (658)..(673): n is a, c, g, or t
ttctatagtctgtcggttcgccactttgactgagctcgatttttgtgctgtcaggggcggacntatgaaaacgcagcacgcgctttttacgtctgcccctntgntgcctttgctnnnnnnnnnnnnnnnnnnnnnnnnnnnnnnnnnnnnnnnnnnnnnnnnnnnnnnnnnnnnnnnnnnnnnnnnnnnnnnnnnnnnnnnnnnnnnnnnnnnnnnnnnnnnnnnnnnnnnnnnnnnnnnnnnnnnnnnnnnnnnnnnnnnnnnnnnnnnnnnnnnnnnnnnnnnnnnnnnnnnnnnnnnnnnnnnnnnnnnnnnnnnnnnnnnnnnnnnnnnnnnnnnnnnnnnnnnnnnnnnnnnnnnnnnnnnnnnnnnnnnnnnnnnnnnnnnnnnnnnnnnnnnnnnnnnnnnnnnnnnnnnnnnnnnnnnnnnnnnnnnnnnnnnnnnnnnnnnnnnnnnnnnnnnnnnnnnnnnnnnnnnnnnnnnnnnnnnnnnnnnnnnnnnnnnnnnnnaagaattcggcacgagggtgtaataacactttttaatgatttgtcttgatggaatcattgtttagaatgtaaaaatggggaaaggggccacttaattccattagtcctctttttatactgaatattttattagatacatgttattcccnnnnnnnnnnnnnnnnagtcaatattgtgtttgtagttttaaaaaatggcgagatatgtaaaatctaaactgcatgctctggaaacacttttttcagatgcatctggtttaaaagggtaggtgtataaacacttttcagaatccaaaacggccaaaagttattgtaaatccgtttgttttcccgttttatgtgggcaataatgtcaaatgtgctatgcagccaggttaacattttagataaacttgattgacttttaatataaactgttacaatgcacactgattgtatataaaaacgttatatatgacaaattaaatttaagaaaaaggaaaaaaa

SEQ ID NO: 80518 - DNA, 561 bp, Homo Sapiens
ggcacgaggatgaagaagaaatggaagagaaactggcaaaagcaaaaggatctcaagccccatctcttcctaacaccagtgaggcacagaagatcaaggaagttcctacacagttcttggacagagatgaggaggaagaagatgctgatttcttgaaggtgaagcggcataatgtgtttggattggaccttaaagacgagaaaacattacagaagaaagaaccttctaaatccagcatcaagaaaaaaatgaccaaagttgcagaagcaaaaaaagtaatgaagagaaattttaaagtgaataagaagataacatttactgatgaaggggagttggttcagcagtggccacaaatgcagaaatctgccatcaaggatgctgaggaagatgatgacacaggtggtatcaacttacataaagcaaaggaaagacttcaggaagaggacaaatttgacaaagaagaatataggaaaaaaattaaggcaaagcatcgggagaaaagactgaaagaaagggaagccagaagagaagccaacaagagacaagcaaaggccaaagatg

SEQ ID NO: 80519 - DNA, 1005 bp, Homo Sapiens
  misc_feature (26)..(26): n is a, c, g, or t
  misc_feature (116)..(116): n is a, c, g, or t
  misc_feature (558)..(567): n is a, c, g, or t
cccttggagctgcacgcgcctgctanttgaattggaagcggagtgagcctcaccttgcgctgagaaagaccgttaccctcaggagacgtgacaaagttgagcggagaagctcgtanccatgaggacacagtgcgctgagcgcagagaagggcccctggaccgcaccctcacggggctgagcttgagctgcagagggcgcagaggcagatccagcagctggagcgcagtttggtgtgctggagcagagccacagcccggcccagctggaggtggatgcgcagcagcagcagctggagctgcagcaggaggtggagcggctgcgcagcgcccaggcgcagactgagcgcaccctggaggctcgggagcgggcccaccgcccagagggtgcgtgggctggaggagcaggtgtccacactgaagggccagctgcagcaggagcttcgaaggagctcagcacccttctccccaccctccggccccccagagaaatgagctcctgctggcatctggagaacacccctgtgcctgggacaggggaggacccttcttttggacagnnnnnnnnnncaagagcccggtcccttgggggcctcaagctggggtgggatgaggaggcgctctgctggcagtgctgaggacgggtactccagctccaggcctggagaggcttcccagcaacacctgcagtccagcccccctcttttaggatgagccactgtagatcattaaagttcctccttgagaggctgagccgtagccaggattggggagagcccttgtctctggtcagccctggagcatgggatcgtgggaaagaggagggggaccaggcccagggcaggggtcagaggcccaggccctgacttcggcttcccagagatctctccgccttagttaagagcatgtgtcgggaaattcctcagagtgctcagagtccctgtatttttatacctttttacaatgttaactgttcagaactgttttttgtaacaaaaccttgttttt

SEQ ID NO: 80520 - DNA, 807 bp, Homo Sapiens
ttctattaagttttagtgaaaagcctaattacagaaaattgtgcagatactagtgaagatactagtataagtttaaaggaacatgtgactgtaaaatctcacatttacaaagtgcttgatctcttcatatttcacacgcatgttttagaatagattttagggagtgtttaattcattatccttttgacttaaaatttttgttaccaacttcctaggacttagataatatataaataagtacaaatcccaggggaagtgttgtgatgctagactaaaaggtgggaatgtgctgctgttccgtgagccttgttccattgttgaaaatttgatgcctcagtgtttattcagtaccacctcatggagcttcaatgtaaatggattatatgtataattggtaatttgtatagttttgtagattgtagattaaatgcactcatcatgtcacatgtgattgtgcttggagtatttgtgttttattcttttacttcaacgggttcttgtctgttacatctctggtgatttgaaatatcaggaaagacagtttgtcagaaatgagaataatatagttgaaatcagttgggctaaaatattctacagcaagacaatttcttttgggtgaactgattctataatttacttacttttaatgtaaggattagatttattgttgagctgctttccagatcagactgtcactttatagtttttctatataaagattatatagttgcaaacaaaggttgtgaaatttcccttttgttgtttttgacttttaattaataaaagtacattgttttcatagcaaaa

SEQ ID NO: 80521 - DNA, 277 bp, Homo Sapiens
atataaagttaaattggctttatacttattggtggaagagagtcataaggaaaatattactagtgtatatacttctgtaggtttttgcacatatatttttatattcttcactatcaactgacagagtaggtattattcacatttgatatataaacaagccgaaacttacagggtaagtagcttttcggcttagctagtgttagaattaaaactctaaccaaggtctgtcttaactccgtagataatgctttcttaaataaacatttatggtaatctt

SEQ ID NO: 80522 - DNA, 743 bp, Homo Sapiens
  misc_feature (572)..(572): n is a, c, g, or t
gcaaaactaattctttcactttcctgtcataaaatcacctctgaaaacacaacttctttacaaaaaagtcacgaatgacacgaactctcaggaaaacacatttctatggtctctggaaacacctgtaactggcacccaggtggtcactcacctgggggagggggtcagggggaaatcacctcctcggcccctccctaccctgccctgtgtgttggctttgtggccgtccaagtgccaattggcttttcgcccaaataagggctggtatttctcctctgtccttggaggtgatttccccctgaccccctcccccaggtgagtgaccacctgggtgccagttacaggtgtttccagagaccatagaaatgtgttttcctgagagttcgtgtcattcgtgacttttttgtaaagaagttgtgttttcagaggtgattttatgacaggaaagtgaaagaattagttttgccaatttgtcttctccattactactcagtctatatgtctactcatctatccattcatctacccatccacccatctacccaaaatatccagccacttgcataatttgncaagatgataagaaggttaatcctaataggagagttataggaacttcctatagctacataaatctcttcatctacatcagattcatttttcaccaatgttagaacaatgatggatatagctttgggccaaaaaaatggggaaagggacctcgaagcctcaaagcttcaaat

SEQ ID NO: 80523 - DNA, 1075 bp, Homo Sapiens
  misc_feature (55)..(73): n is a, c, g, or t
  misc_feature (802)..(817): n is a, c, g, or t
ggctaaaattaaccctcactacaagggaataagcttgcggccgcggctgtaggcnnnnnnnnnnnnnnnnnnnaatatgaggacgatttaatcaaggaccatttacagaggtgggggtgtacgtgaggcagtacagctctagctcagaagctggtaacagctggacaccacacccacccccgcaaacatatcctggaggcccgaaggggcaagggaagggagctgtggagaacgacagtccaccatgggcaggttctcccgtcctgtgaagcttatgcccagcaaacctggtcttcctaatggaccccaatgctgtctgcccgaccacaggctgcatttagtggaccaggctgggggccgcagtcgggagaagggccttcctgagtacgcaaagctataactacaagaatggccactgcagcaccattggcaagagctaaaagctggacacaagccggatggcccgcggatggggagggtcaaatgaactacaatccatccacatgaaaactgggcgctgctacaggaaggaggctccttgtgtgccatcagggagaggccttggcgccagctccctaggaaggcaggctgccaggcagtatgtccagaaggagctcactctggtgaaaacaacaaacaagccatcaacactagctgtgcaggcaaaggcacagagtccagaaggaatagtcctgactgttagcaaagctaacagtctttcctgctctctgtccatctgtgtgtccttccattcatccatctcttctgctggagacacttcaggggcgcagctaatgtggcnnnnnnnnnnnnnnnntttcaacctgtatttattctcttgcccattcttggcctccagggcaaattcctatagtgatcgtatgaattcctatatttcaagctgtttctgtgttaaatgttaccgctccattctacaaactacgagctgagcataatgtaacctgggggcctagggtgagctatcaatattgcgttgccactgctgcttcatctgaatcgtttccagtcataggatcgcacgcgggaaggcgttgtttggccttccgtccgccag

SEQ ID NO: 80524 - DNA, 1035 bp, Homo Sapiens
  misc_feature (21)..(21): n is a, c, g, or t
  misc_feature (78)..(78): n is a, c, g, or t
  misc_feature (103)..(156): n is a, c, g, or t
  misc_feature (158)..(158): n is a, c, g, or t
  misc_feature (161)..(161): n is a, c, g, or t
  misc_feature (169)..(170): n is a, c, g, or t
  misc_feature (181)..(182): n is a, c, g, or t
  misc_feature (214)..(214): n is a, c, g, or t
  misc_feature (248)..(248): n is a, c, g, or t
  misc_feature (260)..(260): n is a, c, g, or t
  misc_feature (348)..(348): n is a, c, g, or t
  misc_feature (552)..(552): n is a, c, g, or t
agcggcatttgcgcaccgcantaatgtgagtagtcactcattagcaccccagcttacactttatctccggctcgtatntgtttggaatgtgagcgataccaannnnnnnnnnnnnnnnnnnnnnnnnnnnnnnnnnnnnnnnnnnnnnnnnnnnnntntgncctcgagnnccagaatcgcnnacgaggctgtgaagccagaccataaaaataanaacagcacggactcctgggcagcctggaccaggnaaccaactgccncaagagtgctgctcaccaggctggaagattccagctcatgttcatgggtctgcacctgcatacaaatgccaagaggactggcccaccnccgggatctgtcctcacccgctcctcaccaagcacccggctgcaagttcccagcagggctcggaagtcccggggcctcctgtgaagctgggaccaccatgctggtccagcctccttggttgtggtcgtggccggaagcagccagactgctggcccctttgagagcgggtgtctctgtgagagagtgactgctgggaggtcttcnagggaacttgggcgccgctgggacaattggtcgctgtttgggggagtgaggttggcaggcccttggccctcggcactgagcctctgccaggcccctgccaagcctggggctggtttcccactgcctgctagtttcagggccatttggggagggggcccaggggaattcattgcccctctcttaagcgtctttgctgtggtccaggaagcccgggcagtgtctgctctcagacagcaggtcagcacagcctcagacatgttctgatgatgcccgctgtgtaccaggctaggggcgggatacttagaaccagcctcccagatgccttagagacctctccaatgggctgccaggggcctcacaggccatggtaatgcagaagccctggctagattgagcccttgcatgcttgttaactctggttggccctagtcaagagccttggctggggaaacaactgacaaaacaaagcctctaccctcctgc

SEQ ID NO: 80525 - DNA, 1378 bp, Homo Sapiens
  misc_feature (55)..(55): n is a, c, g, or t
  misc_feature (62)..(62): n is a, c, g, or t
  misc_feature (714)..(714): n is a, c, g, or t
  misc_feature (761)..(775): n is a, c, g, or t
  misc_feature (991)..(999): n is a, c, g, or t
catagtcctgtgagatgccagctgccatgaccaagcagtattcccactcctcctntacactntggcaaggctttcctggaacatccccatgcccacatctttacccagtaactcactaaagccactcttgactcaagcaggtgccgttccttgatcacggaatctacctttgatttcatcaggccagattcacaaacagaatgggagtgctttatctatacctttgagaggatggagagtgaaataactggaaacactgggttatcacagcttaatttcatccaggcttggtgtctttaccaaagatggttggggaaaggaagggagattcatcttgttcaggcagtgatttgctcagaattttacaagacataccctatacagacctatttgaattctactgtgggtttattgaaccagtgttggaacaacttcgcaaaacagaccaggccagttaggtacagcctcatgagttggcaggtagcagcagcccgtgtcttccctaagatgacattccctgcccaaaacacttctgtgaaaagtacagaataaacagctcagagaatacagtgtaagttacccgcagaaatatagtacttctttctagaagtttacaaactgtccatgtttatcccttgccatatagcaatcactactattagtgctgtacttaagtatttgtttatctgatttctaattgttaatgcttccccncaaatattgtgtgacatgtgtaattaataaaaatcacttaacgatgnnnnnnnnnnnnnnncggaaaaacagtacaatcgaccataataagcaaaaactcaccgcaaaaaaaatgttgtttgtgggccccgccctcgccccctcaaaaatctttctaaaccctttctttggggcgcgcgggcccccctagggaaaaagggaaacctggggccatagtcggttctccaaaggaaaacctcgggaccaaagaataggggctgtggttttctcccccacnnnnnnnnncccccccgggggtcgaacccaaagcgtttttgaaaacaatccccagaagggaaatttcgagaggtgctttccgggggatccctttccaacagggattcccccagggggaagcctctttatatcaaattttcacgcgccccgccctcggagcaaattttattcgggaggatacgtggtgtggaaatctcacttttaaagcccatcctcccgcccccaacctttgaaaaaccccatccaacaaaaacggggtactggaatgaaaacccttgaaacacgccccaaaggggaggcttttcccacacccctttggtccgcccctgttggcaaataaataaataattcgcccccactgggtgggcaaaacaagcggggggcggcg

SEQ ID NO: 80526 - DNA, 1097 bp, Homo Sapiens
  misc_feature (294)..(322): n is a, c, g, or t
  misc_feature (353)..(833): n is a, c, g, or t
  misc_feature (985)..(985): n is a, c, g, or t
atcatgtggtgaatatgttttcattttcctcctaataatgtttctcttttgttaacttatttatttttcaaacactgagccatagtcttaaatttaaatgctaaaaacaattgtatcatgtagtcgggcagcctattgatactgtcaggggaaaaaaatgggtcagaactcagcatctgtcatgaaaaaaatcaattgaaaaacaagcagattttaaattttgaagtaatcaaaataatggaaagtgtctgttttgtggtgtatatactatgaataaaatcacagcattttctnnnnnnnnnnnnnnnnnnnnnnnnnnnnngcctacagccgcgcctcgtgccgaattcttnnnnnnnnnnnnnnnnnnnnnnnnnnnnnnnnnnnnnnnnnnnnnnnnnnnnnnnnnnnnnnnnnnnnnnnnnnnnnnnnnnnnnnnnnnnnnnnnnnnnnnnnnnnnnnnnnnnnnnnnnnnnnnnnnnnnnnnnnnnnnnnnnnnnnnnnnnnnnnnnnnnnnnnnnnnnnnnnnnnnnnnnnnnnnnnnnnnnnnnnnnnnnnnnnnnnnnnnnnnnnnnnnnnnnnnnnnnnnnnnnnnnnnnnnnnnnnnnnnnnnnnnnnnnnnnnnnnnnnnnnnnnnnnnnnnnnnnnnnnnnnnnnnnnnnnnnnnnnnnnnnnnnnnnnnnnnnnnnnnnnnnnnnnnnnnnnnnnnnnnnnnnnnnnnnnnnnnnnnnnnnnnnnnnnnnnnnnnnnnnnnnnnnnnnnnnnnnnnnnnnnnnnnnnnnnnnnnnnnnnnnnnnnnnnnnnnnnnnnnnnnnnnnnnnnnnnnnnnnnnncacaaaatcgtcgctcagttagaggtgggtaaccccgacagactataaaattacacgcgtttctcctggaagctccttcgggtctccctgttcagacctggcggttacggatactggttgctttcttccttcggaagtgtgttctttctaanctcagctgtgcgtattcattcgggtacgtcttcctccacctggggtgtgacaaccccgttagctgacgtggtcttactgtatatcgctgatcaccggagaacgattacccag

SEQ ID NO: 80527 - DNA, 452 bp, Homo Sapiens
ggcacgaggtatgacaccacagagaacatttactgagagcgtatctcaggctcctttcctgggagtgactttttctacatcaagacaagtggcccatcccctctaatgaaggtgaagagaaaacagtgagctggaagagctcatttcagactttttctgccctgactaaatggagagacatggaagatgaggatgggggagaaacagaggatccagaataagaagaaagtagaagacagctctttcagaagatgagccctctagctatgcctaccaggtagagtggaatggtgggctcagccagtataaagttatgaggtcatgctctccaaaatcaggaaaagctttctatgagagcccttttcctggcccttgtcccaaatgggtgtctcttgtcctattataatactataagtgatcatttattaaacacttatgtgccattaatttat

SEQ ID NO: 80528 - DNA, 1245 bp, Homo Sapiens
  misc_feature (577)..(627): n is a, c, g, or t
  misc_feature (648)..(698): n is a, c, g, or t
aaacatttctccatcactcattccaggtcccagagcaaactctctctgctctcggagcctgtgacactggctatgtgctccacagtttcagtcccaggtcatactctccaacagttttcagagctccatatatatgtagatgccatcctttctaaaaacttctcacgacctcctggaatattcctattgatctcattttatttagcatcagctcaagaaactaagtcttagtgcacagtatcacaacaaagaaaaagctttgtttttataactggtaaaaacaagaaaagattctcatcaaaatgaaaatataaaattaatcatttctcaccaaagagtatgcctgggagcctccagctgttaaaagacaatgctattactacttcttatcaaaaatctgtaatgccctgtgatttttatgatacttcttcaatacaaagtgttaatatgtgtcatcagtataataacaaccaacaaaatgccactttcagaaaactgtatgtaaattttttgtaacaatgtaaaaaagaaatggggagtaagtgttcacatcattaaaaggctttgaattcatggnnnnnnnnnnnnnnnnnnnnnnnnnnnnnnnnnnnnnnnnnnnnnnnnnnngaagaccgcaaacaacccacnnnnnnnnnnnnnnnnnnnnnnnnnnnnnnnnnnnnnnnnnnnnnnnnnnnggaaaatggccataagctgtttccaaagaaaatcctggggcatgaactaaggcattggattcctcaccaataacaaagggcccgggcgccaacgcgggcgtgtaaagaaattattccaaaatgtgtttttgtggggggcggtcactgcaataatataagaaaggaaaggcaaattctaggcttcaaataataaaattaacgccccccgcccgggcccgttcttccccatccaccgaaagaaaaatacctcccggggttcctgcccaaaattggaaaacaaataccaaaaaggggggtggattgaaccttggaattcccgcgggggcaatacaagagcccttcgccggccttttgcattaaaaaaatatttcccccccggccgccaaaacgggggtttaaagaaaagttgtcccataatttgtgccccggtttaacctcccggagggggagagaaccttcccccacagggttttggggtaaaaacacaaacaccgctgttttccaaaaaccaccccttttaggcgagaataggaaaaaatattcccct

SEQ ID NO: 80529 - DNA, 605 bp, Homo Sapiens; identical to SEQ ID NO: 10444

SEQ ID NO: 80530 - DNA, 1344 bp, Homo Sapiens
tctagagcagttgaagacatctcttcatcgaggactaacccctacagttatgcaatgagtactgaagaagccagatttcttacctaccatatgtggccattaacttttttgtcaccatcagaatggcaagagctggttgttattatataggacctggagatagggtagcctgcttgcctgtggtgggaagctcagtaactgggaaccaaaggatgatgctatgtcagaacaccggaggcattttcccaactgtccatttttggaaaattctctagaaactctgaggtttagcatttcaaatctgagcatgcagacacatgcagctcgaatgagaacatttatgtactggccatctagtgttccagttcagcctgagcagcttgcaagtgctggtttttattatgtgggtcgcaatgatgatgtcaaatgcttttgtagtgatggtggcttgaggtgttgggaatctggagatgatccatgggtagaacatgccaagtggtttccaaggtgtgagttcttgatacgaatgaaaggccaagagtttgttgatgagattcaaggtagatatcctcatcttcttgaacagctgttgtcaacttcagataccactggagaagaaaatgctgacccaccaattattcattttggacctggagaaagttcttcagaagatgctgtcatgatgaatacacctgtggttaaatctgccttggaaatgggctttaatagagacctggtgaaacaaacagttcaaagtaaaatcctgacaactggagagaactataaaacagttaatgatattgtgtcagcacttcttaatgctgaagatgaaaaaagagaagaggagaaggaaaaacaagctgaagaaatggcatcagatgatttgtcattaattcggaagaacagaatggctctctttcaacaattgacatgtgtgcttcctatcctggataatcttttaaaggccaatgtaattaataaacaggaacatgatattattaaacaaaaaacacagatacctttacaagcgagagaactgattgataccattttggttaaaggaaatgctgcggcacacattcttcaaaaactgtcctaaaagaaattgactctacattgtataagaacttattgtggataagaatatgaagtatattccaacagaagatgtctcaggtctgtcactggaagaacaattgaggaggttgcaagaagaacgaacttgttaagtgtgtatggacaaagaagtttcctggtgtttttattcctttgtggtcatctggtagtatgccaggaatgtgccctttctcttaagaaaatgccctatttgcagggtttaatcag

SEQ ID NO: 80531 - DNA, 611 bp, Homo Sapiens
  misc_feature (351)..(390): n is a, c, g, or t
ggcacgaggaatgccaacataatgacaatttacatttgcacaacgctagcatgatacaaggcattttggagtgccttatcttatttgaaagtgctagaagaagggatgggtttttaatatcaaaggggagaggaaagatttttttctagctgtaggtgagtctgtaggggtcaggaaaaaagaaggcatgtcaaaagaaaaaggaaagcaagtctgagaggaggcagatagattgtggaaacattcagtagctaagcaatgtcttcttaagggaaatgctatagacacttcgatgtctacatacatacaccagtaggaatcacattaaaacattctccgtgattcaagccnnnnnnnnnnnnnnnnnnnnnnnnnnnnnnnnnnnnnnnncggtggaaatagagaccagaaattaccccaaaggctacttaatggttgtctatccctgtgttgtagggaaaacagtccattcggaattaaaaactcattatttaaatcaaatttgccacctagactgagtcacttaatgtttgaataaagttaatttccttctttgtgtatggggaatgttgagaactcatgaataaaagccaaagtggcattttcttttg

SEQ ID NO: 80532 - DNA, 636 bp, Homo Sapiens
  misc_feature (511)..(551): n is a, c, g, or t
ggaacgaggaaggtgtagaccatcatctacttctgctaaaataacttaaaaagaggtccataggccataactacatgagcccagcttttgtaatctgacaaaaaaatgaggagcagcttcgtgtatatcagtgtacacggtattccttaggtcccttccattggtagtgatgctgcgagttattactggagaaaaggaattctagagctttaacttggcagattaaaagtactcattttttattcatcaataattagtaatctcactagttttcaaaaatttgcatattattgacaacctctttgaagatgcatttcacaaactcaacagagtgccatgataagagctagggatcccccaaactatctcaagcatctaaaaaattgccatttttaaaggcttaaattgtagtagtaaaggggaaaacaggaagtagtagtaaaggggaaaaaaacccaataaagcatctaaaaaattggcatgttaaaaggcttaaattgctaatgtgtgnnnnnnnnnnnnnnnnnnnnnnnnnnnnnnnnnnnnnnnnncattgacttttcttaagacttcagagtactgggtagatgaacactttatacagtatatatcttcagcttaaatttgttttgagta

SEQ ID NO: 80533 - DNA, 633 bp, Homo Sapiens
caaggagcgagcctgggtggcgaattcggcacgaggcaggccactagtgtctgcctgttgaagatctggaaactgcctccccagatctgtattgtatttggtaggtaagggggtcagtttctttttctcattgtgtgttgataatctacacaccatctgttggaaccagggtgttattatggggaactcctcctgtgtactaggaggaggaccttagggagaccaagaggagagaagcatttcctttgatgaagtcacatcctgtctatgagcccactaatgctgtaacattggcctgaaagagagtgttctttaaaagcctttctcggctgttagtataaaaacatgatggtatcagctcttagcatgtttgcttgacccttatggaaggtataaatccacagaacttccttcccagagaactgggaaattgtcctagaaataaaccttgtacagttgagtggacatggataagcaacaatttgttactttgcaggatttgttccttggtaattgtttggtgtgtcatcctgtaaatattcatgatagtctgtttatatccttttgtatatcgttgatactggattgggtagaaaaataaattggcaatttaaaaaaatggaacagttaatt

SEQ ID NO: 80534 - DNA, 665 bp, Homo Sapiens
cgcgactaccgctatgatcgggttctcttctggggccgcatccttggcctcgtcgccgattactacatcgcgcagggcctgagtgaggaccagctcgcaccgcgcaagacgctctatagcctgaactgcacagagtggagcctcttgccccctgccacagaggagatggtggcgcagtcgtctgtggtgaagggccgcttcatgggggacccatcatacgaatatgaacacactgagctgcagaaggtgaatgaaggtgaaaaagtctttgaagaagaaatagtggtccagatcaaggaagagacccgcttggtgtctgtcattgaccagattgacaaggctgtggccatcatcccccgaggcgccctcttcaagaccccttttggacccacccatgtcaatcggacctttgaaggactggtgtaagacccctgccccttcacccaaacctgtgatgggaatcaaggggtaagggcccgtgggcgcagccctagcctaggaaggttcctgtaaataggaggggggtggggaaagatggctgccgcccgtggacctttggcctcctttggggatggccagggccctgatagttcccagaaaagtggctcatgccggctaggattgccttttactctgtccagaataaaacttaaatcatgtccaaa

SEQ ID NO: 80535 - DNA, 478 bp, Homo Sapiens
tttgaaggactgtccttgtctgaggccaagaagctcagctcctacttccatttcagggagcctgttgagctaaagaataagaccttgcttgagaaggctgacctggacccctccctggatttcatggactccttggagcatgacattcccaaagggtctgaggcagttgttcagggtgacttcacgtggcttctgagcaggtgtggttttggttggccctgttcctgggactcctgctctgtgtccatgagggtcctggagcatccagatggagaggggcaatgccctggtggtgctgcgcagcctgctctggccgggcctcaccttctaccatgctccccgcaccaagaactatggctacgtctacgtgggcactggcgagaagaacatggacttgcccttcatgctatagaatgggagccagcctggatgtttttaaacagagtctaaacatgattttcttaagcttcaaaaaaaa

SEQ ID NO: 80536 - DNA, 486 bp, Homo Sapiens
cactgaagcttaagaaaatcatgtttagactctgtttaaaaacatccaggctggctcccattctatagcatgaagggcaagtccatgttcttctcgccagtgcccacgtagacgtagccatagttcttggtgcggggagcatggtagaaggtgaggcccggccagagcaggctgcgcagcaccaccagggcattgcccctctccatctggatgctccaggaccctttgggaatgtcatgctccaaggagtccatgaaatccagggaggggtccaggtcagccttctcaagcaaggtcttattctttagctcaacaggctccctgaaatggaagtaggagctgagcttcttggcctcagacaaggacagtccttcaaaggtccgattgacatgggtgggtccaaaaggggtcttgaagagggcgcctcgggggatgatggccacagccttgtcaatctggtcaatgacagacaccaagcgggtctct

SEQ ID NO: 80537 - DNA, 819 bp, Homo Sapiens
ctttgtcagtcttgcagaaactttaatggagaagaaatggactttatttttgaaaggtgaaatgaacaggcatttatattattagagaatggtagtcttattttggtggaacataatgtaacaaccttgaatttcagaggactctgagtgcttctatgtccactacctattgttctattcttcaataatgaaaaagaattcaacgagccgaccgtgattccctctactacaaatattatgtcttgtaagttagcatttttagcacacaggagaaattttatgtaataaaattactgtatcttttggatttaacaaatttgtatttgaaacacattctatgtctgataattcttaatggcacttttactaatttatttggggatcttgggtacattcttaatttgtgtttattcttcacgcttgacttgcaagtgggatattcccctgccacaagtgtcaaacagtgatattcttcctgtgttgtgactggacagttttccagatcttttttgggagattttcctacagcttggttgtatgtcttgagataacacccaccaaacagctctcagaaattcttttttgattgatcagtagctatgatgattctcctccatgacactaaggattagtttatatatttaagagaaataattgctaaaattaaaatgcctctatcaaggaatgctattataaattattgttaacattctcaagtattaattttttaatttcattggtgtagcaaactctaagcccagccactcattttacatggccatggttaatctttttattaataaaaattatacttagaat

SEQ ID NO: 80538 - DNA, 975 bp, Homo Sapiens
acaagtccataaattgaagaaaacacgccgatctgtctgcatctgcatggttcttatctccatgccagctcttagttgaaatcgatggtcccaaacttaccattctttctccacaaggacttcgaatcctcggatggttcgatagtatccatccaacatgagcatggcaagggaagtgagctgagctgtgcgatcccaaccatcactgcaatgcactaccacagacgtcttccctgactctaccttgtcagcaatcctaagagcccctgcaagaataagcttaatatgttctagccaatgagtagattccaagttagacaaccagtgagtttcctcaatgttggggtacacaatctccttaagttttcgtaatgattctctcataacatgaatattgtggatatccaggaaaactagttcagcattttgataggcatcttcactttcataacctccaccctttgccttgttggcaacagcattaacacttggccgggcatcaaatataaagattttgtgagactgggcattggaatccatgatagcttgaaggtatttttcatcttctttgcttcgctttccactcactccaaccatgggctggctacaccgagtgattgtggcttgactttcaggatgaatccatgataaaaccttaatgaggaaaaaatggtaacacaccttttacatacttctctgtttataattctcaaaaacagtactcagtaaagctctgctttctaattggatccaaagcctggccatgaaaggacatctgaggctgctaagaaaaatcatcacctttccttcaagccaattctgggatgtggaaaacttggtctaattctttagtcagatactgatttaggaaagtatttgattattgggaaatgttatctcctgaaaaaaatactgtgaaacagggctaagtaaaccccacttaatatattagtaaaactgctcagttctaaaaaa

SEQ ID NO: 80539 - DNA, 1409 bp, Homo Sapiens
  misc_feature (105)..(105): n is a, c, g, or t
  misc_feature (1316)..(1336): n is a, c, g, or t
atagactaggttagcgagctgggtgtgaattcggcacgaggcatgaggaaaccaactggttgtctaacttggaatctactcatggctagaacatattaagcttancttgcagggctcttaggattgctgacaaggtagagtcaggaagacgtctgtggtagtgcattgcagtgatggttgggatcgcacagctcagctcacttcccttgccatgctcatgtggatggatactatcgaaccatccgaggatttgaagtccttgtggagaaagaatggctaagtttggacatcgatttcaactaagagttggccatggagataagaaccatgcagatgcagacagatcgcctgtttttcttcaatttattgactgtgtctggcagatgacaagacagtttcctaccgcatttgaattcaatgagtattttctcattaccattttggaccacctatacagctgcttattcggaacattcctctgtaatagtgaacaacagagaggaaaagagaatcttcctaaaaggactgtgtcactgtggtcttacataaacagccagctggaagacttcactaatcctctctatgggagctattccaatcatgtcctttatccagtagccagcatgcgccacctagagctctgggtgggatattacataaggtggaatccacggatgaaaccacaggaacctatttcacaacagattacaaagaacttcttggctaaacgagcagagcttcagaaaaaagtagaggaactacagagagagatttctaaccgatcaacctcatcctcagagagagccagctctcctgcacagtgtgtcactcctgtccaaactgttgtataaaggactgtaagatcaggggcatcattgctatacactcttgattacactggcagctctatgagtagaaagtcttcggaatttagaacccatctatgagagaaagttcagtcactttatttattttaaatctctctaggatgagtttagaactgtagcagtgcaggtggcttaagtgaagtaactccatatgtaattacatgattatgatactaatcttttaagtatccaaagaatattaaaatacttcaatcctggattcacagtgggaacaagtttctattaaaaggcaaatgctgttacaaatttttggcatctggtaatattaaaaccattttagaaatacactctgtgctcactgtgcagaggaacatcagttttcaaaccaacactgaaattctgtggcatcacatatattgggccttgatgtcatgacagatcaaaatcatttgatatccctttctccannnnnnnnnnnnnnnnnnnnnagtaactgatttaccttgatcacttttcaacttccatattcttcatatagtaaaaggcaaaatgatgaaaaaa

SEQ ID NO: 80540 - DNA, 455 bp, Homo Sapiens
ctcacaccgccctccacccacccctgtgccgtcgagcttccttctccccgggacacctgcccaacccctgtcctgggctgagcctgcctcagaaaaatgagtctgctccaatgtctgctccccactggattttccaggtgagggatcagcccgccctcagccccatgcggctcagctcctcagggtggtccaaagtagcccccagcccacgaccccacccaccccgccacacacctgactgttccccagccatctccgtccacctggggcgtaactgcccatcacctccttcctcccccagcccctgcttctttgctttgctcctcccagcgggggttcacccctaccgctcagtgctgctccgaggggggctgccaggcttagcagtggaaatacagggatccctgttctattccaactccagatcaacaacaataaatgtttgtgtgccatgc

SEQ ID NO: 80541 - DNA, 373 bp, Homo Sapiens
ggcacgaggatgatcaatatagttgggtatggttatctctccaggcggttgatcaggcccagtatatacaactcaagtcaaatgcagctagttttacactttggcccagttcagcaggtgaaactccatctagatgtgtatgtgaccaggatccaactatattgatcattgactagagacatcctgagctgacaaccagccatcatttatcatggactgtgctaaaaccttccagatacgtaaatttacagtagcccttaaaagctctgcctaaccttgcctgaatgcaacatgatttagctgcttgctagacttgtgtctcccaaattgcaatctctaaaaacctgattaaaatgccttttgctactccaaa

SEQ ID NO: 80542 - DNA, 1430 bp, Homo Sapiens
  misc_feature (768)..(799): n is a, c, g, or t
tgcggccgcctacttccaatctccacctttttctcctgtctcttcccataatcctacgagagacccatactagatgtctgtttctctggaagctttatctggcatgatgttgcttattaaagggcttataagagttctcaagggctattaatatcactttagaaaccccatctgttgtcttggtgctggatatttcccatgtctgatcctcaataacacaattcactaaaggccaagcttggctcaatctgattttcccattcttactacttcacagccatgaatgtgattgctcaatccagttggccctgagagcaccttgccctgctgaccttcactgtcacctcggtcttgaatcagagccccaacccaaacactccctgcctgtccctaccccagcctttattctcaccacttgtttaacggcatgaccttttagtttctccattcccagacacccacacacccagacttccttctgagttgcaggtttctccttagatgtccaactagaaatattactaggaaagttacttttcaaagcaggaatgtgctgggaagtaggagacagcaactccctcctctctccccaaaattattggatcaaaaaagaaattccatccatctcagaatctgtgagtcctcctcacataaatctgagggaaaaggctgtgtcactgcatctttgcaggaagaaagagaagcaagagctagacacacttcagaatatatcttagtttcccctttcccagtttaacatgaaaatgnnnnnnnnnnnnnnnnnnnnnnnnnnnnnnnngaagccttcctctcacctcattttgtaaatgaaaaatccctaattcagtgaattcacctagtcactgcaaatgtatctgaatagtgcttggtgtgcttgccagtctgatcatccactcattctactaacatctttttgcacccactctgtcaagctctagcctagacctttagtgtgccatgcagtcacaggtctgaaaagcagcatcatccaaaccttacttaatctctaaaatctcagctggtggacagctcatgattagttcagcccacttcctcccccttagttgagtttgcagcaggacgcaggagataagcacttccaagcaagtctgatttatatatcaaactcggtctccatcccaggccagctgaccctcagagccagcaatgctctgtgcttcctccctgcgtcacggcttggcaagagctgcctctgctgagcagtgtgtgtgatggagacggaggccgctgaaggccgagtgcttgcaggcttgtgaactgccatcgaacacaatccaaactctggaaatgttcctgaccacctaagccctcaacaacgtaatgcctgtatgtgctgtttttcagtaaactccttgttcatgtcaataaagtatccctgaaaaccaaaa

SEQ ID NO: 80543 - DNA, 297 bp, Homo Sapiens
tgagggcctggactgcagttacacagtcctgtttggcaaagctgaggcagatgagattttccaagagttgaagactttgtcttccggcataaggattcccgtgggaaaagcccctccaggagggtggcggtggtcaggctgccgctggcccacgggagcttactaatgatgaaccacccgaccaacacgcactggtaccacagtctacccgtgagaaagaaggttctggctccacgggtgaatctgacttttcgtaaaattttgcttactaaaaaataaaaacatttttaacagtta

SEQ ID NO: 80544 - DNA, 845 bp, Homo Sapiens
ggcacgaggctattttaacactggtggggggcagcgaggatggacagattcctggtgaaaggggctcaagggggccttttgaggaagcaggaggagcaagagccaactggagaagagccagctgtgttgggaggagacaaagaaagcacaaggaagaggcccaggagagaggccccagggaatggaggccactcagcaggccctagctggcggcacattcgggctgagggcctggactgcagttacacagtcctgtttggcaaagctgaggcagatgagattttccaagagttggagaaagaagtagaatattttacaggagcactggccagagtccaggtattcgggaagtggcacagtgtgcccaggaagcaggcaacgtatggcgacgctgggctgacctacacattttcaggcctcacgctgtctccaaagccctggatcccagttctagagcgcatccgggatcacgtctctggggtgactggacagaccttcaactttgtgctcatcaacaggtataaagatggctgtgaccacatcggggagcaccgagatgatgaaagagaactggcccctgggagccccattgcctctgtctccttcggtgcctgcagagactttgtcttccggcataaggattcccgtgggaaaagcccctccaggagggtggcggtggtcaggctgccgctggcccacgggagcttactaatgatgaaccacccgaccaacacgcactggtaccacagtcttcccgtgagaaagaaggttctggctccacgggtgaatctgacttttcgtaaaattttgcttactaaaaaataaaaacatttttaacagttaaa

SEQ ID NO: 80545 - DNA, 847 bp, Homo Sapiens
ccagggtgactgcgggattccgatctgcgccggagctgcgatgctagagcactcttgccacccccaccccacggacgtgttgcagtgatatcagaattttgcgtgcggtttacccgtgtttaacctctttgcgtctcgcttctgaatcgtatccacttgagcatcactagactgatctattttaacactggtggggggcagcgaggacatggttttaaactttaaaatgaaaatgtgaaactaggaatgttgctgagaccccttggacaaacagatttttgcactggggatagaacttgagcaatttctgtcttggcctcgccactgacgtcccttctttcctgtggggacaggatggacagattcctggtgaaaggggctcaagggggccttttgaggaagcaggaggagcaagagccaactggagaagagccagctgtgttgggaggagacaaagaaagcacaaggaagaggcccaggagagaggccccagggaatggaggccactcagcaggccctagctggcggcacattcgggctgagggcctggactgcagttacacagtcctgtttggcaaagctgaggcagatgagattttccaagagttggagaaagaagtagaatattttacaggagcactggccagagtccaggtattcgggaagtggcacagtgtgcccaggaagcaggcaacgtatggcgaccgctgggctgacctacacattttcaggcctcacgctgtctccaaagccctggatcccagttctagagcgcatccgggatcacgtctctggggtgactggaccagaccttcaactttgtgctcatcaacaggtatacagatgg

SEQ ID NO: 80546 - DNA, 782 bp, Homo Sapiens
  misc_feature (35)..(35): n is a, c, g, or t
  misc_feature (116)..(116): n is a, c, g, or t
ccacaaagaatatagatgatagtagatatatttanttaataaaatggttcatgaatcggagactaacaaagttgtcatgtgctcagaattattaattatcgtgtctgcattttctntcgataaaggaagacacacgatgctaatccggaaatcagcaaactttgcattactccctatgtgcgtattttctctttcttcctgtcaccctgaggaaggttcattgccattgtcatcaccatggaaacaacgttcctctccacctgcattatgtactacatgacaggcatcaatctggggaaataataaaattatcacctttgtcagaccataagagtttctccaaaagtggtcagtttggctgggcaatattttctctcatctaacaaacacaatccattgtcatgaaattacccttaggatgagtcttctttaatcaatcatatattgggcggaaaaaacaccagctttgacccgaagtagttgaagagctacttcattcttttctgaagttgtgtgttgctgctagaaatagtcatttgtgaattatccaaattgtttaaattcacaattgaattagttttttcttcctttttgcttgaagcaaacagttgacaatttttaaccttttcattttatgtttttgtactctgcagactgaaaagacaaagtttatcttggccttactgtataaaggtgtgctgtgtccaccgttgtgtacagaatttttcttcattaattttgtgtttaagttaataaaatttatttgtgatgtactgtaaaaa

SEQ ID NO: 80547 - DNA, 519 bp, Homo Sapiens
  misc_feature (143)..(187): n is a, c, g, or t
  misc_feature (379)..(412): n is a, c, g, or t
gtcactgttaaaaatacatttatcattaaaatatattacacatggagacaggatgcatcatatacagtttggaagacttgctggcccagaaaatcccacttgtttcaccgaacactcattttttcagtgattttacattttannnnnnnnnnnnnnnnnnnnnnnnnnnnnnnnnnnnnnnnnnnnntgatgtggtcataggtcactgcagcctcaaactcctgtgctcaagtgagccacccacgtcagcctcccaagtaactgggaccacaggcacgcatcaccacgcccagctaattttttaaaaatgtttctgtagagagggggtctccctgtgctgcccagcctggtcccaaactcccggtctcaagtgatgctnnnnnnnnnnnnnnnnnnnnnnnnnnnnnnnnnngcgtgagccactgtgcctggtcattttaattttttaaatgcctgtattgccctcagaggctgagcaaccagcctcagagttattgagccattatctgggcaggaacg

SEQ ID NO: 80548 - DNA, 715 bp, Homo Sapiens
atttaaatgagatttgtttttttaaatgcatatctctgtatacagactggctgggcccaccccctgcgtgtggccctcccacagtattttgtgcaatgaagccctgctcccagcctttcagagacagggacacagcccctatttggaaccctgatcatcaccagaccctgggattggctatgggaaagcatgccacagccactcgccttcctacccccgcccgccatccccagttgcagggggatctggggactaccagagactctgggaaatggacaaggtggggggccccactctttctctcctgcagtcccgtagctggggcctccttccttctcagggtctccccagcccagtccccttgctcccatcccactcggtgctgttgggtaggggccctgccaggaactgaccagctcagcgaggagccataatgtgcatatgtgcacaagcagggttgggggaggggggtgtgaggggttgtgcccaggtgttgccccctatctcctggggagggtgaggcagggcagggacagtctccagggtcagtccctggatgggtggttacctccccttcctccaccctaagccctggggccctgaaatggggtgggagggcaggggtgggagccctcctagtgggtttggggggttgggttcctgaatgcaccataatcgctgtatgaaatattaaaaagtctaaagtgaaaaaaaa

SEQ ID NO: 80549 - DNA, 1066 bp, Homo Sapiens
  misc_feature (79)..(553): n is a, c, g, or t
  misc_feature (813)..(842): n is a, c, g, or t
aggagacgccgagaactccagaggaaccttgttctatagtctttcagttcgcactcctactgagctcgatttgtgatgnnnnnnnnnnnnnnnnnnnnnnnnnnnnnnnnnnnnnnnnnnnnnnnnnnnnnnnnnnnnnnnnnnnnnnnnnnnnnnnnnnnnnnnnnnnnnnnnnnnnnnnnnnnnnnnnnnnnnnnnnnnnnnnnnnnnnnnnnnnnnnnnnnnnnnnnnnnnnnnnnnnnnnnnnnnnnnnnnnnnnnnnnnnnnnnnnnnnnnnnnnnnnnnnnnnnnnnnnnnnnnnnnnnnnnnnnnnnnnnnnnnnnnnnnnnnnnnnnnnnnnnnnnnnnnnnnnnnnnnnnnnnnnnnnnnnnnnnnnnnnnnnnnnnnnnnnnnnnnnnnnnnnnnnnnnnnnnnnnnnnnnnnnnnnnnnnnnnnnnnnnnnnnnnnnnnnnnnnnnnnnnnnnnnnnnnnnnnnnnnnnnnnnnnnnnnnnnnnnnnnnnnnnnnnnnnnnnnnnnnnnnnnnnnnnnnnnnnnnnnnnnnnnnnnnnnnnnaagaattcggcacgaggtcttcagtgatgtttcagctattcttgatactttgaaacaagagaagagagcaaactcaaaaggtttttcatggcagcatgtgacaagatgatgctgaaaaatttatatggaaattcaaaggatcaagaatagctgaaacatcactgaagaagaacaaagtgggctgaactcgctctactagatatcaagatttataagcaactacagtatttaggacagtgtagtatcggcactgggagagnnnnnnnnnnnnnnnnnnnnnnnnnnnnnngagcccagagactgacttttgtgtatgtggacagtttgtttatgatgaaagtaccactgctatgcactgtgggaaaatgtcctcaaagaatgacactagggcaactgggtatccccatgtaaaaacaattaaccctaatctcacatcacacacaaaaatcaactccatttggggtatatacttaaatggaaggtaaaactattaatataaagtttatagagaat

SEQ ID NO: 80550 - DNA, 791 bp, Homo Sapiens
  misc_feature (625)..(641): n is a, c, g, or t
caaatttttcttgaatgacaatttatttgtaaaataaattgaatgttgaatgtttactacatatcaagtgcacttttaggttctgaagatacacagcaagtaagacagttcttttcaaggagtgtaaatattactatacaattttctgactaaatttacaaagactagtaaaaatagataacttttcaaatgaaaattaatgttcctttaaattctgagttctgtatttttgaaagtctttttttatgtttgaatatattctaatttactgtaatttgccatcgttttatttgatccaaatcatatatattttagattataagaacatctgtattgtataatatttgcaagtaattaaaaaatattttttaaatcctaggtttaggcttcgtaaatctgaatgcggttttttcattaatcttaaataaaatttaagactgaatttacagttgttaaacattcataacatgatcaatttttagtgggttttttggtggggtgtactattttccaccctttttgtatctagttgcaaggagccaagaacaggcaaattattaactcctttattatttcctcctgtctgaaatgttttcaagcagcgtatttgtctgttaaatcatgnnnnnnnnnnnnnnnnngtctatggctatttcctaatgattttatttaggttgttgctcttaatgaggattagtacctgttttgtacatcagtactggctgacttgtcagttactcggataattgatcgagtgattgctctgcagagaaataaataaatgcttaact

SEQ ID NO: 80551 - DNA, 614 bp, Homo Sapiens
ccggctctccaggcatctgttatattccagtggaggtagggaccatcaatcacttaatgaataagacagaacatttcagagagtgacaggggcttcaaagaacttcagacaggctgccgataaaggggctggtgtttgaaagtgccgtctctgaaaaggggtcttttcctaaaccccagggaggagaaaacaacaaccatggacagagctgggagaaccacattccagggggaggcaacgccaagtgcaaaggccctgaagcatgaccattcttggcaaatgcaagatgcaggaagcaggttagcatggccagagcagagtgaggggaatcgtggaaagtgaggttggagtgggtgggaaagggccatgtgagtcattataaggtcttctgctgtcctctgtccctgcaatgaatgatgagctcccagggacagcgccctgcagccagaaccaggtgcaagcagagtgctcagtatcaatgtggaaccagtggtggctttcttctggccagccagcctgagtctccctccacaggctctgtgcacatccaggacctttctcccatcagcccatgccaggacctggccaagaacattctgtgctggagatctcac

SEQ ID NO: 80552 - DNA, 798 bp, Homo Sapiens
  misc_feature (54)..(54): n is a, c, g, or t
  misc_feature (61)..(61): n is a, c, g, or t
  misc_feature (82)..(82): n is a, c, g, or t
  misc_feature (98)..(98): n is a, c, g, or t
gagccagaaatcgcacgaggctgtatgaatacagtccatggaccctgctccatntaatgcntacaacctcccgtccccctgntgcaggatgttgttgntaccctcgggaggctctctgagactgtgtcttggtcttagatgctgcacatagtacctggtgctagggtctaggggctgcccaaagcccagcaggaacagctactactcatcctgcagaggccttggcccagaccagctttccatccaaagcctcacctggtttccatgtccatctcaacagtctggccttcctgtgactgtagcctggcagccacaccctcagtaatcccgcacagtgagtccagcttctctgggagcttggccttcagttagcccagtccatgagagggcagggtaatgaggaggagtaaaggacctatcttctctgtccacataaggaagttgggaccacaaggtcttttatctccttgttactccccaaccccaccataacctcctactcagcacacagctttatcctggtagattataaggtgagcttccagaacctggcaggaggctggtgtatccccctgcacagacggaagtgtatctgaatgttgtgtatgtggctgatatggaagacatacatgtatgcaatccatcagcgtttaaagaagaagattggctccagttctgaggaggaggaggaagattacagatctattctgagtattttttagagagttaatatttatatttttagtaattttctggtagaaggaaattgcacaataaaatgatttggtttgaaaaaaa

SEQ ID NO: 80553 - DNA, 911 bp, Homo Sapiens
gttttttaacatgggtgagggaggcgacctgatcaggggaggtgggggtacacatcaatttgagttgttcaggctactgaaacattaaaatgtgaattcccaaacttttctttttggctttgtcagggaaaagaaaaatatctttataaagaaatctttggaaattaggagaaggaatttcaggtgggtttaagtcagagctagttccccaacagaaagatcatttgaaaccagtttttatcccttctctttccttccctttccctaaatcaaatcaatattaattgtgccttatttcacttaacatagacttgaattatttttagggaaagcccctataatgaattcagaaatcactacaagcagcattaagactgaagttggaatattctgttgaccataaaaccttgatatcattctgtgtatatagaatgtaaaaggaatattacagtgttaactgccatatatgtaatatacacaaactcaattagcattgtaatggccaaatgcattcccccatgcttttctgttttcaaaaaaattgaaaaacaaatcaactcttatccccaacagctgcctaattttaggagtctgaccctccacatctcactggtgtgggtgcatggggctgtggagtgggtgtcagtatggatgtgtctgaatgtgtgaggccttggaagggactctttctgcagatactgtaaatacaagtaccattttaataaagcatgtacaataaaccaaaataagcttgagttggactttatatacagaactgtaagccagtgcattatgatacaggttgaagattggtgatttgattcaagataaggaaaaatcttggaaatgaaaagcaggcactggttaaccaagttgtacacattgtaccacattcagcataactttaggaa

SEQ ID NO: 80554 - DNA, 735 bp, Homo Sapiens
ggaattcggcacgagggtcaccggaggtatagctgtgcccactgccgcgctcacctggccaaccacgacgacctcatctccaagtccttccagggcagtcaggggcgtgcctacctcttcaactcagtggtgaacgtgggctgcgggccagccgaggagcgggtgctgctgaccggcctccatgctgtcgccgacatccactgcgagaactgcaagaccactttgggctggaaatatgaacaggcctttgagagcagccagaagtacaaagaggggaagtacatcattgaactcaaccacatgatcaaagacaacggctgggactgacccccgctcccccgacgcatgtggctccagcccggcctggccgccagggagcgccactggcttcccgccacccgaagggagctctggaccctcagagcccctgcagaggacggatctagctcctgtatatatattttattgcatgcactgtgaccttggggggagaacagaagggggacgacgcccccgcacctcctgcgatctggctggcttggatctcgtttttaacccgttcctgccccacctgccctatagttatggcctgtgttctgctctcctggtcccagtgcaccgtctgctctgtgaactcctcccaccaggcccttcttaccccacgcgtgtctgtccccctcgttctgtagcgtttgtacataataaaacaatggagtggagacaaaaatagtaaaa

SEQ ID NO: 80555 - DNA, 1019 bp, Homo Sapiens
  misc_feature (852)..(864): n is a, c, g, or t
ctctaggtgcgaggcctggtgtgaatcggcacgaggcacgaagtggttgctttttttagttccggcaatgagttgcgccggggcggcggcggctccccgcctttggcggctgcgcccaggggcccggcggtccctctcagcttatggaagaagaaccagtgtcagatttcgcagttcaggaatgactttagacaatatcagtcgggcagctgtggatcgaataatccgggtggatcatgcaggcgaatatggagcaaaccgcatctatgccgggcagatggctgtcctgggtcggaccagcgtcgggccagtcattcagaaaatgtgggatcaagaaaaggaccatttgaaaaagttcaatgagttgatggttacgttcagggtccggccaacagttctgatgcccttgtggaacgtgctggggtttgcactgggggcggggaccgccttgctcgggaaggaaggtgccatggcctgcaccgtggcggtggaagagagcatagcacatcactacaacaaccagatcaggacgctgatggaggaggaccctgaaaaatacgaggaacttcttcagctgataaagaaatttcgggatgaagagcttgagcaccatgacataggcctcgaccatgatgcagaattggctccagcctatgccgtcctgaagagcattatccaggccggatgcagagtggcgatatatttatcagaaagattataaagtgtgtccagttttgcctgtctataaaagatgatagtaatttaccaagtgacatttgcagagaaacaggtgtacagttatcgttgtacttttgtacaatgtgaattttgttaataaattataaggtttgnnnnnnnnnnnnnaaactctgcagtgttgattttttctctggggttgttttttctgcccatgagacacaggtcaccagcctttgttcagttacagcaaacgaagctggggccttggttgggctcatacttaattttcccttatatacatggttttcttttacatggat

SEQ ID NO: 80556 - DNA, 651 bp, Homo Sapiens
aggacagattctgcaggaagcccagaacctcatggccctcaccaatgtggacaccccattgaaaggtggacttaataccccattgcatgagagtgacttctcaggtgtaactccacagcgcacaagtggtacagactcaaaacacagttctctctactccattcaggactccttctaatggagctgaagggctgactccccggagtggaacaactcccaaaccagttattaactctactccgggtagaactcctcttcgagacaagttaaacattaatcccgaggatggaatggcagactatagtgatccctcttacgtgaagcagatggaaagagaatcccgagaacatctccgtttagggttgttgggccttcctgcccctaagaatgattttgaaattgttctaccagaaaatgccgagaaggagctggaagaacgtgaaatagatgatacttacattgaagatgctgctgatgtggatgctcgaaagcaggccatacgagatgcagagcgtgtaaaggaaatgaaacgaatgcataaagctgtccagaaagatctgccaagaccatcagaagtaaatgaaactattctaagacccttaaatgtagaaccgcctttaacagatttacagaaaagtgaagaactaatca

SEQ ID NO: 80557 - DNA, 652 bp, Homo Sapiens
  misc_feature (409)..(409): n is a, c, g, or t
  misc_feature (559)..(559): n is a, c, g, or t
gtacatgcacagctcagagcgtcctagcctgatacagggcctgcctggtgcctcctggaggcctggccacctggggctgtcacttgaagtcaagagtcctggtgttagggatgtagagggattgggtctggcgactgcgtcgtggcgtagtgttgaggacgtccacgctcttgcggctggaacgcaccacgtctgccacaaagctggtgcactcactgcagacatccttcaggacacagccgtgggagtagatgtgggggaacgcctcctccacgctctgccactgtggcccttgcagagactgaaagatgtctcttctctggattggcgcggctttggcagctgataccctctgaggactctcaaagcccagtgtgtagacaggggatgtgtccaaatttcttagaanggcatcttcatctttatgctacaggaagtgcagacggctcttcttgcagaagagacagctggcccgccacgagaacagcgggaacttggccccgcagcagcagcaaatcttccccttcttcagactgctgaagagctccttgttctgcanaaacttttccatctcgggcttcaccagcacacggcgcaagtccatcacctcttccacagtcagcgccaggctctccacggggtggctgaactc

SEQ ID NO: 80558 - DNA, 853 bp, Homo Sapiens
  misc_feature (601)..(617): n is a, c, g, or t
ggcacgaggttcaactccaactcaaataaaaccgcaataagacacagtgttctatctatcagagtagcaaagtttaaggagttctacactgaggtggcaaggaggcaggcactcgtgcaggatagccaactggtacacattctgagggctgggcaacatctgtccagattcaatggacacccataacaaaacgccacaggcagaaagctgcttgttgcatcaatgcttgaaagaacagagggctggaaaccacctaaatgcccatcagctgggggctgggaaataagttatggtagaactatacaacaaccatgcagccacgaaacagagaagctctttattactgacatggaacatcaccaaaaaatacactgagaagtagaaaatataagtatttgcatttgatgcacagaatacttctggaagaatacataaggtcatattgacagtaacataatagcagctgccagggatgaggtctgagcctctgggaaacaggggaggaagaagatattttgttatcacttatatctttttctgtcttttaaattttatactgtatacatatattatctcttcaaaattaaataactgtttaacnnnnnnnnnnnnnnnnngctagtaatcaaatggagatgaggtaggccacacgctccaagaggaggaaaaataccttgaatttttttccaggagcgccagggtccatggcaaagctctaccctgggccagctgcccccgcacttgcacctgggcacaggaagttgatgttcgcagaattaagaactttttttgtctcaatgcgtgaatggttaaagaaactgtgttaaactatggtgcctccatgctactcagc

SEQ ID NO: 80559 - DNA, 1150 bp, Homo Sapiens
  misc_feature (42)..(59): n is a, c, g, or t
  misc_feature (660)..(660): n is a, c, g, or t
  misc_feature (1041)..(1075): n is a, c, g, or t
tttttttgggtattatacattttatttaaagacttcaaagtnnnnnnnnnnnnnnnnnnggtacagaaatagattacattatgatgaccacagtagtattctacatgacaaaaataaaaacagatttaagtaaatgtaccggcactgaacaagcatttacttaacatccaatccaggctgcatatgcacaaaatgatctgaccacatgcttatgcaaaataaagtttttcttagaaagccaaaattccaaccattctgactgtccgctgcctattcccctgttgagtattttgagcgaacttctatagaatataagaacaattggcatggcacttaaagactgcaaaaaacagaacacaattaaaaacatttataatgcatttctgtataaaatacacaccgtaaatcttattagttaaaaaaagatttaaaaacaaaagaccaccctgaataatggttaaaacctcatcatagaaaaatgctcatcattttgtacactgaaagaaactactgagaggttttttgggggcctggtgggaaggtagatacctaacttaaagattcattcaaaatttgctttaaattgtgggtaataactcactgcttaccccttctcaaaatgttttatcatgaatactctaatatttaaccacaggacanacataaagaataacctgaagaaggtatttctcaaagtgaggtcgaaggccccaaaagaagtctaaggtgggctcactagtgtgcattttaaaccaacttcctaggtgattatttcacattccaaaatctgagaactaatgccctatgggaaacagcaccacttaaaagcaaggccataaacatatttctgacatgagatacagaattctaagtttatgatttgaagtgaatactgctttttgttttaaaacaagtttcaggtgttaagagaaacatattaaataaacatgtggatgtatataaacattttcctttgacgttttcattgctcccggccgtaatggccgaattcccgggcatatgtccggtaccgtcgactgnnnnnnnnnnnnnnnnnnnnnnnnnnnnnnnnnnncgccgcttcctcgctcactacttcgctgcgctcgttcgttcgctgcgcgagctagccctatagtgattatcagtt

SEQ ID NO: 80560 - DNA, 590 bp, Homo Sapiens
tcctgaggctggtggtactaaggaagttcctattaaagaaatagttgaaatgaatgaaatagaagaaggtaaaaataaggaacaagcaataaacagttcagagaacataatggacatcaatgaggaaccaggaacaactgaaggtgaagaaatcactgagtcaagtagcactgaagaaatggaggtcagaagtgtggtggctgatactgaccaaaaggctttaggaagtgaagttcaggatgcttctaaagtcactactcagacagataaagagaaaaaagaaattccagtgtcaattaaaaaagagcctgaagttactgtagtttcacagcccactgaacctcagcctgttctaatacccagtattaatatcaactctgacagtggagaaaataaagaagaaataggttctttatcaaaaactgaaactattctgccaccagaatctgagaatccaaaggaaaatgataatgattcaggcactggttccactgctgatactagcagtattgacttgaatttatccatctctagctttctaagtaaaactaaagacagtggatcgatatctttacaagaaacaagaagac

SEQ ID NO: 80561 - DNA, 2046 bp, Homo Sapiens
  misc_feature (42)..(42): n is a, c, g, or t
  misc_feature (865)..(898): n is a, c, g, or t
  misc_feature (942)..(967): n is a, c, g, or t
  misc_feature (1306)..(1341): n is a, c, g, or t
  misc_feature (1448)..(1473): n is a, c, g, or t
  misc_feature (1902)..(1923): n is a, c, g, or t
ctttggaagttactccaaagaatgagcacaaaacaatcttanagacactgaaagatgagcagacaagaaaacttgccattttggcagagcagtatgaacagagtataaatgaaatgatggcctctcaagcgttacggctagatgaggctcaagaagcagaatgccaggccttgaggctacagctccagcaggaaatggagctgctcaacgcctaccagagcaaaatcaagatgcaaacagaaagcatgtcatggaacttcggcaacagccaaaaaacttaaaggccatggaaatgcaaattaaaaaacagtttcaggacacttgcaaagtacagaccaaacagtataaagcactcaagaatcaccagttggaagttactccaaagaatgagcacaaaacaatcttaaagacactgaaagatgagcagacaagaaaacttgccattttggcagagcagtatgaacagagtataaatgaaatgatgccctctcaagcgttacgggctagatgaggctcaagaagcagaatgccaggccttgaggctacagctccagcaggaaatggagctgctcaacgcctaccagagcaaaatcaagatgcaaacagaggcacaacatgaacgtgagctccagaagctagagcagagagtgtctctgcgcagagcacaccttgagcagaagattgaagaggagctggctgcccttcagaaggaacgcagcgagagaataaagaacctattggaaaggcaagagcgagagattgaaacttttgacatggagagcctcagaatgggatttgggaatttggttacattagattttcctaaggaggactacagatgagattaaattttttgccatttacnnnnnnnnnnnnnnnnnnnnnnnnnnnnnnnnnnttcagaccctgcaaaaccacattccccattttaacgggcgttgnnnnnnnnnnnnnnnnnnnnnnnnnntactgacatcgtgtcggactagtgcctgtttattcttactccatcaggggcccccttcctccccccgtgtcaactttcagtgctggccaaaacctggccgtctcttctattcacagtacacgtcacagtattgatgtgattcaaaatgtttcagtgaaaactttggagacagttttaacaaaaccaataaaccaacaacaaaaaaagtggatgtatattgctttaagcaatcactcattaccaccaatctgtgaaagtaaagcaaaaaataataataataaatgccaagggggagagagacacaatatccgcagccttacaccttaactagctgctgcnnnnnnnnnnnnnnnnnnnnnnnnnnnnnnnnnnnncatcaggaataaaaaaaacaaagttttattaaagattgaaaatttgatacattttacagaaactaattgtgatgtacatatcagtggtgacatattattactttttnnnnnnnnnnnnnnnnnnnnnnnnnnaaaaaatccttgtgatttttaagaacctgctggcaagagtttaacttgtcttcagcatattctgattgtatcataatcattttctgctgttgcagaggatgtgaatacacttaaggagctcacagaatcccagtagcacaaattgggctttggcaaatcgtgtattttgtgtatagaaggaatttaaggagaggtattacttattttcatattgtattttaactgtttctctgatcaaatttttttacttcctcctcctgttcctccccacctccctccttttccagttcagtatttggagttcaacactgtctctcaatcagatcatcttgatctttttctttatctcccttccccttcctaagtcccatttcttggtcataaatattgcattattcacactttcaaactgtgtattttcttacaatnnnnnnnnnnnnnnnnnnnnnnggctttacttcttttgcatgcactttaaaaacaaaacaaaacatttttcaggttccaaggaagagcatgataactgtcagagcttttaattatatttgtaaataaaagtgttcatcacaaaaa

SEQ ID NO: 80562 - DNA, 666 bp, Homo Sapiens
  misc_feature (74)..(126): n is a, c, g, or t
gccgcattccctcactggctgtgtatttattgagtggttcgttttcccttgtgggttggagccattttaactgnnnnnnnnnnnnnnnnnnnnnnnnnnnnnnnnnnnnnnnnnnnnnnnnnnnnngtaaagcaaacagaacccaatgcctccctttgctcctggatgccccactccaggaatcatgcttgctcccctgggccatttgcggttttgtgggcttctggagggttccccgccatccaggctggtctccctcccttaaggaggttggtgcccagagtgggcggtggcctgtctagaatgccgccgggagtccgggcatggtgggcacagttctccctgcccctcagcctgggggaagaagagggcctcgggggcctccggagctgggctttgggcctctcctgcccacctctacttctctgtgaagccgctgaccccagtctgcccactgaggggctagggctggaagccagttctaggcttccaggcgaaagctgagggaaggaagaaactcccctccccgttccccttcccctctcggttccaaagaatctgttttgttgtcatttgtttctcctgtttccctgtgtggggaggggccctcaggtgtgtgtactttggacaataaatggtgctatgactgccttccgccatccccaa

SEQ ID NO: 80563 - DNA, 818 bp, Homo Sapiens
aggcaaagaactgaaaacagaactacaatttgacccagcaatcccattactggatatatccccaaaggcaaataaatcactctaccaaaaaaacacatgcacttacatgttcatcaaagcactgttcggaatagcaaagacatggaatccacttaggtgcccatcagtggtggaatggaaaaagaaaatgtggtacagatacaccatggaatactacatagccataagaaaccaaaatcatattctttgcagcaatgtgggtgcagctggaggccattatcctaagtgaattaacacagaaacagaaaacttaatgccgcatgttctcacttataagtgggagctaagcattgagcacacatggacataaagatgggagcagtagccactggggactgctagaagggagaggaagggaaggaggcatggactgaaaaactacttattggctaatattctcattacctgggtcacgcgatcatttgtactccaaacctcagcatcgtgcagtaatatgcatggaacaaacctgtgcatgcaccctctggatctaaaataaaaggcaaacatgttttttaaatgaatgtttgctctcaaaacagtttccaggcagctgtgaacttttcattaagtgtttaatcttgaaaataatttatttccattttatcctctatataaatgaccatttcttaggtcctagctgttaagcctaaattggggtagactgaataatggcaccccagatatgcccacaacctatgaatgctaccttttatgacaaaagggactttgtagctgtgcatgatattgtgaaatat

SEQ ID NO: 80564 - DNA, 796 bp, Homo Sapiens
  misc_feature (177)..(188): n is a, c, g, or t
tttggccttttttgactttggatcttaactattttcaactatctttttgcttgtagaggcattctttggttcctaagaggtattaaagtgagggattactaacggtgaagctactttggcatgcaggatgctgctgtgtacatatatactagtgtatatgaatataaacccttgtcnnnnnnnnnnnnaataaaagtgagttttcatctgaggtgcttggaatgattcacaaacaacttggcacactcttctggcctgtttacccccattgaaatgttattttataaattacatcttaattcacagaattttttcttgatagtataagaaattctcaaatattttctataggggcacacaactttctatttaaatgtctaagaactaaattttctgtcgccttccgaaatcctattcttaaaattaaaaatataggaaagcacaaatgtttccttcattaggtcaattttttcactaatttcttcatttaaaaagtgaattcttttcctgtttttcctcatttcatccaatagtttccatttctactaacatggtgtggcagaaagaacatgggttttggaactagataaacctgagtttgaattttgattctgtcactgtaggtagctatgtggccttggctcagtttctcatctctaaagtggagacaaaaatacccatggtttgggtggctggtcagattaaataaaaaatatatgcacaaaatttggtacatggtaggcattcaacatgttaatgcatttctcactacatcaagtgtttcaaacctcttgcc

SEQ ID NO: 80565 - DNA, 659 bp, Homo Sapiens
cactagagtcagatgcatcttaatcagtgtgctaacttacaatccattggagaaactaacaatgtcccaatattccttgatttcggactgggaataattctgacaccatatataaaagaagtttgaagcaataaatgggaaacagtgttgtttcctgagccttagaagaatgagtttcttataagccaatgtgcatttcaatttactttccctagaagtaattgcatttatagatttttaggacttttcctagaactacaagggtgcaagtaccaaatgtgctgatggtaatattataaagatgctctacatgcacactcaattacgcccacaccagccatgcaaaattaaaccccggtaagagagtgacagtgatatccaaggtatccactactaccgatgctttaagatgttgtttaccatttataccttctgtgaaaaatagaaggtattttaagaaaagtaactttggtgatctaataaaagggtttggcaaactacaccctgggtccacatttggtctaccacccgcttttgtgctgcctgcaagctaagactaatgtttacatttttaaatggttggaggaaaaaagaaaacttatgacatgaaatttatatgaaattcagatttcagtgtccataaataaacttttattggg

SEQ ID NO: 80566 - DNA, 666 bp, Homo Sapiens
ctttcgcacaccaggttggtgaatcagaatgcaagcaggtgggcaagttttgatgtcacccccgttgtatgcggtgactagcacaggcacacgccaaccatggattcgtggtgtaagtggcccacttggagtagaaacaaggtgtctccaagagacatgttaggataagcaggtctttgcaccaagatgaacacagctggtcacagataaggccattgctagtaacttttggccatgatggaaaagggcatcctctccacaaaagagaaaaacgtcaagccaaacacaaacagcggaaacgccttaagtccagctgtaagagacaccctttgtacgtggacttcagtgacgtggggtggaatgactggattgtggctcccccggggtatcacgccttttactgccacggagaatgcccttttcctctggctgatcatctgaactccactaatcatgccattgttcagacgttggtcaactctgttaactctaagattcctaaggcatgctgtgtcccgacagaactcagtgctatctcgatgctgtaccttgacgagaatgaaaaggttgtattaaagaactatcaggacatggttgtggagggttgtgggtgtcgctagtacagcaaaattaaatacataaatatatatataattatttatttta

SEQ ID NO: 80567 - DNA, 1153 bp, Homo Sapiens
gtctcattcgcggtcgttcttaataatccgtttgtggtgcccctcttacgggtacctcactgttctttgcgcctgcgactttgcctgtgcccacggtctttccttctatcccacagtcggccactcttcgtccgttcggcattctcctgcgctgttgggctccttgccttcttgggttgcctcccgccatccatttgtcggcctggtgtgcctgtgggaagttgtggtaggtgctccccggtgcgcgctgctgtcgtctgctatccccgtgggaagggagccttctgtcgctgttgtcatggtggtcccgttccactccatgtcgccctattgacaatgttctgtgtctcagttcgatcctcgcggctttttccgtttttcgtaagttctctctgttacgtgcgcccgatcacgcgcgcatgttgccctccgccggggttagcccccatgttgccccctgttagttgtgtgggctgatccactcgcgacttctggttgggctacttaaaaggaccaccgtcttcgttggttggggttcttgccctctgcgccagggggttccgtttcatgcgtgcaaagtttcgcgggagcgtcgggtgcttgctcacctgggtctctgcgcttgtgcactgttgtgaggtcaattgcccttttgcgaggctacgagatgatgcagtagggtccccttttggaaggaggtggggatcatgccacgactttccgggcccaatttccaagaggtgtgaatccgccccagggtcccattgcttccaattccggtgcttaaggcgtagtgcacgggaccgcaagggttgtcagacgcccttcggggtgcatattagggttttgaccagaagacacaagcaacccggtctcggcgggtttgtgctctttaaggattgtggttcagttatttttcttcgtgcttgtggtccttttgtctctctgtttttggtacagaacatggctgccctcagacagtctctgctctttctctcagtccgagataggccaggaaggagtgtttgggtgaggggatgctgggaggcgcagtctgaggtcggggagggtggaatgtgagatccaagtggttcttggggtataacattgtcaagggaatgagatgggcaaaatctgagagacaaaagacaaa

SEQ ID NO: 80568 - DNA, 1151 bp, Homo Sapiens
gggccctgacgcgacccgcgccgcgtccgcggcggggagttgttgctgccgcgatgctggtggcggcggccgcggagcggaacaaggatcccatcttgcacgtgctgcggcagtacctggatccggcccagcgtggcgtccgcgtcctcgaggtggcctcgggctccggccagcacgcagcgcacttcgcgcgggccttccccctggccgagtggcagccgtcggacgtggaccagcgctgcctggacagcatcgcggccaccacgcaagcccagggcctgaccaacgtgaaggccccgctacacctggacgtgacgtggggctgggagcactggggcgggatcctgccacagtcgctggacctgttgctctgcatcaacatggcccatgtcagccccctgcgctgcacggaggggctcttcagagcagcaggacacctgctcaaacccagggccctgctcatcacctacggggaacccagaatgggggcttcgggacacagccctcctggaggacctgggaaaggccagtggcctgctcctggagaggatggtggacatgccagccaacaacaaatgcctgatcttccggaaaaactaagcccctccttcacccccgcacacctgcatccctgccggaggctctgtgaggcacgaaccctgcctccctaggccggaccttgtggacgacagccccacccagtctgtgctctcagccgctggccgaagggcccagcctgctcagaataaagcatgtcctgctgccggaaacaggcgaaaaacctcggaggcacaatgcagggccgggaaaacgaggtacgaatgggcatgggcaaagcgggtcccgggacccaggttcctggtcaccaggggtaaacttgcgggcccccaaaaggagccggaataatccggaaaggcagggtaacgtacaacacccggcgagaagaacgcagcgaacacggcgcggacgagcagcagagaaagcaagagcaaagcccacacacgcagaagaacagaggacaaaagcgaccaccagcagacccagcagcgggacgacgaaagacgagagcacaggacacaacagaacgaaaagacacacgcgcagccaacacgacagaacagaagagagaacacacacacaagagcaacaca

SEQ ID NO: 80569 - DNA, 1480 bp, Homo Sapiens
  misc_feature (524)..(571): n is a, c, g, or t
  misc_feature (579)..(600): n is a, c, g, or t
  misc_feature (623)..(661): n is a, c, g, or t
  misc_feature (715)..(725): n is a, c, g, or t
  misc_feature (776)..(793): n is a, c, g, or t
  misc_feature (925)..(938): n is a, c, g, or t
  misc_feature (958)..(958): n is a, c, g, or t
  misc_feature (1056)..(1056): n is a, c, g, or t
  misc_feature (1133)..(1133): n is a, c, g, or t
  misc_feature (1137)..(1137): n is a, c, g, or t
  misc_feature (1259)..(1259): n is a, c, g, or t
  misc_feature (1307)..(1307): n is a, c, g, or t
  misc_feature (1402)..(1402): n is a, c, g, or t
gggcgtccgcggcggggagttgttgctgccgcgatgctggtggcggcggccgcggagcggaacaaggatcccatcttgcacgtgctgcggcagtacctggatccggcccagcgtggcgtccgcgtcctcgaggtggcctcgggctccggccagcacgcagcgcacttcgcgcgggccttccccctggccgagtggcagccgtcggacgtggaccagcgctgcctggacaggaacccagaatgggggcttcgggacacagccctcctggaggacctgggaaaggccagtggcctgctcctggagaggatggtggacatgccagccaacaacaaatgcctgatcttccggaaaaactaagcccctccttcacccccgcacacctgcatccctgccggaggctctgtgaggcacgaaccctgcctccctaggccggaccttgtggacgacagccccacccagtctgtgctctcagccgctggccgaagggcccagcctgctcagaataaagcatgtcctgctgccgnnnnnnnnnnnnnnnnnnnnnnnnnnnnnnnnnnnnnnnnnnnnnnnngaacctcnnnnnnnnnnnnnnnnnnnnnncaagggcgttaggtccgccaaannnnnnnnnnnnnnnnnnnnnnnnnnnnnnnnnnnnnnntcttttctcagacacccgccgcaggggaaaaaggacacccgcccttttgggcgnnnnnnnnnnnggcgtttcgaagaaacttttttattaacacccgccttcggttttgtggcgnnnnnnnnnnnnnnnnnntggagttataaggggagacaaccggtggggcgccacatagcggtgtgtgtgtgtccgctataccgaaatacacacctccgcctcagcgccgcaacagaagacacacacagctggcctctgtgcagaatagtnnnnnnnnnnnnnnaccacgtaaaataaataaanaaacacgccccccgccggcgcgcggtgggcggaaacaacaacgcgcaagagtagttttatttttttatgaagcagaatcgacgcccccccgcggccanagtggttagaggcgcccgtcctcgctgagaagtgtatgtgcacagtagacacgggggcggatttctcctcacggccncgcncggcggagggaggtttgtttctatcgcgggccgggctcgtttctatatagtatgacccacactcgttttcactcgcccccgcgcgccccgcgcgatagcaatcctctgcccagcgcgaggcnacaacaagccgtttgtgtggtaagcttatattatcatccatacagcantccgtctccgcgccgccaccacgcgccgcggggcgagatatcatctctaacaaaaacacaatcgcgaggctgtacggagagatagcatgatctangcaccacccgctactccgcgcgcccggtagataatagatatcgcctacgtgcagtattgtagctgagagagacaaaaa

SEQ ID NO: 80570 - DNA, 543 bp, Homo Sapiens
gggggcggggagttgttgctgccgcgatgctggtggcggcggccgcggagcggaacaaggatcccatcttgcacgtgctgcggcagtacctggatccggcccagcgtggcgtccgcgtcctcgaggtggcctcgggctccggccagcacgcagcgcacttcgcgcgggccttccccctggccgagtggcagccgtcggacgtggaccagcgctgcctggacaggggctcttcagagcagcaggacacctgctcaaacccagggccctgctcatcacctacgggggagggggtgccctttcattctccaaaccccagcctgcaagtctgtcccaggctctctgggaaataccccgaccttggtccagtgggctgtgtccccatgcccacagacctatgccatcaatgggaagatctccccccagagcaacggtggactttgacctgatgctcaaaatgcaggaacccagaatgggggcttcgggacacaagcctcctggaggacctgggaaaggccagttggctgctcctggagaggatggtgg

SEQ ID NO: 80571 - DNA, 804 bp, Homo Sapiens
  misc_feature (710)..(710): n is a, c, g, or t
aaggagcgaggcctgggtggcgaattcggcacgagggcggagcggaacaaggatcccatcttgcacgtgctgcggcagtacctggatccggcccagcgtggcgtccgcgtcctcgaggtggcctcgggctccggccagcacgcagcgcacttcgcgcgggccttccccctggccgagtggcagccgtcggacgtggaccagcgctgcctggacagcatcgcggccaccacgcaagcccagggcctgaccaacgtgaaggccccgctacacctggacgtgacgtggggctgggagcactggggcgggatcctgccacagtcgctggacctgttgctctgcatcaacatggcccatgtcagccccctgcgctgcacggaggggctcttcagagcagcaggacacctgctcaaacccagggccctgctcatcacctacgggccctatgccatcaatgggaagatctccccccagagcaacgtggactttgacctgatgctcagatgcaggaacccagaatgggggcttcgggacacagccctcctggaggacctgggaaaggccagtggcctgctcctggagaggatggtggacatgccagccaacaacaaatgcctgatcttccggaaaaactaagcccctccttcacccccgcacacctgcatccctgccggaggctctgtgaagcacgaaccctgcctccctaggcccgnaccttgtggacgacagccccaaccagttctgtgctctcagccgctggccgaagggcccaccctgctccaaaataaagcatgtccctggctgccc

SEQ ID NO: 80572 - DNA, 1187 bp, Homo Sapiens
ggtatctttagtaaactatgactacatttatctgcaatttttaaaattttccatatctttgtcattcattgtgtgtttgtaaataaggccgatagaatgtttcctataaatggtttgtactagtacattagtgttaaaccagaactgaaatttaaacatatatatatatgaggatgtatatatggcatcatcagcttatttagaactgatggccataccttacaatcttgttttacccaaaattaagctattggggttgaaagctaaaaggagcacttttgtagaatagcaacttttcttttcctctttcttgattgtatggtggggtggtgacctatttttacaaattatacctaatgagtaaaattagtgtaaagtgataacatgcttctacctgtatttctagtgaccctttagcggcaggtatttatacctggtatttatgatgcagtatataagtggtgaacaataactgacagtattgtgcttgctgtacatgtctggtcttttgaaacagattttagtaagcattttccagaggtaaaactgtgtccttattctaattttattcctagggcaaagtagacagggattatttccttgaatctatttccaaattaatatttttttctttggtatttctacactttaaggccatttggtgcaatttagaaagtgttggcctcccttccgctagccacattcaaaattaacttccaaaacctcaggaacagtacaaagaattgaaaccctcaatatggcagcacagccggctgtagtgtatatttagggtacaccaaatcaggtattcctggtggtcttgtgcactttaatttctgttacaatgagttaagaggatgaggaagaaatctacttattaacacttactgcagaaatgtctgcattattccgtttgttttcttattattttacctctccaaacatcttcctgtgcagatcactacttcatagttgccaaattttaaaacacttaactgctgaaattcagtgtcagcaaagtgatattacgttgttctgtttctaattaaccttagcaaatgtacataatgtcaaaacccaatagtatttgacagtacttatgtatacaatgtttgataagcatttttaataagatttgtatttttaaatttagtatataataaaaagatgtgtttcagtgtgaaaaa

SEQ ID NO: 80573 - DNA, 473 bp, Homo Sapiens
ggcacgaggagctataaaatctaagaataattttgggtgaggtgtttataaaggaaaaatatgtagtaagtgttgaatcagtataacatcccttaaatctttggagaggtttacaaagcatgttggcctccgtcatagattcctctgttagacccagcatcacaaaagctgtactcattttggtattcctacttgttagcacagtattgggcacataggaagtccatcgtgcttataaaactgaaccgtaagctagcctttgctttttgttttaattttccattgagttttgattcctccactaaatctgtgcctttccttcagtcattttgttttcatttcagtgaaacaaatataaatcattcacttcctagttccttctcccttccagctctaattcttgcataatctctgtccccagggtttactgcttctcaaattaagaaaatgaatatcctaaacacacacacacc

SEQ ID NO: 80574 - DNA, 860 bp, Homo Sapiens
  misc_feature (179)..(441): n is a, c, g, or t
tggaccaccgcacctggccaaaacaaagtttttaaaagattcctttaataaacatttacaataacatcaagaaatataaacgacatagcaaatatgtgaaagccagccagactctcaatggcatccagaaacataaactacatagaaaagacatgaaagccagccaggcttggcttcgnnnnnnnnnnnnnnnnnnnnnnnnnnnnnnnnnnnnnnnnnnnnnnnnnnnnnnnnnnnnnnnnnnnnnnnnnnnnnnnnnnnnnnnnnnnnnnnnnnnnnnnnnnnnnnnnnnnnnnnnnnnnnnnnnnnnnnnnnnnnnnnnnnnnnnnnnnnnnnnnnnnnnnnnnnnnnnnnnnnnnnnnnnnnnnnnnnnnnnnnnnnnnnnnnnnnnnnnnnnnnnnnnnnnnnnnnnnnnnnnnnnnnnnnnnnnnnnnnnnnnnnagaagaaaaaaagagatatgaaagcctatatattgaagactaccaagtactgcttagagcagttaaagacctttggaatagaaaatgtttcttcttgcatttcaagattgcttttgttttggggggacacactattttttaggaatatgaagttcttcttaggcattcctgtaaaaaaggccacttcttgataggattgtattgaatctgtgggttgctttgagttgtatttttatcttaaccatgttacaacttccaacccatggacacaagatgtctgtccattgatttaggtcttcctgaatctcctcgagcaatgttctgtagttgtctgtgtacaagtacggcaccttcttgaacaaatttattctcaggcatattattcttacaagtgctattataaatgaaatcattgtgtc

SEQ ID NO: 80575 - DNA, 556 bp, Homo Sapiens
  misc_feature (64)..(72): n is a, c, g, or t
gaattaaacaacaaacaaaacgcaaaacccagtatatgctattcaatgatcttagaagtactgnnnnnnnnngacgttttttaaataaatacagaaagcatcttgatctcttgtttgtgaggggtgatgccctgagatttagcttcaagaatatgccatggctcatgcttcccatatttcccaaagagggaaatacaggatttgctaacactggttaaaaatgcaaattcaagatttggaagggctgttataatgaaataatgagcagtatcagcatgtgcaaatcttgtttgaaggattttattttctccccttagacctttggtacatttagaatcttgaaagtttctagatctctaacatgaaagtttctagatctctaacatgaaagtttttagatctctaacatgaaaaccaaggtggctattttcaggttgctttcagctccaagtagaaataaccagaattggcttacattaaagaaactgcatctagaaataagtcctaagatactatttctatggctcaaaaataaggaacccagatttctttccct

SEQ ID NO: 80576 - DNA, 549 bp, Homo Sapiens
  misc_feature (183)..(291): n is a, c, g, or t
  misc_feature (302)..(337): n is a, c, g, or t
gggaaggatcagaaggaatccgccgaggcagggatgggtgtgcccatgtgtgccttgacgggacttcatcttatagactgttaaactgtcacacacaaacaggctttccacccctgctctgagagcaccacgcacagatttccagttcttagtgtggctgtttaaagtagaaaatctgggggnnnnnnnnnnnnnnnnnnnnnnnnnnnnnnnnnnnnnnnnnnnnnnnnnnnnnnnnnnnnnnnnnnnnnnnnnnnnnnnnnnnnnnnnnnnnnnnnnnnnnnnnnnnnnccatgtctacnnnnnnnnnnnnnnnnnnnnnnnnnnnnnnnnnnnntctgaaatttccatctggggattaacttctgtctttctggtgaacaatatagcaattcacgcattcttcaagcagcaaaagttcccggaacaattagggaagacgtatggtctgaatttatccaggcagtgggtctgctttggtttttgctggaaatttatatcagtgtctgggctcccaagaacataaatgtaattgccaaagcaaaaaaa

SEQ ID NO: 80577 - DNA, 669 bp, Homo Sapiens
gaaagagacacctaaggaggtggccgcggacgtcttagcagaggtgattacagcagcagtgagggccgtagatggggaaggagcgcccgctccagagagcagcggggagccggctgaggacgaaggccccacggacacagcggaggccggtagtgatcctcaagccgaacagctgctggaagagcaggtgccctgtggaacggcacatgagaagggcgtccccaaggccagaagtgaggctgcagaggctggaaatggcgccgagacaatggcagcagaggcagaaagtgcccaaaccagagttgctcctgccccagctgccgcggatgctgaagtggaacaaactgatgcagagtctaaagacgctgttcccacagaatgatgctcatttccctgttccagggaaggcgttgggatgatggatgcgttggtctttctcccttggtttgtaagcagtacaagggcgtgtgctcccagaatatgctgtaatctaattttggtgaagagacccagcgtttcctcctgagcagtgcctctcacggcttgtctcatgcagtcgtgtggcttcttgcccaggtttcaaagctgaagtacattgtccttagcggctgtaacatgtctcttgacagtagtgcacttggaataataaaggttgggtgattataaaaa

SEQ ID NO: 80578 - DNA, 595 bp, Homo Sapiens
taacaatcacctctgttgcctccatttgagagaatacttccaggggctctgcatgtctggtccccaacctggtcggggagttcactttcagaggctcagggatgggccttccccagccccaccagcaaatcatctctccctgcttccaggagggtacttactctccaactagtgggctttatgggccaggaaggatgacaggaaggggtgtgtggggtactacgtccctccacactgagaatccgaaagccaagatgcccaagattctatcgttatctgcttgtcttgtagaagcccctctgtgagactgaggggcaaaggagagagggcaggggcgtgtctcaacccttctggccacttctaggttgtgcagactgccactcttgttactacgatggactgtcagatcagcaggtggcccaggagggcttgcttgatgcgggctgctttttccttttgcctccgtgccatgcctgtgaggtagttggtacttactggaatcccactgcatgcatgaagaaacaggcacagagaagccaaatgactttcccaaggtcacacagcctgaagggacagccggctgtcccagctgttt

SEQ ID NO: 80579 - DNA, 820 bp, Homo Sapiens
  misc_feature (447)..(464): n is a, c, g, or t
  misc_feature (489)..(529): n is a, c, g, or t
aatttgtcacagatcccatcccattacaccatgagaacatggatgcttatctctcaaaggccatggaaatagcatctcaaaggaccaaggaagaacggtctagccaagatcatgtggatgaagaggtgtttaagcgagcatatattcctagaaccttgaatgaagtgaaaaattatgagagggatatggacataattatgaaattgaaggaagaggacatggccatgaatgcccaacaagataatattctataccagactgttacaggattgaagaaagatttgtcaggagttcagaaggtccctgcactcctagaaaatcaagtggaggaaaggacttgttctgattcagaagatattggaagctctgagtgctctgacacagactctgaagagcagggagaccatgcccgccccaagaaacacaccacggaccctgacattgatnnnnnnnnnnnnnnnnnnatggtcaaggaagcccagagagagnnnnnnnnnnnnnnnnnnnnnnnnnnnnnnnnnnnnnnnnnggagaagacagccaagacgaaaaaaggcaaatagaatgagaaccatattatgtacagtcattttcctcagttccttttctcgcctgaactcttaagctgcatctggaagatggcttattggttttaaccagattgtcatcgtggcactgtctgtgaagacggattcaaatgttttcatgtaactatgtaaaaagctctaagctctagagtctagatccagtcactgactctgtctggtgttgacagaggatttatttaagctattattttaataaagaactttgtacattt

SEQ ID NO: 80580 - DNA, 789 bp, Homo Sapiens
agcatggtacttgaaccaggttgtacaaaaagcaggcggtaccggtcggaatcccgggatatcgtcgacccacgcgtcgattctccagaaatccaagattattcaggtaagagtgggtatattaaatgtacatctttttactttctattttgatgccaactgattatactagacaattagcactccaggtggttattgaacacaaaacagtaaaagaatattgcactgatagatactaaattattattttattaggttgaaaaagcccttactaaaagcccctcatatatcaattactttatttcattatgactacttaggttccgggctggggacaagttcacttaaaaaggcaatgttatttaacaggtcaccagttaagacttctgctttgtagatacatgcagaagccatcaaacaagggggagcttttaactgcaacaataagctaaagtatgtaaaatactacattctattcagtcttggagtgtttgtagaaagttatcttcagccaaatctttgctgaagactggttgtggagtgttggtaaatgctttgtgtttttatgtaaaatattttctaaacaaaaaatgttaaaagtacatgtcctctgtagtaaactgatatctatatatatgaatcattcaagcctaaagtctagtaataaactgtacttgtgaatagagaaaccctaaatattcatgcagtaaaaattatgcggtctgttaagaaaaatgagtaatttgtgttttggacttgaaataaacagtgttctgtagataattcctc

SEQ ID NO: 80581 - DNA, 1559 bp, Homo Sapiens
  misc_feature (45)..(85): n is a, c, g, or t
  misc_feature (89)..(123): n is a, c, g, or t
  misc_feature (537)..(537): n is a, c, g, or t
gagaggaaaaacttgaatacactatagggcgctagctcgctgaannnnnnnnnnnnnnnnnnnnnnnnnnnnnnnnnnnnnnnnnccgnnnnnnnnnnnnnnnnnnnnnnnnnnnnnnnnnnncagtcgacggtaccggacatatgcccgggaattcggccattacggccggggggagcctacaggccagaaggagctcttcactgaaggtatctggtaccaaaatgggcacgcacagtgtacagaatggaacggtgcgcatgggcattttgaacagcgacacactcgggaaccccacaaatgttcgaaacatgagctggctgccaaatggctatgtgaccctgagggataacaagcagaaagaacaagctggagagttaggccagcacaacagactgtccacctatgataatgtccatcaacagttctccatgatgaaccttgatgacaagcagagcattgacagtgctacctggtccacttcctcctgtgaaatctccctccctgagaactccaactcctgtcgctcttctaccnacactgcccagagcaagacttttttggggggaactttgaggaccctgttttggatgggcccccgcaggacgacctttcccaccccaggactatgaaagcaaaagtgaccacaggagtgtgggaggtcgaagtagtcgtgccaccagtagcagtgacaacagtgagacatttgtggggcaacagcagcagcaaccacagtgcactgcacagtttagtttccagcctgaaacaggaaatgaccaaacagaagatagagtatgagtccaggataaagagcttagaacagcgaaacttgactttggaaacagaaatgatgagcctccatgatgaactggatcaggagaggaaaaagttcacaatgatagaaataaaaatgcgaaatgccgagcgagcaaaagaagatgccgagaaaagaaatgacatgctacagaaagaaatggagcagtttttttccacgtttggagaactgacagtggaacccaggagaaccgagagaggaaacacaatatggattcagtgagcctgctttcgcctgctgtctctgatggctctggcaaggactccagggattctggtgggatatgacttagaaccaggtggctggtcacctggatgtacagaagtctaactggtgaaggaatatcatttacagacattaaacatccatatctgcaatgtgtaccaaagttatatcatgccccataatgctactgtcaagtgttacaactggatatgtgtatatagagtagtttttcaaaagtaaactaaaaatgagaagcatatttcaagaattattttattgcaagtcttgtatttaaatgttaaatcaatatgttgttgcaatttagcttgctttcaagcttcaccccttgcacttaacataagctatttttggcattgtgttatcatcggcttattttatagatcaatatttttatttcccttttttgctgaggaaatgaagataagcaaaataataaatatatatctaaatatatgagttattaaaaacagaagaataa

SEQ ID NO: 80582 - DNA, 1018 bp, Homo Sapiens
  misc_feature (62)..(77): n is a, c, g, or t
ggacatagaaaacatcagtcttgaacttctcttcaagaacccgggctgcaaaggaaatctcnnnnnnnnnnnnnnnnatgtgctgtcaagttttgaagtggtgatctttagacagtgactgagtatggatcatttgaacgaggcaactcaggggaaaagaacattcagaaatgtctaacaatgtgagtgatccgaagggtccaccagccaagattgcccgcctggagcagaacgggagcccgctaggaagaggaaggcttgggagtacaggtgcaaaaatgcagggagtgcctttaaaacactcgggccatctgatgaaaaccaaccttaggaaaggaaccatgctgccagttttctgtgtggtggaacattatgaaaacgccattgaatatgattgcaaggaggagcatgcagaatttgtgctggtgagaaaggatatgcttttcaaccagctgatcgaaatggcattgctgtctctaggttattcacatagctctgctgcccaggccaaagggctaatccaggttggaaagtggaatccagttccactgtcttacgtgacagatgcccctgatgctacagtagcagatatgcttcaagatgtgtatcatgtggtcacattgaaaattcagttacacagttgccccaaactagaagacttgcctcccgaacaatggtcgcacaccacagtgaggaatgctctgaaggacttactgaaagatatgaatcagagttcattggccaaggagtgccccctttcacagcatcctgggatctcaaatatgttggacaatttatttattaatggaaaaataaattttaaaaagaaactacctcgtgctcctgaagcttagcttcagtactgctctcctgaaacatgacagtcatttccgtaggaattaaatacacttaggtgtttagttgatgttcagtctgtattataaatgatattggagcaacaattacaaatctatcatgttatacaaatgtgtttttaataaactgtactttatttcac

SEQ ID NO: 80583 - DNA, 408 bp, Homo Sapiens
ttttttgagaatttaaaatcatatttattgttttgcaaacaataacttagacatttcttaatattttaaaaaccccaacacaaagtaataaatttggcttcttttccccacaaaaatgggaaatacctttcagtaaaggaaattttaaattatttttacacaccagttggttgttggaatttatagctctttaacatatgacatcagcaaaaataattagcattaactgattaatacataaaacaatttacaatcatatggtaagcaggaaacaaaaaccgaccagaaaacaccgttttatagtaattttcaaacagataaattattacagtatactttatccccaacatctctgagcccattaatagagtacttctatacatataaagatataataaaaggatacgg

SEQ ID NO: 80584 - DNA, 1348 bp, Homo Sapiens
  misc_feature (737)..(747): n is a, c, g, or t
  misc_feature (784)..(795): n is a, c, g, or t
gctccttacggggacgtccttgacagacaagcaccttctccacgcccgtccagctcagtcttcgtgaggcagctgaatctgtaccccaagcttccctttctttaacttggtggtgtactttcgttttcttttcctaacagcaccttttctgatacgaaaaagacaagatagatagtaatattaacggctgctatttgaactattactttttccttctggctgctattcaaggagctaccctcctgcttttcctcattatttcctgtgaaatatgaccatcatcgagaccatcagcgatcaagagccaatggcgtgcccaccagcaggagggcctgaccttcctgaggccatgtgcggtttctgaggctgacatgtcagtaactgactggggtgcactgagaacaggcaagactttaaattcccataaaatgtctgacttcactgaaacttgcatgttgcctggattgatttcttctttccctctatccaaaggagcttggtaagtgccttactgcagcgtgtctcctggcacgctgggccctccgggaggagagctgcagatttcgagtatgtcgcttgtcattcaaggtctctgtgaatcctctagctgggttcccttttttacagaaactcacaaatggagattgcaaagtcttggggaactccacgtgttagttggcatcccagtttcttaaacaaatagtatcacctgcttcccatagccatatctcactgtnnnnnnnnnnnttaataaactgttacttatatttaagaaagtgaggannnnnnnnnnnnaaagataaaagcatggtcagatgctgcaaggattttacataaatgccatatttatggtttccttcctgagaacaatcttgctcttgccatgttctttgatttaggctggtagtaaacacatttcatctgctgcttcaaaaagtacttactttttaaaccatcaacattacttttctttcttaaggcaaggcatgcataagagtcatttgagaccatgtgtcccatctcaagccacagagcaactcacggggtacttcacaccttacctagtcagagtgcttatatatagctttattttggtacgattgagactaaagactgatcatggttgtatgtaaggaaaacattcttttgaacagaaatagtgtaattaaaaataattgaaagtgttaaatgtgaacttgagctgtttgaccagtcacatttttgtattgttactgtacgtgtatctggggcttctccgtttgttaatactttttctgtatttgttgctgtatttttggcataactttattataaaaagcatctcaaatgcgaaatccaacctcgtgcc

SEQ ID NO: 80585 - DNA, 713 bp, Homo Sapiens
  misc_feature (176)..(329): n is a, c, g, or t
aaagtgtgcttaattagaaggataaaccgatgttgaacaaatgtttgatcagaggagcttttggaggtgaaatgttccttagtgatacagagaatataaaatactctggcagttacttaggtagttgtggttgagggaatcagtgtattgagtgggtagtatagaaatgtgaagtnnnnnnnnnnnnnnnnnnnnnnnnnnnnnnnnnnnnnnnnnnnnnnnnnnnnnnnnnnnnnnnnnnnnnnnnnnnnnnnnnnnnnnnnnnnnnnnnnnnnnnnnnnnnnnnnnnnnnnnnnnnnnnnnnnnnnnnnnnnnnnnnnnnnnnnnnnaggactgctctagaaaattaggacagcaatcaggtttggcctatatggagggtattagatcccaggtgagtttctgtgtatttttaacctatagaacagaatatctgtcattttcaagaaatagtctccgagagagtgtactctggtttaaacacgtaactgacagcattttaattcttacaggtagcaacacaagtcggaatagaatggaacctgtcccctgttggcagagttaccccaaaggaatggaggaatcagtaatcatcccagctggtgtaataatgaattgtttaaaaaacagctcataattgatgccaaattaaagcactgtgtacccattaagatatggcattattgaagaaataaagtacatttgaaaccttc

SEQ ID NO: 80586 - DNA, 654 bp, Homo Sapiens
  misc_feature (470)..(471): n is a, c, g, or t
  misc_feature (474)..(475): n is a, c, g, or t
  misc_feature (477)..(479): n is a, c, g, or t
  misc_feature (481)..(482): n is a, c, g, or t
  misc_feature (489)..(492): n is a, c, g, or t
  misc_feature (541)..(541): n is a, c, g, or t
gggagccattttgtttttcagctcacttcaagggtacctgaagcgaattggcaccaaagcagcagctgtattgccgcagttctagcttcaccttcacgatgtttcccttggtcaaaagcgcactaaatcgtctccaagttcgaagcattcagcaaacaatggcaaggcagagccaccagaaacgtacacctgattttcatgacaaatacggtaatgctgtattagctagtggagccactttctgtattgttacatggacatatgtagcaacacaagtcggaatagaatggaacctgtcccctgttggcagagttaccccaaaggaatggaggaatcagtaatcatcccagctggtgtaataatgaattgtttaaaaaacagctcataattgatgccaaattaaagcactgtgtacccattaagatatggcattattgaagaaataaagtacatttgaaaccttccaagcnnaanncnnnanncccaaannnnaaaacatgtcgggccgccctcggcccctcagagaacttttctagaccanttctgtttggccgccgcgggcccagttagggtaagttgaacatgggtcataggctgttttccctagggaaatcccctggccatggactaagtgcttggaattcttcacccaat

SEQ ID NO: 80587 - DNA, 692 bp, Homo Sapiens
acgtatgctttaacttttttattttaaaataatcatagatttacaggaaattgcaacaacaacaaaaaaagtacagagattctgtgtacccttcccccagtttcgttcagtggtaactccttgtataactacacaatatcaaaaccatgaaatagatattggcacaatccatagacagtattaaatatacatgcatatatatatatttttaagtgaaaaatatttttaaacctcgctttgcctcacagccaagaagatcaaatactttctccaaaaacatagaatttgtatctaactccactcgctccaaactcaggtccaaccatgaaattattgatccctctctctaaccctccaactacaggcaagaagctgcccatacattccccaaagcaggagtgcactctgccacaggcctagatgccgtcaacctcctggaccttgaactccctaaattaatggcctctgtgtgagtatgtgtaagcagcccctctctgtcccagtccatcctaaaatcactcccttggagccaccactgcccctctcatcttctagaatttctagaaagataaagagctagataagcatctaggtacctttcttctgctgttagctctaaagacaagtgaatatatcctagctaggatgtactctaaggaatgcagaagtaggccgagtgcagtggctcattc

SEQ ID NO: 80588 - DNA, 482 bp, Homo Sapiens
tgcggccgctaggtggaaggggacttcggttccgcacgtcgtcatgttgttggatggcaccagtatgtgacgttcctaggaacttagctctgaggaaaaaacaaagcaaaccggggaagtacgtagccttgaaccggagtaaccagggacagaaaggaaggaaaagggtttcataccttcacggaacgacgctcacttcgtccgcctgaggaggaaaaataagtttaaacctttctgtgaaaaagaacgtggagccctttctgccgaatggaaacccgctaaaccccgttatggagtctgctacaattaagcatctaaccaggaatcgtctatggacacaactctccaggcaattcatgcagaaagtgtgttgacgatttcctgtttcttgcagagcgcttcaccgttaaggctcttagtagctggcgattgtaaagcacattttccgcttcatgaaaatacagtgctcttcttgtgtttgt

SEQ ID NO: 80589 - DNA, 722 bp, Homo Sapiens
aagggaaaagtgttgctttattggatataagtggattgagccagggttgagaaggtaaaccaaggtaaaaatggaagtgcaaggcacagatgaatgaagaaaaaggctggggctgataacagtctccagagagtgtggaatggccattaaggcggccagaatgggcttctgtagtctgctgcccgttgctggagacacacgctgcggcagtctcagtgaacagcgccccctggagcacgatgccagcggtgcccctctggagtagtggcattctgggcccccaaaggcctgtagtgtcatccgaggcacggatacaaaatctcttaaaggtgttgttggatttaaactcatggtaactctaggaggctgggaactgaggctcagagaagttaagcaacttatccaaggtcacaaagcagaaagcccaaagagcaaagattagaagaatctagatcttcccaactgacaagtctttgcttttaagccctaaagcatatgtaacacagttggtaaacaatgtagagggaaagtaaatatttattcagcatcaacttactctgcgccaggaatggttttctatacatttccttgctttgtgtgagtgatcacatgagagggtgagagctagcaagggtccaaacctttttagatagtgagcataaaaggatcaggaggggacagttttctggggttttgcagcatctacaaaagccctcgtgccg

SEQ ID NO: 80590 - DNA, 721 bp, Homo Sapiens
  misc_feature (56)..(56): n is a, c, g, or t
agcggcccggctgacccttttaatttttaagagtgttcaatccgagatgaatcatntgaagtatttttatatgtatatctatttaaaactaatatattattaaagcttaattgccatgccgtttatcttctctgaaagaacttcaaatcttacctgccaacatattcaccataattattttttaatacctttcatacaataacttttttaaaaaaacctcagattgaaaaagcaacctaaattactttcgctctctaatcagcatttcaatgtatttatttttaaatgttctcaaaaagtaactaaaaaattgtgtcggaccctacttttgagaaatctacgtttcccaagttttatgggaactggctattccttgtcccggcacaccttctcattccttcctttcagagcctaaaacctcatttgataagcactcctagtctctggcctgtggatccagtgctattctgtcaccaacctaagaatcccaattgcaccttctgtttctgacagtcacaggtgacagctgtgattctataatacagactggtgtcttagaggtaggaataatacatgattatgaagcatcaccctgctaatacataataatgtctttttatattataagtgattgagtttagttcattttaatacattgtacatgaaaaaatgaaaagtagaactttgtaatactttaatcaataaaattaattaccaaatg

SEQ ID NO: 80591 - DNA, 1192 bp, Homo Sapiens
cttgctctcccaggattgattgtatcttgagttaaaagaatctgctctccattatctcaagtagagcaaatgctaaaccatcacagctgtaaatcatgtacttaatgcaatgtgcccttttgacctccacattctcaccacctgtttctttgttggattaccaataaatagcatgggctcccagagctcgggccttcgcagcctctacgattgtgatggccccctgggtccggtcccacttttctctctcaaactgtctttttctcaatcctttgactccgccggactttgtcacccccacgacctggtgttgggtctgatcaccccaacaggaaagattcttcattttcccttctcttcctaatactgtaatcctaaatccattaggggctgagcaagctaggcatacatgccggtgcagttacttaggcctaaagcactgcactgtagcttgtgcacaatgaggaggtatctatccagggagagtatggcggcagtaatgggatagtggcttcttctaggggcggactgatcaaatatgtttcatatacataaatacacacataaaatatatattttactactattattatttcctctgataaaaatctgcgttcttttatatgtgtaagtaaggggcgctcaaagaatgataggaacctgttaaaggccgcaaaacccacacaggaggggctcccacttgccaaatctggagcaaactggtcattaaaataagtaataatagattacaaacctctgaatgaaataggaaatcacaagtctatactgacataaattaataaattgaaagtttgatgaagaatggtgtgtttacatagtctcagagtacctccccataaaatctttactaattacaaaggaaaaaaagagtaattttacagtagagaagcctggctggtatatcttagtgattaagatgtaatgctctttcatcaaggagtattaccagtaataggatagaatgtcatcatgtgcccctgataggagcatgcatcacttttgtggcattctttctacaactcggaaccttatcatgaggaaacatcagagaaaaccaaattggaaggaaattcttcagactggcttataataataaaaagtgtcaaggttataaaagggcaagactgagaaactgtatcagactaaaggagattaaagagacatgacatct

SEQ ID NO: 80592 - DNA, 564 bp, Homo Sapiens
cagatccattatatctaaagggcaagtgaaggaaacatattgtgaactgggtataactccttggttcttaactagtacattcttaatctgtgagacccaaaggttgataaacaataatttaagattgtacagtactctaaacgtctgcaaaggtctagatgttatcagtatcactagtttttatttctgccagtagctcccttttaggttacattgttgtcctctttccagtgtcgcatctgtcattggtttttcactatggcaagttcattaaaaagcttgctccattgttatcttcaagtaatgcccataaggagatggaagatatctgagacaattaaggctttagcttctaggcaagagaaataacgttgcattaaatttcaagtttctttctgctagacttgaatgtgtctagccactctaatttatgggggcttttggttttttcctattgtactttgtatgtagaattgttttgaaatatcaagcatatttactttgaatttgaactctttcttaattttgtatttatcctttgaataaaatgtaaatccaaaaaaa

SEQ ID NO: 80593 - DNA, 674 bp, Homo Sapiens
gaaagaaaaaacagaaaaagtaaaagatcctaagactgctgctgatgtggtcagccctggggccaactctgttgatagcagagtgcaaagaccaaaagaagagagttcagaagatgaaaatgaagtgtctaatattgtgagaagtggtagatccaagcagttctataatcaaacttatggaagcaggaagtacaaaagtgattggggctattctggtaggggtggatatcaacatgtgagaagtgaggagtcctggaaaggacagccaagcagaagtcgggatgaaggttatcagtaccatcgaaatgtcagagggcgaccatttaggggagataggaggagatcagggatgggagatggccataggggacagcacacttgatggttgttgccgaagtattttctaacagaaactcttaggtggaatgtttctgaaggctttaaaaaaaatacaataaagtaaaaaccgcagttggaactctttcctctccccagccccccttaccttcactcccatactggacaagacattttggacatgagttcaagggggcaggttaattcctggcattgccagttttcttcattcagaatctgtttgttgatcaagtgactgtccccgtaaaaagtagaagataagtttgttaaagtattttttataaacagcttaatat

SEQ ID NO: 80594 - DNA, 989 bp, Homo Sapiens
ttgaagctgcttggtaaagttatcatttcctcagtcttttcttttgtactcctatcatgtattcattaatatctaccagtcccttttcattctaagacaaaacatttctcctaaatctctgaataaaatcagtgctgtaggaagatggactgtgttgatcatgggtgtaagcaacccagtttaagaaacatggcaactaaagggatacctcaggctttctttcccagtgggtcatttttgtcctagttcagtgtgtctgttactatttaaatattgatacaaaagttttgctagttttatcttataacttaaggaatgatactgtgctctgcttggtgcatggagaaaaaggaagacccgtactctccacaccctagagcttttctctaaatattgtgcaaagtttttgctagttttatcttctgactttgggactagtttttgctgcagagttgtgttgctttgtgattttcctctgggatagtgtactgtacacaaccagatgtgttccacactccgtgactccgcagtttgtcctggagtgacatacacatccaccatggaaagggaagcatctctgcctgtggattctcaagtacttggaagcacctctcctgaggaacctacaggattctaaggtttcctaggtcactgaacaactaatcttggtccctgaatatttctaggtttgtaagtgcagcagttttatttcctctagaactcatcctgtttcaagggaagtacctaagaagatatagagtgtttctagggtaagggacctgcaggtgtaagcatagatgaaataactgtcctgtcacatgtgcagcaggccatggagtgtagcgggcatcgctgccgccattcctgcagcatcaccataagcagtgcagggtgtctccatcgagctgtttggttccatgtgtgtttaacatgtgcagaagtagcttctctgtttaagtttaataaagttgagtttcaccagtaaaaaa

SEQ ID NO: 80595 - DNA, 996 bp, Homo Sapiens
  misc_feature (22)..(22): n is a, c, g, or t
  misc_feature (79)..(79): n is a, c, g, or t
  misc_feature (88)..(88): n is a, c, g, or t
  misc_feature (112)..(499): n is a, c, g, or t
cccactctgactgagctcgatntgtgatgtcgtcaggggcggacctatgaaaaacgccagcaacgcgccttttacggtncttgccttntgctgccctttgctcacatgtccnnnnnnnnnnnnnnnnnnnnnnnnnnnnnnnnnnnnnnnnnnnnnnnnnnnnnnnnnnnnnnnnnnnnnnnnnnnnnnnnnnnnnnnnnnnnnnnnnnnnnnnnnnnnnnnnnnnnnnnnnnnnnnnnnnnnnnnnnnnnnnnnnnnnnnnnnnnnnnnnnnnnnnnnnnnnnnnnnnnnnnnnnnnnnnnnnnnnnnnnnnnnnnnnnnnnnnnnnnnnnnnnnnnnnnnnnnnnnnnnnnnnnnnnnnnnnnnnnnnnnnnnnnnnnnnnnnnnnnnnnnnnnnnnnnnnnnnnnnnnnnnnnnnnnnnnnnnnnnnnnnnnnnnnnnnnnnnnnnnnnnnnnnnnnnnnnnnnnnnnnnnnnnnnnnnnnnnnnnnnnnnnnnnnaagaattcggcacgaggcaggggtctccaacccccaggccgcgatgggtactagttaatgacccgttaggaactgggcagagtcttagctgctctctgccctaagctttatgatttactatgtcagctcctggaaactcccttggtctaaagtcgaaaacgcccaagaaagggagccattgattctatttgagaagctgcccaccctgaaccagtcccctgtgactggggttagtagtgataatgtggtgttgtcacgtggcacaaaatcctgtcctataagtatggaagtgaaggtacagttcctataaaaggggacaatttggaggtaaaagtgcatttccagtagagcaggattcttgatttacgtgtgcatctccatatataaatgagaccatccatgctagaagggccaagagtgaggctgtcccagatgtgtgcctgccccagagccttgccagtgccaatagcacaagatactcaaaacagactgagagc

SEQ ID NO: 80596 - DNA, 1043 bp, Homo Sapiens
  misc_feature (381)..(403): n is a, c, g, or t
ggcctgggtggcgaattcggcacgagggtcatgcagctctttcggaccatggcttcttcccgtcagcccaggccacagccgccttccaggcccgctatgcagacatctttccctccaaggtttgtctgcagttgaagatccgtgaggtgcgccagaagatcatgcaggctgccactcccacggagcagccccctggagctgaggctcctctccctgtaccgccccccactggcaccgctgctgcccctgcccccactcccagccccgcagggggccctgaccccacctcacccagctcggactctggcacggcccaggctgccccgccactgcctccacccccagagtcggggcctggacagcctggctgggagggggctnnnnnnnnnnnnnnnnnnnnnnnaggtccctccacagctgccacaggcaggtgagggacccctgagaagatgccaggacttatagtaccccctcaggacatggacagtatgtgggggcaggaaggttatctcctcccgggtaaagccatttcgtcctctccagtttggggcggaatgaggcctgctcctcttgtaaatacccccttccctcgaagctccctcccggtgctggggggcagctgaggggctgcaggggcagtctccctcctccaagcccctgtacataacctggagcgtgtgaccttcagagcttttcactttatgcaaaatggctcctgtgagggctgcaagctggagggtggtgcaggccttgggccacagggaggcgcctgtggaatagggggagttcatgcaccccttttttccccagaggggctggactcaggttagtttgggggtgggggctcctgcactttgccacaggcacggggagggttttctcctcaccccctctgccctcccaacttgggttgtactttctaagaaggtgattccccctgcccttgcccccttccccagaacaaaacatgttgatcatgtgcaatatttcttactgtgccgagaagccgcaatgagcgagattaaagctgtttaacacacaaa

SEQ ID NO: 80597 - DNA, 630 bp, Homo Sapiens
tttacctgaaagctacgtgaatcgttggtaaattggtgtaaaaatagaactgagtcatctcaaaagttcctttcagttctaaaattctgtgaattgaagcctactttttcactttaaatgatttattgggtttacagttctttacgctttctgattgaactgatttgaagttcttatttcgtgtgttggggaacacacccccaacccgtcacagcgtggccgtgggtgggagatggacgttaggctggccagtcactagggggcagcatcagcacgggtctggctgtccctggccttagggagcagtttctgcccctcctgcccgtcagaaagtctcggactcctctctgcttgcatgtgtaaagttttcattttcaggggccttttagtcaaaaaaaataaagctgtatgacttagtgctgaaggatatgaattaggcatagctcttgggttggcagcataaaccaaggggcatcaacccaccaccgacaagctaagaatggtttttacatctttaaatggttgaaaaaggaaaaagaatgtttagtgacacgtgaaaaatacatgaaattcaaacttcaatgtctacaaataaagtgcattagcacacggtcgtcttgcttctctaaa

SEQ ID NO: 80598 - DNA, 508 bp, Homo Sapiens
aatgggaggatgtttatacattaatgggaatgcagtcaggagggaaaaaagactgaagagggaaagttgctgaaacaacacttgataggccgtaagaagggatctgatgaacaaatggagaggctggctttaagtaggaatagaaacagtccaattccagtactaggaaggcagagtaatgggcaatgggggcaaagtagtggtggtggtggatggaaacaagtggaagttttctaattgctcccattttcccagcaaaataggaaacggggtcacataggacaatctctagtgcttgtaaatctaaggaaataaaaagacaaagatggtgataacataataatttgtgctgttgctcttcctaaaatgtgctctaatttttcagaatccgacctatccactaaagtccagctccagtctagcctgcttcaaagcatgatctctttttttcagttaaattcagattgtgtgaactattcatctggctcttggcatgttgattatcttt

SEQ ID NO: 80599 - DNA, 620 bp, Homo Sapiens
cttgcatactttccgaccttcatcatacaacctctcctaacctccctgtagtctttaaaatgtttaacttgcctataagctaacatgtaataaaacacatactcaattatatgaatagaagtggagagccagaatgctacaaaagaaatcacagctgctagaagtatcctccatagaaacatcaacatgattgtggatcaaaatgattttcactggatatggaatttgtatgggccatatttattaaaagagttctgtgtggtcacatagagttcctttgggatttcatcccacttttcaggacttaatttgtttgggtttgcttacctaacaagcaacaacaacaacaaaataaatagttccaaaatctagtttattacataaatctctatgaatccttgagggcctatatctatattataaataaatacaaatatagatttttaaatatctatgggactttgccatttacagccttaagtataaaattacgagattatattctttccattaccctttatttctgctaactttttaaagactggaacattctgtggatgttgtcaaagtttgagtttgtttttccctgtgtattataataaatttgtggtattgcatgt

SEQ ID NO: 80600 - DNA, 1112 bp, Homo Sapiens
  misc_feature (258)..(381): n is a, c, g, or t
  misc_feature (431)..(442): n is a, c, g, or t
  misc_feature (1023)..(1046): n is a, c, g, or t
ttaactgcttccatactccatatgccactttataccgcgtacccctgaagttggaacaattaccacattggtgaatggtccactcccactccacaagccgacgcagaggtcactagcaggtagcgaagagcgcccatacccgaccgcctctcccgcggatgaccgattcattatgacagctgcaagagcaggtttccgaactggaaagcgggccgtgaacgcaacccaactaatatgagttcgctcaatcaatagcannnnnnnnnnnnnnnnnnnnnnnnnnnnnnnnnnnnnnnnnnnnnnnnnnnnnnnnnnnnnnnnnnnnnnnnnnnnnnnnnnnnnnnnnnnnnnnnnnnnnnnnnnnnnnnnnnnnnnnnnnnnatggccctcgagcacaggaattcggcacgaggcgcggctgtaggctttannnnnnnnnnnngacctgggagtaataaagttactttttaaatgcacgtatgcaatcttttattcctcttgttttatggataagagatttgttcaggtcaaaagttgcaaaactgttctgaagcttaatattagagacccaagtaagattgtttttagtcttgcttgaggaatgcacactccatttaaaaaattgtgcgctctgtagatttggattttacagcagcaattacttggctaaattagagtactgcaatcttgtaagtagaaaacagccaccatgacaataaacaaaaacacttaaaaatatttttagcttgttttacctacatctagtttcatttcatcttgctttgctttgttgactctgctaccgctgatgtttgccttgtcaatatcagaataggggcatcagtgtcccgtgaaatacattttgttgtgctatgagcctctgtaatcaaatgcttgtactcagaagagagtgtaaaatcagcatttctatgtaacatatatctctaattatctgtgtaattttataacatactttgacaaccccagtgagttacttaataataaagatcttaaaataatgcnnnnnnnnnnnnnnnnnnnnnnnngcctacagccgcggccgcaagcttattccctcttagtgagggttaatttgagattggcactgcccg

SEQ ID NO: 80601 - DNA, 656 bp, Homo Sapiens
acagtctattatacatagccctgtatatatgtacaccaacatgaaacttttatttaacagacgtgtcctggtaaatatgatttttgtagctttttgtaaattatttaaagtgatgtaaaagatatttttggaaaatactgttgttcaattttgtagggtgttcctaactgcagttttctgtgttctgcatacaagtcttagcttaggaaacatttggttcttaccatcacagccaggttcacagaggctctgatgctttttggttgattgctggtgagaatggccggcggtggctgcagtggtagcctgaggaaggccaagctgccctccctgggaatcactcagatgccccaagatgtccgttgggaagctcccaggacagcactttttatacagaggacaccgcctcggccccacgtccttagaggccagagcacatctgaaaactgcaatcacagccgtccgctggaaaaacgtttcgaagcacagtggccagcgagcgagcacgtggctactccctgttgcatgtcaaatccacacagatgtcagcggcagctgctcggcagcccagccctgggcctgggtgggttcatgtccaatcttgttcgatcactagatgattctaacatcgaaataaacctctttttatatggaaa

SEQ ID NO: 80602 - DNA, 1201 bp, Homo Sapiens
  misc_feature (682)..(706): n is a, c, g, or t
  misc_feature (992)..(1068): n is a, c, g, or t
cgctctagccccgctcatttgtcgtctatgtgtgattgacgtacatcaccggacattgactgtacgattatcgatcattaggattgcctgagccagatcgcacgagttatttcccttaatcttgaggaagagtttttgtttttgttgtttgtcagatagtcatgtaacttgcaatacagatatgtgaaaaaaccccaggacgcatcgtaccgcagcgtcgttcagggtcaggcagagatagacagccagtaacttgagtgacctgtgacaccatcaggtcacaagcatgaaaaaaatgtcatatgtctgctttctaaatatattatacttacatgtacacatgtgtgcatatacattcaaaatttgcattgcataaattgtttattcaactaataagactactactattaagaaaatgcattcttccttcacagtgtgttagtaacttgtctaattgaactaatgttgtgtcctaattgtttacatggaaatactgttgagaagaccattttgttcacttggcagtttcttcacacttgagatggggcctgccatccgagggactgtgttgtagattgtgatcaaggttgattggcaaaactgggcagcttttgcatggtgcctgcttactatatctgaattcagcacctcatttttgtgggagttgtaatacccacaattnnnnnnnnnnnnnnnnnnnnnnnnntatttgaaggtgtctttaacctaatgcgaggaatgcatgttgtttttgtttgtttattgtagtgtgatgccttttcccttacacctactaactattcaaattaataatacttacttagttttagaatgtttattttatgtagtcattaatttttagtaacttcaaagaaacttgtttgctgtgtctattattttgaacataattccatttcctgtgtacagagaatcacatgtatattcacaatgaagcaattgtgtgcaccagaaataaacccctttcaaactannnnnnnnnnnnnnnnnnnnnnnnnnnnnnnnnnnnnnnnnnnnnnnnnnnnnnnnnnnnnnnnnnnnnnnnnnnnnttggcgggccccctccgcccctcacaaaaactttttaaaacatttttttggggccccgggcccaatagggaaaggaacctggccctaattgtttcccaggaaaacctggccatgaacaaggtttggattcccc

SEQ ID NO: 80603 - DNA, 603 bp, Homo Sapiens
tggcaccagcagatctgcatgtgcacagacctcctgtactacctccctcttgaggggagatgcttctgcgggcctgcgacctggtgctcaactctagacaccatcatcctggagcggcactgcaccctcactagccagggtgttgacgtcctcaaggccaaggccacattcaagactatggacttcattgatgcacttgtgccgagcaagcttatctgatcttctgggatctctactaggatgctggcagcccagccagctggtctagccctggacgtgccttcaggggctgggtatgcttcatgacctgtgttttgatcctggttggagtaaaacattccatgggaactcgggctgtgagaaatgtcctaaccacctgactgcagaaacatccttatcacatcctgctgggcaaaggcccaacagcctgacttcaggaacatccttatcatcttctactgagcagcaagctatactgtccagagccctccctcccagcgctatgattaccccagcctgtgagcggcagtgggcactgacactaagctggtttccccctccgcagggctttgctagtaataaacctgtgttgctgttgaaaaa

SEQ ID NO: 80604 - DNA, 811 bp, Homo Sapiens
aaatagctaggtacgaggctggggtgaaatcggcacgaggcaggtttcatatgtgttgtggagatgcttcctctctccaacctcaccgtgcaggaatcccagtgaatatattgccaccatcttggagctcagtgccctcatagtgtaacagcaccagcagatctgcctgtgcacagacttcctgtactacctcactcctgaggggagatgcttctgcagggcctgcgacctggtgcacaactttagacaccatcatcctggagcggcactgcaccctcactagccagggtgttgatgacttcctcaatgccaaggccacgttcaagattttcgacttcagtgatgcgtttgtgctgagcaaggatatgacagcacagccagtggcctctactggatcctggtacccctcagaagacacccagacactgggagtgctgccacctcgtggtgcaagagttctgagggacagggccacattcaagaatttggacttcattgaatgccattttgcagcaccctggtcagagtgaaacattccatgggaactcgggctgtgagaagcatccttcctaaccacctgactgcagaaacatccttatcgcatcctcccgggcaaaggcccaacagcctgactgcaggaacatccttgccatatcctgctgggcagcaagctctaccgcccagacccctccctcccagtcccatgattaccccagcctgtgagtggcagttggtgctggcactaagctggtttcctcctccgcagggttttgctagcaataaaggtgttgctgttgaagccgtaaaaaaa

SEQ ID NO: 80605 - DNA, 475 bp, Homo Sapiens
  misc_feature (31)..(31): n is a, c, g, or t
actgcaggtaagctgggcttggtatccttcnctggcttcagaaagaagccaacaaggagcgtttgcagaatgaaacctttgttccagaagcactgctgactgtaagtggttgccgtttgtggcagtgagcattttgtccattctgaggttggattggtttctccttttggccttgccctgccctacagaccataaaggagaacagcaagaagcccccagcaaacatccacagatggccctggacatcagccacattctgagaaacatccttatcacatcctgctggcaaaggcccaacagcctgacttcaggaacatccttatcatcttctactgagcagcaagctatactgtccagagccctccctcccagcgctatgattaccccagcctgtgagcggcagtgggcactgacactaagctggtttccccctccgcagggttttgctggtaataaacctgtgttgctgttgaaa

SEQ ID NO: 80606 - DNA, 364 bp, Homo Sapiens
gtgcaaatacggcattcaatgtcttcagaattgccgtccctcagaactctgtcaccacgaggtggcagcactcccagtgtctgggtgtcttctgagacactgtcgaccatgttgcattatgtatatgttgtaacttacttaaccacttctactgttgggcattaatctttttctttccttatatcctgtaaaatgctgcaacatccttgtaacctttgcctcctcagctcctactaattccttaggctaaatttctctaagtgggcttaaaagctggtcaaaagatacgaacgtactttaaggctcgactatacactgctatgaaactgatttccagactttctgttttcatttgccagctgtc

SEQ ID NO: 80607 - DNA, 1164 bp, Homo Sapiens
cagtcgacggtaccggacatatgcccgggaattcggccattacggccgggcctgtcttgtatgtctctcaattttgtcagaatttttattattgtttttcacatatgtgaaataagcagttttttcagggtacatagggtatctttgttttacagatttttaaagatgaggttttgaaaagccctcagaggttgttgttaaaagactatcttgcttaataaatgacaacttgttaacagattcacacattacaagtaggacagtataacaggagattggtgtgtgaatgctacaaaacagtcagcaaaaggaatcatgtttgcttgtgaaacttcagaggtaccctgaaagtcatttcctaaagctagtgcatgtgaatcttttccttgaattgtgcagaataattggattgaggcacatattttgaggagtagcaagtggaatggtataatgactacagagaaaattatcttgaaatatagcaaggaagagaaacaagtttctttctccactttattgttggactaattgggtcaatttgctgtgacatatcaaagatctctttgtgccaggccaagactggctactgagttctcaaagcgttttaatatatagattacgtatgagtgcctattttttcctcctcctttcattttttatcttaatacccattttacttctgaaataattcatctgttttgctttatgaccagctttaatttcaattgaggaataataacaaccctagagattcataggaaagagcattgaaatacattttttgcataaagatacctaaaaccatctacccagcttagggttgaactgaatttctgtgaaataaatttgttttaaatactaattattttaaaactacttaattcttaaaaacaatgtcatcagtttcaaaagtttcactttgggaggatattccttaaaaggcatacatagatggtaaagtataaaatatttctgacagaattattcagtattattcaacatttactttcatgtttgttattgtaccacaaagatagtgtcattgttgggttaaaatgttggctgtttttgttaatatacttaaaactgtaaccagtgaataacacctgtagtattttttattatagattatattttatttcaataaactttgatatttagacc

SEQ ID NO: 80608 - DNA, 614 bp, Homo Sapiens
ggcacgagggctttactcctgccagcttgggaaaaggccggagaaggtgaaattctgtgtgctccctccggcgagagactttgtcagctcccgcacagtaacgtggaagtccaagaatccgagtggaggctcaccgaggcgaaggggccaaccatgggaaaggagagtggatgggactcaggcagggctgctgtagcagctgtggtcggaggagttgtggctgtggggactgtgctcgtggcgctcagtgccatgggcttcacctcagtaggaatcgccgcatcctccatagcagccaagatgatgtctacagcagccattgccaacgggggcggagttgctgctggcagtctggtggctattctgcagtcagtgggggcagctggactctctgtgacatctaaagttatcgggggctttgctgggacagctcttggggcctggctgggttcacccccttccagctgaacaccacactgaggcagggagttggctctcttggtggagatgactttcctgggcctctggatgacaatcttccaaaggacaagtctcctactcccaaaactatttaaggaagcatgaaaaataaagatgctggttatcttctaaaa

SEQ ID NO: 80609 - DNA, 1103 bp, Homo Sapiens
  misc_feature (667)..(675): n is a, c, g, or t
  misc_feature (1010)..(1018): n is a, c, g, or t
tatgtgactataaacaagtggtacaaatagcaaggtggtacggtcggaatcccgggatatcgtcgacccacgcgtcgatctgatttgtagttgaaaacatttcaccaccatcaaacactatttctgaatatgtgcctttttatacctagcctagatgaaaaccgatgccattcttattcagaaaatccccccatcctacatgactgttatctagacataaagcaaagtgcatttaattcaaaattggttcacaatataagtattttgtaaaagccagctgaaccagcattttatcaggtggaaatctctgcaagccaaattgctgatactccttcatgcagatcaacttggtgtcccagtcagaatagaacagcataattacctggagttagggggagtatttctgcactattacttgtcagggagagaagaaacttagaattgtccctcaaaggagtgtcaagaagtatgaataaatgtcctttcaccagctcacaggccagaaatggaggacccaagtcaactaggtgaaactactagcagacccagctttcccataataacctaatctgcaaattgttctattaaagtctcattgttttcaggatgcaatgaaagtggatttcaaaaggctttggaaaaataagtggaacatgactgatcttgnnnnnnnnngcaaaagcttaaatatttgatacaagtttacttagctacaacatactttacattgttgcctttagttatctcacaggcactgacattttatatttagaaaatacttttaatctttctaatctttttttgtaaatattagtgtccattctgtatgactcgctaacctactttgcaaggctttgggcaacattttagctcattaacttcaagatgatgtgtcatctgtataggtcaaagaatgggacttctgaactgaggaatttgctgttgacagccaaagtatagtgtacaagattgatgtaacttgatatgtatttttgttgaagttttttgtnnnnnnnnnttatttacaatgttatttgaatgatttttttaaatgctgtgaatctatatttgttgttttatatattaaaattcatttgccaaaa

SEQ ID NO: 80610 - DNA, 749 bp, Homo Sapiens
gaggcttccggttctttattccggaagttgctctcagaggcagcgtgcgggtgtgctctttgtgaaattccaccatggcgtaccgtggccagggtcagaaagtgcagaaggttatggtgcagcccatcaacctcatcttcagatacttacaaaatagatcgcggattcaggtgtggctctatgagcaagtgaatatgcggatagaaggctgtatcattggttttgatgagtatatgaaccttgtattagatgatgcagaagagattcattctaaaacaaagtcaagaaaacaactgggtcggatcatgctaaaaggagataatattactctgctacaaagtgtctccaactagaaatgatcaatgaagtgagaaattgttgagaaggatacagtttgtttttagatgtcctttgtccaatgtgaacatttattcatattgttttgattaccctcgtgttactacaagatggcaataaatactatgggattgtttgtattaaaaaatttacattgcttcttactattcagcagtagaaactttttacacagtaacaccattcgttgttggtatttagttttctgaagggtcgcagttgccttgagcacttggtattcgcagagcttggacctgtagattttgaggcagattaggaattctgcctgatgggtaagcttccagtattgggaggtggagaaggggagggttcagaaaaataaataagagttattgcactaaaaagaattaaaa

SEQ ID NO: 80611 - DNA, 931 bp, Homo Sapiens
  misc_feature (51)..(51): n is a, c, g, or t
ttaaagtagaaagagaaaaggaaagagagaagttacgtgaagaaaagcganagtatgtggaatacttaaaacagtggagtaaacctagagaagatatggaatgtgatgaccttaaggaacttccagaaccaacaccagtgaaaactagactacctcctgaaatctttggtgatgctctgatggttttggagttccttaatgcatttggggaactttttgatcttcaagatgagtttcctgatggagtaaccctagaagtattagaggaagctcttgtaggaaatgacagtgaaggcccacttgtgtgaattgctttttttcttcctgactgcaatcttccaggcaatagctgaagaagaagaggaagtagccaaagagcaactaactgatgctgacaccaaagatttaacagaggctttggatgaagatgcagaccccacaaaatctgcactgtctgcagttgcatctttggcagctgcatggccacagttacaccagggctgcagtttgaaaagtttggatcttgatagctgcactctttcagaaatcctcagactgcacatcttagcttcaggtgctgatgtaacatcagcaaatgcaaagtatagatatcaaaaacgaggaggatttgatgctacagatgatgcttgtatggagtttcgtttgagcaatcccagtctagtgaagaaactgtcaagcacctcagtgtatgatttgacaccaggagaaaaaatgaagatactccatgctctctgtggaaagctactgaccctagtttcaactagggattttattgaagattatgttgatatattacgacaggcaaagcaggagttccgggaattaaaagcagaacaacatcgaaaagagagggaagaagcagctgccagaattcgtaaaaggaaggaagaaaaacttaaggagcaagaac

SEQ ID NO: 80612 - DNA, 884 bp, Homo Sapiens
ctatgtcctcgcatcgttaaggctggcggtttctttcatcatttaaaacgggcattattcccaaatattcaagctttgattggcactagaataaagtatttatttccttaaagatttaacagaggcttgggatgaagatgcagaccccacaaaatctgcactggtctgcagttgcatcttgggcagctgcatggccacagttacaccaggctatgtgtgggtatggtttttctttgggtagggcttttaatttcaaatttcataaaggcacttttacatggctgagtatttattgtttatattctaaatgactatttcatttttaacaactataggctgcagtttgaaaagtttggatcttgatagctgcactctttcagaaatcctcagactgcacatcttagcttcaggtgctgatgtaacatcagcaaatgcaaagtatagatatcaaaaacgaggaggatttgatgctacagatgatgcttgtatggagcttcgtttgagcaatcccagtctagtgaagaaactgtcaagcacctcagtgtatgatttgacacccaggagaaaaaatgaagatactccatgctctctgtggaaagctactgaccctagtttcaactagggattttattgaagattatgttgatatattacgacaggcaaagcaggagttccgggaattaaaagcagaacaacatcgaaaagagagggaagaagcagctgccagaattcgtaaaaggaaggaagaaaaacttaaggagccagaaccaaaaatgaaagagataccagacaaactgaaagaagatgagccaagaaattcaacggccagatatatctattggggaggaagaaagggaagatttgatactcacgatcgagacata

SEQ ID NO: 80613 - DNA, 184 bp, Homo Sapiens
aaactgcctgtaaactttcatcaccagtattctgctacaggtatagacatggctaaaatgcattgattcatcctagaaggagggatgtttacagaaattaagccagattcactcaaagcaaagcacaggcttcaacatgaaacccctacccccacctaaaaagcctacagccgcgcctcgtgcc

SEQ ID NO: 80614 - DNA, 878 bp, Homo Sapiens
  misc_feature (223)..(233): n is a, c, g, or t
tgggcccaccccggggaaccaatatagatatgtccccctggggccccggggggagagaaggccttttaaaaaccaaacccgccccgggaagggcaatttccccaagccccccaaaaaagattttggtgggcggggcaggcccccagaccctgccctgcccttccctgaacttctgtttccagaggcaaagggtcatttcagcccgcttgaatcaagccttttnnnnnnnnnnnggtccccaactttgtttacccgataaggaaggtcagcattcaaagtcaagaagcgccatttatcttcccgtgcgctctacaaatagttccgtgagaaagatggccgggaactcgatcctgctggctgctgtctctattctctcggcctgtcagcaaagttattttgctttgcaagttggaaaggcaagattaaaatacaaagttacgcccccagcagtcactgggtcaccagagtttgagagagtatttcgggcacaacaaaactgtgtggagttttatcctatattcataattacattgtggatggctgggtggtatttcaaccaagtttttgctacttgtctgggtctggtgtacatatatggccgtcacctatacttctggggatattcagaagctgctaaaaaacggatcaccggtttccgactgagtctggggattttggccttgttgaccctcctaggtgccctgggaattgcaaacagctttctggatgaatatctggacctcaatattgccaagaaactgaggcggcaattctaactttttctcttccctttaatgcttgcagaagctgttcccaccatgaaggtaatatggtatcatttgttaaataaaaataaagtctttattctgtttttcttg

SEQ ID NO: 80615 - DNA, 813 bp, Homo Sapiens
  misc_feature (390)..(399): n is a, c, g, or t
gtagacaggatgatctgtctagattgtagcaaatgatggtacatattcacaacaaagttgtgccactacatttaataaacagccacaaacaacaaaaggacaactggtccccgatataaatggactagctacctggacataatatccttgtgaggcatccttaaaggacaaattgcagctggtatttgggtgaatgttgttgctctgtgcctgttgaatgtccatgctacaagaagttatgagccttgttctaagtacagatgaaccttgtatttgtgtaatctcccaagggagagctatggtttacattcaattttttggtctttctgctatgaaacgtgtttattttgcctctgtcaatgtgtttgcaaccttaagtaaggaaagggnnnnnnnnnntagccctctgaactctgatcttttgccgcttctgtagattttgattgtgaagttgggagtgaggacattcaaaagcccatggtgaatgcatatgcctttagaatattgtgcctgttttaaaatgtttgagcttttaaaatacgttgttaaaacatgaatccatttttgtaattgtataaatactcataactaattttgaatgctactgattgtgtaactgaatttttgtatccaaaaatacattcttgagtactacttttcctaccttgaaaatctatttcatttactaaatattgttttctttatgctaacttaactttaaaaggaatgttgccaagctgtctctcctcccccatcacaattgttagttttttttgctttctttcttcaataaatgatagcattatgatcttt

SEQ ID NO: 80616 - DNA, 1020 bp, Homo Sapiens
  misc_feature (27)..(27): n is a, c, g, or t
  misc_feature (46)..(46): n is a, c, g, or t
  misc_feature (84)..(84): n is a, c, g, or t
  misc_feature (101)..(102): n is a, c, g, or t
  misc_feature (112)..(112): n is a, c, g, or t
  misc_feature (125)..(125): n is a, c, g, or t
  misc_feature (148)..(148): n is a, c, g, or t
  misc_feature (178)..(178): n is a, c, g, or t
  misc_feature (187)..(187): n is a, c, g, or t
  misc_feature (194)..(195): n is a, c, g, or t
  misc_feature (207)..(208): n is a, c, g, or t
  misc_feature (225)..(225): n is a, c, g, or t
  misc_feature (228)..(228): n is a, c, g, or t
  misc_feature (292)..(292): n is a, c, g, or t
  misc_feature (298)..(298): n is a, c, g, or t
  misc_feature (301)..(301): n is a, c, g, or t
  misc_feature (319)..(319): n is a, c, g, or t
  misc_feature (345)..(345): n is a, c, g, or t
  misc_feature (349)..(349): n is a, c, g, or t
  misc_feature (437)..(437): n is a, c, g, or t
gattgccctgagccaagaatcgcacgngctcgtcggagatagtatntcttgggaatttgctgcatataatgagaagacattacntcctatgtctgcacttnnctgaaagatntaattaaacatgntgatgtcccaattaatcagatgnagagatccctgcttgtgtcaccctctaggnacctgcacnttgtgtnntgacttccagannggaaaaaaatgcaactntgnttaggggcagtgtttggatcacacagtgtctttcgttccctaccacagtaattcatattaaatnatgctntangattagtgtggatactantgctgctgtgttgctacctgaccttntctngggggggtacctcagaaatgagcatttgagggcaagcgaaaaagccctcttcatcctccagaggcaacaaagaggcagcagaaatggngaaagattgtgagaggcagggcttgggtctagacctggacttaggcaagatatgttgccctcaaccctgagttttcttatatgtaaaaagggaaggttgggctggactagatgaggtcaagatttgccattctgggaggctgatattccagagaatcaaaattaatcctaaaccaaagctttatggctgctacagagacatgtcacatttctgagacttgtcaccaagagtttgtccctcagactttggcgctgttgaatgcaaagacaaggatggccaccttctggttcttgcctgttgtcctcagctgagagcagtctcggtaaaggtggcaaagattctgtgacctcagaccggggaccaaatgcttgggagtctgatggccgggctgggccaccattctcatagctctcattctgtttggagcaaccaaaggatttgtgtgaagttatttggaaaaggaccttaactgagcagtaatcttttttctgtatatttggaatgtttttcattctgacctgttctgtcagtgattctactgaaaaacaatttaatcaatataaaaatgttcaagctatgcaac

SEQ ID NO: 80617 - DNA, 123 bp, Homo Sapiens
  misc_feature (74)..(74): n is a, c, g, or t
gtggttatagcctttgccagaattggaatctgttttgcttgagtcatgataagaagttggaagtttttcttccnatgctgtattactttaaataatattaaacctatttttcttcctcgtgcc

SEQ ID NO: 80618 - DNA, 954 bp, Homo Sapiens
  misc_feature (208)..(208): n is a, c, g, or t
tgaagcttaccggcctggtacaacccagagagtgcctgctgcttccccatctgctcacagtattagtactgcgactccagaccggacccgttttccccgagggagctcaagccgaagcactttccatggtgaacagctccgggagcgacgcagcgttgcttataatgggccacctgcttcaccatcccatgaaacgggtgcatttgcnaatgccagaaggggaacgtcaactggtataataagcaaaatcacatccaaatttgttcgcagggatccaagtgaaggcgacagttggcagaaccgacacctcaagaagtacatcaggggaaccaaaagaaagagacaaggaagagggtaaagattctaagccgcgttctttgcggttcacatggagtatgaagaccactagttcaatggaccctaatgacatgatgagagaaatccgaaaagtgttagatgcaaataactgtgattatgagcaaaaagagagatttttgcttttctgtgtccatggagacgctagacaggatagcctcgtgcagtgggagatggaagtctgcaagttgccacgactgtcacttaatggggttcgcttcaagcgaatatctgggacatctattgcctttaagaacattgcatcaaaaatagcaaatgagcttaagctgtaaagaagtccaaatttacaggttcagggaagatacatacatatatgaggtacagtttttgaatgtactggtaatgcctaatgtggtctgcctgtgaatctccccatgtagaatttgcccttaatgcaataaggttatacatagttatgaactgtaaaattaaagtcagtatgaactataataaatatctgtagcttaaaaagtaggttcacatgtacaggtaagtatattgtgtatttctgttcattttctgttcatagagttgtataataaaacatgattgcttaaa

SEQ ID NO: 80619 - DNA, 721 bp, Homo Sapiens
  misc_feature (142)..(201): n is a, c, g, or t
  misc_feature (607)..(615): n is a, c, g, or t
agaattcggaacgagggtgcctgccatactgcctttcttcactccattcttagctctgctagtttcttcttgtatgtcatgataaaaagggaatgtgggtgtgtaacttttgtgtatgtcccgtttccaaatttccctctcnnnnnnnnnnnnnnnnnnnnnnnnnnnnnnnnnnnnnnnnnnnnnnnnnnnnnnnnnnnntagcattccaacagtttggcaagcgatgcgttcacctgagattaagtgattataggcagtcagtaacaaaactgctagctttgctgtaatagtagaaaggcaacaaattcttaaaagaaaccaagaaggtatacaatcttgacagtctcttattagcttcctcctcttatctctttttttcccacattatctgttgcgtatctactacagtaggctgccacattatctgttgcgtatctactacagtaggctgcaaaacatacagcaaaaaggattggcttgaaggcatttgatgtttgtaaataaatccacaattggatccaagctgaagaggtgatacatagtcagcctagtagacaattctgagcatgtgcatacgcaggtaaagtccaggctatattaaatnnnnnnnnntgtcagtgcgttttttcatgttaaagttttttcaaagctttgttttgttccttgttgtgctgaccacaaacaagttttaagagtatcaagagtctggcaaaaatag

SEQ ID NO: 80620 - DNA, 628 bp, Homo Sapiens
ctcaaaaagagcccaaagtttggcatcccaaatagaattgcatatgcattcctttgcttgactttaagagcctctgttaccaggtcttttttcctgagatttctcccagcacacatcttgtattctaatcaacctatgccaccatatatttagatcctgcatgttcttttcttaactgtgttccctcattcaacagataaataataaagggtaccgtaagccaccaaagataaatgaccctttttagaactcagtctacttaggaagccaaatgtttatttcctttctggataattttgcaatgctagagcctcattaaaatgtaaatgtaagtttaagaaatctgaagagtggatttccaaacagaacctctccatccccaaaacataatgattgtcctttcccctgataactatatagttttgaaattagttttacagtgcagaattggtttgtttcctttacagttttgtcttttgcttttttaatgccaaaggatccgtccttttcttgggacagtgcatgctagaagcttatctaagtattattagcactttaaaggtggacatatgtgcaggcttttgagcagctggggttttatccatctgttactgcccttgttctactc

SEQ ID NO: 80621 - DNA, 513 bp, Homo Sapiens
attgttaacaattataaacatttattaagcaccaagaatatactgtggtggttgctatatgaaaacataattaccaatatagtatccctgccattgagcttacaatctaaaacgaaatacaaggctatgagcctatctaaaaacttccttaacttagaaatggctacaagacaatttgaaataattcattgttcatgccaaaattctaagtactgtttttcttagcaagtgtaacataatcaggaacaatgggtacaagtaaaacattctttggatgatattcaaagccttattagcactgcacctgaataataggtcattttgcctcactcatttgccaaagtagccatttctaagttaaggaagtttttagataggctcatagccttgtatttcgttttagattgtaagctcaatggcagggatactatattggtaattatgttttcatatagcaaccaccacagtatattcttggtgcttaataaatgtttataattgttaacaataaaa

SEQ ID NO: 80622 - DNA, 1168 bp, Homo Sapiens
gtgtctgcagggggcatgttcccgtttactgagcgcgagttctcttggggtggaacggggaccacccgtgcctgctcctggccaggcggggatccccagcagggctggggccagcaagggagtggggccctcaggccagggtggaggctaggagcagtgccaggacggtgagaacaggtccaggtcctaggaggcagggcgtccccgagagggcctcttgcacgctgaggtctaggaccaggtacccgttggggatgccgccctgtagccccagccccagcgtgtccaggtcgtcctgccgctgccgtaggatccagtcccgcaccgggcggtgccgctcctccgccttcaggccctccacgtggggtcccagaagtttctgcacctcagccacagtcaacggcagcaccgcatccgtccgcagcttcatgaacgtggccaagtccatgctcacattctgctgactgagcgccttcaaatcctccgtgggggccccacccaggaaggactggatcttcacgaagtattcggacccgttcatgttctggaaagcaaggcgggccttgggatagaggacgtccagctgccttgggtcacacgtgtccaggtcctggggcctgaccgcccagatgctgctggggggcacggagctcagctcctcggggctgagggagcacaggtacccagggtagaaggcggtcagggtgtctagggtgtctttgtctagctggccccttcccttcacaaagcggtcgatcagggtggccacctgaggactcatttcgtgccctttgttgacttcaagcaaagccttcagggtctccaaggacgtcacattccacttgcgaatgtcctcagggctcatcttgaggaagaggtagcccaggtgctggatcacagactcagggtaaccttgtgggtaaagctcatccagtttatgctttaggacgtccagctgctcgtaggtgaaggggatggcgttcacgcggtccatctgggtggccagcagggccgcatccacgcaggcttccagatcccacttattgtataagattaggcttttgtatatcttacgggccttatagcctgaaagacaggccgtcttctacacttcccaccgtaaccacgaccgtaggatggtctgttcagcctaccggcaggattggtc

SEQ ID NO: 80623 - DNA, 669 bp, Homo Sapiens
gcagtggtctgtgacggtcaatgtctttacttctaaagcatacattgggactcactatatattaacatcaaaagtggctacctaaaatggagtcattctttttaaaaatccaaatcctcacatttttatataagatccaaaatgacatgaaattaaactctacaatgttatgaatagtataacaaactgctttcagaaagcaaaatgaaaggaaaagaattagcagttgggacggttgtaggcctgggttccatgtcttttgaggcattgtgacagagagccagcaccgaggggaaggaccagcccctccctgtggccacaggaaggaactcagtcagacagaggaggtgggcgtggctggtcagccttcttacggtgacagagaagcatggtggcatctccctgcccctcagggcccttggtgtgcccactgattagtcttctttcaagaccagggaggggtggggctggaagagggcaggggatagagcagggttcaaaatgattattttaataataaaggtccttctgggcttcctaaggagggccgtagccacccagcgatgttggtcaactccatccaccaggtcccccacaggcttccttaacccacttgctctttctgctccctatgactgggataccctctgcttcatgagcctcatgggc

SEQ ID NO: 80624 - DNA, 570 bp, Homo Sapiens
aatgagactgtgctattcactgttcttttaggaatctctggctccccacaaacactattttgtgaagacatgctccagaccactgtgtatgccaatatctctttctccccagagcactgctgacacccctacacaaattaatgtccccacatcctgataacatgcagtgcctcttcaccagccatgccttttgcctcaccctttctgttgctatgttctctatcctgcgttggacaaagagtgtcaggcgaggttttctaggcatctccatcaaaatgagaaggaaaaacctccatctctcagcacttattaacctaaaagataaagttgcactttctacttttcttaggtggggattacatgagccccaccagtcatcacggacacatcgtttgtacctatcagatgtatcagtagagatggggacattaatttgtgtaggggtgtcagcagtgctctggggagaaagagatattggcatacacagtggtctggagcatgtcttcacaaaatagtgtttgtggggagccagagattcctaaaagaacagtgaatagcacagtctcatta

SEQ ID NO: 80625 - DNA, 2092 bp, Homo Sapiens
tttcgttcgtgcgtctggtctctcgtgctgtgcaccttttcgggtggttgtggttctgtttcatgtgtgggctgttgcttgttgcttgctcgtggcgtatatgcgtgcgtgctggttgggggtcctttgggggcgtggtctctgtcctgggtgtgcgcgcttggcgttccgtgcggttgtcgtcgtgtgtccttgtgggccctgtgggcgtcgcggtggcctgttcctgtcccatttctggtgtgcccccgggtgtttggcctaggtgtggtgggctagtgtgtatgtggtcggcgttgggtttgttgtgttgtgtggcatgcagtcatggtcgtgcttattcgggtctggtgtgtggctgggtgccgtgttgtggattgctatctcgttgtctggggctttggctccgttgcgtaggtgttggggcgggggcaggcgtgtgtggcggtccgccttgcgggtgccgctggtatcttcggggtgtatggctctagcggccgttgcgtttttttggctctcgcctttggtcgtcgacgctgagcgttgagagaggggcgtgaaggttcggggtccagtggttgggatgggacaccagttcgcgctgaaggcaggctgagccccgctgggcacggcttgctgcgcaagtggtatccctgggcccttggggctttggcccagcctcccgtggcctgctgttccttccacttgcgagcgcctgtggggctgggtaagcggttcggaacacgtctggagcaatggtgcccagatggcactctagcaccaggtgtagtgggaactcagccacctggacgtaaccccctttgggtttgaaagactgggcgtccatgcacttgctgagctggatttgacaccagggcagatggacatctacctgctgctgtggccgccagtttgcctcacctggtctaacggagccaagaacgtgcctaacttgagaactgtgttgtgagatcaacaggacggtgcctgtgccacactcagtgcagtgccagatggcaggactaacacgggctccatcgtggttatcagccaggagcagctcaggatgtgactgggccatgtctgactcctctttccctgtctgcttggatgtgctcaggggcagcagaagataggaaaagcgggacccaaacagtggtgctggggaaatttgttcctgttccctttggaaggctgagtgggtgatgcagcacaggaacaaggcttggacgtcagaggtctcatcttcactgtgacaaagcataaaggacttggggttgagcgtgtgtgtgggctcaagtgaccatgcaagtgctgtcacctccttcctaagaccccatccttctcccaagtcctccgacaagagctaccttcttcaaaacaataacagaaacacatcaagcttggcgtcactgaaattggaagttctgaattctgccgtcaccccagcaacagtgccaagtatgatgagacacttgacccagcacttggcttgatgtctttggctgttaccgtggcaacctaggtctcagcaggtctggctgaagcccgccattgccttttcttccagtgggattgtactggaggggctgggcaatcaatttatgttctcgaaatggaaagcaggatctgggcgcgggaggcaatgcaacttggagtagcttccatggcactgagccccccggcctgcagctcttgcatcatgtctcaggctaagtggcctcagggagtggagatagggaacaaaaaggcaggcaaaaggtacagtgcccacttgagccagggagcatgcagctgctcagacacctggtaggtgactagcaggggagggacacctcagctctccattctgccgaagcgcccagggatcataacctcctccccgcacttcctggggtggggatgccaagatgtttgggtgttgcataaaggaagatgttcaggtgtcatgttggaaagcatctgacctcgcggatgtctacctgcttaggtgtagactgaactcaaaggtcttcaggggcaggcaacatggagcctcgtgccgaattcgccacccaggcctcgctaccttaggaccgttatagttactgcc

SEQ ID NO: 80626 - DNA, 1272 bp, Homo Sapiens
attttcaaaagaagggttgatccatgttttcagtttattgccatacagaaaacattttataaaataatatggtagacttctacttcaacatattcacgtaaaaacatcacagtgcaagaaagtgatcacaattaagcatgaagacatcaaaagccagccagtattttaactacagagcaaaatagtcttgctgtcccttcctagaaaatgttggcacattcattaactgctcaggttacaaaaatcacttcgtgtccacttcctggccttcaaaaaattttcataactacactgtgttacattaatgctggtggacaaattagctcctataaaatctaaaaacctttcaggtggcacaatgatttaaaaccaactaggaaaaagctctcccagaatatttttgtatgtaatattctgtccattaccacaataacagagtaaaaagctgttttaccttaaaaataagctaaaggaagataatttcatttttcctttaaaacatttcttagcttttaaatagagagaaaaagtttaaattttcttggggaggagaatatttcataagtaaaaacatcaaatgttgtacaaatgtttcatttaggaaacaaatacttagattcaaaggattctaaaacatttcaacattataagaaaactgtaatttaaagctaaaaaattgtaatacatcgaactaatataaattactcattaacatgttctattgtttttcacaaaatccataattaaggaatagtgggttaggtgagacatttttcccaacatttggtcagattagctaagcagctctgggcaaaggatgcctcctctgaatcaggatcttggcctcttaaatgagggcactggactaactgcccattcacatccctctaatctacacatttatcacaactgttcatcttatataatccttccaaggatgaagtgtttcaactcagtgtattttccagacaaagctcccctgtttaagtggcaaaactcttctttaaactttaaaatttttactttaaaatgttatttccaatattatttcctgccaccttagaagatgttgagggataactaacaacacagtctctaaatgacacagtctcctggacttgccagctgatgacaggatctgcagatacgtctcaggctctgctccaattctgagcaactctgggccacactgagtgagaaagagaatgataccacctacaccggacgcgtgggtcgacgatatcccgggaatccggacctgtaccagcctgc

SEQ ID NO: 80627 - DNA, 1326 bp, Homo Sapiens
gcggccgcccccggtacgacaagatccggactccggcccggactacgaggcgctgccggctggagccactgtcaccacgcacatggtggcaggcgccgtggcagggatcctggagcactgcgtgatgtaccccatcgactgcgtcaagacccggatgcagagtctacagcctgacccagctgcccgctatcgcaatgtgttggaggccctctggaggattataagaacggagggcctatggaggcccatgagggggctgaacgtcacagcaacaggcgcagggcctgcccacgccctttattttgcctgctacgaaaagttaaaaaagacattgagtgatgtaatccaccctgggggcaatagccatattgccaatggtgcggccgggtgtgtggcaacattacttcatgatgcagccatgaaccctgcggaagtggtcaagcagaggatgcagatgtacaactcaccataccaccgggtgacagactgtgtacgggcagtgtggcaaaatgaaggggccggggccttttaccgcagctacaccacccagctgaccatgaacgttcctttccaagccattcacttcatgacctatgaattcctgcaggagcactttaacccccagagacggtacaacccaagctcccacgtcctctctggagcttgcgcaggagctgtagcctgccgcagccacaaccccactggacgtttgcaaaacactgctcaacacccaggagtccttggctttgaactcacacattacaggacatatcacaggcatggctagtgccttcaggacggtatatcaagtaggtggggtgaccgcctatttccgacgggtgcaggccagagtaatttaccagatcccctccacagccatcgcatggtctgtgtatgagttcttcaaatacctaatcactaaaaggcaagaacactggagggctggcaagttgaagtaagatgaaagaaagcaggcgttcagatgacactgctgatctggtcaccattctcttgtctctggaatgctcccacctaagtggagtagaagaacgtagaggggtccccccaggattagggtacggagtaacaccagttctgccaactctgtgcacaccatcctacaggcctagacgtaagaaggacacaaggaccgtgataccttccatcggctgagacggacaagttacaggatgcagccatccggtccagtaagcctaatagaaagacaaccaaccgctttgtgaagataagccgcacgcccacactcagacccccaggataacgcaaagaagcgaacagggcaggctctcctctcacgtgccggca

SEQ ID NO: 80628 - DNA, 1337 bp, Homo Sapiens
  misc_feature (749)..(749): n is a, c, g, or t
aacgggtgatgcggttggactgaggtgggattctgtggtgaggtcctgtgagatctgaccacctggcccccgtatctccctccactggtggcaggtgatgtgctggcatccctaggcagcagtgtatctgcttcctgtctggggtgtgagctgcatttattctcagaatgatctttattgataagacttgagctggccttcctatcatggatgtggaatacattaatgaccttacaaagttggtgggaacagatactttaccttcttaaacaggagtttaggagcagtgggtccccatcttttggactagctcttaacgttacttttccccgctgtagtgtagcacagccactccccttcactgggggacctcaatgagttggtcagctctcttggccttacatgtggcagttgttttcttgtttgcaggtgcggccgggtgtgtggcaacattacttcatgatgcagccatgaaccctgcggaagtggtcaagcagaggatgcagatgtacaactcaccataccaccgggtgacagactgtgtacgggcagtgtggcaaaatgaaggggccggggccttttaccgcagctacaccacccagctgaccatgaacgttcctttccaagccattcacttcatgacctatgaattcctgcaggagcacttaaacccccagagacggtacaacccaagctcccacgtcctctctggagcttgcgcaggagctgtagctgccgcagccacaacncccactggacgtttgcaaaacactgctcaacacccaggagtccttggctttgaactcacacattacaggacatatcacaggcatggctagtgccttcaggacggtatatcaagtaggtggggtgaccgcctatttccgaggggtgcaggccagagtaatttaccagatcccctccacagccatcgcatggtctgtgtatgagttcttcaaatacctaatcactaaaaggcaagaagagtggagggctggcaagtgaagtagcactgaacgaagccaggggttcagatgacactgctgcatcctggtcacattctctgtctcctggaatgctcccacctcaagtggagttagaaggaaggtagaggggctctcccccaggattttggtgttttgactaacaccagttcctgccaacctctgttgccaccacctttccttccaggccctaagcacgtgcagcaaagcacaccacagcacctttgataacctctctccatcctgggcctgatgacctgctctagactgttatagagggataagcagctcattcccctggttcctaataaaaagcctttaaattaaaaaaaa

SEQ ID NO: 80629 - DNA, 953 bp, Homo Sapiens
  misc_feature (633)..(633): n is a, c, g, or t
  misc_feature (646)..(646): n is a, c, g, or t
  misc_feature (696)..(696): n is a, c, g, or t
  misc_feature (784)..(784): n is a, c, g, or t
cttgtttgcaggtgcggccgggtgtgtggcaacattacttcatgatgcagccatgaaccctgcggaaggctgatctgctgacttggggctctgaatctggatactctccatcaccggttggctgctgtcaccatttccttcctcgttgatggcactactagtggtcaagcagaggatgcagatgtacaactcaccataccaccgggtgacagactgtgtacgggcagtgtggcaaaatgaaggggccggggccttttaccgcagctacaccacccagctgaccatgaacgttcctttccaagccattcacttcatgacctatgaattcctgcaggagcactttaacccccagagacggtacaacccaagctcccacgtcctctctggagcttgcgcaggagctgtagctgccgcagccacaaccccactggacgtttgcaaaacactgctcaacacccaggagtccttggctttgaactcacacattacaggacatatcacaggcatggctagtgccttcaggacggtatatcaagtaggtggggtgaccgcctatttccgaggggtgcaggccagagtaatttaccagatcccctccacagccatcgcatggtctgtgtatgagttctccanatacctaatcacntaaaagcaagaagagtggagggctggcacgtgaagtagcactgaacgaangcaggggttcagatgacactggtgcatcctggtcacattctctgtctccctggatgctcccacctcacgtggagttaaagggaagtanaggggctctccccacgatttgggtgtttgactacaccaatcctgccaactctgttccacactttcctcaggcctagcactgcacaagcaaccaacacctggaactccctcacctggctgatactgtcaaatgtaagaggatagaaccatcctggtcctaaaagcttaat

SEQ ID NO: 80630 - DNA, 597 bp, Homo Sapiens
ctagccaaggctgtgggcggatcaagtatttgacaaactgagacacccaccacactgcagggtcaccatgcactcgtacaagtcgatctgcgaggtcttctggtacagccaagggtaaatatggaggacggggatgaagactgtctacaatgggaagctcgaccacttgaacatttttgtccttcacttcacctgaccagtgtccagtggagatgccagatctgtctgtgcatgtctcacttacaggcctaaatacagtctcccatccaccagtagcatagcgccaattctgagattccaagatgagtgttcgctgggtgccatatgcaatcatgaagcagtagaccacatgatggagctgacagccatagccacagcctttgttgatattacacaccagctttttggctttgctgcagtccttgggattctgaagatatgttatcctccgctgaaccagttctggcagatctttggcctctttttcccgccaatcacctgctccatctgtctgactgaggtagtatagatccgtcattatagacctttcatgatgtcctaaatcctggttaggatgctgtacggatcctctagtga

SEQ ID NO: 80631 - DNA, 1083 bp, Homo Sapiens
  misc_feature (97)..(97): n is a, c, g, or t
  misc_feature (252)..(252): n is a, c, g, or t
  misc_feature (259)..(259): n is a, c, g, or t
  misc_feature (333)..(333): n is a, c, g, or t
  misc_feature (1008)..(1025): n is a, c, g, or t
gctcctgacagtctgctgattgttgtttcgccctcccaaaacagcgtacacttggaggaaggcataattccctgagacggggcatacactgatgctntatgatttcgtgccctacccccaccagttgactggcatccagcacaagagtttactgtacccaacactgacaaaaacaaatgagcttgatgttagcagcagtgccagtcaactgttgtttatttgtttccccacagtatgagacactgcatttcntcattcntaagaaaaccagttgcttgccatgacttgttagcgtttaggtttacaaaagcttgttgttgaatgttgaatatntgtccaaaaggagtttgacaaaatagaagctgcttggtccctgttctgcctgctaggtcataaggatgaaggccatgtggctggggtacttatgtcaagtccagaatggggcagtgtccctctcctacctctctgcggagacgcaattgaaggtcaagtagactcagtgtagggcaggcagctgtcatgctgcaaagaagtttagaggagtctttgggttggggaggtgacaggtaggtaggacaggatctcttaagatgggaaagatactggggagaggagggctgcttggccccagggaactgcagtgaggtggaactgagctccgctcctgaatctccaaaggagcccatgctgcccggcttccctgagtcattttttccagcatcctgtcagatccctcaatgtactgatttcccccttgtgttaactataccgatattatttttttagcaattgaaatgcacttttttatttcaactcaatcatgattttaagtataaaaaatttatagattgttaaaactacttttttgtgtatttttaaccactcaatgtagcattgtatattttattcttgtgagactctggtacaggtgtgccgcctaatgatttttctgagatgctgggcctttggatgtgtacggtaaccaacttaatgctaatgttcaaagtnnnnnnnnnnnnnnnnnncctgagcagcggccgcaagcttattccctttagttgagggttaattttagcttggcac

SEQ ID NO: 80632 - DNA, 812 bp, Homo Sapiens
ccatgttaagaacaacaacaaaagatctcaggtactgaaaggtgatcacatgccacagttgggacagtcccagttaacacctggtgtgattcctaataatgcctatttcacctaccacattgccctgtctggactatacatgttatgattgctcagccttgatgctgagtctacctacgtaaaaatgagggtgggattcttccccggtgggtgttaaccagggatgtgcagccgagtcaccgaggagctttggagtagaaacatacctcagctctttgcagggggatgctgcctgggccagcagagaggggactcaaaagagggtttgagggtgcttccctggtgattcagacgtccagccttggctaaagatgatcctttcattcatcattcagtattacacccagccatcaattccttaaatgtgtattagttgagatgttgttccagctcccaaggtggccagcctgggagttctatttagttgaaaagacctgagtgcatacagcatggtcgttttccagtacaagaatttcctcttcaagaaatatgtgtttgtaacgcacttcacatggtttaaccaaattgctttggaaaaaggcggtccagcccagattgaaagcaagctctcgtcctatacttagcacctccctgtgagtaatcagcaacatcaaaatgcccatacatccttgcaagcaaacatttaccatgaaacaaaaactattccgtaaaatactttcagagtcatttatcaaattgatttgctgcagtattatttgcccccccaaaaaagttatcttaagttgttgatc

SEQ ID NO: 80633 - DNA, 504 bp, Homo Sapiens
ctctatgcctaatattcatcagccttcattactctctagcatattcaccttgattcaacagattcaaacttcctacagccttctactgatgtcttacaagctcttgcctctgtgcctttctcatgctattctttttgcttagattgctctttggtcccagctcatgttcatcactcccttcaaagcctttcttcctttatatcttctgactgagctctccctgattgacatcacctcatgcgatgacctccctcattctgtgctgcctcagcacttatcttttgagtttgtactgtggtccatgtacttactaatatgttgctttgtaattattttctagcactctgtgttacagtttcatatttgtatttatttccaaaattaaattgtaagctccttgagggcaggaataataacttttacatttgtatctctgcacccccgagtgcctagtatagtgctgagcacatagtaggcgtttaataaatgcttgttgaagtaaaa

SEQ ID NO: 80634 - DNA, 1004 bp, Homo Sapiens
tgcggccgcagctgaagttgggccgagagccggcgacggccccgcgccggggtcgcagggtaccagtgtgcggagttcctgttgccaagctgaaggtggccctgggcaggcacaggtgtggtcatatcttcagccaacaggaccatcctccggagggccacctctggggacttcctacgggaagagagtgacagatttggtgcttctgtgtgtttctgccgcttcagtggggccgctgcgggagacagcgggtggatcctccagcagcctgtctgctgagcctggcttctcaagtctactgttaaaatcaggaccgggtcgtgtccgagcctacaggccctgtctccgctccccaggcctgcaggagttgagggctgcacctgctcgctggagagggagaggcagatttagtggacgcctggcatggactcggactggcctttggaagctccctgccctgacggggttgcctgtcaccactgcgaagtgaggcttggcaggacctgcacctgagaaaggctgtgtgtggtcttggggtccacacctgcagagctaacttactgccagacggcgacttactgtgggccaccctcagtgaaccggggtgtcctcagctggccctacagagcacttctgtgctggggatgagtaggaactctgggcgaggagggtcccagcgccgcccctcgatacagcctggctctgccctctgcccgtacttataccaggtgggatccctgccctgcattgcctggggattggctgggcttgggcccgccctgctgtggaactggatgttttcagggagcccagcctttcctcatgtcaacacagttcacaatatagttttcaaagtacagtttaaaactcaaaagtaaacttttcagcaactcaaaggtttgctgagtgatctgaagcactctggccactttttggggccatgggatttggttcacctgaaacagccagtgagaggccgggtgtggtggctcacacccgtaatc

SEQ ID NO: 80635 - DNA, 502 bp, Homo Sapiens
  misc_feature (274)..(286): n is a, c, g, or t
aagggaaacgaaatggaattcgaagggaccttttcactaaccccacttctgtgtgttctgcatggtgcctgccccagggcatctgccaactccagtatcagctctcacagtgtacttggtaccatccctgggctctgctggcgagacgaaacagctgtagagatgaaaacaggctgcagaggctggcacagcctggccggcttttctccatctggggacagtcctactccaagaacactgcacaccagctcctcacacagatcccacttactcnnnnnnnnnnnnncagagaccacagaccacagtgatttttcttttcccttgtttaattaggcaatacccttgttaattgccctttggcaactaacttaaccatgtgcttcccacacagtacatcaggaaaacttacagggcaatatttttaacttggggcaggaagaagggagcagcagagaattgactagatatagcacctattaaaagagaactcttgcttcttctg

SEQ ID NO: 80636 - DNA, 685 bp, Homo Sapiens
  misc_feature (534)..(576): n is a, c, g, or t
cttcctgaaacagctttttgtaaaacaagaaagcagaattgcaacacaatttaaatgtctgtctaggtcacaaaagggatgcaaaatgtttgtaatatgattagtatgtattcatatagtgagtcattcttacacctatacataagattattccatgattaaaggtagcccagctctaataaccataagctatattagtggatcccttttcctattataacattttagtattacttctgatattgattcccttaacaaatggagtctacaaactgaattttaaaaaattgttaaaagtgactaaaactctgtaaacagaggagttgagtttacaaaaaattctgggagaacaagcaggataaaactgagcaagattatcaataagtgtacatctgaaactcccatttttcacagttctgatactaatacattcttaaggaattttgcaaaagttaatctgctgagtagaaatataccttgagaccaaactctttgtaactgttctcttccagatgtggtacataagattagtcnnnnnnnnnnnnnnnnnnnnnnnnnnnnnnnnnnnnnnnnnnnaaaagaagtttttgacaacaaaaaattatcttcgcagattgacaattcagtttcagtgaaaaatcttcatttttatagtctctttttgttttcatttgattaaagagaa

SEQ ID NO: 80637 - DNA, 153 bp, Homo Sapiens
ggcacgaggctttagttcacttctccaccttccatgcatggttgccatctgacctggctactgagaagatcagacctcccagtaggagatccaccacataagctaaaaataagagctgctacttctctgcagataccattaacccaattagat

SEQ ID NO: 80638 - DNA, 1024 bp, Homo Sapiens
  misc_feature (378)..(495): n is a, c, g, or t
  misc_feature (501)..(522): n is a, c, g, or t
  misc_feature (565)..(902): n is a, c, g, or t
  misc_feature (964)..(964): n is a, c, g, or t
aacaaaaacatttaatatttatctacttacatacagtaattaagaatgaatagtttaaacagattattgcatttacatagcattttcctgttttcaaaaaccatttccatatttagtactcaggaaacatggtaaacagatattaccgttcccatactatgggttaaaaaactgagatttagagatttaatttgccaaattgcattatgagaggaaatttaagtggagggatgattcctctacttctacatggaaataaagcaattagttggatgttccagagcaaaagaaaagcctcagacttctttatgggctgaaaggagacagaacatccataaactcatgctgtcttcaaaagcagtatttgagcttttgaannnnnnnnnnnnnnnnnnnnnnnnnnnnnnnnnnnnnnnnnnnnnnnnnnnnnnnnnnnnnnnnnnnnnnnnnnnnnnnnnnnnnnnnnnnnnnnnnnnnnnnnnnnnnnnnnnnnnngatacnnnnnnnnnnnnnnnnnnnnnnggcctacagccgcggccgctccaaccctcgtgccgaattcttnnnnnnnnnnnnnnnnnnnnnnnnnnnnnnnnnnnnnnnnnnnnnnnnnnnnnnnnnnnnnnnnnnnnnnnnnnnnnnnnnnnnnnnnnnnnnnnnnnnnnnnnnnnnnnnnnnnnnnnnnnnnnnnnnnnnnnnnnnnnnnnnnnnnnnnnnnnnnnnnnnnnnnnnnnnnnnnnnnnnnnnnnnnnnnnnnnnnnnnnnnnnnnnnnnnnnnnnnnnnnnnnnnnnnnnnnnnnnnnnnnnnnnnnnnnnnnnnnnnnnnnnnnnnnnnnnnnnnnnnnnnnnnnnnnnnnnnnnnnnnnnnnnnnnnnnnnnnnnnnnnnnnnnnnnnnnnnnnntcacaggggggtatacggtatcacagatcaggggatacgatgaagacatgtgagcaaagcancaaaggccagacgttaaaagcgcgtgtggtgttttcataggtcgcccctgacagataaaa

SEQ ID NO: 80639 - DNA, 737 bp, Homo Sapiens
  misc_feature (372)..(431): n is a, c, g, or t
cgagcttactctggacatcctggaattatggtacacttccgtgctttagattacagacgtggtcagcaaatctgttgtgttattggagtaaggaagaacagctcagcttagttctcaagatgtggagattggagtagctgaatcaagaaactttctagtaaaagagggaagaaaagcctcaggtatttcacaagaggtattgcctaattcacctccctctcagaagtgtgccttctgatggagtgtgcactgcccatgctctgcactgcattcgtagcattcctgacactcaagaggaaggagaaatgtaggtaagaaggtgccattcagcaagctcattcgcatccggcagctggagaaatgaaatcaggnnnnnnnnnnnnnnnnnnnnnnnnnnnnnnnnnnnnnnnnnnnnnnnnnnnnnnnnnnnntattattataatataatgggcaggaatagaaatttctggcagctgccttagttaggttccatatgataggatgcttccctttgctgtctaaattttgtgctcacgaaatttggcttgtggaggataggttgggtaagggtagtagtacggaatcaggggaggaaggcagtctaaaatttatttgcactgcttgacttttaactttgtgctttggttcggagttttaacgaacggggcagagagagacaggtttctaatttgggacagggagaagtcagtcttattttgtatagtgtggcacattcc

SEQ ID NO: 80640 - DNA, 1458 bp, Homo Sapiens
  misc_feature (1344)..(1344): n is a, c, g, or t
cagtcgacggtaccggacatatgcccgggaattcggccattacggccgggactcctgacctcaggtgatctgcccgtctcgtacctcccaaagtgctgggattacaggtgtgagccaccacgcccagccaccactacgcactttaaaaccaaaaaaagctcaaagggatggatcattgtccatggctcaggagccccactgtggggtaagtgtgatgtcgatggattaatttagacagtggtgtattcatcagggcaaaggaaattcttccagaggtgatgatgcggcagatattcccagtgctctcccaaagcaagctggccctcttgtcatcctctcagtgggcggcaccagctgcccctccttccacaagtactcaagcctgtttgtaaatactgaaggaattgatggggttgaggaaaggaggtgcatgtgaccagggtcccaaggccacagcttttcagatcctaggaagcaagtggcatttgcttgagttgtggcctcggaaggagaatgtttatctgttttctaactttgctgacaccaggattctccctgtcattgagaagaaagcattatctaattaccttcaggtggtttacttattctgtaaagaatatgtgtaaatattttgtacagagccctgtatcaaataaacagccatatgtggttactaatcacctcttctgtcattccgtccttggccaccgctcagtgggaatggtctctgatctggatgctcccaccttccatgtcaggcccagaactgtgccatggtctgtggactcctggtcagccttgactggctaggagaccttgggcagtacctacagtcttgctgtttctgtttcatctgcaagaattatgacccacacactccagctgcagcccagggcactgtgatattttatacgtgtgtagatgtttttgtccacagttcctggttcatcactcccataaccctttgttataatgttgggacactgcaggcctcagaaaacggaatctctgtctgtgaccttctcctgccccatttcacttgctcaacaccagactttaatctgactgtagctcataagaccctcattccagagagggtgctgccccatacccggaaggaggaacgctgcacagagaggccaagaagcatctggacagacaggccttgctgggtttagaccttatgctttttgtccagtttcatctcaacacagctgccatgcttcagccatgcctatccaatgacggtctccataaaaaggcccatggaacacggggaagcttctgaaaaagctgaacaatgtggaagggaaggggaaccgagaactttgtccatgtgccaangagggtggcgcacccccactccatgggggacagaagctccaagcatttgcccaggacccgtccagacctcacctgtgtgtatcttcatctggctggtttacttatttggtatcc

SEQ ID NO: 80641 - DNA, 533 bp, Homo Sapiens
  misc_feature (465)..(479): n is a, c, g, or t
gtgcctcccctttccccagggcacctcgcgctccttgaaggttcggacgaggaaaaagactgtgccctcagacgtggacagctagggtctgctgcatctgcccccttcttacctcgtgccctgcagggctccagggctatttggagggaccttgggctgcacatctggcctgcctgcaccagctgcctgggccccaccctcctgactcctgctgatggttaagggccgggagcagatgctgccaaggccacatgtaccaaagcaggctgggcccagggttctatttattgccttgctctgccctctcccttccccggttgtgggacaagagccctccctgaacccctgcaaccctccctgaacccctgcaaatgaaaccaaacgtccacctgggggtgttcattccttcctgtccttcaaagtacttgatagcctttcataaggcctggcacatgtgtcctggtnnnnnnnnnnnnnnntggtgagtgaggccaggtttccgagtgttttgataaataaatccataaaggggc

SEQ ID NO: 80642 - DNA, 1697 bp, Homo Sapiens
  misc_feature (1148)..(1148): n is a, c, g, or t
  misc_feature (1624)..(1638): n is a, c, g, or t
cggagccctggggttgggcagcactcggttccgtgcaactttcaagtgagttgcgaactccgccctgtaggccggtgctggtggcccggcgcgctggaaccgcggcgacccgctccagcgcgggaccagcagcaagggccgagcgccaggttctccgcggcagaaagggcgggtgggagctgtaactgccccggccgcggggcgcgcccgctcccaagtcggcttcctccccgccggggccgctttgcctcgggtctccccattctccaggtcccctgaactgcacagtcggaggccgtgggcggcgggctctgcctccgccgagggacagccggatcgcccctctgcttcccgcaactgccctgatcaccccccgtcccagcccttgagtgaacgtccttctgagcggcttcctggggtcctccccacgtcccaaaggccggcaagatggtgtcctggatgatctgtcgcctggtggtgctggtgtttgggatgctgtgtccagcttatgcttcctataaggctgtgaagaccaagaacattcgtgaatatgtgcggtggatgatgtactggattgtttttgcactcttcatggcagcagagatcgttacagacatttttatctcctggttccctttctactatgagatcaagatggccttcgtgctgtggctgctctcaccctacaccaagggcgccagcctgctttaccgcaagtttgtccacccgtccctgtcccgccatgagaaggagatcgacgcgtacatcgtgcaggccaaggagcgcagctacgagaccgtgctcagcttccgggaagcggggcctcaacattgccgcctccgctgctgtgcaggctgccaccaagagtcagggggcgctggccggcaggctgcggagcttctccatgcaggacctgcgctccatctctgacgcacctgcccctgcctaccatgaccccctctacctggaggaccaggtgtcccaccggaggccacccattgggtaccgggccgggggcctgcaggacagcgacaccgaggatgagtgttggtcagatactgaggcagtcccccgggcgccagcccggccccgagagaagcccctaatccgcagccagagcctgcgtgtggtcaagaggaagccaccgngtgcgggagggcacctcgcgctccctgaaggttcgggacgaggaaaaagactgtgcccctcagacgtggacagctagggtctgctgcatctgcccccttcttacctcgtgccctgcagggctccagggctatttggagggaccttgggctgcacatctggcctgcctgcaccagctgcctgggccccaccctcctgactcctgctgatggttaagggccgggagcagatgctgccaaggccacatgcagggatgcacccacaatgtaccaaagcaggctgggcccagggttctatttattgccttgctctgccctctcccttccccggttgtgggacaagagccctccctgaacccctgcaaccctccctgaacccctgcaaatgaaaccaaacgtccacctgggtgtgttcattccttcctgtccttcaaagtacttgatagcctttcataaggcctggcacatgtgtcctggtnnnnnnnnnnnnnnntggtgagtgaggtcaggtttgcgagtgttttgataaataaatacataaaggggcaaaaa

SEQ ID NO: 80643 - DNA, 971 bp, Homo Sapiens
gcggccgctgaccatgggaaagaagatggtttcctgcagttccgcaggaatgccggggccgttgtcgatgatctcgaccttggtaaccaggcggtggcgcacatggccgatggtgaactggcgcagagcgcgggtgcgcaggctgatgcggcccaggcgcagctcgttctggctgctgatggcctgcatggcgtagcgcacgatattgagcaccgcctggatcatctgctcgcggtcgatcaatacgtcgggaatgctcgggtcgtagtcacgcaccagggtgatgcagccttggctttcggcctcgaccagctggcacacgcgctccagcacttcgtgcacgttggtcatcgccagggacggcaacttgttggagccgagcatgcggtccaccaggttacgcaggcggtcggcctcctcgatgatgacgttggtgtagtccttgaggtgttcctccggcagctcacgggccagtaattgcgccgcgccacgaatgccgccgagcgggttcttgatctcgtgggccaggccgcgcaccagcatcttgctggtttcctgtttggacagctgcgcttcttctttagtaatgcgcagcagacggtcgcgcgggtgcacttcgagcagcagcagggtcgcgccgttgctcaaaatcggggtcacggcgtagtcgaccgtcagggtctggccggtgagggcggtgagcatcgcttcgcgcttggtgaacgggtgcgcctgctccacggcctggcgcaacgaactcaaggcctcggccgactcggtgaacaattcgctgatgaactgcccatggctgcgctgaccactgatggccaggagcatctccgccgccgggttcatgtactcaagacgcaagtcgtcattaagcaggatggtcgcggtggtcaggttgtcgagtaacaaacggtgcagtgcatcgctgatggtcatcgggacctcttttggagcaaggcgcg

SEQ ID NO: 80644 - DNA, 1040 bp, Homo Sapiens
  misc_feature (44)..(44): n is a, c, g, or t
  misc_feature (183)..(183): n is a, c, g, or t
  misc_feature (194)..(194): n is a, c, g, or t
  misc_feature (222)..(222): n is a, c, g, or t
  misc_feature (230)..(230): n is a, c, g, or t
acgctctgctaacatgtacgtacgccctacggagtgacgcgtcntcatgacacggagcgttgtcgatgcacgttgtggactgttgtgtgcgtagaacagtctcacactgccatgtgagagttgacccaggtgacgttgtcgccgtgcgtcatgttgacctacgcagtcagcggcgtgccgtgntggaggtgccngtacgtgcaggggcaaggacgcaccagntcctcaantccgtagagagaacagtccaaagctggagcctgggaagcgtgcgcccatgaatatccgcaggagcacgcatgacctggtggccatggacggatgttgtacgccgtgggggtaacgacgtagctccagcctcaactccatcgagaagtacaacccgaggaccaacaagtgggtggccgcatcctgcatgttcacccggcgcagcagtgtgggtgtggcggtgctggagctgctcaatttcccgccgccatcctccccgacgctgtccgtgtcctccaccagcctctgacccacctaccaccagaggcctgcagcctcccacatgccttaaggggaccgtggcccccaccagggacgtcctgcgccatccgttcacgtctctgcatccattccttcatgtctttatttagttgtttatttatttagttatttatcttattgagaggtgaggagtgccacggctgcccgtttacacctttagcgtctggtcctcctgcgtgtcctcccctccactgcctgcatggggggcgcggggagtgaccaggcgggggcctcaccgccccagggccgttgcctgctcagaccttgcaggctgtggagcaagaggccctgggtctctccaagcagctgcagaccccagctcgaattttgcacatggcggggtcccgggaagggtggggagcaggtgtccttcctgtcgtcgtctgccgtgtgccatctttcctggatcttgtagcgggtgcacacgcgtgcactgggaccccacacagcaatacgagtccaacttaataaacacatttctggggttcctc

SEQ ID NO: 80645 - DNA, 653 bp, Homo Sapiens
gcggccgcgtacacggtagttgaggccccattcgtggccgacctgatctgccaatgccgcaggctcggcgcggtacaccgtgtcttcacggtcgatgcgcgagttgccacgggagcggtcgttgtacacgagctgcaattccagccccatgaactggttgacctgttgatgcaggtccagcagctcctcggtttgtagcgactggtggaagctttgcaccagcaattgcgggccgtaacggtcaatggtcaagccgccggcgccttcctggctgccatggaacagccggtagcagtctgtgccttggacgtgcaactcgttgatcaggtcttggcgatggttgagagcggcgcgcagcgcctgattcaagggagtcatggagcgcgccttgcgggtaaaagagggcgcgaagtttaacagctatgggccgccgtctacatcaaccccatccgccgctgggcgcgttgcaccgaaccgttgcgcatcgcccagcgcagcaagggcgcgctgcgcttcacacccgcgcggatcaccaagcgttgcatcgagctttggtgttgcccgagcatagcgctggcccagtccggcagcaggtcgatgccggcctgcatcatcaagctgccaaagggtttggccaaggtgctgggcgcagg

SEQ ID NO: 80646 - DNA, 962 bp, Homo Sapiens
  misc_feature (532)..(569): n is a, c, g, or t
  misc_feature (587)..(587): n is a, c, g, or t
  misc_feature (749)..(749): n is a, c, g, or t
  misc_feature (778)..(778): n is a, c, g, or t
  misc_feature (793)..(793): n is a, c, g, or t
  misc_feature (877)..(877): n is a, c, g, or t
  misc_feature (882)..(882): n is a, c, g, or t
gccctgtggggttttttattttggcagagggaggagatttaaggaaagaacaacccggctataagcccgaggggctgctgtgaccccgcccccgttgtccaaataaggaaaatgaggtcccgggagagcggaccagcaccaggtcttccagagaagcttccctggggtctccgcgctggcggggtctctccgccgcctcccccgccgccgggtctttgtctcgcggtcactacggctgcgcttccgcgctctcgcggccgccggcggggcttttcccgggggagcgagggccaggcccggcgtgggtgggcgcggaggcaggggccgcggcctggacgccaatgtcagcgcgagggtcgcccccgggacccgtagggcgggaccggcctaggcctcccgcaggctctgccgtcaccttcaggtcggagcacggggtcccctcccggcaaatgggcgcggaggaaagcgaaacggcctcggcgccgtcctgctgttccccacggggcggggggcaggacccggaagcctggcnnnnnnnnnnnnnnnnnnnnnnnnnnnnnnnnnnnnnnaccggccgatcgtcctgnggggtccgagcctttctgctgcggccccgccgggcacgtggatgcgagtccacgcggttggggaggtcgctggaaacggggcgcaacaagtgctggttgcctgggagcgactgtcggtgttctgaacacacgtggcggccgggttgagtcgatcattcatcntacgccaggagcagtccatggcaagctgngctggcgctggctgngcgcgacagacccaagcgaggtggctcgcccagccagtggtgcccagtgacaccggtccggattaagagagtcaacggattganattanggagcacaggaggcatgacgctaggactcttgacaagccaagttcgatcacgcttcaccactaaaaatcaccagatgagg

SEQ ID NO: 80647 - DNA, 1126 bp, Homo Sapiens
  misc_feature (230)..(238): n is a, c, g, or t
aaactaggtgactatagaacaagtggtacaaaaagcaggctggtaccgggtcggaattcccgggatatcgtcgacccacgcgtcgaaaaaatatgagggaggctaaggaaacttagacactttctgatcactgatgactccttaggctgcacctgagtgatggtggtgtttttggaggctgtacctgagtgatggtggtttttggggggctgcacctgagcgatagtgannnnnnnnnggaggctgcacagctggtcagaccatctctagatgttctttccacagtggttcatagggcgtcattcccccttcctggattattttgactatgggtagcttattttcaagagctctttgcctttttaatcctgttccagatcacttatccaaaatctttccaaatcaattatattttgctgcttttctttaattccctaaaagccatagcttctagattttctatcagcacacattctcaccagaagttgaaccaatacaggtagaaaaagaaagcccccttaatgtttttaactgatgatatttttttaagcttaccaatataagtatttttaaaggttctatttttcaaagtcataacaatgattgttcttgttttctctcatagaatagactgccatcggataaagagtggtccctagcttctatttttccaagtaaataagtagaacatgttcttgggattataccattaaatgttaattttcttgaagaagaaagattgttgtctgccaagattttatgttagcgctcggattgaggcagaaaacggaagcaccaggtttaacactgggatgacttgggttgtgttcctggaggtttgaagtgggccttcccgccttttgagggggaaaactgactgttttgaacacatatcctggattagttgggttgttttgtattgaggatccctaaaagacaaaagagtcttggaaaggactgctggcttcgtcttgaacgttcgccccatcaccagtgtgagtccgtggggaagtcttcctcaagtggggttcagtctgtaattttcctgtctgttcttagtttgttctgagttattttggattttgttctttagccaaataaaggcagtgtggttttacctgaaaaa

SEQ ID NO: 80648 - DNA, 989 bp, Homo Sapiens
ccggtactgatcgccagtgtggcccacatttcatcagcggtaagaccgcccatgatgactggctggttgttcagtcgcactggaaggaaaatcagcgtcccgtcgtctgagagttctgtcatggccaaggctctttagagaatgttggtagccttggtcactagaaaaatggcgacacccaggatggcgacaccgacagcagctgtagcgccaaggtccatccatttctttttgccgtgctggatctcgtgataggtgccaaaggcatgccaggctacgccgctgaaaatgacagcgcagatgatgaggccgagcagagaaaagccgtcaaaggcgtagttctgcatggtttgcatcagattcgagccttcgccgcgtgtggggggctgagactggggcagggctgccatggccagttggggaagagtcagtatgccgatcagcaagcgacgtgtttttgggagcaaagacatggtgaatctccgataaagtcaactgagaacaaacgtggtgaggatcatgcaaagcagcagaatgcgaacaaccgaggttgaagcaatcgtgcggtcaaggttgccggtggcccaccctcggtagcagctccagagcgcccaggccccccacaaaaagatgatggccaccgcaaggccgacgaaaaacaggtagctagccgaggctggaaatcctcccgctgcttgaaaggccgaggcttgagcgccgctcatgctcatggcttatgtccttctgtcgtgtattggcctgacagctcaacaggatcgcggggctgtgctcggctgggtgtcaggtagccctccaggccatggcgaatccgagcgatatcgcctgccaaacgttggtagtcgaagaagtaacgctttccaggttcgtcggcgacttgagcgctacgacgtgcggtgtcctcccagggcatttaactggcggatcatcacgtccaggttggcctgttcggaggctgaagcagcggccgc

SEQ ID NO: 80649 - DNA, 1055 bp, Homo Sapiens
gcggccgcccccggcgacacggcggtgcgggcgcaggtagtcaaactggttgtccaacaccacctacggcaaggacggctacttcttcggctacgactccgagaccatccgcctgttcaagggcaacagcccggacggcgtaggcaagagcttcaaggacaaccgtgaccccaacggtgtctacgtcaaccgcgacctggtcaaggtcggcaaggacggcacccactacctgcaatacagctcgacccagcccggccagaccgaactggtgcccaagcttggctacaccgaatacttgcccaagtgggacatggtgattggtacgtcggtgaacctcgatggcatcgaagcccaggtggcggtggtcgaggccaaggtcgaaaaacgcatggaaggtgtgctgctgagcatccttggcgtggcggtggtggtgctgctggtgattgctgcagtgggcatgttggtggccaataccatcttgcgcccactgagcctgatgaaagccaacctcgacgatatcgccgcgggcgagggcgacttgacccgccgcctggccatcaccagccaggatgagttgggggacttggccggcgcgttcaaccgctttgtcgacaagatccacggcctggtgcgccagatcaccgagatgaccgcgcaactcaccgggctggtcagccaggtgtccgatcaggcccagcgctcggaaaccgcatggaacgccagcgccacgagaccgatcaggtggccaccgcgatcaaccaaatgtcttcggcggcccacgaagtggcgcgcagtgcccaaggcgctgcggtggctgcgcaacagaccgacgctgaaggccaggccgccaagcgggtagtggatggcagcatcgcgcagatccatgcgctggtgaacgacatccgcagcagcggcgtgtccctcgacagtttgcagcaggacgtgtcgtcgatcgtcagcgtgctcggcgtgatccgctcgattgccgagcagaccaacctgctggcgctcaacgccgccatcgaagccgcacgggcaggcgaggctggtcgcgg

SEQ ID NO: 80650 - DNA, 682 bp, Homo Sapiens
  misc_feature (74)..(74): n is a, c, g, or t
aagggaaggcaatcatgcaatcatcttcaagaagttcttccaagaccctggattgcggacacccaagacaaccngtgcgggcttctctggaggctggggggtggccagggctggctggtggctctgctgggagtcccagtgggaggaggcggggaggaaggcacaggctcgcttgtgggctccagcgggttgcttttgaggcctcctctgtaggcctcgaggggctgcttctgcggcggtgcagggagctggggggagggctaggcagccggaggtgcccctgaggtccctgaaatacatggcttttgggcacactggctcccagctgacctgaggacctcatacaaaattaaaaggcagaaaggcaggcgaggccagacctggggctgggacctctgcgcctgcccctgctcagagccgccggccctccctgtcccaccccagagcctctccaggctgaggtgaattaaatatcgtctgtgttgtatttttggcaaagtcagtccttggcctctgtccctggggccttggggcagttaccgccaccggggcctggctactgtaaggccaggaagaggaggaggggcaggaggaaggtcgggggctggggcagctgcagccgaggtcttctgtccttcctgctctgacagcttgggaggcatgtaaggcggcggtagccctt

SEQ ID NO: 80651 - DNA, 992 bp, Homo Sapiens
cgtcaaggacttttggatcagcctcccaggaacactgtgcagtgagaagatggccctgagcactgccagtgatgaccgctgctggaacgggagcgccacaggccggtacctccctaaggtcatgggtgacggcctggccaaccagatcaacaaccccgaggtggaggtggacatcaccaagccggacatgaccatccggcagcagatcatgcagctgaagatcatgaccaaccggctgcgcagcgcctacaacggcaacgacgtggacttccaggacgccagtgacgacggcagcggctcgggcagcggtgatggctgtctggatgacctctgcggccggaaggtcagcaggaagagctccagctcccggacgcccttgacccatgccctcccaggcctgtcagagcaggaaggacagaagacctcggctgccagctgcccccagcccccgaccttcctcctgcccctcctcctcttcctggcccttacagtagccaggccccggtggcggtaactgccccaaggccccagggacagaggccaaggactgactttgccaaaaatacaacacagacgatatttaattcacctcagcctggcctcgcctgcctttctgccttttaattttgtatgaggtcctcaggtcagctgggagccagtgtgcccaaaagccatgtatttcagggacctcaggggcacctccggctgcctagccctccccccagctccctgcaccgccgcagaagcagcccctcgaggcctacagaggagcctcaaagaacccgctggagccacagcggcctgtgcttcctcccgcctctccactggactccagcaagccacagcagcctgccaccccagctcagagagccgcaggctgctgtgtcgcatcaggctgcaagcctaaagagtgagctccctagagtgaagcggcactctgcctgaggcacgtgcggactgaacctgtagatagagccaacgtaggctgcaag

SEQ ID NO: 80652 - DNA, 969 bp, Homo Sapiens
  misc_feature (864)..(884): n is a, c, g, or t
gcccaactgaaaccaagtttcagtctgccttacctttacccgtccttgagaacagcggtccagggaatcaggcagtctgtggcctcctgtagcagggcgctcttaacagactcaggtgtaaggtttggatcccttgctacatcacaaatcagtttcaagagggccttcagtaagaccacaagtctgcaggaaactctggaatcaggaagaaaagctatgttcatactctaaatctggatattaaaattggaagagacttcaaagactgtcaagtggaaagctatcatttcctaaattaaggaacttaggtcaaagttaaatgaaaaagacctaaaaacagaaccaaagtcagcctctagatttcttaccctcaagtctcctgttagcatactgcctatacacacagacacaccctctgccacactgctctcttccttccagaagcttggttctactataagcaacagctccttcatgggctgagaaggggaaaccaggatctccccaaccaagggcctatacttttatttttcaactctattaactgaactatgcttggagagagccctgaatcctttaactttaatgccatcttaggcctggaagttagagtgagggaaatgagcttggcttctgggactgtgtcaagttgaattttctgtcatttaatttcagatcctagctcatcatcagtgaagtccagcctacttacttgtaactattaacctttctaaaagttttcatcgccttggtaaagctccagaaatggacaatgctagtgactgcacaatattgtgactgtacttaatgccactgaactgtacactttaaaatggaaaatttatatgtatttttaccacaatnnnnnnnnnnnnnnnnnnnnnctttaatgaaaggtggaaaataatttaacttataatgtgaaaatacaatgtgaaatgtacaataaatcatatttatggacagaaa

SEQ ID NO: 80653 - DNA, 1093 bp, Homo Sapiens
  misc_feature (64)..(115): n is a, c, g, or t
  misc_feature (119)..(153): n is a, c, g, or t
cccgctccccatatccccccttcgcctccaaaattcaactaagcgtaatactatagggcgctannnnnnnnnnnnnnnnnnnnnnnnnnnnnnnnnnnnnnnnnnnnnnnnnnnnccgnnnnnnnnnnnnnnnnnnnnnnnnnnnnnnnnnnncagtcgacggtaccggacatatgcccgggaattcggccattacggccgggagagcccaggtcctataccatgccatttccaaccacctgtacacaccagagcaccacctcattcaggctgtgctcctgtgtctgctggatttattccccatcctggagaaaaccctgcactggaaaggagatggagctcgacccaccacccattgtgatgaggtcctgcggctgatcctgacccacatggagccagagcaccgccttcttttacgcaggacctacgcaagaaacctgccggctttcgtgaacaggttggggatcctaactgtccggcacttaaagaggctggagagagtcatcattggttatctggaggtttatgatggacctgaggaggaagctagactgaagatattggaaaccctaaaacttctcatgcaacatacttggcccagagtttcctgcagacttgtggtcttactgaaggcccctcttgaaactgatttgtgatgtagcaagggatccaaaccttacacctgagtctgttaagagcgccctgctacaggaggccacagactgcctgattctcctggaccgctgttctcaaggacgggtaaagggtctcctggccaaaattccccaaagctgtgaagacagaaaagtggtgaactatatcagaaaagtgcagcaggtttctgaaggcgcaccctacaatggaacttaagacttgtattactttcccaagaggaaaggattttcttcccatcccaatttgtatgaatggagttatttaagaaaaaaagatatttttacacgaaactttgtaagtgaaagctgctttttccttccttctttccttttacctccataagaatagggaaagtagaacaagaaaaaattgaactccttccatttctaaataaagtttgggagaaaaaaggaaaaaa

SEQ ID NO: 80654 - DNA, 801 bp, Homo Sapiens
ccgaggatcatggcgtagtcgaggaacgccttgaacttgatttcgcggttacacaggatgtccgggttcggcgtacggccggccttgtattcggccaggaagtgctcgaacacattgtcccagtactcggcggcgaaattggcggtgtgcagcttgatgccgatcttgtcgcacacggcctgggcgtcggccaggtcgtccatggcggtgcaatattccgttccatcgtcttcttcccagttcttcatgaacaggccttccacctcataaccctgctccatgagcagaacggcggaaacggaagaatccacgccgccggacatgccgacgatgacgcgcttcttttgtgtgtcagaaggggctggatcacgcatagggtttcaacgggtgtcttgaaaaaggacgcgattctaacaggctcacgcccgcaaggctaaagagaagggcggatcaattcgaggctatggcgctggccggccagataatcatcgatacagcggatgatcagctcactgcgccagtcgtcgcgcagggccatcagctcctcacgggtcagccagcgggcgcggacgatgccttcatcgagctggtagtcggggtgatgtttcaaggccttggcggtaaaacacacgcgctgataagtcacgccattgctgggagcggtgtacaggtagatgccgacaatgccggtggcctcgacgtcccagccggtttcttcgagggtttcacgcacggcagcttcggtgagggtttcatgcgggtccagatggccggccggctggttgagcacggcgcggccgc

SEQ ID NO: 80655 - DNA, 754 bp, Homo Sapiens
tatgaattaaattataacagaaggtactagagataccgatatagagaattgtagatatgtctagtaaactatgtccatgtatgttaaatcttaactatcaagacatttcattagggtacttgtgaatcatgtatggcctggaatggtgaaattcaagtcttggagtatctctttcatactcttagctactctagttgccactggcaaccttagaccatgttgatttgtgtccttcaggaggcttaagcctctgtaagtaactgatggtccagcatagccagtatttccagtcctttgccacaattgctctcagtgtgtctgaacacagctttttccctgcacaggggttgagcagcagagatctgccactgcctctccaaatgtacatcaatggcatctatcccaagctggggtcagggctacagatacaggcagtagtatctcctcattgttgttgtttttttcttttagacattgtattatgaaaaatttccagcatacagaaaagttgaagaacacccacatgcctgctactcagattctacaataaacatttgctatatttgttttacctacatatctgtcatccatccatccattcatattatttttaatgcacgtcttattttttaatgcactgtcaactacagacatcagtactcttcacctccaaacatttcagcaacatatcattaacgatagtcaaaaatttgtttagagttccttttgttttaaataaaatttataaagaatg

SEQ ID NO: 80656 - DNA, 726 bp, Homo Sapiens
ttaattaattaattaaaatgaatttcagctagaagagccttattccattttcctttttattaaacatctggcataagttggtaagtatgtgaagtttatcatatattcttatgcgaattattattttcgccttttttttataattctgtctgggatttgaatagtagagtttgaattcaggaaggacacctgtgataggacaataaaatctagagctggacgtggccctcctgctacctgtcgacacaggtaaatttcctagaatctgttccctttatagatccatgttgaaattcacttatagcctcacttgcatgagatttgccaggcagaagtgaagaagacattagtcaggtattggaaccccaccatacagggagacagcctgcttcctgctcattttcctggttattttctctgccaatcaaaagtatcctgaaaacaccctgagctgcttgacttccattctcaaagagatgtgttggtttccacagttgtctccacaagctccgcatcaaagatccacgtacagtttggattttccttctagccttcatgtgtggcccaagcatctatttcagactgtcatggttggcattgttctctgaggttctgtcttccctttgtgtttctatgagctttaatttgtatggttcttgttctgttaatgccactagggactatgtattcctgattccaccatgacagctacagtaaaacagtaaa

SEQ ID NO: 80657 - DNA, 2797 bp, Homo Sapiens
  misc_feature (1419)..(1419): n is a, c, g, or t
cccggttgaatggacgaggcggagctgcttgttgcagctgtgggtgaggacggctctagctaggtgagcggctccggccagttcccttttagactatggcgacatacctggagttcatccagcagaatgaagaacgggatggtgtgcgttttagttggaacgtgtggccttccagccggctggaggctacaagaatggttgtacccctggcttgtctccttactcctttgaaagaacgtccagacctacctcctgtacaatatgaacctgtgctttgcagcaggccaacttgtaaagctgttctcaacccactttgtcaggttgattatcgagcaaaactttgggcctgtaatttctgttttcaaagaaatcagtttcctccagcttatggaggcatatctgaggtgaatcaacctgccgaattgatgccccagttttctacaattgagtacgtgatacagcgaggtgctcagtcccctctgatctttctctatgtggttgacacatgcctggaggaagatgaccttcaagcactcaaagagtccctgcagatgtccctgagtcttcttcctccagatgctctggtgggtctgatcacatttggaaggatggtgcaggttcatgagctaagctgtgaaggaatctccaaaagttatgtcttccgagggaccaaggatttaactgcaaagcaaatacaggatatgttgggcctgaccaagccagccatgcccatgcagcaagcacgacctgcacaaccacaggagcacccttttgcttcaagcagatttctgcagcctgttcacaagattgatatgaacctcactgatcttcttggggagctacagagggacccatggccagtaactcaggggaagagacctttgcgatccactgggtggggctttgtccattgctgttggcttgctggagggcacttttccaaacaccaggagccaggatcatgctgtttactggaggtccccctacccaagggcctggcatggatggtctggagatgaaataaaagatccctattcgtacttggcatgatatagagaaagataatgcacgattcatgaaaaaggcaaccaagcactatgagatgcttgctaatcgaacagctgcaaatggtcactgcattgatatttatgcttgtgcccttgatcaaactggacttttggagatgaagtgttgtgcaaatcttactggaggctacatggtaatgggagattctttcaacacttctctcttcaagcagacattccaaagaatctttactaaagattttaatggagatttccgaatggcatttggtgctactttggacgtaaagacctctcgggaactgaagattgcaggagccattggtccatgcgtatctctgaatgtgaaaggaccgtgtgtgtcagaaaatgagcnttggtgttggtggcacgagtcagtggaaaatctgtggcctagatcctacatctacacttggcatctattttgaagttgtcaatcagcacaacaccccgatcccccaaggaggcagaggagccatccagtttgtcacgcattatcagcactccagcacccagagacgcatccgcgtgaccaccatcgcccgaaattgggcagatgtacagagtcagctcaggcacatagaagcagcatttgaccaggaggctgcggcagtgttgatggcacggcttggggtgttccgagcggagtcagaggaggggcccgatgtgctccggtggctggaccgacaactcatccgactgtgtcaaaagtttggacagtataacaaagaagaccccacttcttttaggttatcagattccttttctctatatcctcagtttatgttccatctgagaagatctccatttcttcaagtgtttaacaacagtcctgatgagtcgtcatattacagacatcattttgcccggcaggacctgacccagtccctcatcatgatccagcccattctctactcttactcctttcatgggccaccagagccagtactcttggatagcagcagcattctagctgacagaattttgctgatggatactttctttcaaattgtcatttatcttggtgagaccatagcccagtggcgtaaagctggctaccaggacatgcccgagtatgaaaacttcaagcaccttctgcaggcaccactggatgatgctcaagaaattctgcaagcacgcttcccgatgccacgttacatcaacacggagcatggaggcagtcaggctcgattccttttgtccaaagtgaacccatctcagacacacaataacctgtatgcttggggacaggaaactggagcacccatcctaactgatgatgttagcctgcaggtgttcatggaccatttgaagaagctggctgtctccagtgcctgttaagctgaggatacaaccaggaaatgcaacggtgtcagattgtgttcaaaatgtctagaaaggcttgataacattcctgttacttttctagcagattttaacaaataatcaaggacattttatatgtaactctttagattataatttatttgtattcctgtctttgtcctttttcttgcactataaaattataaggtcataaatgttttggtacttgtagatgtttatgtgctttttgtatcctaacttttagaatctaaataaaatcagaggtaatgtattttggcagcttgtttaggtgagaatcttaatgatcataaaggaaataaatctagatgcagaaagtactggctaaaatattgctaatacaaatgtgatttcctgaggaaaaaaaa

SEQ ID NO: 80658 - DNA, 1208 bp, Homo Sapiens
  misc_feature (1079)..(1111): n is a, c, g, or t
  misc_feature (1124)..(1124): n is a, c, g, or t
gcatttatctgctcatgttgagcacagtggatcaaagttcctctctgctctgtggccgcccgcgcgacgtacgcggggatcgtgggatccgaaggatgggaggtctctttttctctggggtcccacgggaaaataccccccgttaaagtgttccattttaaacctcccaggattttaaaattataaaagggcaagccaaaagccgagccagacctccccttgaaaagggtaaaattaccagcacccagtgtaggagtaaagccctcagcctgtatccaaaagcacacacaaagttattagataagaatctccttaaaatttaattgactaaatgtattacattcaatattccatgggcttcttctggacaaaggatcggcataaatacaaacaaacctctggaccttcttccctaaccgacgaagatgaaacacaggaggcaaggggcacgggcacgccttcatatttacactttgcctttactttacagttcagtgccagaaatatttacagaaaatacaataagaaaaaatcatgtcttggcaacatactgaaattcatacaaactgtatatatgatttcaagcaaataatgatactgcttattttttagccacaactgccaagcccttcagaggagaaagatgtcttggtcactataagagatgaggacttgggaaacttggtttgcttcaacaagtatttactgggcgcctactatatgcaaggcactgtggaatcccaaattataccttttccctcaccattaaaaaaagaaaagcatctgaagaacatgagttgatattctgagaaacacactagaagtacatggcttctttagctactaagaaacccaccgtttgattccacatcgtacggatagaccacctccaatctctccaactcaggaaaagaggctgtcatggaaatctttaaaacagaccatctgactccaatgtcatttcatgtaaacacagcaatcagttcttttcaggaagagagaacctgaatgggctttaaaatggtgaatagagaactactgccagcagcagtgtcaaattacctccaatacatgtttcnnnnnnnnnnnnnnnnnnnnnnnnnnnnnnnnnccacctaccacanaacacatctttgagcaaggctaacttccacttttgggtaagctccaccttccagaagaaatgaatactcttaaagactctgcct

SEQ ID NO: 80659 - DNA, 941 bp, Homo Sapiens
  misc_feature (446)..(475): n is a, c, g, or t
  misc_feature (841)..(875): n is a, c, g, or t
ttggtcactattaagaatgagacttgggaacctggtttcttccaccagtatttactgggcgccctactaatatgcaagccactgggaaatcccaaaattataccttgtccctcaccgttgagaaataagaaaagcattcttgcagtaacatgaaggttaatatttctgaggaaacacactagaagtacatggcttctttagctactaagaaacccaccgtttgattccacatcgtacggatagaccaacctgccaatctctccaactcaggaaaagagcgtgtcatggaaatctttaaaacagaccatctgactccaatgtcatttcatgtaaacacagcaatcagttcttttcaggaagagagaacctgaatgggctttaaaatggtgaatagagaactactgccagcagcagtgtcaaattacctccgatacatgtttctttgnnnnnnnnnnnnnnnnnnnnnnnnnnnnnnccacctaccacaaaacacatctttgagcaaggctaacttccactttgggtaaagctccaccttccagaagaaatgaatactcttaaagactctgcctctctagaacccagtctgcagagtctgacaaatgcttccctagtgtatggagaaggtaaccgttcatgaaggcctcatacacagaacctgcagcaggtaactgacattactggccaaaggtgtgggtacttgtattcatcaatgaatccagaggaaaatgggctgctctgaaataaaggatctggaaatgaaggaaaatgtgcatgagtatgcgagtgtcccggccgtaatggccgaattcccgggcatatgtccggtaccgtcgactgnnnnnnnnnnnnnnnnnnnnnnnnnnnnnnnnnnncgccgcttcctcgctcactgacttcgctgcgctcgtcgttcgcttctacgacgctattcctccccc

SEQ ID NO: 80660 - DNA, 363 bp, Homo Sapiens
ttaattggcaaatagagtcagtagtcatacagactctaaagtttactcaaagtttaaattggatttgaccgtggaactataaatattattcagttgttagcattccaagattagctggtttaactatgtttaataagccttctgtcatcttacttttctgttctcttagagctttagagagaccaaagagtttttcactgttaaagtgtccagtatgtagccaagaaccatatggagaacatcaaatacagtggaacaaatgtaactgctattgatgtcacactttgtgaagtagtctttgttgcttaaaaagggtgacatctagtggctaaacatgttatttcaaataaataatatcgaaat

SEQ ID NO: 80661 - DNA, 1650 bp, Homo Sapiens
  misc_feature (80)..(80): n is a, c, g, or t
  misc_feature (102)..(102): n is a, c, g, or t
  misc_feature (124)..(124): n is a, c, g, or t
  misc_feature (130)..(130): n is a, c, g, or t
  misc_feature (133)..(133): n is a, c, g, or t
  misc_feature (156)..(156): n is a, c, g, or t
  misc_feature (213)..(214): n is a, c, g, or t
  misc_feature (219)..(219): n is a, c, g, or t
  misc_feature (271)..(271): n is a, c, g, or t
  misc_feature (288)..(288): n is a, c, g, or t
tggatactgtataaaaggggagtgtggagagaacccgctttaatgcaccttgagatcttagcatagagacacaatccganggacatgtccgaagccttttcntacccgacgatcccacagctgngacaanacngtgtagagattcataccaaaagntaaaggaaatgacacggaccccactgccccgccatacgactccttggccactacgcnntatgnaagcactggctccgtgcggatttccttgagctcgctggagtcagtgaccacnggatgcagatcaagacntatgatacccttagtgactgggacctcgatttcaaaaagcttgcagatatgtatggaggagtggacagtgacaaagactcctaatctgttgcctttttcattttccaatacgacactgaaatatgtgaagtggctatttctttatatttatccactactccgtgaaggcttctctgttctacccgttccaaaagccaatggctgcagtccgtgtggatccaatgttagagacttttttctagtacacttttatgagcttccaaggggcaaatttttattttttagtgcatccagttaaccaagtcagcccaacaggcaggtgccggaggggaggacagggaacagtatttccacttgttctcagggcagcgtgcccgcttccgctgtcctggtgttttactacactccatgtcaggtcagccaactgccctaactgtacatttcacaggctaatgggataaaggactgtgctttaaagataaaaatatcatcatagtaaaagaaatgagggcatatcggctcacaaagagataaactacataggggtgtttatttgtgtcacaaagaatttaaaataacacttgcccatgctatttgttcttcaagaactttctctgccatcaactactattcaaaacctcaaatccacccatatgttaaaattctcattactcttaaggaatagaagcaaattaaacggtaacatccaaaagcaaccacaaacctagtacgacttcattccttccactaactcatagtttgttatatcctagactagacatgcgaaagtttgcctttgtaccatataaagggggagggaaatagctaataatgttaaccaaggaaatatattttaccatacatttaaagttttggccaccacatgtatcacgggtcacttgaaattctttcagctatcagtaggctaatgtcaaaattgtttaaaaattcttgaaagaattttcctgagacaaattttaacttcttgtctatagttgtcagtattattctactatactgtacatgaaagtagcagtgtgaagtacaataattcatattcttcatatccttcttacacgactaagttgaattagtaaagttagattaaataaaacttaaatctcactctaggagttcagtggagaggttagagccagccacacttgaacctaataccctgcccttgacatctggaaacctctacatatttatataacgtgatacatttggataaacaacattgagattatgatgaaaacctacatattccatgtttggaagacccttggaagaggaaaattggattcccttaaacaaaagtgtttaagattgtaattaaaatgatagttgattttcaaaagc

SEQ ID NO: 80662 - DNA, 562 bp, Homo Sapiens
gcggccgcgccatgcccaccagtatcaacagccccagcagcacagtcgcagtggggatcgccaacagttcccagcgcgccaggcccaggccgccgagcatccagaacatcaccgccgaggcggcgcgatggtcgcccatgaacagcagcaggttggccaccgccatcatcacgaatgacacggctacgccgcacaacagcaggcgatcactctccaggcggccgttacgactggccacggccagcaccaccagcatgctcagcagcgcaccgatgaaggcggcgataggtaaggtcagcaagccgacgacttcccctacgtgcaacaccacgaccaccgcgccgagagtggcgccggaggtcacgccgagcaggtgcgggtcggccagcgggttgcgcgtcaccgcctgcaacacggcgccgatcaacgccagcccggccccgaccagtgcgccaagcaacatgcgcggcacgcggatcaaccagacgatatgttcctggccggtgctccagttgacgtcaccgaggccgaaggccttgttgagcagaatccgcctcgtgcc

SEQ ID NO: 80663 - DNA, 612 bp, Homo Sapiens
gcggccgcaccttcggggatcggcatcttgccgttgaaatattcgttctggaaatcgatgaccagcagtgcggtggtggctgggtcaagctgggtgacgggtgttgcgccagacattgcgcggatggtctgctgagaggggttgatcatttgtgcgtttccttaaaccgtaacggggtgagtggcgtcgagtttaaggggggctttcatgtttgaaatacacacaggaatgaacaatatctgtgcaaaaactgcacatttattgcgaaataaaccggtcgtgtccagctaatatcaggcagttaagaggtcactttattgtggcgagcaggccacccctgtgttgatccacgaagcggtgtaagcactttcttactggcccaccaagagaagtgagcgattgaataaatccgtcccgtttttcagtgttagccagttgaggtgggattggtataccagccataccggatctggtatccaccctcacaaaaaagccccccacacttggcttcgatgtgggggcctgttttatataagtggcgttattctaatttcgctttcaatctaactttcgtgaaccgtcgcaatcggccaatcgaaaccgaccgatcgc

SEQ ID NO: 80664 - DNA, 1172 bp, Homo Sapiens
  misc_feature (326)..(412): n is a, c, g, or t
tctgtccctgaaaggccagaacaaactgcctcctagggtaacactaagtgctactgccatttgagacagacgtgtgcacagacagccctagctcacaggattgtaggtccccagcggatgaatgaactggctgtttgctgggtgccgggaagatgctttggagccacccatagatggacctgcatggggacttgcttttccaggagagatgattgattcaccatgctgacctgaccactctcccacgtggtcttcctagtgatcagatggggtatctgaaggttcagaaacagatcaaagaaaacgctgtgcacatggagtgaatnnnnnnnnnnnnnnnnnnnnnnnnnnnnnnnnnnnnnnnnnnnnnnnnnnnnnnnnnnnnnnnnnnnnnnnnnnnnnnnnnnnnnnngggaggaaaaaagactcagagaggttaagtatccgacccaaggcacacagctgtttctcaggggagcccggattcaaacccagggactcggatcctagagcctgtgctttcacccgctgcgctgcaccatatgtgtaccaggatggtagaatcagaggtctggattccagcatttccctgccagaggctatggtgggtgtgccgagcaccaccctgagggggaagcagtatctcagcaactacacccccgaggaagaggcagtccccaatcagcgggagcaatgggacctgctgatgacaaaataagccacagaatgaatggctctgctccactggccttctctcctccctgcccccttttccccagctgaccagatgcagggcagtggcagggaggggctgataccaaacccggtctgggagactgcccggagggaacacaggttcccaagctccttttggagaggctgatgtgagttcacctcgaacctttcagctggtaatggccacctcttggagaatgtaactggttaccagaaaaccccagaggttgtctcccagtacctagcctaaagtggatgtggccacagaacctaccaaaatttaaataaaagcaagaactaggcgtgtccagggatggcgttgtgctgtttatccgctctctgctcttcccactcctccttcctttgggattttgtccaagactctgtaaattaatttttctgtgcctgtttcctcataaaataaacaagctaacctc

SEQ ID NO: 80665 - DNA, 1855 bp, Homo Sapiens
  misc_feature (1280)..(1350): n is a, c, g, or t
  misc_feature (1353)..(1356): n is a, c, g, or t
cagtcgacggtaccggacatatgcccgggaattcggccattacggccgggggcgcgcggacctgcagccatggcagtcaccgcccaggcagcccgcaggaaggagcgcgtcctctgcctgtttgacgtggacgggaccctcacgccggctcgccagaaaattgaccctgaggtggccgccttcctgcagaagctacgaagtagagtgcagatcggtgtggtgggcggctctgactactgtaagatcgctgagcagctgggtgacggggatgaagtcattgagaagtttgattatgtgtttgccgagaacgggacggtgcagtataagcacggacgactgctctccaagcagaccatccagaaccacctgggggaggagctgctgcaggacttgatcaacttctgcctcagctacatggccctgctcaggctgcccaagaagcgtggaaccttcatcgagttccggaatggcatgctgaacatctcgcccatcggccggagctgcaccctggaggagaggatcgagttctccgaactggacaagaaagagaagatccgggagaagttcgtggaagccctgaaaacagagtttgctggcaaagggctgaggttctctcgaggaggcatgatcagctttgacgtcttccccgagggctgggacaagcgctactgcctggatagcctggaccaggacagcttcgacaccatccacttctttgggaacgagactagccctggtgggaacgactttgagatctttgccgacccccggactgttggccacagcgtggtgtctcctcaggacacggtgcagcgatgccgggagattttcttcccagagacagctcatgaggcgtgaccggggcccacatctgtgtgtcgtgacttctgaagagtttggcctaggcctaaagagaggtcctggtgttggatagatgccagggcccctcctctggcccaggacgcctgctgcaagcccacccagatggggccagagtctgtgtggacaaccgtccccagccagtctgctcctagtggcactggcttcgtcctcccagggcccagagtgttccccatgctccacctggtggcccaggccacagctgctgcttgtatttcggtacagaagaggtttctttctgcaccaggaggaggcgtgctcaagtatcggtacgagatctagcctgccctgcctgcctgccctgggcgatgaggtacggtggggaaggtgcctattttagagaactttgtcacagtattaaagttcccagaacaaagtannnnnnnnnnnnnnnnnnnnnnnnnnnnnnnnnnnnnnnnnnnnnnnnnnnnnnnnnnnnnnnnnnnnnnnttnnnnccttgccggccgccctcggcaccctcaaaaagcttctctaaaccatttctttgggcccggcgggccccagtaggataggggaaactgtggccttacccgtgttccctagagaaacccgtggaaaggaactgagggctgtggatctcccaccattaaaaaaccgccccgggaggaaccgcaagcggttcttgaaacaatccccaaagtgagagttcctgagggcgctttactgtgaatcctttccaacgagaaagccccacgcgaagcctcgatatatcaaatttaccccccccggcctctgccaatttcattggaaggaacgtgtgggggaatttcctttaggggccttcccctggcccaaatttgggaacggcccctccccaagacgggccttggtagaaacccccgaattcgcccaacggggaattccggcccccttgggcgcccctttgcgttttataatttgttggccccttggggtggaaaacccggggggggc

SEQ ID NO: 80666 - DNA, 1298 bp, Homo Sapiens
  misc_feature (852)..(853): n is a, c, g, or t
  misc_feature (856)..(983): n is a, c, g, or t
  misc_feature (995)..(1007): n is a, c, g, or t
  misc_feature (1052)..(1062): n is a, c, g, or t
  misc_feature (1117)..(1127): n is a, c, g, or t
  misc_feature (1164)..(1217): n is a, c, g, or t
  misc_feature (1234)..(1245): n is a, c, g, or t
gcggccgctcctcctcctcctcgccttcctccggctcagccgccgcgccgccgggctgctccttcttcctcctcgggcgcccgcggcgatgttcaaccgcgccgtgagccggctgagcaggaagcggccgccgtcagacatccacgacagcgatggcagttccagcagcagccaccagagcctcaagagcacagccaaatgggcggcatccctggagaatctgctggaagacccagaaggcgtgaaaagatttagggaatttttaaaaaaggaattcagtgaagaaaatgttttgttttggctagcatgtgaagattttaagaaaatgcaagataagacgcagatgcaggaaaaggcaaaggagatctacatgacctttctgtccagcaaggcctcatcacaggtcaacgtggaggggcagtctcggctcaacgagaagatcctggaagaaccgcaccctctgatgttccagaaactccaggaccagatctttaatctcatgaagtacgacagctacagccgcttcttaaagtctgacttgtttttaaaacacaagcgaaccgaggaagaggaagaagatttgcctgatgctcaaactgcagctaaaagagcttccagaatttataacacatgagcccccaaaaagccgggactggcagctttaagaagcaaaggaatttcctctcaggaccgtgccgggtttatcattgctttgttatttgtaaggactgaaatgtacaaaacccttcaatgggatgtgtgttttattaactgcttcaccagtaaattttgcatgatggctaagctaacataaaaaaagaataataataacttggaagttttagtttaccnncgnnnnnnnnnnnnnnnnnnnnnnnnnnnnnnnnnnnnnnnnnnnnnnnnnnnnnnnnnnnnnnnnnnnnnnnnnnnnnnnnnnnnnnnnnnnnnnnnnnnnnnnnnnnnnnnnnnnnnnnnnnnnnnnnaaattggggcgnnnnnnnnnnnnnaaaaaaatttttaaaacctttttttggggcggggccccccaaggnnnnnnnnnnngggcaaaattgtttcccaaaaaaacccgggaaaagaaaggggttgggtttccccnnnnnnnnnnncccccggggaacacgaaggtttttaaaaaacaccaannnnnnnnnnnnnnnnnnnnnnnnnnnnnnnnnnnnnnnnnnnnnnnnnnnnnnctctttattataatttnnnnnnnnnnnngtggtatttttggggaagagggggggaaaatttataaaaaccttcgccgcaca

SEQ ID NO: 80667 - DNA, 698 bp, Homo Sapiens
gaattcggcacgaggggcggttcgacaggcgaccgagctgctcgaccgtgtcgcgataagcgcgccagttacggtagttgcggatcaggttcattttcgtgtctcttcagttcgtcgttcgggtcgtaggcgacccgtaaagccttaggccgacttgcgggccacgtagggaatgtcgctgcggctgatgccgaggtcagacaactcccgattgctcaggcggctcagctcggaaacggtttcccggtagcggcgccagttgcggtagttgcggatcaggttcatgatacttgctcgtttacgtctttgtttcgttcgttcatcttttctgtacgacgctaagataggtggacccatatcgatttaaaagtgcgaatggcgcatggcagcaatgcgttttgtgcaatgcaacatggcagccgtttcacaccgatgtcacaaagaagccagaatcggaaaatgacgcgacgtcaaagatttgctccggtcggctggtaatccgactaaaatagtggagtgacgcctttggcaggctatgtaggcagagtcaggcaagacatcgcgcgctgggtggaaagcggcctcatcgacgccggaaccgccgaaaaattgaccagcgacatcgaggcgaatgcacggcggtcgctgagcttcggctccattctggccatgctggccgccgtgctgctggcggccgc

SEQ ID NO: 80668 - DNA, 779 bp, Homo Sapiens
cgtatgaaaacgacccgaggcgatgcctcgggggtttcatgctagggagcgcctggctgacctgggggtggatatataggttggccagcctcaggcgagttcgccgcacaggtccagttccaccaggcggcgaacctcggccaccggcaggccggcaccgagcagtgcgttgagcttgccgaacgcggcctcgcgggtcatcccgccaccagacaacacgcccacgccacgcaagcggctaccggcttcgtacacatccagctccacaccgccttcatggcattgggtgattgccactaccaccacgccgttatcctgcgcgcgctggaggctggcgaggaactgcgggttgtcgctcggcccggtgccgctgccgaagcattccagcagcagcgcctggatgccgctgtcgatcaacccgtccaattgcgcggcggcgatgcccggcaccagtggcagcacgcccacattgatcagcgccttgggctggcggtaatgcagcgccgccggaatcatatccgccttggcgacgccgccgttacgctgcaatgcggcaaacgggtggcgaccaaaactgcggattttcgcgcaacgggtcggggccatcagtgcgccgtggaagtacagttgcacgcccggcgccaggccttcgcccaaggctgccagcgcaccgctgacgttttcccaggcatcgctgtcgggcacaccggccggcagcatcgagccggtaaacagcaccggtgcgggcaggcccagcagttgaaactcatggcggccgc

SEQ ID NO: 80669 - DNA, 683 bp, Homo Sapiens
attcggcacgaggggcaggcatgcgcgggattgtaggcagcggaccatgaacagggtgcccgcgcgatgggactgtcaaatttgatgatggagaatgccggatcgccttttcgccagcccctcctcccgtgctccgggacgccagcaacgccaagatgtttgaggaccgaagctacaagaggacgttctacagcgcaccgcagtcggtcgagtcgctgatcgcggctttcctcgaacccggcatcatcgtgctgaccttcctggtcgtgaacggcgaattcaacgagcccgtcatgcgcccgacgctgacgctgtgcctgctggtcttcgccctcacctttccgggccgcaaccgcttcaacgaccacccggccagcgccctggtcgacgtgctgtcgtcctggctagtgctgctgggcatcctgctgctgtgcggctatgcgacgaacagcctgcattatttcgaggacaaggtgctgatctggtgggccgtcctgacgcccgtcatccagatcgtcgcgatcgcactggggcggcgcatccagcagtggcgggccagcgacccgggcgcacgccgcacggccgtggtcatcggcgccgggccgctgggccacaaggtggcgcgcgcgctgcgcgacacccagggcgtcatctgcctgggctatttcgacgaccgcggccgc

SEQ ID NO: 80670 - DNA, 610 bp, Homo Sapiens
  misc_feature (61)..(61): n is a, c, g, or t
tggcacgaggtcttccctcatcccccctgcctttccttcacagtcagcctgcatggtggtntgaggccttcccccctacagcctttcccctttatctttcacggtaatcacccctcattactcgtacttctaactccatcttgaaagctgcttcctggaagatccaaacggacacaaggagggactgaaggattagaatgagggaagtaacccatgcactgcttatttgagatggggaaccgaaggactttggcagttcctacacagagacagatggcagagatgacaaggtttctcagagaatgcgtgagtaactggaatggcttttcctgatgacccagacagcctgctcaagagcacactgttgcagctgccctccttggatggaactatggaatgatttttattcttctacttcccaggtgaatgggaaaccaaggacacagtcagcatttaacaaaaaggaatctgcatctcagtcagaactgtattgcatttgcttctctctggattaccttgaagttactccccttccctcaataataatggcattatgaaaaaaattggaattgatcaaatgaagtaaagagtaaacagaggaaagactaaa

SEQ ID NO: 80671 - DNA, 866 bp, Homo Sapiens
cagtcgacggtaccggacatatgcccgggaattcggccattacggccgggcgagtaagcactaatgtggcatggacattcctgatgtcccaagtccccaggccagtgttcgcctaatgattgacagaagcgtccctgcgttcttcatgcttggacacagcaacccttttaattagtcttgaaaagtttcagacacaggattaattttcgtggtggtgcttttgggcctttctggcttgggtggtggtaaagtcatgattttgcagttgataacactgacttataactctgtttatcaatgtctcctatattcaaagcccctgcagtggtatttgtgtctcgttgcaaatttctttcagcggaaagcttgcacaactttcgttgtgtctcagaattctaaccttgttatttaagacaagctgctctacccatttaggatataactttgtaaagaaagtgtaaaccaaatgattcaatgtatgatgaagtttatgtgtaaatccttggtaatgctagaattctgggagcccagaagggttgaaagagaaatgaaacttgcgtgagtcccattattttacgcatgtatgtgcagatacgttctacccacacgtgtgcgtgcacatggctgtgtgcgtgcaccaaagatggactgctttccatgtgtccttttgactttctgcacgtgtcactgcggtgcagtctcttagcagacttcaggcccaaactgtattcttcactcaggcaaaattgaaaagtggaataattctaaattacttctaggttatacttttacctccctgaaattgtagttgtcacttggagggcaaaatatttattgaaataaaattttctgttaaaaattcaaaa

SEQ ID NO: 80672 - DNA, 1100 bp, Homo Sapiens
atttcctgcctcccttttgcgattcagcttgtcatgtttctctaggagagtgtttccttcatatctattgaatcattccctttggtttttgctttgtatctcaaagaatttttgcgggagtacttctgtggtagtagggtcttgtcacatcatgcactaaaaacagaatgtgactcacccttttctactgctgactgagttgtgatgaggctttttctttctaagaagtgtttaaattaccacatagtccaggaatcacggacagtaacactaacactttcatctgtgtgggccaggagttgggcatgtagtttaatgacgtataatttttgaattccaagcatagtttgaaaaaatatgaaaatcttagcacccagcacatgccttttaatgaagaagttctcagcagctggcagaaatgcatctgtgtagagagacacaggcggaacaggtggcagggtggggcgtcatctggaggcctgcgtctgggctgagtgaccttcgttcttaggctgcctggtgtgggaaacgtgaagatgtgcgcatttctccggccccatgctgggcacttgctgcaggcccttacccttgtcgtttctaaatatcgaacataagaagactgtccacttctcttttaatgtaaggatgttggtaaaccaaagctttatggctttggaatggaatttttctcatttcctaaaaataaatggtagaagtaaagtatgctcatcatgagctggtcccaagcgagtgtttggtttagccagaaggtaaatgggcaagcagcgtgagctgacagcttgcaaaagaggaaatgaaaaaggctgttggataacatgtagtaagacctttttcattgtccacctgcttatgctatttttagtgaaaagaatatgaaattgtatatttactgtgataaaatataaacttgtgcatgtgctaggtggagatgttcacagaggggaaaatgttgaggtgttaacattgatgacttcagaggagtgagattgcaagtgatttgaaggtgctgcttgtatgtttttacatcccttgcaaattgtctacaaagagcatgtcttgatttataaaaatcatgaagg

SEQ ID NO: 80673 - DNA, 780 bp, Homo Sapiens
ttgggttcctgtctcactcactttgattaccaatgtcattctgccacgtatgttccatatgtcctatctatctgccctgcacaattatgagagggaaggaattattgcatttataaaatccttttcaaaagaggccattagcaaaaatactaatctaaagcttcagcttctccctgggccttgctctgatgctaaggtttaaactgcccccgaaggaggaagaaaataaataaattaaatgcttagctcttttagacagaagtaatcaattatgcaagacatcccttggttttattttaacttaacctttgtgaatacttcacaaaaatacacatacagaagtaaataaaactatacagttgaactaaatatccagcagatacaacaagtagtcagaagttcaaagatggataagttaggcagctgatgaggttgtctgcataatcaaaggggtagcacaaataatgaacaaataacttttaacaaaagcattctagttaacataaaagaaattggtagtctataaaatggttgaatgggtaacatgcattgatcaatacaacaaccaataatatttactgaattcaaactatttacttgtaaacatttaaaaaagcattatgagatctaaatacagtcttggacaatttcaacaaaataagtcgtatgttcaaaaaataaagctgatgagcaatagatcattcgatatattttctttcatcagttccagcaagagaaatagcagagtatttgttaaaagtatacagcaaagattgttcc

SEQ ID NO: 80674 - DNA, 993 bp, Homo Sapiens
gcggccgcctcaacgtcgtgcgcgataagcgagacgagagcattttgctggcggtgggagagctgacgaaaacgctgcagcagttcgcgttcgtgcagtgacagctcagggctgtccaggcgcatgctcaactcttcgcccaacgcaccttcctgaataaggctctgctccaggcgcgcgatgatttcggagttcatgctgcggtgatgattgcgagccacctcggcaatgcgttcccgcattccgtctggcagacgtacgacgaacttgtcagccgtacggctggaataaattgcctgtttcaatgggcgcatatatttaaccggttagttcaggggagcggtttttggaattggccgcaagatgagtgttaagacaaggctcacgaccaaagttcaacccgaattgcaaagaggccgcatcatgcctcagatttgacatttccttggcgtcaattctgtgacaaatattgaactgactaaaggcttaatgccagcactcatttgcatttttgcggactggttggaaaacttttcaacgcgtcattcctcaggggaacttcccgtaagtccaggctcgcgcagggattgaggccgcatatcctaaagcaaagtggccttttgcccttatctttaagactagtggcaatttgccgatttgctagggtggggcgacataaggtcgagggagggaggtggcgcagagattaccgcaaaacggggtcgaatttgatttttcggcccatgaaaagcgtcagcacaagcaggctcgtgaacacgccggctgcgaccattgcagcagtttgtccatcttcagaggtggcgcccaggcccaggaggccagtggcgacagtcaggcacaaaaacagccaggcggatttgctcatgaatggcgtccttagaaaacccaatgttcggatgccggtgcagtctgggtgccttgggtcaggcgtaccggcgattgcgcgttgggcgtcatcaccgccaattgcgg

SEQ ID NO: 80675 - DNA, 732 bp, Homo Sapiens
gcggccgccagcaccacgggcggcaaccatcagcgccgagcgccgattgcggctgagcaggcccatccagaggactgctatcaccagtgcaaccaatggcgtcctggaaccggtggccagaattgccagggtcatgaccgccagggcgggtgcgctgagccacagtacccgtagccgtttggtggtgacgcagaggtacagccaatacacgcagaaaaagccgaacaggtgggaactgagcagcgggttgtccaaggcgccaaggccgccaatcatgcgcatgctcggctcgaagcctttgacgaatgccaccaggtttaacagcgtcaccaccagcgcaatcacggcggcgctgaagaagatcggcttgaacaggtcattgcggtaatgcagcagcagcccgcagccggcaaacaacatgaacgtctgcaacgggatcttgaacaggttggagtcgccggtgggttccgggctccacagcaccgtgatcattgcccatgcgcaaaatgctgtgaaggcaagcaccagcggctcgcgcagtaactctttgagttcacgtgggcgcaggcacagcaggagcaaggccggcagggcaaagaaaatatagaagccgcggtgcatgacattgcgattgttgacgaaaaacagcgaactcagaagcaacaataagccaatgggcaaaatccagagaaccaggaagtcgaaaacgcgacctcgttccgcctcgtgccg

SEQ ID NO: 80676 - DNA, 1035 bp, Homo Sapiens
  misc_feature (275)..(320): n is a, c, g, or t
gcggtgaggccacggccatacaccatgtcgtaagccaggctgccaggcgcgtacaggccggagggcagcggcggcgcttcgtcgctgaggctggcgctggtggcgttgaccaccacgtcgtagggcgcgtcggcggcgtccgcccagccgccggcgccaagcgcgccgctcacgtcgtggctggcgaactgcgcctgcagcgcgcgcgccttgtcggcggtgcggttggcgatgaacagacgggcgacgccggcgtcgagcagcggcaggatgannnnnnnnnnnnnnnnnnnnnnnnnnnnnnnnnnnnnnnnnnnnnngggaaggcggcagcccagcgtgtcgaggtcgcccaccagcccggcgccgtcggtgttgtcgcccagcacgtcgtcgccgaacacgaaggtgttcacggcgccggccagccgcgcccgctcggtcaggcggtcggccagacgccaggcttcttccttgaacggcaccgtgatgttcatgccgcgcccgccgctcgcccggaacgcggcgaccgcgtcggcgaagccgtcgagcggtgccagcagggcctcgtagctcaggtcctgcgcggtctgcgcggcaaaggcggcgtggatggccggcgacttgctgtgtgcgatcgggttgccgatgacggcgtagcggtcggtcatggggtatcagcgtgattcgagctggtcgccctgggtgaaggtccaggtgcgggtgatggacaggatttcgtattcgcgccggatgtccggcgggaaagcggcgtagggggcggccatgcgcacgatgcggatggatgcgtcgtcgagcaccttctggccggacgagcggttcaggtcgatcttctcgatctcgccgtcggcacggatttcgaccgtcagcgtcaggttgccgtacagcttgccgcgcgccgccggcgggtagttcaggttgccgatgcgttcgaccttctgtcgccagtcctcgatgtactgcgcgaaacggtattcctgcgtccgcgcgccgacgaatttcttgcgcggccgc

SEQ ID NO: 80677 - DNA, 1147 bp, Homo Sapiens
  misc_feature (44)..(78): n is a, c, g, or t
aacgacgagcgcagcgaagtccgtttgagcgaggaagcgggcgnnnnnnnnnnnnnnnnnnnnnnnnnnnnnnnnnnncagtcgacggtaccggacatatgcccgggaattcggccattacggccggggagtggcatcagcgatggcggctgcgtcggggtcggttctgcagcgctgtatcgtgtcgccggcagggaggcatagcgcctctctgatcttcctgcatggctcaggtgattctggacaaggattaagaatgtggatcaagcaggttttaaatcaagatttaacattccaacacataaaaattatttatccaacagctcctcccagatcatatactcctatgaaaggaggaatctccaatgtatggtttgacagatttaaaataaccaatgactgcccagaacaccttgaatcaattgatgtcatgtgtcaagtgcttactgatttgattgatgaagaagtaaaaagtggcatcaagaagaacaggatattaataggaggattctctatgggaggatgcatggcaatgcatttagcatatagaaatcatcaagatgtggcaggagtatttgctctttctagttttctgaataaagcatctgctgtttaccaggctcttcagaagagtaatggtgtacttcctgaattatttcagtgtcatggtactgcagatgagttagttcttcattcttgggcagaagagacaaactcaatgttaaaatctctaggagtgaccacgaagtttcatagttttccaaatgtttaccatgagctaagcaaaactgagttagacatattgaagttatggattcttacaaagctgccaggagaaatggaaaaacaaaaatgaatgaatcaagagtgatttgttaatggtaagtgtaatgtctttgtgaaaagtgatttttactgccaaattataatgataattaaaatattaagaaataaccactttcccggacttttttattaataaaaatggctatcccttggaaaacagtaacctaaatttttattaagggaaaaacactttgcccaaccttctggggcaaaaatttttccaaaaaacaaattcttgaaaaacaatttggggaaacccttttttaaggccatgtaaaaacctttttaaaattttttgcgc

SEQ ID NO: 80678 - DNA, 979 bp, Homo Sapiens
  misc_feature (866)..(868): n is a, c, g, or t
cagtcgacggtaccggacatatgcccgggaattcggccattacggccggggagtggcatcagcgatggcggctgcgtcggggtcggttctgcagcgctgtatcgtgtcgccggcagggaggcatagcgcctctctgatcttcctgcatggctcaggtgattctggacaaggattaagaatgtggatcaagcaggttttaaatcaagatttaacattccaacacataaaaattatttatccaacagctcctcccagatttaaaataaccaatgactgcccagaacaccttgaatcaattgatgtcatgtgtcaagtgcttactgatttgattgatgaagaagtaaaaagtggcatcaagaagaacaggatattaataggaggattctctatgggaggatgcatggcaatgcatttagcatatagaaatcatcaagatgtggcaggagtatttgctctttctagttttctgaataaagcatctgctgtttaccaggctcttcagaagagtaatggtgtacttcctgaattatttcagtgtcatggtactgcaaatgagttagttcttcattcttgggcagaagagaccaaactcaatgttaaaatctctaggagtgaccaccaaatttcatagcttttccaaatgtttacccatgagctaagcaaaactgagttagacatattgaagttatgggattcttacaaagctgcccaggagaattgggaaaacaaaaatgaatgaatccagagtggattggctaatgtaagtgtaaatggcttttgggaaaaagtggattttttactgcccaaattttaaatggatacattaaaataattctggcacccctcaccccgtttttccccccttnnnccttggtcgggccgccatccgggccctccaaaaaaccttttctaaaaccctttctttttgcgccccgggggcccccccagggttaagtggaacccggggcccataacttgt

SEQ ID NO: 80679 - DNA, 681 bp, Homo Sapiens
cgtgctggccccactgcccacgagctggccgtggctgccgtggacctgctgaaccgccacgccaccgaatttgatgcagcccaggtgctgcagatgctgcctgacacctggtcagtgcagctcctctgcccattcctgatgggggccatgagggacagcatccatgccaggaggaccatgcaggtggctctcggcctggccaggtccgaaaacttaatctacacctacgataagatgaagttgaaaggaagctcaatccaactctcagacaaaaagctttgtcagatatgccaaaatcccttttgtgagcctgtgtttgttagatacccaaatggtggtcttgtgcacacccactgtgccgccagcagacacacaaaccccagctcatccagtcatggcactcggacttgaaaagcttggcccaagggtgcgaggggaactccgagttctttctgagcctgctggacatgaagagcagatgaccaccatgctatgtgtcagccaggacgaagggaaacatctgggtgccagggagccttccgtccatacgcaacaaggactcctcgctgctgaccaggctctatgaatgtacatggaaaacccctaaaaatccccaaaacagaaacatacaagagttcacctgtccaggtacatagtaatccaagacagaggtctactttg

SEQ ID NO: 80680 - DNA, 553 bp, Homo Sapiens
gcggccgctgggtgggcacagtggggtaacttctagattgtggacttagcctcaaggttaccagacaggagctggctgttaggcagaattgaggtgcctgaattgggcaaacctctcttcaactgttgggttttgccagggacgaaacccttgctctcctgccatgtccacgggtgtttggactgagggtgttggctattctggacgaagactcctagttatgtgccatggtttccaccctctgctccacccccagccttttctgtaccaggctgggacccccagtcctggagccccccaccttcttgtctcatggctggcactggaggctgctgttggccacctgctccatccagcgcctcccctccctccatgttccctctctgcacccttgttcacctgttgccccgcttccattctccccattcctctctgccgttgtttacctggagactcaggagagattagtgcacctgttcaagttatcacctttaagtggaaattagctttcatttagaaatgtgtggcccagggcaggggcagtggctcactc

SEQ ID NO: 80681 - DNA, 1612 bp, Homo Sapiens
  misc_feature (653)..(653): n is a, c, g, or t
  misc_feature (722)..(722): n is a, c, g, or t
tttggctttaaacaacaaatattgactatcttgtggtttcaatgggtcaggaatttctggggagcttagtgggaggttttggcccaggtgcagatgatgggctgcatcatctgagagacccaaaagcttgactggagctgacatcaagatggcgtctcacgggcccttgccacttgggccccctgtaggctatttgagtgtcctcacgacatggcagctaacttcatccagagtgagtgatctgagaacgtaaaggaagccacagtgccttttatgacctagtctctaagccacacaccatcactttcctctttatcagaaaaatcctgtgcatgagtcgctaagtccagcccatactccaggggatggcaattgggtgccacctcctgaaggagcattagaggatttgtggacctacactgaaaccagtacagcacctctgggtgggaatgaaaggtatttaagggaaattctccagtcggctcagggggcaaggttgggtggagggctgtccacactgaggagctaaacatgtcctggttcccctctgggctcattgtctctattctgacaggacctgcagtatatcttcatcccctcagacatccgcgactatgtgatgctgagatcggccattctgggcgtgcctgtcnctgagggcctagataaaggggacagggtaccgcggctactccggcgccctgaccctcccctccatctcncccttgcaatacgacggctctgggcgctctgtccacttctatcatgggtcctaggccgcacgcctattttggaccagaagcctctgccagtaaattcaagctgctacatccggacttcatcagctacctgacagaaaggttcttgaaatcaaagttgattaacacacattttggagacctatatatgcctagtaccggggctctcatgctgctgacagctttgcatacctgtgaccaggtcagtgcctatggattcatcacaagcaactactggaaattttccgaccactatttcgaacgaaaaatgaagccattgatattttatgcaaaccacgatctgtccctggaagctgccctgtggagggacctgcacaaggccggcatccttcagctgtaccagcgctgaccccaatgcactgagccctttgcttcttcaagagttgcggccctgatcctctcaagtggccaaaagcttttttaacttttcaatcttcaccttcccttgccaacagagggcactggggtgaattcaagattttcatcgaggtctgttcaatataggacaccccagcttgtccttggctcatccaagaactcttctgtatctaaaacaatacatctcaatcttggccaagggaaaatggactgctttgctggattggcactgagcaactttaggaaatgtcggtggagtgttcagcaagatcagacagcagtccaggtcaaaggcaaacacacacgctccagcccaaatcctcctggtggcacatcctaccccagatgctaaagtgattcaaggactccaggacacctcttaagagcctttctaagaacatgataggcttacttctgctccataataaagtgggagaaaaaagccagactataaa

SEQ ID NO: 80682 - DNA, 949 bp, Homo Sapiens
  misc_feature (851)..(851): n is a, c, g, or t
  misc_feature (877)..(877): n is a, c, g, or t
cggtccggaattcccgggatatcgtcgacccacgcgtccgcggacgcgtgggttcagacactgatgggcctctgtgccaaccagactcaatggagctgtgatcaaaggcttcgagcgcgatgtgggcaccaagacttccttctatggtttcactgtgaacacgatgaagaactccctcgtctcctactggaatctgggcttcacctccgtgccacaaggacaggacctgcagtatatcttcatcccctcagacatccgcgactatgtgatgctgagatcggccattctgggcgtgcctgtccctgagggcctagataaaggggacaggccgcacgcctattttggaccagaagcctctgccagtaaattcaagctgctacatccggacttcatcagctacctgacagaaaggttcttgaaatcaaagttgattaacacacattttggagacctatatatgcctagtaccggggctctcatgctgctgacagctttgcatacctgtgaccaggtcagtgcctatggattcatcacaagcaactactggaaattttccgaccactatttcgaacgaaaaatgaagccattgatattttatgcaaaccacgatctgtccctggaagctgccctgtggagggacctgcacaaggccggcatccttcagctgtaccagcgctgaccccaatgcactgagccctttgcttcttcaagagttgcggccctgatcctctcaagtgggcaaaagcttttttaacttttcaatcttcaccttcccttgccaacagagggcactggggtgaatttcaaatttttcatcgagggctgttcaatataggacacccccagcttgncccttggctcatccaagaactcttcnggtatctaaaacaatacatctcaattcttggccaagggaaaatggactggcttttgctggattggcactgag

SEQ ID NO: 80683 - DNA, 1989 bp, Homo Sapiens
  misc_feature (129)..(184): n is a, c, g, or t
  misc_feature (368)..(421): n is a, c, g, or t
  misc_feature (512)..(524): n is a, c, g, or t
  misc_feature (539)..(551): n is a, c, g, or t
  misc_feature (574)..(613): n is a, c, g, or t
  misc_feature (734)..(751): n is a, c, g, or t
  misc_feature (1001)..(1070): n is a, c, g, or t
  misc_feature (1413)..(1421): n is a, c, g, or t
  misc_feature (1423)..(1423): n is a, c, g, or t
  misc_feature (1565)..(1565): n is a, c, g, or t
  misc_feature (1627)..(1636): n is a, c, g, or t
  misc_feature (1778)..(1778): n is a, c, g, or t
ggagtgccgtggaggtgtgtgtgtccatggcatccggagcgaggcgactgtcctgcgtgggtagccctcggccggggagtgaggccaccaaccaaagtcagttccttcccacctgtgtttctgtttcgnnnnnnnnnnnnnnnnnnnnnnnnnnnnnnnnnnnnnnnnnnnnnnnnnnnnnnnnaattctctcttctcctccagacacaatggcactgcttatctccgaaatggtgtgatcgtctcctcattgagcagcggctgccaccgcgctgtgggtagtgtgtgaccgtggctgtactgtatagtgaacatagttggcatatctttgtttgaagtttgttggtgactccaccaaactggtgtgnnnnnnnnnnnnnnnnnnnnnnnnnnnnnnnnnnnnnnnnnnnnnnnnnnnnnntcctgcctatattttactcagtttcaaactttattagtctatttttaattataaaaccagaaagctacaatttcttttctttcccctccannnnnnnnnnnnnacccatttgttggcnnnnnnnnnnnnnaatgtcagatctgttgagttggnnnnnnnnnnnnnnnnnnnnnnnnnnnnnnnnnnnnnnnnactgagaaaggaagggccaagggatgaggtgggaaccgggccctgggggcgccacagactaaggcagagactctcctacctggcgcccagccccaaccagctggccgctcctgcccatgcnnnnnnnnnnnnnnnnnnacatttttataattggagcccctggtgaggttacgcgtgccatgagaaccccctctacaccacgacgctggtgcctcagtgttggccaaactctggagtcactgactggtttgactttcatacggtgaatatgcatttggtctgtactgatcatggaataaacacatctctctttttttatccaccaacgtgccgtagcccctaaaaaaacatctatctcctatccgcctctctcccccctactactccnnnnnnnnnnnnnnnnnnnnnnnnnnnnnnnnnnnnnnnnnnnnnnnnnnnnnnnnnnnnnnnnnnnnnngaataataattcctatcccaacaacactacccctcccggggccccgcctccacaatttgttgtacccctcacccccccgtggccccttaatgttgtttttacccccataagatgataccccactatgttgcccttttagataacccaccccgtctctttgttatctcccctcccgccgtaacgaattataaattaaactcccccgcccacgtgcggcgggtttattattctactctgtcacggcttctcaatgtgattatccacccagccttttcttcatcctcacacccgtgattttgtccccccctttccacttgagagagaaattttaatgttccctttnnnnnnnnnanacccgccggggagtgcttcgtccccacttcctccctccaccccccctttctccggggaccaccatctctttccccctatcacccccctatacccacaaaacaccccacccaataagataaatcttcttcccgcctgcagctnaacgttttttccttgggccccttccactgagagcccccccactcctttacgaaaatatactnnnnnnnnnntgccgtaacgtgcgcagccaccttatctcggcgggtgcggtttgtgcgggtttgtaaaaacgcgatgtccccccccacatgatcatattttttctataatcttcttaccatttccacacttttccccggtaaaaccatattnatacccccatctccccaacccctcgtttcttcacctcgctagacatttctttttcctccccccgccgggataaaacactacaccccatagtgtgcttcacctctttcccaccccacccagcacacaccagcttctttcccgtttatctccggcgccccacccaccactacatgtttttcccctccccgcacgcaccccccacctgtccttt

SEQ ID NO: 80684 - DNA, 614 bp, Homo Sapiens
gcggccgcctgctgggttatgcgctgaccggcagcgccgtcatggaaaaacttgcccttaacaaagaacttccgccattgctggcgtaaatgccggtcgttctgtcggaatcagcaccttcttacccccagaaaggtcgccgcgagactggcggagcgtgcgagggcatgccatcctcactcccgtctgccgcagagtagagcctgcggcgccttgggcgctgctccaccagagagcagcacggacataacaacaaaaaaccgtcaaagaggcttcacttatgcgtaaaccagaactcgcagccgctattgcagaaaaagcagacctgaccaaagagcaggccaaccgcgtccttaacgacgttctcgaagaaatcaccggcgccctgcaccgcaaggacagcgtcccctggtgggcttcggcaccttcctgcaacgccaccgcggcgcccgcaccggcaaaaacccgcaaaccggtgagccagtgaaaatcaaggcgagcaacaccgttgcattcaagccgggcaagtcgctcaaagacagcgtcaacccgtaatagcaggaccgtctgaagggaggcgggttggtaagaaaatgggcacgccgcctcgtgcc

SEQ ID NO: 80685 - DNA, 765 bp, Homo Sapiens
gcggccgcggctgtaggcaggtggtagtacacagggtgattcaaaaagggaagaatttcaggcagaggaaacatgagttgtatcaggcatagaaacctggaacaaaatatttatgtttgctcagacctcagtctgaaggaaaggaagagcagtaaaaatgagagtaaccacctccagttcactttactcccagttttcttggtacaaaagagtgaataagatctttatctgcataagaatcagggacttttgtcacgtgaaatatgaatgaggagtattacttggctagcactttagagagcatttgtaatctatatgatattaatcaggaagtgattaaacagcaatgcccttttctacatttgcctggaaatgctcaatggtgtaacacaagcaagagccatgaggatgcttcacaaataaaggatccattttcagttgattgcaaataagaggagattctttcagcttaaaggactttcaagccctttctatcaatttgcccaataagaatatttccctgaagtagtgatggttatgttgggatgtaatcaatgaccaagagctagtgaaaggggtaaatgtgacacaggtgttgcaaggggagggcacagcacacacaaaggcctagtggtggaagggagaagggcactttcaaggaactgagagtctgtagcagcacaggagggaggggcagagtgtagcaagggtaacaggagatcactaaagggccttgactgggtatacagcttcctcgttccgaat

SEQ ID NO: 80686 - DNA, 904 bp, Homo Sapiens
  misc_feature (525)..(533): n is a, c, g, or t
gcggccgcggccgtagacgtctttacaaaattcctgacaggtggttactgaatctctctatgaactttccattcaaaactttccaagtttttccttatgtggaaccgaaatctttctttctcccgtgaaactttactactatcagataattgaagacagatctctttgtattctcttcaagcccaaaccaattctgttccttcaatctaaatagtggtaatatgaatgtttaagaaatgaaataagaaacatgtgcaggcactttggaaggtgctaagtgactgccctaaggaatgaaaagcaagggccaggtgggagtagcccagcgaaggcacttgggctgccaggaacaggaggcgtgggaaactctggcttaggaaaacatgaacacaggggcaacagaggcaaactgttgttcgagttaaatataaatctcaggctctttaaaggtaaaaggtttaaggataatccatttggaagaagaaaagagtgaggctgaaagtaaagccacatgacaagcatatnnnnnnnnntgcagatgatacaaatatgaaagaggccttcagtgtttgtttattaagaatcttaatgcagtttactgatggattaaaaacagctaacattgtctgaaaattatgttacctataagaagttggaaataaataaaagcataatcactagtgatgtgtatgtatttatatccacttgcaaactgtccttgaagcatgtgaaaaggagtaagaatactatctatgggtagctttcctccccttaatgtgaaaaatgagaactaaagcaaaaagcatcactcactgtacatatacaatgtattttacgtagtgtaaaaaatatggtttagatagtgaatatattaatgaaatcatatgtaaatttatttttagtg

SEQ ID NO: 80687 - DNA, 662 bp, Homo Sapiens
gcggccgcacccagttctatatgactgactcgatcaacccgcagtttgtcagcaacgccgcacgcaatatcgaaaaagccacctggctgctcagtcagcgccaggatgccaacggggtgttgctgctgttttccaacgagatatcggaggagggcagtaacctgagctttgcggtcgagttcggcaaagtggttgcgcgcctggacttgctcgcgcagatgctcgatgaacgctaccgacgtgtggcgctcaactacgcgcagagtttgctgctgatgaatttcttgccggtgcagtaatgtaggtacggtatttccctttcaggtgtaggaagtggcctatcttaagtccccacgcttgaaacacccctcggtgggcaatagcctcggacttttctcaacggatgagtgcctaccttgggtaagcgaaaaacggtttggcctacggatcgcgaagttcgtctgcgattcattctctttgcggtgatcgacgtggcaagcgcccagggtgttcctgccgaggtgttattgagtgcacataaactgctgcgcgattcgccggcggagtctcagttacgtaaagccctggctgacatcctggcctgcgatgaaatggcggggttcagtttcctcagggggtctgaggccctcgttccgaattct

SEQ ID NO: 80688 - DNA, 1331 bp, Homo Sapiens
  misc_feature (53)..(53): n is a, c, g, or t
  misc_feature (77)..(111): n is a, c, g, or t
ctgtatagatcactatagggcgctactcgtcgtagcgaacgacgagcgcagcngagcagtgagcgaggaagcggcgnnnnnnnnnnnnnnnnnnnnnnnnnnnnnnnnnnncagtcgacggtaccggacatatgcccgggaattcggccattacggccggggagaaacggcagtggcagcagcgtccggagcagccgcagccttctggaagctccaggcggtctttctgccgagcctcggtcccggcccccatcctccccgccccatcggttgttgtctgggcggatttaaacagtcaagtaaaatcaagctgggtaatcatggcagaaggtggatttgatccctgtgaatgtgtttgctctcatgaacatgcaatgagaagactgatcaatctgttacggcagtcccagtcctactgcacagacacagagtgtcttcaggaattaccgggaccctctggtgataatggcatcagtgttacaatgatcttggtagcctggatggttattgcattgatcttgttcttactgagacctcctaatctaagaggatccagcctacctggaaagccaaccagtcctcataatggacaagatccaccagctcctcctgtggactaactttgtgatatgggaagtgaaaatagttaacaccttgcacgaccaaacgaacgaagatgaccagagtactcttaaccccattagaactgtttttccttttgtatctgcaatatgggatggtattgttttcatgagcttctagaaatttcacttgcaagtttatttttgcttcctgtgttactgccattcctatttacagtatatttgagtgaatgattatatttttaaaaagttacatggggcttttttggttgtcctaaacttacaaacattccactcattctgtttgtaactgtgattataatttttgtgataatttctggcctgattgaaggaaatttgagaggtctgcatttatatattttaaatagatttgataggtttttaaattgctttttttcataaggtatttataaagttatttggggttgtctgggattgtgtgaaagaaaattagaaccacgctgtatttacatttaccttggtagtttatttgtggatggcagttttctgtagttttggggactgtggtagctcttggattgttttgcaaattacagctgaaatctgtgtcatggattaaactggcttatgtggctagaataggaagagagaaaaaatgaaatggttgtttactaattttatactcccattaaaaatctctaatgttaagaaaaccttaaataaacatgattgatcaatatggaaaaa

SEQ ID NO: 80689 - DNA, 812 bp, Homo Sapiens
  misc_feature (686)..(700): n is a, c, g, or t
aaaatgattaaccatgattagaaaagggaagatattgatgcagaatcttcgttttcattaaatatgaactttagcagtaaaagaacaaaatttaaatttactacatcaatgcagaaagacacaccacaagaaaatggagcagactagaagtgcagttgatgaggaccggaaaatgtatctccaagctgctataggtcgtatcatgaaagcacgaaaagtgcttcggcacaatgcccttattcaagaggtgattagccagtcaagagctaggtttaatcccagtatcagcatgattaagaagtgtattgaagttctgatagacaaacaatacatagaacgcagccaggcgtcggcagatgaatacagctacgtcgcgtgatgtcgctctcctccagcgtggtgtgagaagatcattgccatcaccatttggtgtgttcctgtgggaaaaagcaggactgtgcctccataatttggtcatttggcagcccctgttttctgctgtttacaacatcaccagtgccacgtcatgagcgtcaaagaaaatgcctagagatatttcaagctcatgtcattaatgacatttcttaaaaactttattaaaagaatgagtgaagtattgatgaaaagtggaaattcggttgggtaccatgctttttctccccttcacgtttgcagttgatgtgtcnnnnnnnnnnnnnnnaatgtatcttaaaggacataaaatttaaaaacttaaatattgtaatatgacagataacctaataattgtatctacattaaaatgacaaacatgatactgctgcttgtcaaat

SEQ ID NO: 80690 - DNA, 1202 bp, Homo Sapiens
ttttttaatgaattggaaatatgtttaatataaaacactgatatcctcaaaacattacttgcacattaatttaggaaaatgaattttaaacaatcttcaaaacatgataaaggacagtgatatctttgaaaaacatacaaacaaaaacattaagaaatcacaagatgtcttatagacttgctttcccaaaattagatgtacaaaacaatagtcacctttaaaagtaccccccaacacacacaaattgggaatgaaatatgtaattatagccatctttatatgaaatatccaaacaacaaatatatttaataatataaagatagtgccaaaatcaacaaaagctaagaatactgaggcttaactgaccccgattcgtatgattttgaaataaaatgttcagactttctagctttatcttaatttgcctttgcttcactgctttatgtagttacaatgtaaatctaagagatgcttaaaacagattaaaataatattgttaaaaaacatttttcttatctgagaaaatacaatataatcatatctccctcaaaatactcctgataacacttagaaagttctgaagtgtttaatcatatataatgccaccattatcacatgaattcagaactgttacctgaatatttaataaaaaattaagttccatgaggatcataggtctctaaaagctaccaatttaaaaatataaaagcaatgagagcaatctggctttgcagatgaatactgggtaaactgagctataaaattatatatttaattctacccattaataaataggactgagggttttctttgttaaagttatgaggacacccattttatcttctatattagagaaactatacataaattccgtgataatgtgagtgaatattcatatacgcagtaccatcaatgatagtcgatacacgtatagaacttctctaattgataatgattcactaacatggatcaaacatgtactccatctaaattttaccctgaacccatctgtactcacctgatgcatatactcacatttgaagcatccaaacactatgtcagaccagaatcagagtaatcgtaatttaacactctaagagtactaataacctgcactgttacgagagccaatcgttatcattccttcctgactccggccgtactggccgaattcccgggcatatgtccggtaccgtcgactg

SEQ ID NO: 80691 - DNA, 562 bp, Homo Sapiens
  misc_feature (184)..(196): n is a, c, g, or t
  misc_feature (443)..(455): n is a, c, g, or t
gagaaggttccatagtccactcttaggggaaccagcaaagcctcatggcagttggctccatctggacctcccatggtcactacaggatggtggagcagggggcatcttttagcctccccccgccaccacatccaggccctctcaggcacctcctgcctcagcccacacctgcctcacccattgnnnnnnnnnnnnnacctactgccatcccactcctctgccagccacttcccagccgccccaccccactccatccaccaaatcacctcctgacttaatcctttctggaaggagctgccgcccaggaaccggtattgcctagagcctccaggaggggccctcctcaggcctccagtggccccatgcccacctgcctgaccctccactgcccctggaagcaaagtgcctatcagcagcgttgcgtcctctggggcccccggtcnnnnnnnnnnnnntgtgggctaaccttggccaccaccacaaaaggaatgtgccagaatgctgaaccttcttgttaatgctatgaccgtgccttgaataaacaagtcctcccaacctcaaa

SEQ ID NO: 80692 - DNA, 735 bp, Homo Sapiens
  misc_feature (28)..(28): n is a, c, g, or t
  misc_feature (35)..(35): n is a, c, g, or t
caaatcatccttgtgagttcatcaatancacacgncagaggacagaatactactgcaggaccgactgtacagacttccacgcagaaaaactcattaatgcagccccaggaggccagggaggcactgaagccagtgtggaagtcttattcgagcccagccacctgggtgagaccaagggcatcctgatcctatcatcgctcgcaggtggagagtatatcatccccctctttggaatggctctgcctcccaagccccaaggtcccttctcgatccgagccgggtacagcataatcatccccttcaagaatgtcttctatcacatggtgaccttctccatcatcgtggataacccagccttcaccattcgcgctggagagtctgtgcggcccaagaagatcaacaacatcacagtctcctttgaaggaaacccatctggcagcaaaacccccatcaccaccaagctgactgtgagctgccctcctggtgaagggagtgagactggagttaaatgggtttattatctgaaggggatcaccctttagtggtaaccagggttacctgtatcaaccaaaagctatgcattgtcttagcctgaaaaagaatagagaaaacaataagaattctaaaggaactgtttttattcttctcatacaattatagggcagttatttccctattatgtgttttccaaatatagatatgaaatatctattccatattaaacattataactac

SEQ ID NO: 80693 - DNA, 579 bp, Homo Sapiens
gcggccgccaaacggcacttggtaaccgagaatcgccacggccttgagcaaggcgcggcggatcatgcgtttggtctgttcgtcgaggtaggcgaagttgtacgccgggtcgcgcacagccggtagggtcaagtcattcatggcggttgccctcggccggttggcgcagtttgcggatcagttccagctcggactggaagtccacgtagtgaggcaatttgaggtgcgagacaaaacccgccgcctcgacgttgtcgcagtgggccagcacaaactcttcgcgttgggccggtgagacgacttcttcgttgtactccccggcgcgcagcgagcggtcgaccagcgccatgcccatggccttgcgctcggcatgcccgaacgccaggccgtaaccacgggtgaactgcgcaagctcagtggccgagccgacaaattggttgaccatctcgcactcggtgacttcgatgctgcccaggcagatgggaaagcccaactcttcggggtcgatccacacctcgacgtcgccgatgcgaatctcaccggcaaacgggtggttgcggccgtaaccgccctcgtgcc

SEQ ID NO: 80694 - DNA, 646 bp, Homo Sapiens
ggtattgctggctcctcggaacaagatgccaactggctaagcagttctggatctcggcgtcgatgtatccccctagcgaatctcagctggtgctgcgcagagacagcagtcagcgtctgccggtggcgcggcccaggaggagcagagggtctgaaaacagccactcctcgcagtcttttcaccttgcgagtaacaaaaatagagacatctttgccgaagccctaaagatacaggaatctgaggagaaagtaaagtatctccaaaaggctaaaacaagagaagagattctccaactcttaagaaaacaaagagaagaaaggatctcgaaagaactgatttcccttccgtataaaccaaaagccaaagaacacaaagcaaagaaagtggtatcagagtcagataaagaggaccaagaagaagtcaaaactttggactaatttgcttgacacatggcagaggatggctcacttataccttcactttggaaacaaccttctcttagatcaggatcattgagatcactggcaacattatagtagacaaagaaatacaagttaaatacgcagacttccaggaattttaccagttagtgagtacttgtgttaaaataaagaaataaaggttaaatatgcaggcttctaaaaaa

SEQ ID NO: 80695 - DNA, 649 bp, Homo Sapiens
ggcacgaggccgtaccggcatgcaggcccgctcggtggcgtccgtgggcatcagcacgctgacccagcgcctgggctcgtcggccgtcatcgtcgtcggcatcgctggcgtggtgggcgtgctggtggcgctgctggccatggccgagggctatggccagaccctgcgcaattccggcagcctggacaccgccatcgtcatgcgcggcgcctcggccaacgaggtctcttcctcgctgagccgcgaggacatcgtgcagatcgagcaggccccggacatctcccacaatgcccagggcgagcccatcatctcggccgagacggtggtggcgaccaatctgcccgtcaagggcagcaagaccggcgactcgggcagcgcccaggtgcacggcgtcagcgaagccgccttcgtcgtgcgtcccaacaccaagatcatcgaggaccggaccttccagccgggcctgcgcgagatcatcgtcggcaagggcgcggtgcggcagttcgaagggctgaaggtcggggagacgctgaagctcggcaaccagccctggaccatcgtcggcatcttcgcctcgggcgatgccatggagtccgagctgtgggccgacgccaatgtcgtcaacgacacctacaagcgcggcagcggccgc

SEQ ID NO: 80696 - DNA, 756 bp, Homo Sapiens
gcggccgccagggtgaccaaggcgttggcgacgttatgttgaccggtcatgtcccattcgacgacgccttggggcctcaccctcgaacagcacttcaaagcgcgagccgtcttcgctgagcaacttgacctgccactgcccgcccgcgccggtggtttgcaccggcgtccagcagcccatgtcgatcacgcgctgcagggccggctcggtggtcgggtggatcaccaggccttcgctggggatggtgcgcaccaaatggtggaactggcgctcaatggcggccagatcagggaaaatgtccgcgtggtcgaactcaagattgttgaggatcgcggtacgcgggcggtaatggacgaacttggagcgcttgtcgaagaaggcgctgtcgtattcatcggcctcaatcacaaaaaacggcgtatcgcccaaacgcgccgacaccgagaagttctgcggcacaccgccgatcaggaaacccggactcatgcccgcatgctcaagcacccaggccagcatgctgctggtggtggtcttgccatgggtgcccgccactgcaagaacccagcggccttgcagcacatggtcggccagccattgcgggccggagacatagggcaagcccttgttgagtacatattcgaccgccgggttaccacgtgacatggcgttaccgatcaccaccagatccgggaccgggtcgaactgtgagggggtcgtaccttgggtcagctcaatacctgggcctgaagctgcgtg

SEQ ID NO: 80697 - DNA, 627 bp, Homo Sapiens
  misc_feature (552)..(572): n is a, c, g, or t
gcggccgctccaacatcgtgtaaaaaatgtcccagttcaccatgggcggccccgccatctccatggcgtcacccatgtccatcccgaccaacaccatgcactacgggagctaggggcccgccccgcggactgacagcaccaggaaaccaaatgatgtccctgcccgccgcccccgccgggcggctttcccccttgtactggagaagctcgaacacccggtcacagctctctttgctatgggaactgggacacttttttacacgatgttgccgccgtccccaccctaacccccacctcccggccctgagcgtgtgtcgctgccatattttacacaaaatcatgttgtgggagccctcgtcccccctcctgcccgctctaccctgacctgggcttgtcatctgctggaacaggcgccatggggcctgccagccctgcctgccaggtcccttagcacctgtccccctgcctgtctccagtgggaaggtagcctggccaggcggggcctccccttcgacgaccaggcctcggtcacaacggacgtgacatgctgcnnnnnnnnnnnnnnnnnnnnnatgaaaagaaccagtgtcaatccgcagaccctctgtgaagccaggccgggcgggc

SEQ ID NO: 80698 - DNA, 1730 bp, Homo Sapiens
ctctgtagcgttgtatagattgtactcgtgttgttgtgtattgaatataggtactgtattagatatcgtgttcctccctcttgtggtctatattgaggcctcgtccgtctagttaggagggtctctccgtcctggtctgttaaaggtctctgttactgtgttttttcaacaataagtttaagatgcctacttaccttcccgtgtaacaggcctctgtttacaaaggggagtcctccttggcagctccttccactgaacagctctggggacagggctagggaccttgcaggacaggctggcagggccccaggccctgttccagcagagacaacccagtcaggtagacggcagaggggaacgagggctcccacaacatgattttgtgtaaaatatgcagcgacacacgctcagggccggaagtggggttaggttggggaacgccccgcacatcggtaaaaaagtgtcccagttcccatagcaaagagagctgtgaccgggtgttcgagcttctccagtacaagggggaaagccgcccggcgggggcggcgggcagggacatcatttggtttcctggtgctgtcagtccgcggggcgggcccctagctcccgtagtgcatggtgttggtcgggatggacatgggcgacgccatggagatggcggggccgcccatggtgaactggctgttgactgcatagtgggcactcgtgctgccaccaccactgccctgggcgccggaggacccttggacaatccccgtgctcattatggagcccatccgggagtgggtgtgattgacaatccccgtgttggctaaaggaatcaggttgttgtggcccacgctggagccactggcaataacactgctcaagtcataggcggtcggcatccctgccacggccatcccgctgctgaggttgtaggtgctgcccgtgttccacatgttttccgagggagatgtgtagtgggagccgggtgggggtgagggcgttgtgcccgtgtatctaaagaaggggtttttcagatccaggaggttactggacttggagccggtctggtccacctgggccacaatactgatgtcgtagctctgtcttttgttggcaataagcagacatgtccctgagagcgtgtcccctgccttggcgaacagtggtgactggaacaggcaccgcacctggtaccagtgggtcaggggctctgtcggggctgtggacagccacacggtcattatggagccgatgaaagcaacgtcaaaccagaaagccaggccgtggaccagccctgaatgcagcatgtggaatttgaatgggatttctatcctgtgcaaatctccttctttggcttctaagaagttcaccgtgtacttgacagacttggccatcaggatccggatgtcaaatgtgtccaccacaggctgccggaaatactcatccaccgcggcacctcggagggccgacaggtccactccatggaaagatggctggtaccagaagttggccttggtgaactgctccatgtagagctgttcatccgtgaagggtgcaaggtggacgtcaccaatggtaggaaacatgtttccgctgggcttcaggtacttcttggcgtggaggtagctctccagcatgcgctcgttgaagagcatgtagcccatgggctccgagatgatgatgtccacctgctcgcctcgtgccgaattcggcgcgccgtcgacttcatactctctcccccc

SEQ ID NO: 80699 - DNA, 984 bp, Homo Sapiens
  misc_feature (914)..(935): n is a, c, g, or t
agggcggaagagtatgaagtcacggcgcgccgaattcggcacgaggaaaagacagagctacgacatcagtattgtggcccaggtggaccagaccggctccaagtccagtaacctcctggatctgaaaaaccccttctttagatacacgggcacaacgccctcacccccacccggctcccactacacatctccctcggaaaacatgtggaacacgggcagcacctacaacctcagcagcgggatggccgtggcagggatgccgaccgcctatgacttgagcagtgttattgccagtggctccagcgtgggccacaacaacctgattcctttagggtcctccggcgcccagggcagtggtggtggcagcacgagtgcccactatgcagtcaacagccagttcaccatgggcggccccgccatctccatggcgtcgcccatgtccatcccgaccaacaccatgcactacgggagctaggggcccgccccgcggactgacagcaccaggaaaccaaatgatgtccctgcccgccgcccccgccgggcggctttcccccttgtactggagaagctcgaacacccggtcacagctctctttgctatgggaactgggacacttttttacacgatgttgccgccgtccccaccctaacccccacctcccggccctgagcgtgtgtcgctgccatattttacacaaaatcatgttgtgggagccctcgtcccccctcctgcccgctctaccctgacctgggcttgtcatctgctggaacaggcgccatggggcctgccagccctgcctgccaggtcccttaggcacctgtccccctgcctgtctccagtgggaaggtagcctggccaggcggggccctcccttcgacgacaggcctccgtcacaacggacgtgacatgctgcnnnnnnnnnnnnnnnnnnnnnnatgaaaagaaccattgtcaatccgcagaccctctgtggagccaggccca

SEQ ID NO: 80700 - DNA, 1052 bp, Homo Sapiens
  misc_feature (107)..(107): n is a, c, g, or t
  misc_feature (135)..(135): n is a, c, g, or t
  misc_feature (158)..(158): n is a, c, g, or t
  misc_feature (171)..(172): n is a, c, g, or t
  misc_feature (176)..(176): n is a, c, g, or t
  misc_feature (262)..(262): n is a, c, g, or t
  misc_feature (289)..(289): n is a, c, g, or t
  misc_feature (336)..(337): n is a, c, g, or t
aaatatccttctagatcttgcccttattatttatcaagctacatactattttataagtgcagacacatcaaaagggtatctagctcatgctggtgtctagtcaactntatcctgcagcagtaagcctagatactntacacgattgcctgagtgcttgntgtgaccgtgccnncagnccaaggggatcatgccccggctggctttcccgggggtctcagctcctgttgtcagtgatagcggctcaaaggagcatcagttcttntgatccaagagtgctactgaaatgccntgccctgtgcgtgccttaaacattgagaagtctgctctccgtttatnntgggatttgattctcattttaccatagcttatattctcaatttcaatgccagtctcagaactcttgttttctgtgttctgttctcaaaattacattgtccctcatgtcatttcaaactgttttccaaagggatttgagcatatacaactacaaatccaagcagattgactctcaaaaataatcttaaatactgcaaatagtcccaactaagattcagtcagtatgtttgttttgcaagtttgggagagtaagttggctttgagtcacacatcgaagctttaagaggtgagacgctggcttcattctggactagacaggaacttggcctcagcgtgagatcctgccatgcagtgttgcggtggcactgaagaagtgtgaatgtgaaggcggcgtcggcgcggggccagagcaccactctgctgccccaccacgcggcctgtgaggagccactaaacctttccgtgcctagacctccccatctgtggaatggggtcaataccacctacctcacaggggtgttgtgaggactgagaagaacaatgtcaaatgtttttaatactcagatgtgggagcgacatcaatgaaatctgtactgtatgaaagctacacaaaaatgggcagacatttggttaattgtgccagatacctaaaatgtatgttcagaaaagcattttatcaactcagaaatatgacttatttctagatttcatggctt

SEQ ID NO: 80701 - DNA, 791 bp, Homo Sapiens
  misc_feature (108)..(108): n is a, c, g, or t
ttaaaagctttcgaatgtgtgacctcaaaagccaacttacttttcccaaaacttgcaaaaacaaacatacttgactgaatcttagtttgggactatttgcagtattanagattatttttgagagtcaatctgcttggatttgtagttgtatatgctcaaatccctttggaaaacagtttgaaatgacatgagggacaatgtaattttgagaacagaacacagaaaacaagagttctgagactggcattgaaattgagaatataagctatggtaaaatgagaatcaaatcccaaataaacggagagcagcacttctcaatgtttaaggccacgcacagggcaggcattcagtaagcacttcttggatcaaaagaaactgatgctcctttgagccgcctatcactgacaacaggagctgagacccccgggaaagccagccagggccatgatccccttggcctggggccacggtcacacaaagccactcagccaaatcgtgtagagttatctaggcttacttgctgcaggataaaagttgaactagaacaccaagcattgagctaggaatacccctttgaatgtgtactgctacttataaaaaataggtatgtagctatgattaaatagatgaagggccaaagcatcctatgaggaagtatttttaaaattgtatagatgttcatgcagtgggggacagaaataaagaggttaaagcggtctgtgtttttcggttaaatgaaaggttgtaaatgcatttttaccgctgataagaaggggtacctgctacccccc

SEQ ID NO: 80702 - DNA, 732 bp, Homo Sapiens
cggcacgagggcaacacccgcgggtaaagcggtatcagctatatttttaatagcgattggcgcctgataacgcaggtgcaggtggtagtcggtgatgcccccatcccagtaggcgccgcgcggtgcgccggcgatgtcgtgcacggcgcgcagcacgaagggaatggagcaactggcctgcagcgcgggcatgaagttctgcgcggtcaaggccacctggtgggtgcggaagtcgcgcacgtcaaacggcagtgcgcccggcgcagcggtggagaacaccacgcggtccagccacagcgccagcgcgcggcggtgcagcgcattactggcgaaagcgcccaggtagcccagcggcgtgccccagcggtgctcgcgcgccagcaggtggcgcccgcgcgcggcgacgatgtgcaaccggtagcgcgcatggcccagcaccgtgtccacacggccgccaaaaaaggcctgcaggttctgcccgaactgcgcgctcaccgcgtccgccgtcgggcggcgcgcgccggggggcagctcgtactcctggtggatgtagtcgtgctccaggcgcacgaaggcggccaggctgtggtccaggcaagccgtggccatgcgccacgcgccgatcgacgcacctatcaggtccaccggctgcgccgactgcggcagccattcaccaaaaacaaaccggtccagcgggccgaggatgagtcccttcgggccgcccgcggccgc

SEQ ID NO: 80703 - DNA, 419 bp, Homo Sapiens
ggcacgaggccaaagggcgccagcaccagcgaggccagccctgttgcggtgatcaacggcgaggcgggtacggtatagccgtcagcgcgcaacacggcgacgccgggcatgttttgtgaggtcattgccaccacaaacaacgggataccgatgctgatggtcgccgccagcgagaagtgcggcgtggtccacaccggtgttgccacttccaggtggaaaccgctgaagtccagcaaacccatcagccctgacaacagggtgccgattaccagcgcggccagtactgcataacgcggcgacaggcgcttgatgatcagataggtgaaaaacatccccagcaccaggccagtgcgatgttgcgcggcgacaaaaatctcgctgccgatcttgaacagaatccccgccagcaaggcggccgc

SEQ ID NO: 80704 - DNA, 1062 bp, Homo Sapiens
  misc_feature (64)..(124): n is a, c, g, or t
gggagaggcccttctctaggcagggcagactcctcggggatttaagtgctgaagtaaactgtgnnnnnnnnnnnnnnnnnnnnnnnnnnnnnnnnnnnnnnnnnnnnnnnnnnnnnnnnnnnnnagtgtgtcaggcctggccctgctccaatcctccccactccccagctggctgacaccctctcttggactcagtttttccatctacaaagcaaggggctagacaggtaggttctgaggtcccttccgctccatggtatggccttgaagccacagaccctaatcctctgagcctctgagaccgcaagctctcaaataatggggtggttggcttcctggtcatgtctcaagcccctggtcctttcctttctcccactcctcaattccagggttctcagactgggctcttaggcctaaagggtcctcaatggatacaccagctttcctatttccaaatggtaacaagactgccaagaactaggcaaaatgcaggctaaataacatcaaagtttttggctctagatgaatcagaattgccattagcagctatatgtgtttttggctgaagagtaaaaactagattaatgaccttcaaaacctagaatccactggggaaacctctccagggaaagggccccggccattctcaccctactcacctatgatgatgatgaggatgatggcgcaaatcactcccaagatgatcatcatcttgaggtttttccaccagtatttgcgcttgagcttggctgcacttgtttcaaactgggaggccccccgcctggagtgcatctgcacggtcgtccagcgtccgacagcattctggtctcgctaccaggaccattgtccacgttcaccctcatgatgtccaccacctgcatccacctgggccgtgggtctgactgacagtctcctgttactggtgaggtttaggagggggtgcagggggaccaccctccacagcacggggcagcagggggcgccaggtggcagcaggtagcacacatggcggggcagcgggtggaggacttggcagcggcagtgatggcggcgcggctcgcg

SEQ ID NO: 80705 - DNA, 962 bp, Homo Sapiens
  misc_feature (404)..(429): n is a, c, g, or t
  misc_feature (554)..(605): n is a, c, g, or t
ttgcccctttccaaaaatccggtcccttattggccccttgggaatattttgatgccccgcctttttttgtcttgtcttcttttgaggcggggcagagggagcatgacggggagagtgaggaggaaagaggaaaggaaggccagggtgggaggaaggatcagctaaatctgagggaagaagaaggaaaggagagggactattgcatagcagatgcaaatgaagggacttggggctagtcaggaagaaagggaaagggaaggaaggcaagagagaggggtgaagggaacctcaggaaggggtgttaaggacaaccggaaaaatcatctagtaataaaactacaaacagaccaaatatatataatacttatatatgtataaataacagctggctatttacagggggnnnnnnnnnnnnnnnnnnnnnnnnnnggatccaggagagggggggctgaaagatatggctgagaggtggaggaacggctgagggttgggggagaagcccttctctaggcagggcagactcctcggggatataagtgctgaagtaaactgtnnnnnnnnnnnnnnnnnnnnnnnnnnnnnnnnnnnnnnnnnnnnnnnnnnnnacaagaaagcagatgtgtcaggcctggccctgctccaatcctccacactccccagctggctgacaccctctcttggactcagtttttccatctacataagcaagggggctagacaggtaggttctgaggtcccttaccgtctccatggtatggccttgaagccacagaaccctaatcctctgagcctctgagaccgcaagctactcaaataatggggtggttggcttcctggtcatgtctcaagcccctggtcctttcctttgctccgctactcctcaattccagggctctcagactgggctctttaggcctaaagggtcctcaatggatacaccagctttcctatttccaaatgta

SEQ ID NO: 80706 - DNA, 655 bp, Homo Sapiens
gcacacatccagattggagacatccagatgaggcccacggagcaggtgacctagtgactgtgggactcctccttccctccccacccttcatggcttgcctcctgcctctggattttaggtgttgatttctggatcacgggataccacttcctgtccacaccccgaccaggggctagaaaatttgtttgagatttttatatcatcttgtcaaattgcttcagttgtaaatgtgaaaaatgggctggggaaaggaggtggtgtccctaattgttttacttgttaacttgttcttgtgcccctgggcacttggcctttgtctgctctcagtgtcttccctttgacatgggaaaggagttgtggccaaaatccccatcttcttgcacctcaacgtctgtggctcagggctggggtggcagagggaggccttcaccttatatctgtgttgttatccagggctccagacttcctcctctgcctgccccactgcaccctctcccccttatctatctccttctcggctccccagcccagtcttggcttcttgtcccctcctggggtcatccctccactctgactctgactatggcagcagaacaccagggcctggcccagtggatttcatggtgatcattaaaaaagaaaaatcgcaaccaaa

SEQ ID NO: 80707 - DNA, 1110 bp, Homo Sapiens
cttgcgcacgtcgaccgcgcgggtcgcgcccatcttgcgcgcgagctcgaggcggtactcgttgacgtcgctgatgaccacgtgacgcgcgccgacgtgcttcgcgatcgcgaccgccatgcagccgatcgggccggcgccggtgatcagcacgtcctcgcccacgaggtcgaacgagagcgcggtgtgcgccgcgttgccgagcggatcgaggaacgccgcgacgtcgtcgctcacgtcgtcggggagcttgaacgcgttgaccgcggggatgacgaggtactcggcgaagcagcccgcgcggttcacgccgacgcccaccgtgttgcggcagaggtggcgcttgccggcgcgacagcgacggcagtaaccgcacgtgatgtggccctcgccgctcacgcgatcgccgaccgagaagccgcgcacgtgcgagccgacctcgaccacgcgaccgacgtactcgtgcccgacgtgcatcgggaccgggatggtcttctgggcccagtcgtcccagttgtagatgtggatgtcggtcccgcagatcgcggtcttcgcgatctggatcttcacgtcgttcggcccgacctcggggatctcggcctcgcccatccagatgccgggctcgcgacgggccttgatcaacgccttcatcttcataggagtgcggcagttatgaggcgcgcgcggagcgcgcgtgtgtggtcttcgtgagagcgatcaccgtggtgatcgcggtgttgcatgacgcggtgcgtcctacgagacgagacgcatctcgcgaccgatcttcgtgaacgcggcgatcgcgcgatcgacgtgctcgggcgagtgggcggcgctcatctgggtgcggatgcgcgcctggccgcgcggcacgaccgggaacgagaagccgatcacgtagatgccctcggccatcatgcgctcggccatctgcgaggcgaccttcgcgtcgccgagcatgaccgggatgatcgggtggcccgcgccggcgagcgtgaagcctgccgcctgcatgccctcgcggaagcgcgcgctgttcgcgcggaggcgcgtgcgcagctcgtcgctcgactcgagcagatcgaggcatgcgatcgacgcggccgc

SEQ ID NO: 80708 - DNA, 722 bp, Homo Sapiens
  misc_feature (73)..(73): n is a, c, g, or t
gcacagcccctgtaacttcacaccgtggctctgttcttcatagcagtgtagggagcagagaatagcagaaccncaggaattaggagggtgaagtcctaatcctactgctccctctgcacaaggtcgtcttggttctttctattctttgggcttcagtttcctcatatggacaacgaggattgaactagatctgtggttttcaaacagggttccagggaaatctggcagaggtacctcaggggtgaaggggccccatgcccttccctgtttcatctaaaaatagggaactcctttcccaggcggctgccgaagatggcagaggggcaggtcccggtgctcaatggtcaaagctatctcctgggcttcctgagggccatggtggctaagcaggccggaagttggtggtcgtacactgcgggggcatcagtatttctggcaatgtctatagaaagaagttgaagtacctggccttcctccacaagtggatgaacagcaacccttcccgaggcacctaccacttctgggcccccaccacttccgggtccccagccgcatcttctggcggaccccgaggcatgctgccccgcgagaccaaggaagccaggccgcccaagaccgcctcaaggtgtttaacggcatcccaccaccctatgacgaaaaagcaggtggtggttcctgctgccctccaaggttgtgcatctgaagcctacagccgcggccgc

SEQ ID NO: 80709 - DNA, 773 bp, Homo Sapiens
  misc_feature (378)..(474): n is a, c, g, or t
cagttaaactccttgacttaatatttaaagcaccaacaaggactttaattgcaggttatagacagcaaattccttctttttattcattattttgtttgggggatgggtacaaaagtaaggttgtaaagaaggaaaacaccaacaagataaaatcaatctgcctacaatttggatttattttgatggtgtggaaaatattatatgactattattttaggcgctactggataaaaaaaccaggaaattaatttcagtatgttggagagacaaggagatgggatggaaagaaaaatagctggttccgaagtgaagagatgtgaaatacagatgtgaaaaaaagttaaatcatttatggaaacttatattaagaaaatgcannnnnnnnnnnnnnnnnnnnnnnnnnnnnnnnnnnnnnnnnnnnnnnnnnnnnnnnnnnnnnnnnnnnnnnnnnnnnnnnnnnnnnnnnnnnnnnnncagttaaactccttgacttaatatttaaagcaccaacaaggactttaattgcaggttatagacagcaaattccttctttttattcattattttgtttgggggatgggtacaaaagtaaggttgtaaagaaggaaaacaccaacaagataaaatcaatctgcctacaatttggatttattttgatggtgtggaaaatattatatgactattattttaggcgctactggataaaaaaaccaggaaattaatttcagtatgttggagagacaaggagatgggatggaaagaaaatagctggt

SEQ ID NO: 80710 - DNA, 396 bp, Homo Sapiens
  misc_feature (169)..(302): n is a, c, g, or t
gatgtcctttgcagtggatcacagctacctgctgagaaactcctggagggcagaggcatgcctgccatcttcatcattgcattaccatcacccaacactatcagggaacctgccctgataatcagtctacagttgtatccagcagctccagagagacagcgaccagcannnnnnnnnnnnnnnnnnnnnnnnnnnnnnnnnnnnnnnnnnnnnnnnnnnnnnnnnnnnnnnnnnnnnnnnnnnnnnnnnnnnnnnnnnnnnnnnnnnnnnnnnnnnnnnnnnnnnnnnnnnnnnnnnnnnnnggaaaaagacctgtactttaaacaattgctttgctgagatgttgttaaatctgtagctttgccccagccactttgccccaaccactttgaccca

SEQ ID NO: 80711 - DNA, 1286 bp, Homo Sapiens
  misc_feature (1128)..(1162): n is a, c, g, or t
aacgccggccgctgacgacaagccccatcgctgtacttaccgcgcacaccactctccctgtgagagcggccttggccgcgacggggccgctgccgtcctcggacttcgacgcgggctgctgtcggggtcaagacccctcccacagaaccccggccctggttccagtcacgagtcaggcgcgatccctgtgggagcggccttggccgcgacagggccgctgcagtcctcgggcttcgatgcgggctgctgtcggggtcaagacccctcccacagaaccccggccctggcttcagtcacgaatcaggcgcgatccctgtgggagcggccttggccgcgacagggcctttgcagtcctcggacttcgatgcaggctgctgtcgaggtcaagacccctcccacagaaccccggccctgactccggccacgaatcaggtgtcagacgcatgcgcgctccgccccggcgagcacccgcgcaaacatccgtgccagcggcgcgcgggcggcgtccgcgccttccatttgcgcgcgcacgatggcgccctcgatgagcagcagcagatcggcggcaacctcgtccggtcgaacgaaacccgcctcgcgacaggccgcttcgatccgcgccgccagttcccgcttgtgcgtcaccgtcatcggcggcgcgtccgtgccggcttcggcgtgaccattgatgaaggcgcagccgcgaaagccgggcgcgcggaaccagtcgtccagcgcatcgggcagcgcagccaaccaggcgcgggcatccggcgcagcagcaagccggctctccagccagcccatccagcgcgcgtggcgcaggtccagataggcctcgaccagcgcctgcttggtcggaaagtggcggtagaacgacgccttggcgacacccgactcggcaatgatgcggtcgatgccggtggcgcgcaggccgtggcggtagaacagccggtaggcgcattcgagtacgcgggtccgcgcatcctgttcggacagcggaccgggtccggcgagatcgtcgagagatgtgaacatccattcatgttgacagacagacctgtcttgttcaagtatgtagacagacctgtctcttttcaacccccggagcctttgccatgaccgacnnnnnnnnnnnnnnnnnnnnnnnnnnnnnnnnnnnaaccgctgcgcagaaggtgcgcgccgccgaagacggctggaacagccgcgacccgcaacgcgtatcgctcgcctacaccgccgacagccggtggcgcaaccgctcggagttcctgcgcggccgc

SEQ ID NO: 80712 - DNA, 716 bp, Homo Sapiens
gcggccgctggcgctggattccaccgcgccgatgcgcaaggtgccacgcggaatcgcgttggcatccactgcgcgtttggactcatccaccagggccaggatgcgctcgcagtaatcgaggaagatttccccggcggcactgatggccaacccacggcctgcgcgaataaacagcggtgtgcccaactcgctttccagctgcttgatgcgcgtggtgatgttggacggcacgcagtgcagttgcagcgcggcctgggccacgctgccggtttgtgccacggcgcgcaccattttcagttgggccagttccattgctcagttccaatgatttcagaagtcagaaacgcttaattgtcctgcgccttgcgcggctcaagactgacggtattccttctcagtatctggatgccgtcgatgaatgccccgtcacccgtaaagcttacgctagtcatcgctggcgtgattctctgttgggcctattcgccgattggcgtgcacatggggctgcacagctacagccctggccagttggcgttgctgaggtttctgatcgcctcggtgttcatgggcggcatcgccctggcggtaggcatcggccgcccgcgtgtgcgggatctgccgtggttgctggtgttgggttttttcggcgtgttcctgcaccacaccagcctcaactacgggcaacagtgggtgacggcggcggcatcgcctcgtgc

SEQ ID NO: 80713 - DNA, 384 bp, Homo Sapiens
gcggccgcacaggcttatgcacaaaaggccggggaactgcaaaaacggctggagcaaaccgagcaagaatggcaacgcctgaacccaccgagtattggcttcggcacccgtgcagtggacaccaatatccagttgcaggcgctcaacaaggaacgcctgcggctgcccatggagttgcaggcactcaaggtccaggcgtatgcatcggtgcatcgaacggaacgcaacctcaagctgctgatgattggcgcagtaccgctgccgttatgcctgatcgcctgtgcagtgttcctctaccatcggcgtcgtcgatcggcggctgtcgttcactgatcagccgtcaacgacgcgcaatcagcccttgccctcgtgccgcctcgtgcc

SEQ ID NO: 80714 - DNA, 735 bp, Homo Sapiens
  misc_feature (673)..(673): n is a, c, g, or t
ttatggagtacctactctatgccaggccctgcaccgggcactggggatacagacatgattcagacacagtctagcttgggaaacagactcatgcccgactaattataaaacagtgagataagtgtcacagtagaagcatgaaccaaggaagcacagacaactatttctgcctgggggagctggggaaggaggtgacacttgagttggggcctcaaaggacaagtaagatgttgccaggcagagaaagggggaagggcatcccaggcagagggaactacacagcaaaaagcaagggagtctggccatgtttggcctgctgaggaagggaaggtggtcttacgggatgggaggtgaccagccctgctgagcccacgctcccagctttcaggcacctcctgctcttggggcagaggcctgggagaaggtatggcactccttctccttccccatcggccttctggggggcttcagggagaggctgcattgcctgccaggtcctcgcagacctccggttcctcctcagaggagctcggggagtccgcctcctgactcttctcgatcttgtccacacacagcaggcccgagcggtctgttgacattagcagcacagcctgcagcagagccacttccgtgtcatccaggttaaaggcagagagtgacttgcccagttcanagatggcgtcggagactacgcccaggcccgcattcttgagctgctcccgcttgacagccatc

SEQ ID NO: 80715 - DNA, 913 bp, Homo Sapiens
cctggcatgtccgtccgtacaggtaccctgcagtgaacgcagttgggcagaccggtgcaggagatctgggaggatttcctccatgagcttaaacgcccggctgtgcgagatgctggtagagttttgccaaacacatcccgggctttccgtgacgctttctcagcatgaccaagtcaccctgctttaaggctggcaccttttgaggtgctgatggtgcgctttgcattcgttgttcaaccgtgaaggaccagacagtgatgttcctaagccgcaccacctacagcctgcaggagcttggtgccatgggcatgggagacctgctcagtgccatgttcgacttcagcgagaagctcaactccctggcgcttaccgaggaggagctgggcctcttcaccgcggtggtgcttgtctctgcagaccgctcgggcatggagaattccgcttcggtggagcagctccaggagacgctgctgcgggctcttcgggctctggtgctgaagaaccggcccttggagacttcccgcttcaccaagctgctgctcaagctgccggacctgcggaccctgaacaacatgcattccgagaagctgctgtccttccgggtggacgcccagtgacccgcccggccggccttctgccgctgcccccttgtacagaatcgaactctgcacttctctctcctttacgagacgaaaaggaaaagcaaaccagaatcttatttatattgttataaaatattccaagatgagcctctggccccctgagccttcttgtaaatacctgcctccctcccccatcaccgaacttcccctcctcccctatttaaaccactctgtctcccccacaaccctcccctggccctctgatttgttctgttcctgtctcaaatccaatagttcacagctgagctggc

SEQ ID NO: 80716 - DNA, 978 bp, Homo Sapiens
  misc_feature (800)..(800): n is a, c, g, or t
gcagcaccaatgcccagggcagccattggaaacagaggcggaaattcctgcccgatgacattggccagtcacccattgtctccatgccggacggagacaaggtggacctggaagccttcagcgagtttaccaagatcatcaccccggccatcacccgtgtggtggactttgccaaaaaactgcccatgttctccgagctgccttgcgaagaccagatcatcctcctgaaggggtgctgcatggagatcatgtccctgcgggcggctgtccgctacgaccctgagagcgacaccctgacgctgagtggggagatggctgtcaagcgggagcagctcaagaatggcggcctgggcgtagtctccgacgccatctttgaactgggcaagtcactctctgcctttaacctggatgacacggaagtggctctgctgcaggctgtgctgctaatgtcaacagaccgctcgggcctgctgtgtgtggacaagatcgagaagagtcaggaggcgtacctgctggcgttcgagcactacgtcaaccaccgcaaacacaacattccgcacttctggcccaagctgctgatgaaggagagagaagtgcagagttcgattctgtacaagggggcagcggcagaaggccggccgggcgggtcactgggcgtccacccggaaggacagcagcttctcggaatgcatgttgttcaggggtccgcaggtccggcagcttgagcagcagcttgggtgaagcgggaagtctccaaggggccgggttcttcagcaccagagcccgaagagcccgcagcnagcgtctccctggagctgctccaccgaagcggaattctccatgcccgagcggtctgtggggaagacgacagcagtgaggcggactccccgagctcctctgaggaggaaccggatgtctgcgaggacctggcaggcaatgcagcctctccctgaagccccccagaagtgcgcctgggtg

SEQ ID NO: 80717 - DNA, 2074 bp, Homo Sapiens
  misc_feature (184)..(184): n is a, c, g, or t
  misc_feature (222)..(222): n is a, c, g, or t
  misc_feature (232)..(232): n is a, c, g, or t
  misc_feature (240)..(240): n is a, c, g, or t
  misc_feature (380)..(380): n is a, c, g, or t
ttccgatccttggcacctgctgagatttcccagtgtcgtgcgtatgtgacatgtgtgttgagaaaacgtgttgaccagtttgttcatcacggcatgagtactgtccagctgccatgctgtgtgataccgttgggtcagattgggtgagaatgagtagttctgcatcttgttctacctgagacantttacacaagccaagtatatctctccagcctgcagatntcacctgacngtcagccnccatgcgtagactcccgctgcagccctctgccctgtggctcactgcatgcagcccctggcgtgcaatactagtgctccacggcgcgatgtgttctagcccttgcactgcacctaggctcagggttcaaacggccagcccngaaaagcctgcctgccttctttctggaaacagcacgtccccggccgtgtgcctgcccctttctctactgagctagtccccaaaccaaaggcaagccccctcgggcctcgggggatggggccggccacacccctgactccgccctggctctgccccatacccctgccgtggggccgacctgggggatgcagacatccggctccgtattcctgcctatcggggccaggatgcaaaaacaatttttgcgtaaaagatgtcacactgatctgctggagtggggtggacacatgaattcagttttatcatgaacactcgcgactggctgcttgttaattcagggataatggtggcattcttacaaactgctcgggaaatagaatgacgggaacacttttagggagcccaggaagttaccagggacattggtgtcgccggcccaggcaacagcagcgtacgcttttcaaagatcattgagttgtcttagaatttgaagctgtgtaatgacaatgtcacctggagttcgtctccatttcttaactttttgttgcacaagtatttggacagaagtcgaactgtgaatgagatactgaaatgcactaaattgtattacattaaactggagttacttgatacaatgaagaaatgcatctgatctacttgtatttattgtctcagaattgtacgttgtgacaatcaaatgttacttgcctaaatgccaggaaattcaactggccttttaatcagcaagatcgccagcaagtactgtaactgtaaaggaaaatctctctctctggagaacccacacaaaccattgacctgagtgcgcatgacagccactggcttctttttctatgattgaaaatctgccatcgctgactgttggccagtttcaaagggacccattgtatacagggtgcaaatgtattatacggatgtttccttttgtacacttcatttttacaagttttgctactcacaagctttatgtagtggaggatagaggtatttttggtctttagaagcttgtcggggtgagggctgctaacttacacttcagaggcctgtgtcccaaaggcctggctgcgtttgccgtgctgtgcgaggacctgtgtacacaggcaggtgtgcgcctgcccgagcgcgagtagctcttgtgtagtggtgaaatgctgcaggcatctgtttattaaaattgctgctgtgaaagacagggataaaatatccacaatataagagaaagcgactccgtgcctccttctgtttcttcgtttccagtctgcatagatgtctccaaggtaaaccagggccaccaggcactcctgtcccatggggccacccaccttcagagcccactcccacgggctctgtttccttggaggccatcctgccgatggcacttttcaaggccctcccttccctacgagttgctttctgggaggggaaattgaaaaggagagcggtcacctggcaaaaacacaggggaaatcagccagtccacaaaaatacgcaaaatgacctgatgatgtccaaaaaagggttttaaaagcgatcaaggacaaaaggttttcctaagtggcatgtatacatccaaaactactctttttttgtaaaaacattcatctgtggagaaaaccaaggaacccctttctcttctttattaaaaagcaaaacaaaaactcttgttagaaccaaaag

SEQ ID NO: 80718 - DNA, 635 bp, Homo Sapiens
  misc_feature (89)..(99): n is a, c, g, or t
cggcacgaggaatagaagcagccaagttcagaagactatttctggaaggatgctacattgaagattttaggccctattcgaaaaagggnnnnnnnnnnnggaggctattaaaagattctgtgcagtagcatgacatgcatctttgtattttacaaggattcctctggcaccacactggaaaatagatggcagaagcagagaatgcaagagactagattggaagctgacatcaatggagatataataagagcctgaactgtgtcagtgactgtaacaagacagaagaaaaggacatctaaataatagctaccatttggagatctgacatggtttggctctgtgtccccacccaaaaatctcatcttgaattgtaatccacatgtgtcaggggagggacctcctgggaggtgattggatcgtggggggcggtttcccccatgatgtttttgtgatagggagctctcacgggatctggttgtttgataagtgtctggcatttcccctgcattctctctctcacctgccgccatgtaagatgtgccctgcttccccttcaccttccaccatgattataagtttcctgaggcctccccagccatatggaactgtgagtcaattaaacctcttttgtttat

SEQ ID NO: 80719 - DNA, 964 bp, Homo Sapiens
gcggccgcgaggtaacaacgaatgcccaaaggtgggcaaacaagtgcactttacaacatagtgatccagaggaccgcaaaaccagtacaagatgtggtgagaatctctatatgtcaagtgaccctacttcctggtcttctgcaatccaaagctggtatgacgagatcctagattttgtctatggtgtaggaccaaagagtcccaatgcagttgttggacattatactcagcttgtttggtactcgacttaccaggtaggctgtggaattgcctactgtcccaatcaagatagtctaaaatactactatgtttgccaatattgtcctgctggtaataatatgaatagaaagaataccccgtaccaacaaggaacaccttgtgccggttgccctgatgactgtgacaaaggactatgcaccaatagttgccagtatcaagatctcctaagtaactgtggattccttgaagaatacagctggcctgtgaacatgagttactcaaggaaaagtgcaaggctacttgcctatgtgagaacaaaatttactgatttacctagtgagcattgtgcaagactgcatggataagggctgcatcatttaattgcgacataccagtggaaattgtatgtatgttagtgacaaatttgatttcaaagagcaatgcatcttctcccccagatcatcacagaaatcactttcaggcaatgatttacaaaagtagcatagtagatgatgacaactgtgaactctgacataaatttagtgctttataacgaactgaatcaggttgaggattttgaaaactgtataaccataggatttaggtcactaggactttggatcaaaatggtgcattacgtatttcctgaaacatgctaaagaagaagactgtaacatcattgccattcctactacctgagtttttacttgcatgaacaataaattcaaagctttacatctgcaaa

SEQ ID NO: 80720 - DNA, 334 bp, Homo Sapiens
agaaagaataccccgtaccaacaaggaacaccttgtgccggttgccctgatgactgtgacaaaggactatgcagttccacataccaacaaaactagtgatgccagctgctctgaacgacctagcaagaaactgactcatggaggaatgcagtttcaacatcctgatgattacatcccccttaccctgaccaatcaacaatccaaatttttcagcttctcatcctccacagtctccttaaaggaccccttcatggagcaaatttgtggcttgagatttcctctcatttcctagttcaaaggccttgtgattattaaaatcattctcggctgtaaa

SEQ ID NO: 80721 - DNA, 1108 bp, Homo Sapiens
  misc_feature (53)..(94): n is a, c, g, or t
  misc_feature (98)..(132): n is a, c, g, or t
cactccaaaccaaacgcaaaatgaaagactactatgggcgctagctctttttnnnnnnnnnnnnnnnnnnnnnnnnnnnnnnnnnnnnnnnnnnccgnnnnnnnnnnnnnnnnnnnnnnnnnnnnnnnnnnncagtcgacggtaccggacatatgcccgggaattcggccattacggccggggagacgcgcctctgcatctgcgccaggcgaacgggtcctgcgcctcctgcagtcccagctctccaccgccgcgtgcgcctgcagacgctccgctcgctgccttctctcctggcaggcgctgccttttctccccgttaaaagggcacttgggctgaaggatcgctttgagatctgaggaacccgcagcgctttgagggacctgaagctgtttttcttcgttttcctttgggttcagtttgaacgggaggtttttgatccctttttttcagaatggattatttgctcatgattttctctctgctgtttgtggcttgccaaggagctccagaaacagcagtcttaggcgctgagctcagcgcggtgggtgagaacggcggggagaaacccactcccagtccaccctggcggctccgccggtccaagcgctgctcctgctcgtccctgatggataaagagtgtgtctacttctgccacctggacatcatttgggtcaacactcccgagcacgttgttccgtatggacttggaagccctaggtccaagagagccttggagaatgtacttcccacaaaggcaacagaccgtgagaatagatgccaatgtgctagccaaaaagacaagaagtgctggaatttttgccaagcaggaaaagaactcagggctgaagacattatggagaaagactggaataatcataagaaaagggaaacagactgtttccaagcttggggaacaaacgtgtatttatcagcagttagtgagaaggaagaaaaaatcagaagaaggttcagaggaacacctaagaacaaccaggtcggaaaccatgataaacagcgtcaaatccatctttcatgatccgcagctgaaaggcaatcccttccaaagagggttatgtgaaacaacaacgaagcccttggttacagaac

SEQ ID NO: 80722 - DNA, 568 bp, Homo Sapiens
agatgtataatgtttcataaaccctggcactggtcacaaagctcagctgtgaaaatgaaatttgtagtatttttaaacatgaatgtcaatttcaagtgtatttgaaatggttcctccaggagagatatttgtgcaccattaggaaaatcttctctgcagaggaagtagccttctttggagaaaatggaaaatgggttctgatatgtgatctcagagtagcccatttcctagggcaccatggaaaacacaaatgtgatctttaagtatacctcttccccagtttggggaggaaaggactcagtttgcaccctttttgtatgtaaaataaaatgtcttacctttcttggctacttctgcttgtttggttggttgattggtttgtctgtttttaatctccctcggctcatttgtaattaacaatctagctaggactaactttgatgcgattcaagactcctgtgaacaaaaataatttggcattcttgtttcattccttggattaaatattgtcttctcctgtgagtcacttcaaaaataaatactgctgtctctcttcgagtgctgaaaa

SEQ ID NO: 80723 - DNA, 1102 bp, Homo Sapiens
cgcccggaagccatcagcgtcaacccgctggtgcatgaagaaaacctgttcccggccaaggtccgcgaaatcactttcctcggcaaccgctgccgcatgagctttgagctggagcaactgcctggccacccgctgttggccgaactggcccccgaagccatgccgcgcctgggcgcgcaggatatctgggtggccctgccgccgcgcagcctgcaggtgtttgcctgagatggctgccgatatgagtctgccgatacccgaccacgtggctcgtcaggtttcccgcgctgagcttggcgaccgcctctttgtggtcggcggcaaactgctttggttactcctgttgggcattgcggtgttgttgccgttgctggcgatcttctggcgcggcttcagcagcgaagccgggcagggcggcgggctggtcgcggcgcgggagctgatgaccagcgccaactttcattggttgttaggcaatagcctgaaagtgtccctcagtgtggcggccatcgtcgtaccgctggcctacctgtttgcctacgcactgcaacgcacgctgattcccggcaagccgatctggcgcggcctgtcactgctgccattgatggccccgtcgatgttgccgggtattgcgctggtctatctgttcggcaaccagggcatgttgcgtggtttgctctcggacaatatctacggcttctggggcattgtgctgggtgaagtgatctacaccttcccgcacgccttgatgattctgctgtcggcgctgtccctggcggatgcgcgcctgttcgatgccgcctccagcatgggcgccagcccggcccgggcgtttcgcagcattacctggccggccacgcgtcaggcggtattcgcggcgttttgcctggtgttcaccctgaccatcaccgacttcggcgtgcccgtggtggtgggtggcgattatcaggtgttggcgctggaagcctacaaggcggtggtcggccagcaacagttcggtcgcggcgccttgatcggcatggtgttgttgctgccggcgctgttcagctttgctgtggacgcctggctgcgccgtcgtcatggcgatgccatgagcggccgc

SEQ ID NO: 80724 - DNA, 582 bp, Homo Sapiens
gcggccgcgcgaccggataccgatttcatcggtatcgaggtgcatggcccgggtgtcggcaacatgttcaagctgatcgcagaacagcagctcgccaatgtacgtgtcatccagcatgacgcggtggaggtgctgcgcgacatgattcccggtggttcgctgaccggcgtgcacgtgtattttcccgacccgtggccgaagaagcgccatctgaagcgccggctcatccaggcaccgctggtcgcccagctcgccgccaagctggcgcccggcggctatctgcactgcgcgaccgacatcgaggattacggccagcagatgctggacgtgctgtccgccgaacccttgctcgaaaacaccgccgacggtttcgccccgcgaccggactaccgcccattgaccaagttcgaggcgcgcggcctcaggctgggtcacggcgtgtgggacgtgatcttccggcgcaggggctgaagccgcagctgcgggtcctcgcactgcgacgacctgcaggcatcctcagtcgagaaatcgctgcagcagctcgttcaggaagcgccgcccccgcagcgtcggcctcgtgcc

SEQ ID NO: 80725 - DNA, 1355 bp, Homo Sapiens
gctggtaccggtccggaattcccgggatatcgtcgacccacgcgtccgagcgtcgcgcagggtcggggactgcgcggcggtgccaggccgggcgtgggcgagagcacgaacgggctgcctgcgggctgagagcgtcgagctgtcaccatgggtgatcacgcttggagcttcctaaaggacttcctggccgggggcgtcgccgctgccgtctccaagaccgcggtcgcccccatcgagagggtcaaactgctgctgcaggtccagcatgccagcaaacagatcagtgctgagaagcagtacaaagggatcattgattgtgtggtgagaatccctaaggagcagggcttcctctccttctggaggggtaacctggccaacgtgatccgttacttccccacccaagctctcaacttcgccttcaaggacaagtacaagcagctcttcttagggggtgtggatcggcataagcagttctggcgctactttgctggtaacctggcgtccggtggggccgctggggccacctccctttgctttgtctacccgctggactttgctaggaccaggttggctgctgatgtgggcaagggcgccgcccagcgtgagttccatggtctgggcgactgtatcatcaagatcttcaagtctgatggcctgagggggctctaccagggtttcaacgtctctgtccaaggcatcattatctatagagctgcctacttcggagtctatgatactgccaaggggatgctgcctgaccccaagaacgtgcacatttttgtgagctggatgattgcccagagtgtgacggcagtcgcagggctggtgtcctacccctttgacactgttcgtcgtagaatgatgatgcagtccggccggaaaggggccgatattatgtacacggggacagttgactgctggaggaagattgcaaaagacgaaggagccaaggccttcttcaaaggtgcctggtccaatgtgctgagaggcatgggcggtgcttttgtattggtgttgtatgatgagatcaaaaaatatgtctaatgtaattaaaacacaagttcacagatttacagtgaacttgatctacaagttcacagatccattgtgtggtttaatagactattcctaggggaagtaaaaagatctgggataaaaccagactgaaaggaatacctcagaagagatgcttcattgagtgttcattaaaccacacatgtattttgtatttattttacatttaaattcccacagcaaatagaaaataatttatcatacttgtacaattaactgaagaattgataataactgaatgtgaaacatcaataaagaccacttaatgcacgctttctaaa

SEQ ID NO: 80726 - DNA, 804 bp, Homo Sapiens
cgagtgattggcctggtcgaacacctggctggcgcgaacgctcaaggcatacacatggtcgccgagggtgagacgacgcgtggcaacaaggccgctgtcgcccaccgcgttgctggacgcgtacagcacgcgctgctgcgtgtcggaagtgtcgacgatctgcatcaccaggttgtcgcggctgggcttgggcaaaccatcggcgaccagttggcgcatgctgatcactgccatcacataaccatggggctcggtgtcgacgggtttgctcacgggcgccaccaacaagacgccggcggcataagccggttctacgcccaccaactgcatgggctgggacaccgcaggccggccgcttttctgcacccgctcaagcaccgaacgacgcagtggctgggccaacagatcgaaccccaagggcgaacccagcaagctttgggtctggctgtacagcaccggcacatactcgtcgcgctcgggcgccggcgccagttcacccgaagtgttcaattctctaatggcgaaaggtgtaccacgctgacgcgagatttcctgttcaaaagcgttgcgctgttcgcgaaatatacgcggcgcccaggcataggcgcgggcgcgcagaagcaaaggcttggcgaaaccatcgaactcggcgcgggacacgtcactggaattgacgaagaaacgctgcaggctggccaggcgttgctcctggtcttcgaaccgctcctgaaggcgggtgtagcgctcgttgaccaataactggaaacgctggcgcacttgctgtttgtagaggtcggcggccgc

SEQ ID NO: 80727 - DNA, 760 bp, Homo Sapiens
  misc_feature (33)..(33): n is a, c, g, or t
  misc_feature (37)..(37): n is a, c, g, or t
  misc_feature (100)..(133): n is a, c, g, or t
  misc_feature (284)..(284): n is a, c, g, or t
  misc_feature (561)..(570): n is a, c, g, or t
tccttgtctgatggtaacccatggcccccgccntgcngggataacattctcaggagcttctcttgtcctagccccttctcatttcaaaaaatattagtcnnnnnnnnnnnnnnnnnnnnnnnnnnnnnnnnnncagcttttgtagagaccaacccaagtagatgcaggtgggtgttagataaaaacacacatccccaggggacaagccatccagcggtgaggaatctctgccatgttctcttccctgctgcccacaaacgttacggagactcccttagcctccnccctcctcttccccactgaggggcagcttgtggagatggaggactcgggcccatagatgcagaccccctaccaaatctagcaatagttctcacccttccaaagctcgagtgccattttgagatgacctaccaatgacatgcagtaaaggacataacctcacagcctttttagaagcatttcgaatatctacagttgcctcaattcacggggcatttcactcctctgatccaggttagaattttgctaaatctgtagcatcctgaatagcacactaannnnnnnnnnagcacactaactttaactacattagttgagtgtagttgatacatctgtggcctcgtgtctataaagagcacactagattgtacccagcacttttggatatgacatgctaattagatgtatttaactattcataggaaagtgtatgataaatgactgtaatatttctaataaatatattttgtttctaatt

SEQ ID NO: 80728 - DNA, 1207 bp, Homo Sapiens
  misc_feature (82)..(99): n is a, c, g, or t
  misc_feature (507)..(741): n is a, c, g, or t
acactgaagtcacctcctcagggaaaggcaagaatgctgtttacaacttagcctataacttgcttaaggccaggatttacannnnnnnnnnnnnnnnnntcttttaatagataaaagtagaaatcttagagggcattccaggaactggttatcagaagtcaacatggtagattagcatccaagatggaagttactttagcctcatactgtgcctgtgaatttctttgaggaggggatggggcggccccacacctctcccaggttgtacatacccaagtgctaggcagttcctgtagctggtgagaagcccaggggcaggaagtgagacatccccagagcaagaggcaaggttcagccctgcttgaaactggttgccacagcagtgactttagtatgaaggccaagaggattggaagtgacacacaggaggtctcaaacactgctcttataaatggcctgtgtgtcctaatgccatcagaagtgataaagttggtactaggatgtggnnnnnnnnnnnnnnnnnnnnnnnnnnnnnnnnnnnnnnnnnnnnnnnnnnnnnnnnnnnnnnnnnnnnnnnnnnnnnnnnnnnnnnnnnnnnnnnnnnnnnnnnnnnnnnnnnnnnnnnnnnnnnnnnnnnnnnnnnnnnnnnnnnnnnnnnnnnnnnnnnnnnnnnnnnnnnnnnnnnnnnnnnnnnnnnnnnnnnnnnnnnnnnnnnnnnnnnnnnnnnnnnnnnnnnnnnnnccgggccaaccgcccaattactctgtctccccattatttatctttataattcccttacgatgacccctgacccccattttctaactccctttttctaaggcaagtccccggctcggtatacctttctattcgccttttttcttccattcgttaaaatcctctggaacttcttttgtggacaacgtttacttgtttccatcactcgctcgaatcccccttcctacaaccataacccatcttttcctttttttggggaaccccttgtggcaagcttttttttccgcccatccttccccactatatttttgataagggccgacacctagtgggccaaactccggacacggacaccttgccgatattcctcccccctagcaatccgttgacctccaatctcttgccaaatccacctgcgctttcatttttgtcccaccccctcaacccccccttcccttcctttgtgtgc

SEQ ID NO: 80729 - DNA, 930 bp, Homo Sapiens
gctgatcctacgaagagcattcactcagggcgcgacataaccagccatcgcccctttgcttacgagcgcctcaatggttttagcacgcttttcgcggcagggcactgacctgcaacaacttgcgcgcctcggggccaattggcgctatcattactggcttgaaccagactacgagattgatagatgtcagaaccaaaaggcgtaaacggctacctgatcaccaagcgtgcggacggctggcacctgatcaacttccacggcgacagcgtcgccggggtattcgcgagcgaaagcatggccgttgcggtggctgaagtgtttgtggacgaagccggccacgcatcgagcaagcgccccaaggacaaaaagtaagcgtcattgcttgcgcacaaagccccggtcaaacggggcttttttgtgtttgtctgtaccttgatggccgttcgctataatcttgctacgaacgccccacgacagtgtctgcgcccctcctacaccctcgacgacgacccaacacatgaacaagattctggcactgactgcggccctggcgctgatgaccggctgcaccaccacgtccgacacctacctgaaaaacggcgagcaaggcctgaccatcgactgctcgggcgaggccaattcatgggccagttgctacgaaaaagctgacgcttcgtgtgcgggcaccggttaccgcatcgtcggcaccgaaggtacgccggcactcaaggagagcgacaagaccctgggcaaagacgtaggcaacttcaagagccgcagcgtcgtcgtggtgtgcaagtaatactgcgtactacagatgaacctcggcgaacttgagccccaggccacgcaaggtctcgatcaggtcatccaggcgcgggaatgactcaacctcatcctgatcgtcgaccagaaagtaactgcggccgc

SEQ ID NO: 80730 - DNA, 776 bp, Homo Sapiens
gcggccgcaggcacggcgggtccactctgacagtgagaccgacgacatttgggttcatccccagcaaacggcgggttgagcgacgagagtggtcaaggttaaaggccaaggactggggctccagctctggatcgcagggtcgagaagactcggttctgagctacgagacagtgacgcagatggaagtgcactatgctcgccccatcatcatccttgggcccaccaaggaccgcgccaacgatgatcttctctccgagttccccgacaagtttggatcctgtgttccccatacgacacggcccaagcgggagtatgagatagatggccgggattaccactttgtgtcgtcccgggagaaaatggagaaggacattcaggcgcacaagttcattgaggccggccagtacaacagccacctctatgggaccagcgtccagtccgtgcgagaggtggcagagcaggggaagcactgcatcctcgatgtctcggccaatgccgtgcggcggctgcaggcggcccacctgcaccccatcgccatcttcatccgcccccgctccctggagaatgtgctagagattaacaagcggatcacagaggagcaagcccgcaaagccttcgacagagccaccaagctggagcaggagttcacagagtgcttctcagccatcgtggagggtgacagctttgaggagatctaccacaaggtgaagcgtgtcatcgaggacctctcaggcccctacatctgggttccagcccgagagagactctgattcctg

SEQ ID NO: 80731 - DNA, 1080 bp, Homo Sapiens
gcggccgcggcggttccggccatcgtcgaattcgccccgacccgtcatcgcacgctggtcacgagcctcgtggtcgtgccggtcgccttcggcgtgctgtcggcgtcggtgacggcgagcttcctgctgccgctggtcggctggcgcggattggcggcggtcggcttcctgccgatcatcctcggaattctcaccatgatcatcatgccggaatcgccgcgctggctgatcagcaagggccgcgtgcgcgaggcgcaggcgagtatccggaaactctaccgggtcggtggcgacacgttcgcgttgcccacgctgcaacaggcgagctccgcaacatttgccgatctcttcgccgagcagcggcggttctggctgaccgttctggtctggttcggcgccagcacggcgaactacggcgtcttcctgtggggaccgaccatcgtggcgctgctgctcggcgttgcgccgcaggaggcggccaagatgttcatctatgtcagcctcgccggcgtcctcggtcggaccggctttgccttcctggcgcatcggatcggccgcaaaccgtgcggtcagttgatgggctacggcactgcggtcacgctggcgctcgccgcctatttccacaatgactttgccggttcggtgccgctgtttctggtgttcctgatcatcggcgccgtgttcttcgacggcgggttctcgaacatcgggccctatcccgcggaaatcttcccggtccagctttcggggcgcgcggtcggcctcgcccagctctcgaacggggtcggcaagatcgtcgggccgctgtgtcttgcgttgatcgcgggggccgacaatctcgtgcatccgagcgcaaccgccgcggcggtgatgccggcgttctgctttctcgccggcgcaggccttctgattgggctcgccttcacgttcctcggcgtcgagccgcacggtcgcccggtggctctgttcggtgagaatgcgggcgccgcaccgaaatcgctggccgcgaaaacggcaagttgagaagacgaagggtcatatcatggacaatgcgcacgacacgatcgcaaccgcggcgcc

SEQ ID NO: 80732 - DNA, 724 bp, Homo Sapiens
gcggccgctcacggccctccacgtcttcgccgggcttgaagtcggcgacctgttcacaggcgctgaacatgaactgctgctgagtcttgatctcccgcgccagctccggcacttgctcgatcaacttgcccaaatcgccgggcagcggatgctgggccagcagtttggtgaggttcttggcagtggtttccagccagtcggccgtggaacgcaggcgcgtgtaatgggcgaagtggccaattgccttgtccggcaggtggtggccttcgtcgaatacgtagagggtgtcgcgcgggtccggcaacaccgcgccgccgcccagggccaggtcggccagtaccatgtcgtggttggtgacgatcacgtcgaccttgcccatgccttcgcgggccttgtaaaaggcgcactggccgaagttggggcaatggcgattggtgcactggctgtggtcggtggttaggcgtgcccagtccgaatcttcaagagcggtgggccagctgtcgcggtcgccgtcccatttattgccggccagcttctcgatcatgctggtaaacagcttctggctgacttcatccacctcgatcttgaagccttcttcttcgaacaaggaggcagtggcggtttgcgcatggccttcctgcagcaacacgtcgagcttggacaggcacatgtagcgcccacgccccttggccagggcgaaagtgaagttcagcctcgtgccgaa

SEQ ID NO: 80733 - DNA, 1150 bp, Homo Sapiens
ggagaagagtatgaagtcgacggcgcgccgaattcggcacgaggtggggccagagcaagtgccacaagtgtccccagctgcagtacacaggagtgcagaagccagggcctgtacgtggggaagtgggcgctgactgtccccagggctacaagaggcttaacagcacccactgccaggacatcaacgagtgcgcaatgccgggcgtgtgtcgccatggtgactgcctcaacaaccctggctcctatcgctgtgtctgcccacctggccatagtttaggcccctcccgtacacagtgcattgcagacaaaccggaggagaagagcctgtgtttccgcctggtgagccctgagcaccagtgccagcacccactgaccacccgcctgacccgccagctctgctgctgcagtgtcggcaaggcctggggcgcgcggtgtcagcgctgcccaacagatggcaccgctgcgttcaaggagatctgcccagctgggaagggataccacattctcacctcccaccagacgctcaccattcagggcgagagtgacttttcccttttcctgcaccctgacgggccacccaagccccagcagcttccggagagccctagccaggctccaccacctgaggacacagaggaagagagaggggtgaccacggactcaccggtgagtgaggagaggtcagtgcagcagagccacccaactgccaccacgactcctgcccggccctaccccgagctgatctcccgtccctcgcccccgaccatgcgctggttcctgccggacttgcctccttcccgcagcgccgtagagatcgctcccactcaggtcacagaaactgatgagtgccgactgaaccagaacatctgtggccacggagagtgcgtgccgggcccccctgactactcctgccactgcaaccccggctaccggtcacatccccagcaccgctactgcgtggatgtgaacgagtgcgaggcagagccctgtggcccggggaggggcatctgcatgaacaccggcggctcctacaattgccactgcaaccgcggctaccgcctgcacgtgggcgccggggggcgctcgtgcgtggacctgaacgaatgcgccaagccccacctggtgcggcgacggcggcttctgcatcaact

SEQ ID NO: 80734 - DNA, 1409 bp, Homo Sapiens
  misc_feature (1096)..(1157): n is a, c, g, or t
taccactattcacggttggctctcacggctccaggagatgtggggtgtggggtatcagaggctgagcagctgaccttcacctccacaccttgggagaagtgctgggagctggtgtggatgctgacctgtggggcctctcgcaccaggagccagacggatgcccttgtgaccccattggcattgctggccacacactggtacctcccgccgtctgtgggtctgtctgtcatttgctgccactcatgagaaggaagggggtggggatacacttctgtctccttgggacagtgagaggggtccaagaagcccctggctgggcagtgtcccctttggcactgtggcagtttccaggggataccagacagggtgtccccgaggctcctgccacaaccacccccctcacacacctgtgccatccatcccacagggcatctggcggatccccgtggacgagattgaccggccgggcagctttgcctggcacatgaaccgctccatcgtgctgctgctcaaggtgctggcccagctgcgggaccacagcaccctgctgaaggtgtcctccatgcttcagcggaccccagaccagggcaagaagtatctgcgagatgctgaccgccaggtcctggcgcagcgggccttcatcctcactgtgaaggtgctcgaagacacgctgagcgagctcgcagaggggtcagaacgcccaggcccaaggtctgtggcctccccggagccaggatgaccaccgatgtctcacacaaggccagtcctgaggatggccaggagggcctcccccagccgaagaagccccctctggctgatggctcagggccagggcccgagccaggaggcaaagtgggcctcctcaaccaccggcctgtggccatggatgcaggagacagtgcagaccaaagcggggagcggaaggataaagagagcccacgggcagggcccactgagcccatggacacgagtgaggccactgtttgccactcagacttggagcggacaccacccctgctgccaggtcgccccgcaagggaccggggccccgagagccggcccactgagctgtccctggaggagctgagcatcagtnnnnnnnnnnnnnnnnnnnnnnnnnnnnnnnnnnnnnnnnnnnnnnnnnnnnnnnnnnnnnncaccacagggaccagggcagggggccacccggaggagccgctctcccggctcagccgcaagaggaagctcctggaggacacagagtcaggcaagacacttctgttggatgcctaccgtgtgtgggccatatccacccctcgacgccgggatgagccggctctgcctgtgtcacagtggaggggtcctttagggccaggctcacccctcaccctttttttggttgcttttctaataaagatggaacagttaaa

SEQ ID NO: 80735 - DNA, 758 bp, Homo Sapiens
  misc_feature (696)..(713): n is a, c, g, or t
catataggctaggtacgaggcctgggtgttgaattcggcacgaggccgtcacgccacccaccccaaccctgctctcccccaaaggcagcatctcggaggagaccaagcagaagctgaagtcagccatcctttctgcccagtctgctgccaacgtgaggaaggagagcctatgccagccagccctggaggtcctggagacatccagccaggagtcctcgctggagagcgagacagacgaggacgacgactacatggacatttgaggggccactgcagccccaccgccacgccccaggggaccagccaggcctggaatgccccctgggcaggaccctgggcaggaccagaggcccacatggatgccactccccacacagcccccaggcctgcccagcccacctcctcatggcatcctccctgtacccaggtcaggctgtccacaccacatgggagcccagaggaggaggggcccgccttagccatgtgaaggtggattggtcgccatctgcacgccaggcggcatccttttctatgaagtgttgactttgtaaatctgcccacacccagctggccatatccacccctcgacgccgggatgagccggctctgcctgtgtcacagtggaggggtcctttagggccaggctcacccctcaccctttttttggttgcttttctaataaagatggaacagttnnnnnnnnnnnnnnnnnnccctcgtgccgaattcgccacccaggctcgtacctagggcgttgt

SEQ ID NO: 80736 - DNA, 809 bp, Homo Sapiens
  misc_feature (763)..(763): n is a, c, g, or t
cattgatagtgatcttaaaatatttaatagtctttctttaaaatccaaaatgtgattcttacaagttatgtgccacatgaagcaggtgttattttttgagaaatgcaggtgataactgaaaaacatagcactgaggtattttttatttttaaaattgaaggaaacaaagtctggatctaattatttttacatttacaaaaactgctactgcttggctcttttgctataagtttaggttctgaatacatgacaagagtatgggaaagagcagaataatagtacacgcagttttaaaagctatgcacatcataacctggaataatgattacacagcaagaggcctgagtggaggtaggctaacaacacattttgactttctcctcaaaggatagctttgaaaaacaagtgtaaccaattgttacaccaaattaaaatggcaatattaaatcggtaacaaaacgatccacattttatacaatattgtatttccaaacatacataggtcatgaaaatcagagaacctaatatagcaccgttgaaaccattcattatccttcatgcgtgtatgcaattcagaatttcggcagaagacaacaaatggaaaatgcctttcgtttctataaatcattttggatttcaattaaatctttgccttagtaaagggtattcttatctcaagatcaattagccgtttttagctccaccgttttggaagtaaaatgatgagctacatctactttttaatttaaaccaagaccaagcnagtaggcagcaatgtcaagatatccattgagaacacacagaacata

SEQ ID NO: 80737 - DNA, 1134 bp, Homo Sapiens
aaggctaggtacgaggctgggtggtgtaaatcggcacgagggaaagcaaggggaccaaggccgggactgctggggtgaaggtccgggaggctgagtaaggggacggaagggcacaggccatggaaaggaatgacatcatcaacttcaaggctttggagaaagagctgcaggctgcactcactgctgatgagaagtacaaacgggagaatgctgccaagttacgggcagtggaacagagggtggcttcctatgaggagttcaggggtattgtccttgcatcacatctgaagccactggagcggaaggataagatgggaggaaagagaactgtgccctggaactgtcacactattcagggaaggaccttccaggatgtggccactgaaatctccccggagaaagcccccctccagcccgagacgtctgctgacttctatcgtgattggcgacgacacttgccaagtgggccagagcgctaccaggctctactgcagcttgggggtccaaggctcggctgcctcttccagacagatgtgggatttggacttcttggggagctgctggtggcactggctgatcacgtggggccggctgaccgggcagcggtgctggggatcctatgcagcctggcgagcactgggcgcttcaccctgaacctaagcctgctgagccgggcagagagagagagctgcaagggcttgtctcagaagctgcaagccatgggcaaacccagatccgtgaaggagggggctcagctgggaggagcagggtctggaggagcagtccggtgggctccaggaggaggagaggctcctgcaggagctgctggagctgtaacaggttgacggatgcggcaaactaacctcagaggtcccagggtcatggaggcagactaaggatcgaggacgaggggaactggcgggacccttattagaaaccacaacgtgggtcctctccaaaggggacttcagagcgaaaaagggaactagtttcccgatgatcaggcgcagaggtgccggtgaaaggggcacggcagaaaactcgaagtcaaggaggggtccccaaagtggaagccaacaggagtaaagagggaccgccgggtagaagcgtcacgaaggaaacgaacactgcact

SEQ ID NO: 80738 - DNA, 980 bp, Homo Sapiens
  misc_feature (871)..(871): n is a, c, g, or t
cggctaggtaagcgaggcctgggtgttgaattcggcacgaggccgcggcgactatcccatcggtagccacggccacagcagcggctctcggcgaggtggaggatgaagggctcctggcgtcgctgttccgggaccgcttccccgaggcccagtggcgcgagcggcccgatgtgggccgctacctccgggagttgagcggctcggggctggagcggctgcggcgcgagcccgagcgcctggcggaggagcgggcgcagctgctgcagcagacgcgcgacttggccttcgctaactacaagaccttcatccgcggcgccgagtgcaccgagcgcatccaccgcctgtttggcgacgtggaggcgtcgctcggccgcctgctcgaccgtttgcccagcttccagcagagctgcaggaactttgtgaaggaagccgaggagatcagctccaaccgccggatgaatagcctgaccctaaaccggcacacagaaattttggaaatactggagattcctcagctcatggacacctgtgtccggaacagttattatgaagaggccctggagcttgcagcctacgtacgccgactggagaggaaatactcttccatccctgtcatccagggcatcgtgaacgaagtgcgccagtccatgcagctgatgctgagccagctgatccagcaactgaggaccaacatccagcttcctgcctgcctccgtgtcattggctacctgcggcgcatggacgtcttcactgaggctgagttgagggggaacgtcccttcagggcccgagatgcttggctccggtccatcctgactgccattcctaatgatgatccctatttccatattacaaaaaccatcgaggcctcncgtgtccatctctttgatatcatcacccagtaccgtgccatcttctcagacgaggacccactgctgccccctgccatgggtgagcacactgtgaatgagagtgcatctt

SEQ ID NO: 80739 - DNA, 739 bp, Homo Sapiens
ataacggctaggtagcgaggcctgggtggagaattcggcacgaggctccgggctttgcccagatgctcaaggagggagcgaaacacttttcaggattagaagaggctgtgtatagaaacatacaagcttgcaaggagcttgcccaaaccactcgtacagcatatggaccaaatggaatgaacaaaatggttatcaaccacttggagaagttgtttgtgacaaacgatgcagcaactattttaagagaactagaagtacagcatcctgctgcaaaaatgattgtaatggcttctcatatgcaagagcaagaagttggagatggcacaaactttgttctggtatttgctggagctctcctggaattagctgaagaacttctgaggattggcctgtcagtttcagaggtcatagaaggttatgaaatagcctgcagaaaagctcatgagattcttcctaatttggtatgttgttctgcaaaaaaccttcgagatattgatgaagtctcatctctacttcgtacctccataatgagtaaacaatatggtaatgaagtatttctggccaagcttattgctcaggcatgcgtatctatttttcctgattccggccatttcaatgttgataacatcagagttgtaaaattctgggctctggtatcagtcctcttcagtatgcatggcatggttttaagaaggaacgaagggatgtacctctgtcaagagcaaaatgggtgtccctg

SEQ ID NO: 80740 - DNA, 999 bp, Homo Sapiens
tggctaggtacgaggcctgggtggtgaatcggcacgagggcgtgctcctcgctttctccgcggtcttccgagcggtcgcgtgaactgcttcctgcaggctggccatggcgcttcacgttcccaaggctccgggcttgcccagatgctcaaggagggagcgaaacacttttcaggattagaagaggctgtgtatagaaacatacaagcttgcaaggagcttgcccaaaccactcgtacagcatatggaccaaatggaatgaacaaaatggttatcaaccacttggagaagttgtttgtgacaaacgatgcagcaactattttaagagaactagaagtacagcatcctgctgcaaaaatgattgtaatggcttctcatatgcaagagcaagaagttggagatggcacaaactttgttctggtatttgctggagctctcctggaattagctgaagaacttctgaggattggcctgtcagtttcagaggtcatagaaggttatgaaatagcctgcagaaaagctcatgagattcttcctaatatggtatgttgttctgcaaaaaaccttcgagatattgatgaagtctcatctctacttcgtacctccataatgagtaaacaatatggtaatgaagtatttctggccaagcttattgctcaggcatgcgtatctatttttcctgattccggccatttcaatgttgataacatcagagttgtcaaaattctgggctctggtatcagtccctctttcagtattgcatggcatggttttcaagaaggaaaccgaaggtgatgtcacatctgtcacagatgcacaataagcagtgtactctggtctttgatgcctgaatacagaatcaaggaacgcgtcgctacaggcctgctgaattgtcgacttcgagggaacaaaactctgggtgacacgatacaacgttgcgtccgggcacgtccgccacggggaaagccaatgttcctctgccacataatacggtgggaaca

SEQ ID NO: 80741 - DNA, 886 bp, Homo Sapiens
  misc_feature (701)..(701): n is a, c, g, or t
  misc_feature (808)..(808): n is a, c, g, or t
taactacggctaggtagatgccgcgggttaactcggcacgaggtctgagcggtctgcgtaaactgcttactgcaggctggccatggcgcttcacgttcccaaggctccgggctttgcccagatgctcaaggagggagcgaaacacttttcaggattagaagaggctgtgtatagaaacatacaagcttgcaaggagcttgcccaaaccactcgtacagcatatggaccaaatggaatgaacaaaatggttatcaaccacttggagaagttgtttgtgacaaacgatgcagcaactattttaagagaactagaagtacagcatcctgctgcaaaaatgattgtaatggcttctcatatgcaagagcaagaagttggagatggcacaaactttgttctggtatttgctggagctctcctggaattagctgaaagaacttctggaggattggcctgtcagtttcagaggtcatagaaggttatgaaatagcctgcagaaaagctcatgagattcttcctaatttggtatgttgttctgcaaaaaaccttcgagatattgatgaagtctcatctctacttcgtacctccataatgagtaaacaatatggtaatgaagtatttctggccaagcttattgctcaggcatgcgtatctatttttcctgattccagccatttcaatgttgataacatcagagtttgtanaattctgggctctggtatcagttcctcttcagtattgcatggcatggtttttaagaaggaaaccgaaggtgatgtaacatcctgtcaaagatgcaaaaaatagcagnggtactccttgtccctttttgatgggcatggataaacagaaaacctaaaggggaaccagttgttttgataaaagaacc

SEQ ID NO: 80742 - DNA, 1025 bp, Homo Sapiens
gctaggtcgaggccggtgtgtaatcggcacgaggccgagccggtcgcgttgaactgcttcctgcaggctggccatggcgcttcacgttcccaaggctccgggctttgcccagatgctcaaggagggagcgaaacacttttcaggattagaagaggctgtgtatagaaacatacaagcttgcaaggagcttgcccaaaccactcgtacagcatatggaccaaatggaatgaacaaaatggttatcaaccacttggagaagttgtttgtgacaaacgatgcagcaactattttaagagaactagaagtacagcatcctgctgcaaaaatgattgtaatggcttctcatatgcaagagcaagaagttggagatggcacaaacttgttctggtatttgctggagctctcctggaattagctgaagaacttctgaggattggcctgtcagtttcagaggtcatagaaggttatgaaatagcctgcagaaaagctcatgagattcttcctaatttggtatgttgttctgcaaaaaaccttcgagatattgatgaagtctcatctctacttcgtacctccataatgagtaaacaatatggtaatgaagtatttctggccaagcttattgctcaggcatgcgtatctatttttcctgattccggcatttcaatgttgataacatcagagttgtaaaattctgggctctggtatcagttcctcttcagtattgcatggcatggtttttaagaaggaaaccgaaggtgatgtaacatctgtcaaagatgcaaaaatagcagtgtactcttgtcctttgatggctgataacagaaactagggaaccgcgtatcacagacggtgaagaattgtcgaatttcagtacgggaagaaactctggtggacaatcacagcatggggaacgggcaacgccggcacgggcatgggaaggctcctatgccaacaaaagggggggacacaagggcccgacactgaacggggcatccaaaaccctttaaaagacggccaaagacacg

SEQ ID NO: 80743 - DNA, 903 bp, Homo Sapiens
ggctaggtacgaggcctggtggtgaattcggcacgaggggtcttccgagcggtcgcgtgaactgcttcctgcaggctggccatggcgcttcacgttcccaaggctccgggctttgcccagatgctcaaggagggagcgaaacacttttcaggattagaagaggctgtgtatagaaacatacaagcttgcaaggagcttgcccaaaccactcgtacagcatatggaccaaatggaatgaacaaaatggttatcaaccacttggagaagttgtttgtgacaaacgatgcagcaactattttaagagaactagaagtacagcatcctgctgcaaaaatgattgtaatggcttctcatatgcaagagcaagaagttggagatggcacaaactttgttctggtatttgctggagctctcctggaattagctgaagaacttctgaggattggcctgtcagtttcagaggtcatagaaggttatgaaatagcctgcagaaaagctcatgagattcttcctaatttggtatgttgttctgcaaaaaaccttcgagatattgatgaagtctcatctctacttcgtacctccataatgagtaaacaatatggtaatgaagtatttctgggccaagcttattgctcaggcatgcgtatctatttttcccgattccggccatttcaatgtttgataaacatcagagtttgtaaaattctgggctctggtatcagttcctcttcagtattgcatggcatggttttttaagaaggaaaccgaaggtgatgtaaacatctgtcaaagatgcaaaaatagcagtgtactcttgtcccttttgatggcatgataacagaaactaaggggacagggtcggtaaagactgctgagaatgtgaattatagggggaaaaactcg

SEQ ID NO: 80744 - DNA, 1933 bp, Homo Sapiens
cggcagtaactactacggtttaaggtagcgaggcctgggtggcgaattcggcacgaggcagaaggctgtgcgtgctcctcgcttcctccgcggtcttccgagcggtcgcgtgaactgcttcctgcaggctggccatggcgcttcacgttcccaaggctccgggctttgcccagatgctcaaggagggagcgaaacacttttcaggattagaagaggctgtgtatagaaacatacaagcttgcaaggagcttgcccaaaccactcgtacagcatatggaccaaatggaatgaacaaaatggttatcaaccacttggagaagttgtttgtgacaaacgatgcagcaactattttaagagaactagaagtacagcatcctgctgcaaaaatgattgtaatggcttctcatatgcaagagcaagaagttggagatggcacaaactttgttctggtatttgctggagctctcctggaattagctgaagaacttctgaggattggcctgtcagtttcagaggtcatagaaggttatgaaatagcctgcagaaaagctcatgagattcttcctaatttggtatgttgttctgcaaaaaaccttcgagatattgatgaagtctcatctctacttcgtacctccataatgagtaaacaatatggtaatgaagtatttctggccaagcttattgctcaggcatgcgtatctatttttcctgattccggccatttcaatgttgataacatcagagtttgtaaaattctgggctctggtatcagttcctcttcagtattgcatggcatggtttttaagaaggaaaccgaaggtgatgtaacatctgtcaaagatgcaaaaatagcagtgtactcttgtccttttgatggcatgataacagaaactaagggaacagtgttgataaagactgctgaagaattgatgaattttagtaagggagaagaaaacctcatggatgcacaagtcaaagctattgctgatactggtgcaaatgtcgtagtaacaggtggcaaagtggcagacatggctcttcattatgcaaataaatataatatcatgttagtgaggctaaactcaaaatgggatctccgaagactttgtaaaactgttggtgctacagctcttcctagattgacacctcctgtccttgaagaaatgggacactgtgacagtgtttacctctcagaagttggagatactcaggtggtggtttttaagcatgaaaaggaagatggcgccatttctaccatagtacttcgaggctctacagacaatctgatggatgacatagaaagggcagtagacgatggtgttaatactttcaaagttcttacaagggataaacgtcttgtacccggaggtggagcaacagaaattgaattagccaaacagatcacatcatatggagagacatgtcctggacttgaacagtatgctattaagaagtttgctgaggcatttgaagctattccccgcgcactggcagaaaactctggagttaaggccaatgaagtaatctctaaactttatgcagtacatcaagaaggaaataaaaacgttggattagatattgaggctgaagtccctgctgtaaaggacatgctggaagctggtattctagatacttacctgggaaaatattgggctatcaaactcgctactaatgctgcagtcactgtacttagagtggatcagatcatcatggcaaaaccagctggtgggcccaagcctccaagtgggaagaaagactgggatgatgaccaaaatgattgaaattggcttaatttttactgtaggtgaaggctgtatttgtagtagtactcaagaatcacctgatgttttcttattctccttaaattaagagttattttgtgtttgtattcttggctggatgttataataaacatattgttactgtcaaaaaa

SEQ ID NO: 80745 - DNA, 425 bp, Homo Sapiens
gcggccgcggcgggcggctcgccccatgtcaggtacacgtccacatgatcggccgcgatgggcaacgcggccggagacgagcctccgaaatacagctgcggcaacggtgttggcggctccgagacccgcgcatcggtcacggtgtagtgcttgcccgaatagtcgacgggatcacccttccagatctcccgcacgatctgcaggaactccccggtccgctcataacgctcgtcgtgggtgagccaatcgccgaagcggcgctgttcggtgtcgtcgccgccgctgacgacgttcagcagcaggcgcccttcggagaaccgctggaaggtggcagcctgctgtgcggcgagtgtgggtggcaccagaccgggccggaaggcgaccaggaacttcagacgttcggtctgctccagaagcctcgtgcc

SEQ ID NO: 80746 - DNA, 599 bp, Homo Sapiens
ggcacgagggcggcggccagcaggcagcgcatcccgctcacatcaggccttggccgtcttcttggccgcggccttcttggccggcggcgccttggcggcgcgcggctcgaactcgaacacgaccttgccttccttcttgtcataagccaggaaggccttgaacttgcggcgggtcttgttggagacgaagttctccagcaggtcggtcttgccgtcggccagcagcttgtgcacttgggccggctcaatgggctgggtcaggatgaccttgcccgtcttgaagtcgcaggtgacatgggcaccgaccgagtgctcgcagacgtagttggccccgtgctcgtagacatggcccttgcacttggggcagggccccagcgagttctggcccgagaagtcgaccggctcgccgtcgttctcggccttcttggcgtcctcgccgaagtcgaactccagcttccagttggcgatctcgtcgtcgtagaccagggccagttcggccgtgaagggccagccggccttggagcggaagccttccagcgggccgatcttcttggtcgccaggaaggcctcgacctcgtgcagctcgaagctgcggccgc

SEQ ID NO: 80747 - DNA, 643 bp, Homo Sapiens
gcggccgccaggactatctgaacgtctgcgccggttgccacgcgccgaacggcgagggcaagccgcacatcgcggtggccatgcgcggcaacaccacgctgcgcctggaagacccgcgcaacctgctgcgggtgatcgaggacggcatcggcgagcagcaattcaccgggttcgagcgcatgcaaccgatgccgggctttgccgacaagctcaatcaccaacagctgaccgacctgctcaactatctgcgccagggttggggtggccagtcgagggagctggcggtcagcgacgtgcagaagttgcaggccgatgcaccgccagccgagcacaaggcgcactgacacctagcatctgctgcaggaacccgatgggaaccgggttaatctgttttcaacgcctgaacagctcagacaaatggctgcccactgaaaccgcgtggcaggcgctgcagcccaggcaagtcggtgaggcgttgcgtccaggcactgcgccagtcaacggcagtatgggttttggctttgcgcgcggagcggcgggcagcgttgcgctgggtgcggcgcgcttctttgtaggcgtcggtattgcggcaggtgcggcatttgactcggttcagctcggtgctggacgtgagcctcgtgcc

SEQ ID NO: 80748 - DNA, 594 bp, Homo Sapiens
aactgcaatagaaaggtagcttaactaatttttgtctatgatgacccacaacatgaagattccctagatgtctagaaacatcttgcattttactttgtcctagaccctgcatccatcctcatatttcccaaaaattagtttcaattagtgaaatggtccgtttttcagctcctagcagtacttattaatatgcagaaatccgtgttatgtgattctttaaaaaatttctagaacccaaactatcatttaatcaaaaatactgctaggctaaatcagtgaatcctaaatagtgtttttatgaaacgaattcaatattgtcttcccttcttcccctctcactttccctgactgcccagctattaccactgcctcttgaaaaaaacagatgataatagtacagtttgtgaaaattctgattaaccagtgaatgagaaatttggattaatgaaatgtcaattattgaatatatgcaagcaatgcggttttattattttgagttcatggtatcagacaaactaggattgaaaaagttattcaaactcagttttgcaatagtttcccagctatatatcaatacacaaactccctcgttcc

SEQ ID NO: 80749 - DNA, 1096 bp, Homo Sapiens
  misc_feature (132)..(132): n is a, c, g, or t
  misc_feature (507)..(550): n is a, c, g, or t
ttgccagctttgcagaaatgcatttagcacatgtaactattccatgtgtgaaatgcaatcaaacattttctggccagtgtttaaacttcagtttcacagaaaataaggcacccatctgtctgccaacctaanactctttcggtaggtggaagctagacacatgaaggtaaataaaaagaaaggctgttaaatacaggaaacagttgcatgtagtaacactaatatatttaaaaataagtcaacagtaaaccactgaaaaaatatatgtatatacacccaagatgggcatcttttgtattaagaaaggaagcattgtaaaataattctgagttttgtgtttgttgtagattgattgtattgttgaaaaagtttgtttttgcgtgggagtgtgtgcctgcgtgggtgtgtgcgtgtttgggtttttttcctttaactgacaagccatcttgagtggtcatgggccactgcttttccctttgtgagtcaatacatagtgctgctgtgtgnnnnnnnnnnnnnnnnnnnnnnnnnnnnnnnnnnnnnnnnnnnncattaaataaatttgacttttctgtaattcaggtttttcctttttttgtaccattttaaagttagtatcttttgatatgcatatttgtttatggtaaaaaatttataacgtgttcaatattttcttttcccccattaatcagttcattagaaatattttaaaatcagctattttgtgaagccatgagttccagaaagtaaaggtgacatcggaaaaataatcaaaagctatttaaagcatctataaggtgctctctttctgtcttctacagatgagtcacacctttgagcttaatctttgaaaggttagagaataaattgatttttataaatactgcaaatcaggcttttgtttcctttttcagatatcttggacaaatcacatattttaaaatttgttcttgtatttattggttttgcagaagaaggcatcgtcatgcacagtatttgtaattaaaagcaaatcatttgtttaaaaaggcagtttgcaaaaaatgtttttggtcttttataattctcattaaaagaatatctggcaaattaaaaa

SEQ ID NO: 80750 - DNA, 525 bp, Homo Sapiens
ggcacgagggcggccgtcaggggccagcagggtcaggtcgacggccatgccgaagctgtggatggagccacgctcggggttggcgagatacatggtcagcggcgtgccttgcagctcgtcccacaggcgctgctgcacgcgctggggacgcagggcgtccagcaccaacaggcgatagccggggcgacgctcatgcagccagatggctgcggcctcgagggcgtcggccgcttcgcggcgcagccaggcgcagtcgatgccggcatagaccgagtggccgacgaagttgtcggcagtggcgtagcgcaggtcgacggcgatgccgtgcttcagcgcgtccaggcgccggaagtcgggatggccggcgatgtcttcgatgcggatgtcgttcaaggcaatcgcgccagatgttcgtgggcagccgcggtgatgaacttgaccaggcggcgcgaggcctggcccagcggcgcgctggcggcgctgagcagatagagctgcaccggcacggcgggcgacagcggccgc

SEQ ID NO: 80751 - DNA, 706 bp, Homo Sapiens
ttcggcacgaggggcgccagcaggcgcttgaggttgtcgcgaatagcctgggacataagcgttctccgcgccggtcagcgcaacaacggccgcaacagttcacgggcaataatgtgccgctggatttccgaagtgccttcccagatccgttcgatccgcgcgttacgccagatgcgctccaccggcccttcatccatcaagcccatgccgccaaagatctgcacggcttcatcggctaccttgcccagggtttcactggcaaacagcttggccatgccggcctcgccatcggtcatgctgccctggtccatcttccaggcggtgtgcagggtcagaagctcggcggcgcgaatctgcgtggccatgtcggccagcttgaaactcacgccctggtaggtgccgatgggctggccgaactgcttgcggtccgccgcccattgcagcgacacctccagcgcacgctgggcctggccgacgcagttggcagcgaccatcacccggccagcggtgagccaggcgttggcgacctcccaacctttaccgacttcgcccagcactttggaggctggcacgcggcagtcgtcgaagaacatttcataggtgtgataaccgcggttgctcacacacttggggccacggcggatggtcatgccgggcgtgccgcgatcgaccaggaatgcagtcaccgcattgcgctggcggccgc

SEQ ID NO: 80752 - DNA, 502 bp, Homo Sapiens
ggcacgaggggccggcggagcttctcgattctctcgtttcgagcagtgaagatatactgcaatcttcccgagaccaagcatatgaacctcacaaatactatttttcgaggaggattcgggacgcggttaggatgtatcgtcacgccgtttatgatgcaacgagggaagatgctattcgcgcgaaggttgcggaaaggcggaaatcgcataaagggtctattcttaacattcccgaaggtctgagttacctgggtgctgagcgtcgggaatacgaggatagtctcggggctgtcgcgggtggtgaagcattccactacgccgttctgcattttcggcttgatgacgtcacagacgccgcggtcgaaacggctgccgcatggctgaagcgccccggaggagacggtgcgaggtatttatctggtcttctgagcgacatcggtctaggaagatgtttgtactcaatggggaggcttctcccaaaggcaacgctgggtgcggccgc

SEQ ID NO: 80753 - DNA, 467 bp, Homo Sapiens
aataacattacaacaataaagcaaaataatatttaaaagaaagaaagaacaaacagtcgcaataccagaacaccattgtagtcgtttgtgtatgtgtgacttctttactgtgttcatgcagagacaagctttgtaatacctttgtaactactgtacaggtgcgtggttagattccgttttgactgcttggtatctcattgtaagcatttcccagggacactacacagtctttataattatgatcactacatcttttggataacttaggcttttgcactattttgtcacgatgcctcaaacttttctatcattgtctgtaattactcctataatcttttattataaaatattgaaacaaagtcacatcactaaaaacactgtgagtataatttattagtaagtgtagactgtgtatcattagcaaaacttgtaaatgcaacgagtcaataaaacagtagaacaatgtc

SEQ ID NO: 80754 - DNA, 1236 bp, Homo Sapiens
gcggccgcgtccacacgcggcgcacgtcggcgctgaagaggggcacgccttcatcctcgccgagcagcaggcgcaactcgtagtgctgggcatccagcggtggctcggcggcggccaggatctgcagcccggcctcgctgaggttgacgacaatgccgccgcgcgcctcggacaggccttcgggcttgatcacccagacaggcagttgctcatgctggtcgggcacaaggaagaactcgacccgggggaagcggcgctggtcaatcgacatggtgtgatcagggggcgtggacgggctggatcagagcatccgcgaatgacaggcgcttgtcagcagccccatcatgccttgatttgacgacggtcacaccgcaagcaggtcgacctcgaacagcaaggtggcgttgggcgggatgacgccaccggcaccgtgggcaccatagcccagcgccggcggcagcaccagcatgcgcgtgccgccgaccttcatgccctgcacgccctcgtcccagccggcgatgacctcgccgccgccaaggcggaacttgaagggctggccgcggtccttgctggagtcgaacttcttgcccttcatgccgtccttgaacagccagccggtgtagtgcaccgacacgcgctggcccttggccgcctcggcaccttcgccgacggcacgatcctcgtactgcaggccggtggaggtcgtgtgcaggttcagctcgacgggctcggggccgccggccaggccgagcagctcgactacgaagcacagcgtggcgttgggcgggatgacgccgccggcgccgcgtgcgccatagccgaggccggccgggatgatcagggtgcgcttgccgccgatcttcatgccctgcacgccctcgtcccagcccttgatgaccatgccggcgccaagctcgaactcgaaggggtcgccgcggtccttgctggagtcgaacttggtcgtcttggccccatcgacccagagccagccggtgtagtggaccgtgacgtcatggccggccgacgcctgcttgccgtcgccttcgacggtgtcgtcgaactgcaggccgctgggggtgttgttcatgggaaatccttcaagtgagtgaatcgggcgattgtcgctgcgcgccatgcctcgacggcttcgacgaggggctcgcctccctggagtggcagacccagccgggcagcggcctccctcagcagcgtcgccgggtcgctcaggtccagggc

SEQ ID NO: 80755 - DNA, 573 bp, Homo Sapiens
  misc_feature (178)..(201): n is a, c, g, or t
gcggccgctgccttggcacccagcgccacccgcacacggcgctccgctagccaggccgggagcaagagccaggcggtggagaagccgccgtcggagaagccgcggctgaggcgctcgtcgccgcgggcccaggaggagggcccgggggagccgccgccgcctgagctggcgttgctcnnnnnnnnnnnnnnnnnnnnnnnnactcccgcgaccccgacgtcctcggcgtccaacctggacctgggcgagcagcgggagcgctgggagacgttccagaagcggcagaagcttacctccgagggtgccgccaagctcctgctagacacctttgaataccagggcctggtgaagcacacaggaggctgccactgtggagcagttcgttttgaagtttgggcctcagcagacttgcatatatttgactgcaagtaccggaattatatatgaataataagcacatacgatggaattactcaaatggagaactgaccaggctactaacaatagagtccagattggaaaagaagcactgtggaataacttgtgagaggattctgtgctaaattagaactt

SEQ ID NO: 80756 - DNA, 1152 bp, Homo Sapiens
  misc_feature (262)..(313): n is a, c, g, or t
ggctaggtagaggctgggtgttaatcggcacgaggcggcgatcgaggagctctgcggcgccaagctgcgcgggcagaagcggtccggggcctccgcggcccccgcggcctccgcggccgctgccttggcacccagcgccacccgcacacggcgctccgctagccaggccgggagcaagagccaggcggtggagaagccgccgtcggagaagccgcggctgaggcgctcgtcgccgcgggcccaggaggagggcccgggggannnnnnnnnnnnnnnnnnnnnnnnnnnnnnnnnnnnnnnnnnnnnnnnnnnnactcccgcgaccccgacgtcctcggcgtccaacctggacctgggcgagcagcgggagcgctgggagacgttccagaagcggcagaagcttacctccgagggtgccgccaagctcctgctagacacctttgaataccagggcctggtgaagcacacaggaggctgccactgtggagcagttcgttttgaagtttgggcctcagcagacttgcatatatttgactgcaattgcagcatttgcaagaagaagcagaatagacacttcattgttccagcttctcgcttcaagctcctgaagggagctgagcacataacgacttacacgttcaatactcacaaagcccagcataccttctgtaagagatgtggcgttcagagcttctatactccacgatcaaaccccggaggcttcggaattgccccccactgcctggatgagggcactgtgcggagtatggtcactgaggaattcaatggcagcgattgggagaaggccatgaaagagcacaagaccatcaagaacatgtctaaagagtgagcttctgcctctcctgccctgaaaaggaggaatgattggggccagcaactttgctctccctgccgtgcctcggtggtgctcctgaatgtggctgacctgggctgctggttccgttgactagggtcatcttgatctctgcagtttgctccagctaccagtttctttaggcagctctttgtcctccctctgcccagattttgatgtagtctaattgacatccttctcttcccaacttttgtgtgatcttttaggaaaaaaaataaatatttttaacattaaagcagtcactttggtttatcaaa

SEQ ID NO: 80757 - DNA, 601 bp, Homo Sapiens
  misc_feature (235)..(258): n is a, c, g, or t
  misc_feature (482)..(482): n is a, c, g, or t
  misc_feature (550)..(550): n is a, c, g, or t
ggcgccaagctgcgctggcacaagcggtccggggcctccgcggcccccgcgacctccgcggccgctgccttggcacccagcgccacccgcacacggcgctccgctagccaggccgggagcaagagccaggcggtggagaagccgccgtcggagaagccgcggctgaggcgctcgtcgccgcgggcccaggaggagggcccgggggagccgccgccgcctgagctggcgttgctcnnnnnnnnnnnnnnnnnnnnnnnnactcccgcgaccccgacgtcctcggcgtccaacctggacctgggcgagcagcgggagcgctgggagacgttccagaagcggcagaagcttacctccgagggtgccgccaagctcctgctagacacctttgaataccagggcctggtgaagcacacaggaggctgccactgtggagcagttcgttttgaagtttgggcctcagcagactttgcatatatttgaantgcaattgcagcattttgcaagaagaagcagaatagacacttcattgttccagcttctcgcttcatcntcctgagggagctgagcacataacgacttacacgttcaatactcacaaagc

SEQ ID NO: 80758 - DNA, 780 bp, Homo Sapiens
  misc_feature (749)..(749): n is a, c, g, or t
gtttgtgatagtatctattacactgatgttaacatcacatggttgactatgtggagactccaagtgaaatttcttgcagttgtcagtgccacgaaaatctgtatttctggataaaactcaaagagtttagaaaaacattcaagtttcatagtctagaggtctaacactggaatcttttccaaatttaaggtttaatgattttcttaaatctaaaaatagtaggttgcagatgtatttaaacagtgtgcctaggtagtatgtttatatattaggattaaaatgctcttctaaagtttactaattctaacacagcctttattgtttcatggagacatatctttccgattcccaggttaatttaaacaattaattcaaagcaactattgacttagttctagattgggatacctatttatgcatttgaagccttagatatgtatttcaaattacaaacgtgtgctggtcatggaaagttgtgactgagagtctcaggtaagttttgtttccatgtgaacacactgcttccaattaatgttatgcccagagtagacaattaataaacaccctttgaagtgaatgagtgattaactgcaaatattacaatacatcttcttagtgggcatgataattggacatatttagtccttgctgtgacctaagaaaggaattgttttcattaaatgtttaatgtttcaccctgttcatacagctggagttactgattcagtttgatgtgaattcagtcttcnataaaaccatcattatacctgcacttatgct

SEQ ID NO: 80759 - DNA, 991 bp, Homo Sapiens
  misc_feature (783)..(783): n is a, c, g, or t
  misc_feature (787)..(787): n is a, c, g, or t
  misc_feature (800)..(800): n is a, c, g, or t
  misc_feature (893)..(945): n is a, c, g, or t
ccaaggtagcgaggcctgggtggcgaattcggcacgagggtggaaaagagaccaacacggagaccccggccccatcccccacagtggtgcgacctaaggaccggagagtgggcaccccgtcccaggggccatttcttcgagggagcaccatcatccgctctaagaccttctccccaggaccccagagccagtacgtgtgccggctgaatcggagtgatagtgacagctccactctgtccaaaaagccaccttttgttcgaaactccctggagcgacgcagcgtccggatgaagcggccttcctcggtcaagtcgctgcgctccgagcgtctgatccgtacctcgctggacctggagttagacctgcaggcgacaagaacctggcacagccaactgacccaggagatctcggtgctgaaggagctcaaggagcagctggaacaagccaagagccacggggagaaggagctgccacagtggttgcgtgaggacgagcgtttccgcctgctgctgaggatgctggagaagcggcagatggaccgagcggagcacaagggtgagcttcagacagacaagatgatgagggcagctgccaaggatgtgcacaggctccgaggccagagctgtaaggaacccccagaagttcagtctttcagggagaagatggcatttttcacccggcctcggatgaatatcccagctctctctgcagatgacgtctaatcgccagaaaagtatttcctttgttccactgaccaggctgtgaacattgactgtggctaanagtnatttatgtggtgnttatatgaaggtactgagtcacaagtcctctagtgctcttggtggtttgaagatgaaccgacttttttagtttggggcctactgttgttattnnnnnnnnnnnnnnnnnnnnnnnnnnnnnnnnnnnnnnnnnnnnnnnnnnnnncctgagcaggcggccgcaagcttattccctttagttgagggttaat

SEQ ID NO: 80760 - DNA, 508 bp, Homo Sapiens
ttatcgttctgaatgaagtggatcccacatggagcaagagtgagggtgccgtccctacagtagccccctctgttgtgatagcgagttctccttgcccctttctggaggccccctccactgactcaggggccttgcttgctttgcccagcagatggaccgagcggagcacaagggtgagcttcagacagacaagatgatgagggcagctgccaaggatgtgcacaggctccgaggccagagctgtaaggaacccccagaagttcagttctttcagggagaagatggcatttttcacccggcctcggatgaatatcccagctctctctgcagatgacgtctaatcgccagaaaagtatttcctttgttccactgaccaggctgtgaacattgactgtggctaaagttatttatgtggtgttatatgaaggtactgagtcacaagtcctctagtgctcttgttggtttgaagatgaaccgactttttagtttgggtcctactgttgttatt

SEQ ID NO: 80761 - DNA, 436 bp, Homo Sapiens
gcggccgcggcgggatcgcctccatcggcgccgcgacgatcccggtgacggcgagcggggtaccgctctgaccgcgcgtccaatatcgaactcgccatgcctgtatcccggcaggcgtgtcggccatcgattcggccgcaatcaactcacccgcccgctgcgccgcagccggcgcaggaagggcaactgcgacggcaatcaaggcggcgatcgacaagcggcgcatcggcatttctccccggcgcatcgctataccatggcatggcgcctgcgaaaacgcgttcctcgatccgcagcccgaaccaatgaaaaggccgggcagagccacgctcgtcccggccttctcgatcagcttcgaatgaagcctatttcttcgcggcagccttcttcgccggtgcctttttcgccgtaggcttgtcttcggcggcctcgtgcc

SEQ ID NO: 80762 - DNA, 1383 bp, Homo Sapiens
cgagcgcggggcgggttgccgaagggcctcggcctgggctgcgtgctggagagcggggacggggccgactcaccagaggctgcagcaacaggtccactttgctctccagtctctttctccgacaccgctgaggcggtttcccaccgacttcctttccatacagcaccggcaggcaccggggtgaagggtcataaaaatggcgctggccgctcgtttgctaccccagttcctgcactctcggtcgctgccctgcggggccgtccgactccggactcctgctgtggccgaggtgaggctgccgtcggccacactttgctacttctgccgctgtcgcctcggcttgggagcggcgttatttccacgaagcgctagggccttggcagcctcggcgctacctgcccagggctcccggtggccagtgctcagcagcccgggactccccgcagccttcgcttctttccctgcctgccctcagcgcagctacagcacggaggagaagccccagcagcaccagaaaaccaagatgatcgtcctgggattctccaaccccatcaactgggttaggactcgaattaaggccttccttatctgggcctatttcgacaaagagttcagcatcacagagttctccgagggagcgaagcaggcttttgctcatgtatccaagttgctgtcacagtgtaaatttgatctgttggaagaacttgtggccaaagaggtgctacatgcattgaaagaaaaggttacttcactacctgacaaccataaaaatgcccttgctgctaacatagatgaaattgtatttacatcaacaggagacatctccatttactatgatgagaaaggaaggaagtttgattaacatcctgatgtgcttttggtatctaaccagtgccaacatccccagtgaaactttaagaggagccagtgtattccaagtttaagttggggaaacagaaagtgggaaactaaacaacttcttagggcaagctatgagtttcagagggagttcacacaaggagtaaagcctgactggaccattgcacggattgaacactcaaaattattagaataattttcttggaaaaatcagcttatggactttagcagttgctgtgaaaaactaaggaagaaaaattttggggtcatttgatcttcacttaatctaagtctgtgaattacttttatattattttgaaatactccttgcagtatattggcatgatacagtaaaagcattttccacagattgttatcaccttctttaaaagaagtcaaaatttaaaaaatacaatagcacgttgttggtgtcatattcaataacatttccaatgctacatataattttatagacataataaagaaggtattgaaaaaactaaa

SEQ ID NO: 80763 - DNA, 1002 bp, Homo Sapiens
  misc_feature (89)..(89): n is a, c, g, or t
ccccataagggctagcataagctgaggtagacttatctttaagctgcagcaaaatcaaggagtgacttttgtcccctctcctgttgacnctggtttagagccgttaaccacttggtgagttatgtgggtgttgttgccctgggtggcctgtggctccgtccacaagtcatgctgagttttgcagcctctgtgacttggagatgtcccttcacccctcccctttcaccaccatcctcttttcctcatggaaatgtctgctttatgaaactatgcacatattgaaagtgagttgaaacaaatgagggttgggtaggagcttccaggcctgggatttacaccacgcctagcccagcagaggccttagtcccatttggggcttgggagtgacatttgcttgaggcttatacactggtgtggttgcctggcttgcaggaaatgaccaagctcacacatgctggctgaagcgtaagcagacaactgaggtactcttttgaaggatgaaggtggtggattctcagccctgggggtcttcctcacctgaggacccttcagagccaccctttctagtttgcatttcctggtgcacacatttaaggcataacagcacattcatccctttggtttgggatctcaggaatacagtcccatgcaaagattctctggttttatggcttttttccctttctttacaccatcctctcccataagcacccatgtctttgaatatgaatgtatttgtaaaataccacgtttcatgtgtgaatatgtgcttttactgtacatagtgctattgtgcaataggtcttatgctgttttcactcaatgtgtgctaagatctagccccattgactcttctagaaatgcagtattgctttgacctgccatgtggcactccacaatgtcaattgcagtttacacacattgcctaaagtgggggacacctgggtgcccctgaccccttggcaccggatacaggccacgataaacatcctttcgtgtgtt

SEQ ID NO: 80764 - DNA, 1440 bp, Homo Sapiens
cagtcgacggtaccggacatatgcccgggaattcggccattacggccggggcaagccttcacaaggagcttgagccatttctgttacgccgagttaagaaagatgtggaaaaatctcttcctgccaaggttgagcagattttaagaatggaaatgagtgctttacagaaacaatattacaaatggattttaactaggaattacaaagccctcagcaaaggttccaagggcagtacctcaggctttttgaacattatgatggagctaaagaaatgttgtaaccattgctacctcattaaaccaccagataataatgaattctataataaacaggaggccttacaacacttaattcgtagtagcggaaaattgattcttcttgacaagctattaattcgcctaagagaacgaggcaatcgagttcttattttttcacaaatggtgcggatgttagatatacttgcagaatatttgaaatatcgtcaattcccctttcaaagattagatggatcaataaaaggagaactgaggaaacaagctctagatcattttaatgctgagggatcagaggatttttgctttttgctgtcccacaagagccggaggtctagggatcaatttagcctctgctgacactggttgttatatttgattccgattggaatccacagaatgatcttcaggcacaggctagagcccatcgaattgggcaaaagaaacaggtgaatatttatcgtctagttacaaagggatcagttgaagaagatattcttgaaagggcgaaaaagaagatggttttagatcatcttgtaattcaaagaatggacacaactgggaagacagtactacatacaggttctgccccatcaagttctactcctttcaataaagaagagttatcagccattttaaagtttggtgctgaagaactttttaaggaacctgaaggagaagaacaagagccccaggaaatggatatagatgaaatcttgaagagagctgaaactcatgaaaatgaaccaggtcctttaactgtaggagatgaattgctttcccagttcaaggttgccaacttctcaaatatggatgaggatgacattgagttggaaccctgaaagaaattcaaagaattgggaggaaattattccagaagatcaaagaagacgattagaagaagaagagaagacaaaaggaacttgaagaaatttatatgctcccaagaatgagaaaattgtgcaaaacagattaggttcaatggaagtgaagggaagcgcagtagaagtaggagaatactctggatctgatagtgattccatctcaaaagggaaaaggccaaagaaacgtggaagaccacggactattcctcgggagaatattaaaggatttagtgatgcagaaattaggcggtttatcaagagctataagaaatttggtgggccgc

SEQ ID NO: 80765 - DNA, 1106 bp, Homo Sapiens
gcggccgcgtcctgacgcagggtgtcggcattcacggtgccaccgggaatcaccagcgcgtcgaagtcactgctcagcacctgcgacagcttgacctcggattccacggtctggtccttctcggtgtcgccgacgaacgtctgcacggtgccgcctttgctggagccatgcgtcaccgtcgcaccatagccacgcaatgtttgcagaggcttgagcagctcgtcgcgctcgatgccggtgttggaggtgatgatgaggatgttcttgccgttgagttgtgagctcatggtcgagtctctcctgctggatggattaatcatgcggtgtgggagagtggatcgagcgtgggcggcaaaggtttaaattaatttggacttttttcttgggtggttttcgaggagggccgacctgcaaaaatcctgaactatcgaaaatcgctggcctctgctgcatagacgcctgctgctttttgcgggccttctattgcctggagactcaccatgaccgatcccaagactgtcgacaaaaccccggaacccatcagctctgaagatgcccagaaaggccgtcaacaacctgccaaggggcagacgctggaacagcccaacccgaagaccaaagccgtggacaaagtgttgacgcccacgtcgatcaaggacaccgaacgccagactgacgccatcaacgagcaggctgccaaggccgagcgcaagctgggccactgagcatggcccgttcgatcacggcgtctgaactgggcattgagcttgcgcccgacgatgatgccagcctgttcaagtggtttatcgccagcttcctgatgggcaagcgtattcaggcgcccatcgcggcgcaggcttacaaggtgatcgtggagcaagagggccgcgacactgcacgcaagttgcaacattgcacgtcgcgtgagctggtttcgatgctcgggcgtgcccattacgtgcgttacgacgaaagcacagcgcagcgtctgctggacctcagcgccaagttgaatgccgagtacgcgggcaagatcagccacatgcgcagcgccagcgaaaaccgtgaggccttcgaaaaacgcctggccgaattcgacggcgtgg

SEQ ID NO: 80766 - DNA, 824 bp, Homo Sapiens
tgaaccctctgctagatcattctcttctgtagagcctgtccatcttccctttatcagtagtaagctgcccagcctctgtcaactttgcaggtgattttgcttagttctgtctcatcacattcacttgctgaagtgcatagacttcctgcctcttgctggacctctacttttgcttgtgggcagcctcattgaaggcagttgctacggctgacctggaaagaccctgccatgaagataggtgcaggcagagaagtctggatgggaactaagtctagcggactgagaaattgcccatgggctccataaaaaatgtggtcagtgaacctatcgaaggacatgaagactaccacatgatggcgtttcagttgggccccacggaagcctcttactactgggtgtactgggttccaactcaatatgtggatgcaatcaaagacactgtgctggggaaatggcagtatttttgaaagcactttcacctctggcccaggagactgacccaaagtgaaggacattgccgggagaggcctgcagcatccctggatttcagagttctggaactttgttcataaaaaatctatattcaatctgaggtgatgtggtgactgaagccagaggtgatgtactttcaccattagcttaattttaacttaaaattaccagttccctttcttgcagtcagcttcataccatttttaaagtcaatacaatggaaatcaataaatctgaattccgaacatgttgtgtggaatactcttaagtgtgtttgagagtagatctgccaattatgttgacaagggaatgatcaaaagctttgtaaattt

SEQ ID NO: 80767 - DNA, 1119 bp, Homo Sapiens
aatcttgcgaaagtcctcgtgaatcgacggggtgtcatcgatcaataagattcgccggtttgggtttattcatgctcaagtccgtgcgggatcaagggggatgagcaaggtgaacaacgcgcctttgcccgggccatcgctgtgggcagtcaggcggcccttcatttccagggccgccagggcgcagctgtgcaggccaaagccgtggccttccttgcgggtggtaaaaccgtgggtgaagattcgcgtcatgttttctgcgggtatgccttcgccctcgtccctgacgctgatctgcaaggtgccgtcgtccagcggcagcaccgtcagggtcatttgccgggtgcggtcggtgaggttggacatggcgtacttggcgttgctgatcaggttgaccaggatcagcagcaaccgatgcttgtcggccatgatctcggggacgtcgtggtagttcttgaccacggtcacatggtggcggctcagggccccggaattcatgcgcaacgcatcctccatcaaggcgctgatatgcaccggctccagcagtgtggatgcgccggcgtaggactgctgggtggaaacaatgtccttaatgtggtcgacgcttttgctcagttgcgccagttcctcggtgaggccctgctgttcagtggcgatggcgtcgaccaactggttcaggtaatcgggcaacaacttgcctttttcattctcggtgagaaaggtccccaggtcgcggcggtgctcgttgatcaactgcatggccttgcccagccccagcgccttgctggtgcgcagcttgcgcgtcaccagctcggcggagatattcacgctgttgagtacgttgccgacgttgtgcagcacgttggtggcaatttccgccatgccggcctggcgggcgctgtctaggagttcaccctgggcatccttgagttcccgggtacgctcctcgacgcgttgctcaaggttttcgttgaccacatgcaaagcccggttgactcggttgatctcggcgaaactgcgcaacaggcgaatcgccaggtacagcagcagcgccaccaacaaggttgaaaacaccagcaggtagcgatggtatttctggtcgagcaggtcggcggccgc

SEQ ID NO: 80768 - DNA, 676 bp, Homo Sapiens
aattcggcacgaggcggatgacgccctcttcgccctcacaggcggacgcgttgcagaggtgcatatgacgtggcgccagagcgccgaaccggacccgcgctggccagcgaccgccatcttcgactcgctgcaaggctgggcccgcgcccgcatgcgccccctgcacgcggaactgtctcgtttgcggtgagagagcgggctatcccgcgtttggcgtgttgcggtcgaagccgacgtagacttcgaactcgccggggcgcgcgccttcgggcacatcgaaggtcactgtgcgaacggccgagaaatagccgatcggattctcgaccgcgaccgtcgcatccacgcgcagcttgtccgtcgtgagccgctcgcgcttcgcgtcggtgacgaacacattgatcggcatggagatcggccccgactgaccgcgaggccccagcaggatgcggcccgagaagccgtacttcaccgtcacctgcgtgccgtttatcgtgcattcgcgcgcggtcttggtgatctcgccgcgatgcatgatggcaagaccgtcgcccacccggcccgtctcgtagatcgtgaggtggctgtcacgcggccaggtcaggaagcgcgggcagcccggttgcgcgtcgccacccgagaactgaggcgcactgtcgccgcccgccttcgcggccgc

SEQ ID NO: 80769 - DNA, 689 bp, Homo Sapiens
gcggccgcggacggtgccgaagaagtcgaggctggagaggccgcgcggatcggtgaggtagtagccgggggcgacggcgccggagacgaaggcgttgttccggctgcggccgaagtcgaggtactgggcgtcggcctcgaagccgatcacgacacccgagcccggggtgaactggtagttgtagccgatctggccaccgccggagaagccgtcctggctgcggttgcggaaggaggcgacggtgccgggggcgccgtaggggaagggcaccgcgaaggtgttgccggagttgcggtcgctggcgtcgaaggcgtagccggcgttgataccgaaataggcgccggtccaggtgaagaccgggacgggggtgaagaccggcgggggggcggcgcggcgcggcaggtcggcagcgaaggccgagccggcgaaggcgacgcccgcgagggcggtggtgacgcggagcagggatttcatgatctggtcctcactggtggtccgcgccgcccgtggaccggacagcggcgtaaccggatctggctgtgttccagcggttccagggctgcttttcgctccgcggtgtcgccgaccgctcacgcggccccttatggcaacccgccgtttttccccggcaccttgaccccccaacgcggtcgaatggccaaggttcatttacggctacgcttttttcc

SEQ ID NO: 80770 - DNA, 691 bp, Homo Sapiens
gcatcactctttaacctgggcattggccccagcagggatatcatgggaccgcagccgctccgtgcactgtctctgcccccagaggaagccctgtccatggttcctggtgcacggccacaggcctgccttgaggccaccacatctggtgtctagaacagctgcgggccccacttgggcagaaggaagaggtgctagctgctgcccctgcctgctgtgaacacctgcccagcccttccttgtctgctgaggtgctcagaccagagtgccattaaataccaactgatgtcacggagcggacggtgcattgccaaggactcacagctgtgggctcccttccagctcctcccactttcttggctgggtcttctgaggcctacgtggaatgaactacacatgtggcctcatgcccaagggtttgttagatggcctctgactctgtgggattcaacttgacttttttgccccaggaggctctgtctggaaacaggcttagctttagtgctggggtgggacctgccctgtgggccccagggaggggacagtgggggtgaggccctgaggctgtccagggtctgagctctttgcctccaacctgcttctgccccaaaaggaacaggctgttggtggcaggctcctcccggggagctgtactgtacagacccaaggtgtaaataaacagtttgctcttctc

SEQ ID NO: 80771 - DNA, 1717 bp, Homo Sapiens
  misc_feature (789)..(866): n is a, c, g, or t
cgagctccgggaggctagatgattgattcccaagtgccggactagcaagtgctggagtcgggactaacccaggtcccttgtcccaagttccactgctgcctcttgaatgcagggacaaatgccacacggctctcaccagtggctagtggtgggtactcaatgtgtacttttgggttcacagaagcacagcacccatgggaagggtccatctcagagaatttacgagcagggatgaaggcctccctgtctaaaatccctccttcatcccccgctggtggcagaatctgttaccagaggacaaagcctttggctcttctaatcagagcgcaagctgggagcacaggcactgcaggagagaatgcccagtgaccagtcactgaccctgtgcagaacctcctggaagcgagctttgctgggagagggggtagctagcctgagagggaaccctctaagggacctcaaaggtgattgtgccaggctctgcgcctgccccacaccctcccttaccctcctccagaccattcaggacacagggaaatcagggttacaaatcttcttgatccacttctctcaggatcccctctcttcctacccttcctcaccacttccctcagtcccaactccttttccctatttccttctcctcctgtctttaaagcctgcctcttccaggaagacccccctattgctgctggggctccccatttgcttactttgcatttgtgcccactctccacccctgctcccctgagctgaaataaaaatacaataaacttactataaagatgnnnnnnnnnnnnnnnnnnnnnnnnnnnnnnnnnnnnnnnnnnnnnnnnnnnnnnnnnnnnnnnnnnnnnnnnnnnnnnccaacaaaatagtcccccagtagagggagccactcagacacaccgaccgctagcaccactacatattagcgtaaaaacaaagggcggccccacaaataggagagaggcgcatgaattaaacagacaagacgcacaggaggacaagcaaaaaaagaaacaatgtaagcagcgaggaaacaacgagtagaaagagcgaaaatcatgaggaacagacagaccaacctgaatcacaaaggcggagacgagcacaaaaagagtgagggaaccaaaacacacaccaacgaagcacttacaaaacgccccagcaggacaggaaacaagaaacagaacaaaacaacagagtactaaagcatggggtccaaccaaaagcaacagcagcaaactacacgacacagacacgaaacagacaaacaatgtcagccacaaccacggacaacatcaagctaactggagaggaaaccgacataatataccagcgcacgcgagaagcacgacctgaacaacaacgcccgatagcacacggaaacaatacaaacaaacagcagaacacagacggacaaaagaacaccgaaaaaaagacaaacgacacgcacacaaacacagcgagacacgaaagaccagaccaaacagaagacaagaatgagcaaacccaacaaagagagaggagcagagccgaaggacaaagacgaataaaaaaagacagggacaaacgaaagagacgaacagaagagcaaaagtaagacagagccgaagagaagaacagaaggtagcaaggaaccaacaaacaagagagacgaaagaaaataaggacatagagaagaaaaaacaagtcgaaaaagagagcgacaact

SEQ ID NO: 80772 - DNA, 283 bp, Homo Sapiens
gcggccgcttaattaagacgcgacctgatcgccgacggcaccatctacggcggcatgctgccgaagatccgctgcgcgctggaagcggtgcaaggcggtgttggcagctcgttgatcctggatggccgggttccgaatgcgatcctgctggaaatcttcaccgacaccggtgtgggtaccctgatcagcaatcgcaagcgcccttaagcactggcaaacaaaaaggccccgttcaattcgattgaacggggccttttctatgtactcggtctgaaaagtggga

SEQ ID NO: 80773 - DNA, 783 bp, Homo Sapiens
  misc_feature (173)..(173): n is a, c, g, or t
gtaaaggctcaaatagccattgccgtgtcaggaatcaccaacaaaccggccccgcgcagccaatcggcaaacaccacacggccaccgtgaacggcgtggacctggctgccggcggcggcgctgatcatcaccccatcccacttggcgcgggtgtcatcgccacgggtttcacncaaagcgtgccagcagtcgaccatcaacgggccatggaagtttgccgcgggctgaagcaaaagggccgccgaagttctcgccggagctggaaaccagcggcccgggcgctgcgcgcgccggtttacgcggcgctggcgcgtcagtggtagcggccagctcggcttcacgctggcgctttttttccgcttcctgctgggcgatcagcgccttttgccgcgcttcttcagcctcacgtgcctggcgagccagggtttcctcgatggttttgagcactttgcccaagtcggcctggtcttgttcgcgggcctgcagcttggcgtcgcgggccttcacgtcattgttgagcttggccagggcttgctggcgctctttgcgcaccttgtccaactggtcgcgctgagtgtcgagggcggttttctgatccatcagttgcgactgctggtcggcgatttcctgctcgacattggccaactggcgcagggtttcattaaaaccctttaattgtgccaggcgcgccttgctcaggtagtcgtagtaagtgagggtgcgcgcgaatttctccggagttctgctggttgagcagcagcttgaggtattcctggcggccgc

SEQ ID NO: 80774 - DNA, 812 bp, Homo Sapiens
gcggccgccacccagcggcaggccgaaaccaatcaccagcgcgcccacggcggtgctggccagaaagcgccggcgtgacaggttgaccgggtcgcccagggccacatccagcagttcgttgcgcgtattcatcatgcgcgctccttctgctgggccaaatcctgcatggcggtgtggatggcgttataggtgccgcagcggcacaggttgaccatggcggcatcgatttgcgcgaccgtcggcgcgggggtgtgcttgagcagcgccgtggccgccatcacctgcccggactggcaataaccgcattgcgccacctgatgctcgacccaggcggcgaccacgtgcttgcccaccgcatcgtcctcaatggcctcgatggtcgtgacctcgcggccgaccacacccgccaccggggtaacgcaggagcgcaccacattaccgtccaccagcaccgaacaggcgccgcactgggccaggccgcaaccgtacttggtgccggtcatgccgaggtcgtcgcggatcacccacagcagcggcgtgtcggcgtcggcatcgacctggtaggtcttttggttgatacgtaattccatggcgggttcacctgctgatcatcggttggtggtgctgagctcttttgagcccttataagaagagtgggacttgtagcccatcgttgcactctagaccacggcgcaagggctatctatccgccagtcgataagtcggaggatcaggcaagtatttcgcaggaatgcactaccggcagcttgatcgttcccacgctccgcgtgggtacgcacctcgtgcccgat

SEQ ID NO: 80775 - DNA, 1078 bp, Homo Sapiens
  misc_feature (421)..(421): n is a, c, g, or t
  misc_feature (697)..(758): n is a, c, g, or t
  misc_feature (821)..(821): n is a, c, g, or t
attccccgagaagcagcggtgtccccagcctctcactcggagccgatatggggagtaaagtggcggacctgctgtactggaaggacacgaggacgtcaggagtggtcttcacaggcctgatggtctccctcctctgcctcctgcactttagcatcgtgtccgtggccgcgcacttggctctgttgctgctctgcggcaccatctctctcagggtttaccgcaaagtgctgcaggccgtgcaccggggggatggagccaaccctttccaggcctacctggatgtggacctcaccctgactcgggagcagacggaacgtttgtcccaccagatcacctcccgcgtggtctcggcggccacgcagctgcggcacttcttcctggtagaaagacctcgtggattccctcaagctgcccctcctcnttctacatcttgaccttcgtgggtgccatcttcaatggtttgactcttctcattctgggagtgattggtctattcaccatccccctgctgtaccggcagcaccaggctcagatcgaccaatatgtggggttggtgaccaatcagttgagccacatcaaagctaagatccgagctaaaatcccagggaccggagccctggcctctgcagcagccgcagtctccggatccaaagccaaagccgaatgagaacggtgtctctgcccgcaggacgcctgnnnnnnnnnnnnnnnnnnnnnnnnnnnnnnnnnnnnnnnnnnnnnnnnnnnnnnnnnnnnnnctcggcccgagccttttcccggtgggtgtcaggatcactcccactagggactttgcgctaatnacctgagcgaccaggactacatttcccaagaggctctgctccaggagtccaggaaagacgaggcaccttggccgcggggcctgctgggacttgtagttgcctagacagggcaccaccctgcacttccggacccgccgctggaggcgccgtgaggcgttggtgtctccctggatgctactagccccaacgccggggctttgcatggggcccaggggaggcctgagcttggatttacactgtaataaagactcctgtgg

SEQ ID NO: 80776 - DNA, 447 bp, Homo Sapiens
cggatccaaagccaaagccgaatgagaacggtgtctctgcccgcaggacgcctgcccccagcccccgcagccctctggccccctccatctcttgtccgttcccacccacccccctcctcggcccgagccttttcccggtgggtgtcaggatcactcccactagggactctgcgctaattacctgagcgaccaggactacatttcccaagaggctctgctccaggagtccaggaaagacgaggcaccttggccgcggggcctgctgggacttgtagttgcctagacagggcaccaccctgcacttccggacccgccgctggaggcgccgtgaggcgttggtgtctcctggatgctactagccccaacgccggggctttgcatggggcccaggggaggcctgagcttggatttacactgtaataaagactcctgtggaaaacccaaaaa

SEQ ID NO: 80777 - DNA, 1082 bp, Homo Sapiens
  misc_feature (37)..(37): n is a, c, g, or t
gcggccgccgcgacccaatttggccgccacctccatngggcgtggccaagagttgcgaacaggcctcgggcagcgcgcagcacacaaggcgcatcgccgaagacagcagccgcgacagccagcgcaccacggcaagcatccaacagctcaaccagcgcctgaccgacaccgccaacgccctggaacaggtcagccagcagggccagcagattcagtcggtggtcgacaccattcgcggcatcgccgaacagaccaacctgctggcgctcaacgcggccatcgaggctgcgcgtgcgggcgagcagggccgtgggtttgccgtggtggccgatgaagtgcgcagcctgtcgcaacgcacccaggcgtccaccgcacagatcgccggcaccgtggacagtttgcgcgcgactgtcagccaggcggtcagcctgatgggcgcggcgtgcgaccaggcactgaccgacgccgaatccgtcaccggcctgggcacccgcctgggcgaaattgccggtgcggtgcaacacgtcaccgacaccctggcgcagatcgcggctgcggtggaagaacaggctgcaacggccgatgaggtcagcggcaatatccagcaggtcgaccaggcggcggggcgcttgctggacggcgcacgggcggtgaatcaggcggccgataccttgcgcaagggcagcctggcgctgagtgatacacggcgcgctttcgattgggctgaggcgcgggcaggtcaacaatatctaccgcagatacgctcgggctgcgtctcatgctgagggttcattccatcagtatgaggaccgtgcccatgagcacgccgagccctacatccgcgtcaccgacgtttcaggaaattcgtacacacctgcttgagatcgacccgggcctgcgcacgcaaacccaggagcctgtcgtattacctgccgaactgcatgcgctggaacaactgaacaccaccctgatcagcgccaacaacgtcctgttggcgaggtcacgcagcttgttcgaggcattgacggaggcagatctcacccaagcggccggcaagacgttgcttgcccaactcaaaaccg

SEQ ID NO: 80778 - DNA, 1093 bp, Homo Sapiens
  misc_feature (758)..(766): n is a, c, g, or t
  misc_feature (868)..(877): n is a, c, g, or t
  misc_feature (888)..(906): n is a, c, g, or t
gggctatagagcaaatgataaattgacccctttttataaatggagggaaaaaatgaacagatttcagagattaaatgaaaaaaagcagatgttttaagtgcaattaacactgaaagagacctgttaaaccattcagaaaaagcttaagaaatgcgatatgacttccttttgtaatgctgctgatcccagtagactatgacttttgataattagcagaatttaactactgagtagttgattattttcacattttaattgctaatcactggctatataagtgtttttaagcaaaggtatttttgaagtggtgtagaacccctccaagctttcctgctcagtgttctaccagacttaccctggggcctggcttaaaagcaggattgaagaaaagggactgggggaaggaaacttattggaaaacttgatgcgaatgagtttctgcttggcacagtctctgcctgcttgctctcctttgctgatggattgcatttatcaaactattcatgctagcatttttccaacgagggaacttattccgcacgggcctactgtaggaccattgtctcgtgtaattaggaattttccatttgaaggattgctaaattgtcacagtagtaggaagtatagggaaacctctcagctgtggcactgttgtagctttggagtgcagagtgtaactctgggacaatcagatttcacatattctgtcatcttggcataagccattaaaagcttggagattactgtatttggcattnnnnnnnnntgtcacttaggtcagcactcccagacgtagcacagaaaaaccctttgacacaaaccatgtgttctgatttttggttcagaaaatattgaaactgtgagttgnnnnnnnnnnaacaactgggnnnnnnnnnnnnnnnnnnnctatagttagaaaaatggaagttccataggttctatttcttactctatgtatggctttgttttcagtctatttctaggagctttctctgaatcgctaattgtcctttcagttgaaatctaatttatacaatcattctatacttaaaggttaaatacatcttaattaattttttcttaaagtcaatgt

SEQ ID NO: 80779 - DNA, 1220 bp, Homo Sapiens
tttatgaaggaatccataattttgaacaacattagactttggggggctggggacattacatagcagcacatacataagctcattgtagctaatatatgctaaatgttatataagcttatgtaagctaagttttcaggtgaaatttagtagatagcttgtatggtgagtagaaggtgagacacctggatggaggcggaggataggccaggaaaaagaattgaaaaaaattattgaactataatttagagtattacattttacctagtaatgcacttgtacacctcatacttatctgtatagctgaaacaaaagtaatgatatgtattctatgtcggatgctttctggtattttcaattctattgcataacattaaataaacactgtatccatcatagagatttcacaaaaagatagtagtaaaaaacttcagttggaaaggcactgaacttgaaggcggtagtggggacaagcctggacaggtgtagagggaaaggacagtcagtctagggcaaataggatgaggcttgtgagcaaatttaagtaggtacttactcaacttcttaacacaccaacccttcacttgcgacctgcgagtgagtgcctccttaaattttactcctttgcaattcactgcatgccctaatctcagctctgaagaccttccttatatggacatacccatttcgttctggcacaaaaatgacatcagaaccaggaagataagtgagttcagaaagaaaaatagagcaaagatttttagggcaaacagcaggtagaaaaaaatcacccaataaaccagtttgcagcacagtattccagggggcagatccaagttagaaaagtccaagcaaagaggagagctacaaaaacaagaggcttaacctagaaaggctggatgttgccagtgccagtgatcttctggctgggatgaagcacttctgttccaggggcagtagtttggttagagattatgttttgtcgtatgtattccgaaacccaataacagtggcttaaacagaggcttatttttgtcaagtagcatcaagtctaggggtggacagtataaggctgatacagctgctttacggaccctaccaaggactcaggcttcttgttccatcatccttagcatggaccttcgtcatcacagatgcaatttggccacgccacccctagcctcacacattccaatagtggaaagaggaataataataagagg

SEQ ID NO: 80780 - DNA, 530 bp, Homo Sapiens
agaggtcaacctggaggtttaatttggaccttactcatccagtagaagatggaatttttgattctggaaattttggtaccttccctagtgaatatctagggttctcttccctagttttgcattttttctgttttaaaataggagcaatttctacgggagaaggttaaagtcaatggcaaaactggaaatctcgggaatgttgttcacattgaacgcttcaagaataaaatcacagttgtttctgagaaacagttctctaaaaggtatttgaaataccttaccaagaaataccttaagaagaacaatcttcgtgattggcttcgagtggttgcatctgacaaggagacctacgaacttcgttacttccagattagtcaagatgaagatgaatcagagtcggaggactaggcaaaggctccccttacagggctttgcttattaataaaataaatgaagtatacatgagaaataccaagaaattggcttttagtttatcagtgaataaaaaatattatactcttgaaaaaaaa

SEQ ID NO: 80781 - DNA, 1515 bp, Homo Sapiens; identical to SEQ ID NO: 3471
  misc_feature (944)..(945): n is a, c, g, or t
  misc_feature (1024)..(1024): n is a, c, g, or t
  misc_feature (1180)..(1180): n is a, c, g, or t
  misc_feature (1205)..(1223): n is a, c, g, or t
  misc_feature (1274)..(1274): n is a, c, g, or t
  misc_feature (1320)..(1320): n is a, c, g, or t
  misc_feature (1325)..(1325): n is a, c, g, or t
  misc_feature (1361)..(1361): n is a, c, g, or t

SEQ ID NO: 80782 - DNA, 746 bp, Homo Sapiens
attcggcacgaggctcgaggagggcgacgtcatcacccggatcgacgacgtgctcgtcaccagcgccgactccctggtggcgaccatccgctcctaccgtcccggtgacgaggtcgaggtgacctacgagcgcgacggcgaggagcaggtcgtgaccctcgtcctggactccgacgccgaggagtcctgacccgcacccccctctcccggggtcggcgccgctacccggccccgggagcggccggggcgcggcccctccctccgcgtcccggtccgcgcgaccctggccaccggtccgtctcccggtggtcggggtcgtggcacgtccccgctgctcagccggccggcgcctgcagcaccagctcgaaccggctcccggaccgaccgggctcgctgccggcgagccgcaggtcgccgccgttggccagcgccagcgcgcggctgatgtgcagcccgaggccacgcccgggcaccgtgccggcggtgtcggggtgccgggcgcggcgggtgaacacgtgctcgcggaagtcctcggggatgccgggaccgcggtcctcgaccaccaccgccacccgcccctcgggcgtcggggtggcgcagaggtgggtggcgcccccggcgtacttcgtggcgttgccgagcaggttggccagcacctggtccaggtgcgagggctggaccagtgcccgcaggtcctcggggcaggcgacgacgggctggtggccctcggactgcgcggcggccgc

SEQ ID NO: 80783 - DNA, 718 bp, Homo Sapiens
  misc_feature (212)..(225): n is a, c, g, or t
cggcacgaggctacaactaaaaatccgggatattatatacaaagcaaacataagaaagttctaaaaggtggagagagaatggactggccagggacctcagaacctgaggaagaacacagcagtgactttcttgggctttcttattgcctcatctatcccagatcgggttctagagaagctggcaacccggaaacgccaacaggcacagaccnnnnnnnnnnnnnngccccaagaaaaatctgctttttttagccaaaggactgggaagggagcagcctagcaagacagaaaatgtttagaaaaccacaatcctacttcaaagaccacagaagaaagctatggtcctatccccgccaacaaacgcctatacttccaccctcaccaggctgtaacaaggctcctcagtcctccacctttaccctggggtggtatcagagaagaccaactgagcagacagatttctaaaacccacccctccccacacattgccctggcagcgtcccccctacccagagccatctctcttcttccttactggtgtggtttcagtggaagccaagtggggggtcaggacttataccaattcccaatagtaatgatgttaccctcaaccccacagcatgctgtcaatcgaggccatgtaagtagcaataacaaggcattcctgatcttccccagccagtgtggtgtcagcagaggcctagtggggagcggccgc

SEQ ID NO: 80784 - DNA, 948 bp, Homo Sapiens
tactgtaaagaaaaatctgcaaaaatattcctagcaattgaatcagtgcttttaaataaaagaagtggagaggggcttggttaaattattctgacaagtttttttgctagtggttgccaaaattaaggatatttaaagtgtcctatcacccaaatttggctttaagaaaaagctatattctgtgtctatagtgtgaagcccacactatctgtgctgcattctcaatgatacaatacctatctggaaactttcctgttttgccaatgggtgcacaaatctaaaacattttatcacaaaaggtacttgaatttaaatttcttttgaacacccagtaggaggaaatatgtacaatacaaaatacctagaagcttcattttactgtcaactggagtttgtgctgtatccaaaaaaaagttctatctaaattttaagtaaaagctcaatattggacctatataaaaattaaggctcattggtaaagatactgataaattgtcacagaagaaaaacatggctttatctggtttttaaatgattcctgcttgattgacttggtttctcaatgtatgaaaattgatcagccatataaaatgtgaaatctaaagggaacttccagccatggaacaatcaaatccatggcctcaactgaaacttacattctgctttattctgaaatccagactttcagcagtagttgaacctatggaaaatgcaattaaatctaagtgcttataaggttttttgaggtcagtgcttttagagtgatgaaataggtttgcattatcatatcgccttagaaacatttcagttttactatgtagagacggttttttccccctcttataaaactgaggtttaacatgtgattcaaatttccccatctggggtacagaagaaagctgggtccaccgaattcttaaaatgctgcaatcttgcttgctcaacgaa

SEQ ID NO: 80785 - DNA, 984 bp, Homo Sapiens
gcggccgctcctttcactttccctacccctcaggacacacaggacagccatggctccaaagccgaagccctgggtacagactgagggccctgagaagaagaagggccggcaggcaggaagggaggaggaccccttccgctccaccgctgaggccctcaaggccatacccgcagagaagcgcataatccgcgtggatccaacatgtccactcagcagcaaccccgggacccaggtgtatgaggactacaactgcaccctgaaccagaccaacatcgagaacaacaacaacaagttctacatcatccagctgctccaagacagcaaccgcttcttcacctgctggaaccgctggggccgtgtgggagaggtcggccagtcaaagatcaaccacttcacaaggctagaagatgcaaagaaggactttgagaagaaatttcgggaaaagaccaagaacaactgggcagagcgggaccactttgtgtctcacccgggcaagtacacacttatcgaagtacaggcagaggatgaggcccaggaagctgtggtgaaggtggacagaggcccagtgaggactgtgactaagcgggtgcagccctgctccctggacccagccacgcagaagctcatcactaacatcttcagcaaggagatgttcaagaacaccatggccctcatggacctggatgtgaagaagatgcccctgggaaagctgagcaagcaacagattgcacggggtttcgaggccttggaggcgctggaggaggccctgaaaggccccacggatggtggccaaagcctggaggagctgtcctcacacttttacaccgtcaatcccgcaccaacttcggccacagccagcccccgccatcaatccccctgagcttctgcaggcaagaaggacatgctgctggtgtggggaatcagctggccagcctgaggaggtctgacggaaaacggggagaagtgcaacccctggacgagaac

SEQ ID NO: 80786 - DNA, 1093 bp, Homo Sapiens
  misc_feature (65)..(65): n is a, c, g, or t
  misc_feature (132)..(132): n is a, c, g, or t
aagaacaccagacatagcccaaagagccaaaaaggtaagaagagttcctgggtcaagtgtcaccnttcataaaaccgaagacggggactgggagtggagtgacgacgagatggatgagaagagcgaagaagngaaagcagctttttctcaggaaaagtcacgaagagtaaaagaagaaaatccagagattgcagtgagtgccagcaccatccccgaacaaatacagtccctctctgtgcacgactctcagggcccacccaatgctaatgaagactacagagaagcttcttcttgtccccgtgaacctcgttttgagattaagaaactccagaaaggaacttaatgacatacgatttgagtttactcccaggaagagatacagcagatggtgtatctccaggagctcttctctgctggcttggtggatggtcacgatgtagttatagtggctgctaatttacagaagattgtagatgatcccaaagctttaaaaacattgacatttaagttggcttctggctgtgatgggtcggagattcctgatgaagtgaagctgattgggtttgctcagttgagtgtcagctgatgtatgtcccttgatgtcaccctgatctgtcatgccccaccgccacccctactcccttcaaccctccctctttctgcccatttcctcccaccccctcactcccatttcctagcaaaatcagaagattgtgaagaggccggcttcaacaaaatgggataaaaaaataattttttaaaacttacaacactccgagttctgctttattctctagcaatccacagtacaagaacaagcaaatgccacagctgcacgactgttgctcatttttccaaaagctatttaatattcttagcaatcaatttggatatcccttaagtgaaaagaatctgaaatacactcaggtggtcttatttattggcaacaaaaggaattttctatccagaagcctatttctcctttcattgttgttatttctgttataatactttaattgtacatctgacaatactgcctcttttatgttgtatttagaaattaatatacttataaaattaagatttattagcc

SEQ ID NO: 80787 - DNA, 528 bp, Homo Sapiens
gcggccgcgacgacagcgaggaccgacctgcgtagcttggtagatctcaggaatgccactccttatcgataaataacctggcccctatgccaaggtaacaatcacgctactgggataatggtgcagcccctgcagcatctcaacgcacagtttctcgcttgacgacaggcccatatacgtcatttacctgatacttgagcatccgactgaatgattcctttcatcatgtgaatgaatgaccacctacagcacattcattccgggctcgacggacgatttcacacttcgacgccacggaacccataaccgcagtggcgggcgctagccaaggactacccgggtaaattgcaggatcgtatgaagtggggcgtgcggggctcgaacccgcgacccagggattatgagtcccctgctctgaccggctgagctaacgccccgagacaagtagctaccttaccgggtaaaacgtccgcgagcaccttgcgttgctgaccctgacgtctgaccaccgaacggccccctcgtgcc

SEQ ID NO: 80788 - DNA, 1107 bp, Homo Sapiens
caagtaatgttatgtacagttttattgccagtatatgcacaacagtaagcatagaactataaatacacaatgtaattaacagtagaaaacaaaattgttacaggtagagggagaggatatagagaaacttttcctgctgctagaacagaaagaaaggggaaagcctatgacaaatcatccattcagtactcttgtcttaaattctttacatatatttctacatttttttcagttaaacaaagtacagataactctgcaacaatggcaaactgcttccctaatagctatttgccttttcaatcaaattcactttatattaggattaaaaaaaagtaaagatgagaaatcattagtatcctggttccaaattatctaatttagcctttcaccaaaactggtaatttttgagtcggctgcacatgaaaagaatgggtgtagcaagaggtgattaaaaaaatttgctaaaaagtaacagaaaatcaccctttaagtagttttccaaaagacactataggcagcagctcagttaaaagtattagccctgaagaggtagagaatttgagcccattatacaaagacagccttggcaccatcttctctctcatcaggatcaatattttcaagtaagacaatttcatggtaaaaggaaaccaggttccaccatttaaagaaaaggtgctggtcactcccatgtctcgataatttgtttattacgtgagaaacagaagacggtcaaggacacacacgcacttgattttttttgtccgtttccattatcaagtttattcataagtgaatttgatattaataaatacaaaaaagcatcattcacaacaaagatataaacaaaccaaaataaaccctgcaataaaaccttctatttcagtaagtatcaagaaaaaacaggcagatgatttggtgcagctttcttaagggatcatagaagggacatggttttaaataaagatggcaagatcaataaccaatagacagtatcagttttacagaactggctgattctgtaacatctgtctttgaggttttagttttcaactatcccggccgtaatggccgaattcccgggcatatgtccggtaccgtcgactg

SEQ ID NO: 80789 - DNA, 1049 bp, Homo Sapiens
  misc_feature (42)..(42): n is a, c, g, or t
taaaaatatcctacaccatctgctagtctgctcgctctgatntggcgatgttggagaccatgcgtccagatggcatagctaaaaatggaggattgcccagttgacactggacatttcatgagcataaattttattacgccacaccgacttaatgtttaattgcagcataacctactctatcatgatactctatatgcaaggaattgagatagggttggaagtacacatgcatagattcatgacaaggttcttaccctcttgagaaagaggagttttaggattctaaccccaaacttatagtccattcattccagtaaaaaaatgtgttgtttcatcagtgtatttctcatcaacaaatattatgtgctgttaagcattatactaggtacatgtatttctgaagctcaaatatatgaatgaggtggatctttatcaggagcttcatatgtcactgacattacagtacttcctgagctctcaggaatccattatttgtaaatgttcaaaaaaacctcaaccagtcatttgatttcatataaatcaaataatttaatcaatatccacccactctaatttacatccagcttgaaaaacactgtatttagaaaaaggattagagtgagcaatttcattatccttatctgcatggaccaagtctttgggaatgctttttctactagataataatacacgctcttgaggagagaaaatcctacactgctttgcaggtcaacattttgattgtagaaaacaaaatctagcaaacaatcatctgttacatagtacttcacaaaggaaataatgctaagacttataaatggaagcctagccacgttactgttaaaaaacaaatgtggcctggagcagacccatcagtccatgttttatgaacagactgaatgtgtccgtagcatccaccattgtttattacaatgtaggtttaatagttggccttccactcagctcagattcctaatagcaggcagcgtgcttatctgtcttcatatcaccaaggattggaaagcagtagtaagccttgacatacagca

SEQ ID NO: 80790 - DNA, 494 bp, Homo Sapiens
ggtcgctcggcgcgtccttcgccgcgggaccgctgactttctcggcgcaatatatcgacaccgacgtcccgaagacgggggtgaaggcggtcgatacgctgtacgatccgaccgtggtgttcacactcggcgcgtccttctgacgacctagcgggtccgcggccacgcgaaggggacggcttcgggggaggccgtcccctttgttgcgcgaaagctgggagcgacggcaggattcgtccatcgtcattcgcgcgaaagcgggaaccctccgccaagttggttgtccatgcggcgctggaactgggtccccgctttcgcggggatgacgaagggggaaggtcagcgccagcgcagattatcggcgccgagatcggcgagggtccgggcccccatcagcttcatgccacgctcgatctcggcgcgcagcagcgcgatcgcgcgcgcgacgccatcctcgcccgccgcggcgagcgcgtagagatagaggcggccgc

SEQ ID NO: 80791 - DNA, 712 bp, Homo Sapiens
agaattcggcacgaggcgtgcaccgtgatcatcgatggtgtggcggcgcgctcgtgcgtgtttccgctggcgggtgcaaccgggcgcgagattgtcacccttgaagggctcggcacacgccaggcgccgcaccccgtgcagcaagcctttatcgaggagcaggcggcacaatgcggttattgcctcaacggcatgatcatgacggccaaggcgttgctcgaccgcaaccccaaccccagcgaagcccaggtgcgcaatgagttgtcgggcaacctgtgccgctgcggcacccatatcgaaatcctgcgcgccgtactgcgtgcagcgcacctcttgagcgtggaaggccgaccatgactgatatttcccgtgaccaatggctggccaagtcgggcgtcttattgattgtcgatgatgtactgccaccttcaggcccggtggccaagggcggcacaccgaccgtgaaacccaaggagctggggttgttcatcgcggtaaacgatgacggcctggtgtatgcctttaacggccatgtggacctgggcaccggcattcgcacgtcgctggcgcagattgtggccgaagagctggacctgagcatggagcaggtcaagatggttctgggcgataccgagcgtgcgcccaaccagggtgcaaccatcgccagcgcgaccttgcagatttcggcgatcccgctgcgtaacgcggccgc

SEQ ID NO: 80792 - DNA, 1326 bp, Homo Sapiens
  misc_feature (264)..(274): n is a, c, g, or t
  misc_feature (371)..(383): n is a, c, g, or t
  misc_feature (421)..(429): n is a, c, g, or t
  misc_feature (441)..(457): n is a, c, g, or t
  misc_feature (1107)..(1121): n is a, c, g, or t
aggggtagtgtaaatcctgtaaattgggaggtgtttctgtaccacctttcttttcaaaaattattatttggtcaggaggcgcgggcggccggtagaaattcttggttatatgggggagttccggtcaggtgagatcaccccccgtggtatgagaagtctcccggggacatggggccccctcagtaggtccccccttttggggggacagggtgtggggaaccccgccccggtgtttctccgccccgcggcgtgttttttattttnnnnnnnnnnnatttcccagaggcccttgttcctggggccgcgggtgttttctttgggggggacccgagttaggggcccccgtggcccactttttctttttggggggnnnnnnnnnnnnntatggaataggtttttgaaaaactttttttcagggccnnnnnnnnnccggacaagtgnnnnnnnnnnnnnnnnncccctagcgatcgaccaggtcgtgtgtgggtggcggtttgccccccctccggcttcaggggtggttgttctcattcaaattacagaattttattgatacagtagattaataaaaactgaaaggatgataaaatgggataaagaattcagtacattattttataacacactctttaaaattaaaatactttaaatctttcttcttaaaattttcattgccatgaaaggccagaaaattctgggacaaatcaatactgaggtgtaaagtaatccaagaacttcaggactatttcacaatttgcatggttgtcctcctatcagaggcatccttctggtgtaatggcagacaatttagcacctctgaagattaagggtgcccaggagtaaacactaggtaagatacacaaagggaagagaccatttaactctccaacaaatagtgacatcaagaaaatgacaccaattgttgaaaacaaattttttttcacagtaaaattgcagagaatacaaatacaaacactgacagattactgcttaagatctatcctaacaaattcttttcaaatcaatagatccaataaacagtcgggtactgtcagtttaaagccgcagataaaagctatacaagcacttcagaaatcagaaacattnnnnnnnnnnnnnnngatatttacaagtttcttctttatgtctacatagccatcgcacattacactttcacaagactccatagtcaatgttaccatgtgtatggctaaagcatgtgaccacaaacgtatggggtcaccaaagtaaggtccaactgtccactcttcagcagtcccattttgtgcatcaaaggctttattcagcctcaagcttgaccaaaaa

SEQ ID NO: 80793 - DNA, 847 bp, Homo Sapiens
gcggccgccgtgttcttcctggtcacccgtggcctgcatttctccatcgaattcaccggcggcaccgtcatcgaggtggcctacccgcaggcggccgagatcgagaagacccgccacaccatcgagaagatgggctatggcgaggtccaagtgcagaacttcggctcctctcgcgacgtcatgatccgcctgccggtgcgtgccggcgagaagcagaccgaagtggtcggcaaggtcttcggtgagctctgcgcggccgaggccggcgccgtcagcgagcaccaggaagtgacggcccagggcgagcaggtcagcaagcagatctgcaagaaacccgacggggccgagcccatccggctgtcgcgctccgaggtcgtcggtccggccgtcggcgccgagctggcccaggacgccgccaaggccctggccgtgacggtggccggcatcatgatctacctggccatccgcttcgagtggaagttcgcgctggccggcatcatcgccaacctgcacgacgtggtcatcatcctgggcttcttcgccttcttccagtgggagttctcgctggcggtgctggcggcggtgctggcggtgctgggctattcggtcaacgagtcggtggtcatcttcgaccgggtgcgggaggcttccgcaagttccgcaagatgaacacccacgaggtcatcgaccacgccatcacgtcgacgatgagccgcaccgtcatcacccacggctgcacccagctgatggtggtgtccatgctgctgttcggtggtccgacgctgcactatttcgcggtggcgctcaccatcggcatcctgttcggtatctactcctcggtcttcgt

SEQ ID NO: 80794 - DNA, 601 bp, Homo Sapiens
  misc_feature (54)..(54): n is a, c, g, or t
  misc_feature (483)..(528): n is a, c, g, or t
ctcatcttgcctcagtctttctggcaaccagccccagtcctgaagctatctagngacccccaaccaccagtcatctcatcagcatacaaaagatattcatcactccagagattccaagggtcttaaaagctcttacgccaggaaccagggactaagactaaatattataacaacagatgctcctatcatcccatcgtgcaggaaattacaagcatttcagaagctctgagccaggaatcagagatgaagaataaatatatatttttaatattcatagtatcacagcagcattcagttccttgtaggttgtcttgctagtattggctgtagaccaccctcagctccttgccaaacgggcctctccatggggctgcttacagcatagcggctggctgcagcaagccagccagggagagaggctaccagcaagaaggaagatacaatctcaccaaacatcatcccagaagtgacatcctgtcaccnnnnnnnnnnnnnnnnnnnnnnnnnnnnnnnnnnnnnnnnnnnnnnggggatgacacaaggcataatagcaggagatgaaagttaaaataaaaataggtaaaaatcactggggatcatc

SEQ ID NO: 80795 - DNA, 722 bp, Homo Sapiens
  misc_feature (77)..(118): n is a, c, g, or t
gcggccactacaccatttcttgaagaattttttaaaaactactctttcaagggtattacagataaacccgtggatgnnnnnnnnnnnnnnnnnnnnnnnnnnnnnnnnnnnnnnnnnnaattccacaaatcctccgacgtcacctattattgtatgagtaacttctattcatttcccaatgaaagaataatagcttcttaaatatttttatcatgtttaagggtgtgcatatttatttaatcagaagtaaaacaagaacaaattctaggaaaaagaaattcagtaaggaagagggctttttcgtctaattttaactaaatctttgatatttgattctctactcttaaccaaagtattcaaattatttaggaatttcaatgaccttgctttctaaattaggaaaacagccacaccaatcaatttgctaggtgccatattgctttgtataagttattttccatcaaggatttgtgtctgctttgtgtgctgctatataataattatgtcttgctgaagttcttctgcttattgaattcctctactgaagttccttacttattcaaataagtaaggtaggaggtacttagtcaattgagcagctaattggctaaaagtgtcttgagcacaagataagcatgtactgaaaaactgagtatctcttgtccattgttaactgtatttctaatggttgattgcatttaaattaaataattcacccctac

SEQ ID NO: 80796 - DNA, 760 bp, Homo Sapiens
cttcatcgctcatagaatatgttattttcaaagaagttcaagaattttcaagttgagcctttgaaaatcccataaattggttttagctaaacacttactagtagtgtctttaaattatttaatcaaccttgtcttttcaaggaaattaccacttaaagagatagttggtaaataaacatctatgccttttctcagaaatgatttgctgaactatgtccatattttacagcttagataatagtttatatggaaactattatacatctgctattgtgcaatattgttaaattatactgaagtagctctagaaagacacatgtatacaaggcactattgtacacactttgctgaatattttgtcagttgtatttacaaagaaaggtactttcttaagagcatatatgttattaatatttgatatgattttaaagtcagaatagtacagattgctgagtattatactttaggctagattaattaaaattgaatactgaaagagattttttgagttgcaaaaagtttataaatgcaaagcaaaaagaaaacatttattttctgagtctgcaggagaaacaaactaaacattatagttttatagctgctatcttgttaaccaaacaggttgttcataatattaaaaatcttacgtagttgtgttaaactgaaccagttcattataccttatgcattaaattaaatatgttataaggtggctttacttgtctttataaaaataaatatatctactaaacatgaaaaa

SEQ ID NO: 80797 - DNA, 394 bp, Homo Sapiens
gcggccgctggcgccccagccgagcttgcgcgcttccagcagcaccacgctaaagccgcgttcagccagctcaagcgctgtgtttaggccggaatagccgccgccaatcacgacacatcggcgcgcacttcgcccatcaacgccgggtagtcgggctgtgaaacgctgctggcggcgtagtaggaagcggtgtgccgggcgctggcggtcatggggagcatccctgtttggaaaatttgacgcaggatacagcggtcggacgaagctgtctgcgcagcacgttttgcgtcagaatccacgcttattcgccgttcggtaagtgttttgatgagttgcaacagccagaaaatcagcgcgctgcgcaggcagatcccttcgttcgagtcctcgtgcc

SEQ ID NO: 80798 - DNA, 903 bp, Homo Sapiens
ggcaccggccacggcacactcaatatcgtcgccgatgaagtggtgttcggttatcccagcgaggcgaggccggacacccaggtgacgctcgaccgcctggcgctcggcttctccacggtcaacgtgacggcgcgcggccgaatcaccgcgaacaaccgcaatacattgtctgtgtatgagagtcagggcgcgtaccagaccggcgtgggatacagctacagcggtggcaacctcaatctgatcactccggtgctgaccggcgactccggctcgatcaaccgcatcaccgccggcggtgcgctcaacctgaccggcaccggcgggccggccgcagcaggcccggcggcgttcggcgccgagatcggcctgaccggcagctcagtggcgatctccagcgccgtcgtgctgccgagcggcaagctgaccgtctccgcgaacggcgacatcgcgctgagcgatgcggcgcgcatcgacatggcagggcgaaccgtcagcctgctcgacgcggtgcgctacagctggggcggcgacgtcgcgttggaaagcgcgcatggcaacatcacccaggcggccggatcggtcatcgacgtctcggcggtgaacaatcgcgccggatcattgtcggcgacggcgctcgatgccgcagccgggcacgtggtgctgggcggctcgctccgcggcagcgcctcggggcactacgacgccggtggcacgatggtgccgttccttgccggcagcatcgacgtgcgcgcgcagacgatcgacgatttcgccgggctgaaccagcggctcacgctcgccggcgtgaccggggcgcgcaacttccagctcaagcagggcgacctcgccatcggtgacgaactggtggccagcagcatcagcgtgtcggtggatggcggccgc

SEQ ID NO: 80799 - DNA, 542 bp, Homo Sapiens
gtgtgagccaccatgcctggcttacacagtataaagggaatgcattggcccacacagtggaaaaaaatatctagtaggaataggaaggacttcaggtgaggtttgatccagcagctcaaatgttgtcaccacaggcctggattcctctggcctttctcaaggtctctttcattttcatgctccacaagatggcttctgccaggctgacctccctcccctgaccccagcagctctggacacccctctcagtgccatttatattgttgcatcaataggctcatttctatatactgcaaggttcagagaagacagaatatctctctcaagagttctaacataagtctgggggtcctggctctcataggcttgaacagggccacatgtccattcctgagccaatatttgtgaccaaggggatgtggtcaatctcatccaaacctcacttgaagtgagggtgggaggaggagtgctctgcaaggagactgtaggtctggaccaccaaaaaggtagatgggttggtgggaaaagccagatgcctacta

SEQ ID NO: 80800 - DNA, 264 bp, Homo Sapiens
gcggccgcggctgtaatgtttagaatgtgctaggcttagagaaccagactcagacacagacacagaagtgctggaaaaccagctaatctccaggctaactctcttgcctgcactagtaccaatgtcactctggctcaggggacaccaagccaatgatgggaaaacttagctctgaaaaagagcccaaagagcattttagagataactgcaaagttgtttgataaggaaggaagtgacaaagagaaaaagaagataaagagaaag

SEQ ID NO: 80801 - DNA, 990 bp, Homo Sapiens
gttggtgccggtgctcagcgcctggccttgtgcgtccaccgactccagcttcatggtgtactgatcagtgcccagcgccgggatgatggtgaaggtaaagccgctgataaacgccagcaccatttggccgccacccggtggatggttgtagaccttcaggcgcaggctgtaatcgccgggctgtttctggaattcatccagggtcacacgaccaaaacaggccggagtcggtcaggactttctgcagctgtggcttgagcatgtcccgcgcttgtgggaattccgtagcggcggcgtttgtcggctcgccctggtagaacttgaagtctacgtagacgttcggtttgttggcgtagctggccttcgatggcagcgtgacaggtgcgacttcgtccttcgtgaagctggcgcagccgcccatcgacaacgtgatcagggccaaccccagcatttttccaatgtgcattacgacttccttagtgaatggagcgtctccatggccggagttgctgggggcggatgataaagagtgagcaacaatgttaaaaggccatctccgagaaatacccgctcgcaggcagcactagttggcggagaccagtttcaggccgatcacgccggccaggatcagtacgatgcacagcactcgtaacggtgcggtggaatcgcccagcaacaccatgccgaggatcgcggtgcccgctgcgccgattccggtccacactgcgtaggcgctgcccaccggcagcgtgcgcaacgctgtcgacagcaggatgacgctggagacgccggtcacgacggtgagcaatccgggggtgaatcgggtgaagccatccgaagccttcatcgcgaacgcgaaagcgatttcaagaatgccggccaagccgagcagtagccatgccatggggtgaaccctcaggaaatacagtgagtgtgtggcgaggggacccgccacaacgaatccgcgttggcttatgccttggcggccgc

SEQ ID NO: 80802 - DNA, 497 bp, Homo Sapiens
gcggccgcgtgacgtccgacaagggcgtctacgacctgctccaggtggcgcggcgcgtcgagcaactgcgcccggggctggtccgatggaccgtgtgcggcgatggtcccgaactgaccgaactccgccgccaatgcgcggggctggccctgcagcagatcatagaaattcgcggctttaccgcacctcgggagctcaaggctgtcctggcggcgagccacgccgcgatcgttccgacccgcagcgagttcgccgaaggcatggccctctaggcggtggaggcgatcctcgccggccgcccctgcgtgaccagtccggtcgttcccgcgctcgaagtgctgaagccggcctgcgtggaggcacggaccaacgacgtcgagagctatgtggcggcgatcatcgagttggcgacgtcgcggtctctctatgatgagttgcgcgccgcctgccctgaactggcggcgacgttttacgatccggcttacgggcctcgtgcc

SEQ ID NO: 80803 - DNA, 424 bp, Homo Sapiens
tccctattaaaatatgtttattaatgtgccaaatatttatgaatgatgagaacatcactgcttaagttaatagcaatcccaaagcaagaatcatattattctatgaaaccaggctcttcaggatatcagacaacacacttatacagtttcatacctcatctcaagtttaactttcaaattacattttcacttgctgtgatctttttaaacatgaggacaagcctaaagcaagctcactcattgtctcccttgcttccccactgcacataagactggtcacaaaacttcctttatgttcagtaggctatatattctaattagatacttctttcacttattcttcttatcaagttttcattgactcattcccttattttcataccaagcttcatctcctcttctaaaagcctacagccgcggccgc

SEQ ID NO: 80804 - DNA, 1048 bp, Homo Sapiens
gcggccgcaccttgaggctggccgccaggcgcacggcggcgcgcaccaggatttcggcgccgagaatcagcagcagcaggccgctgaccagttcgagcaggctgaagggcgagagggcggtgagtacggagatggccaaggctactgtcagttgctcagcgcttgcacgcgaacccgtgcggtgccgctgcccagcataccgagttgctcagccgctttgcgggaaacatcgatcagacggccacgggtgtgcgggccgcgatcattgatgcgcagcacgacggatctgttgttgtcgagattggtcaccttgacccgcgtgccgaagggcaggcgccgatgggcggcggtcagggcattctggttgaagggttcaccgctggcggttctattgccatggtgcttggcgccgtaataggaggcggtgccggtttcgtcgtagccgttggggtcgatgaggccgctggcgcaaccggccaacagagagaacagggccaggaggccgagtagacgcttcatgttcaacaaacccccaattgatcgttcccacgctctgcgtgggaatgcagcccgtgacgctccgcgtcacaaaagcggacgcggagcgtccagtgaggcgttcccacgcagagcgtgggaacgatcaagtgtcagccttcgagcttgcttttgagcagttcgttcacctgttgcgggttggctttgcctttggaggctttcatcgcctggccgacaaagaagccgaacatcttgctgcgcttggcttcgtctgccgcacggtattgttcaacttgctcggcattggcggcgagcatctcatcgagcacggccgaaatagcgccgctgtcggtgacttgcttgaggccacgcttctcgatgatgtcgtcggcgctgccttcgcctgcggccatcgcttcaaacacggtcttggcgattttgccggagatagtgttgtctttgatgcgcagcagcatgccgcccaactgctcggcggtcaccggggcttcgtcgatctccaggccctgtttgttcaacaggctgcccagct

SEQ ID NO: 80805 - DNA, 1403 bp, Homo Sapiens
cagattcaggccggtgcgcgtgccgatctcgcgccggccgggaatgagcgcttcagggtagaaggcttcggggatgttgtagcgccaggcgatggtgtccagcgtgctgagtaggtacggcatgaaggccgtgcctgcgccctcgcacgagtagccgaacgaactcgcgaattggctgaacacgtagccgccggggtggccgatgacgtcggcgttcttgaacttggcgaggttgttctcgttgtcgtggttcgtcgtgccgtcgtcgccagcctgcgcagtcgggttcggcgtgctcatcgcgcgcacctcgacccaggggttctcgccggtgttgctgtagctcgataccaccgcgtccggcacgtagtgccgcaccttcaccgacgtgcgcacggtgcagcccgtccaggtgcagaacagccagtagcagatgccgacgacgcggtactcgatgcagtccggcgacagggccgacgacacgatggtggccgtgttcagcgcgaagctcgatgccgcaccgcccagcagcaccgaggcgatgggcgaggcgagcgcggcgcgacgatcccgacagcaggcgcttcatggctgtgtcctccgatggcttcgacgcgggccacggcacgcgccacgtcgggctcgccgtagaccacgtagcggcgatcgaccactacggcgggcaccttggcgatgcccagcccccaggcatcggccacaccctggtaggcgctgccgatgcgtcgttgcaaagcctggccgccatcacgcagtcgctgctgcacgattgcggttgcgcggttggggtcgttgggcagactggccgccagctcggcctcgatgcgctcgggcaggtccagctcgaccacgcgggcgccggcagcgggctgcacgggatggtggctgtcggtcacgacgagcacgtcggcggccgatgcggtctggcagagcaggcacagcagaagtcctcccgcgcacgcgatgcgcgtgacccccagccgcggaatggaatagaacaagggagccgtcatggcgggtgtcctggaaatgagagcaaggcccctagtcgaacgccgaaggcatgtctgctgcgacaaggaatgcgcaccgcgcacaccccgctttcgcaagcggcacaaggaggaaaaacgggagccgaagctcccgtgggaatcaggcgcccgcagccgaggcctgaatggcgcggcgggcatggacttgccagaacggatcgaccaaccggccggccagtacgcgggcgcgcaggcgcaggcgctcggccgtgctgtggttgtcccagccagcttcgtaggacgcctcgccgcgcaggtcatcgacctgcttcgcgacgtcggcggcttccgcatctgaggcggtgggttcgcaccagcggatgcggccgc

SEQ ID NO: 80806 - DNA, 865 bp, Homo Sapiens
ggctccttcatcgggtgcgcggcgagacgaaggtggcggcggcgcgaacttctgtcaaagcctgaccggtcagaccctgactcattaagatcgggcgcgtcggagcgtcagattgatgcgcccgcccccgggcacgagctgggaggagccgccgagcacgcgatcgacgccgtggaaggccagcctcgccgcccccgccaggacacagacatccccggaacgtaatcgaagactagtggtagggtcgccgcgtttcagtccgcccaggcggaacacggccgtgtcgccgagcgagaccgacaccacgggcgccgtgaaatcggcttcatccttgtcctggtgcaggctcatcttcgcctcctcgcggtagaggttgaccaggcaggcgtcgggcggccgggccgggtcgccatatctgttccaaagcgcgatcagcgaagccggcatcggcggccagggcgccccggtgaccggatggcgctccacatagcgatagccgtccttgtcggtgaaccaaccgaccgcgccaaggttggtcatcatgacgctcatggggcgtccgcccggcgtgacggggcgatagaagggtgcaaggtctacagccaggagaacgtcttccagcaattcgcgttgcgccgcggcggtcagcgcctcggggtggaccgaaaagtccgctcgaactggttccgaacgcaacaacatgaatttagtttaactcgacgacggggttttgcgtctgcgttatcagcggcgccggctgcggtcaggcgccggcttgggagttatctatgcgcgttgtatcgaaagcgctcgccttgacgatgtttttggccatggcgggcgtcgcctgcgccgaagcggccgc

SEQ ID NO: 80807 - DNA, 748 bp, Homo Sapiens
gcggccgccggtactacaaggttagccgtacggaagtggaagagggtacagcccagcccaagctgccgatgactggctacattcccacgcggcgtaaaaatggcacacatgtcggcatgttctggtccagggggtgctgactttacgcggcgagtccacgttaggccaggcgcggcggttgacgcttgagctgcaatacgagggcgtaaatattttttcaacctggaacggcaatattgcagtgcgatacagccagaatgcgaacctgaatacatgaagattgaaattcgacgcgccgaaatcacggaacgccagatagtccgaaacctgatggaactgtatcagcatgatttttccgagcttgacggcacggatatggacgaacatggtcgatacgggtatgacgatttggacagtttttgggtgaaccccacgtggtcagcgtatgtgatgaaggttgacagcaagtgggcgggctttgtgttgacgaacgatgaggtccatatccagggaaatacacatgcaatcgtggagttctttgtcgttcgcaagtaccggcgtcaagggctgggcaggaaggctgcgcaaaccatcatgacgatgttcccggccaaatgggaggtttgtgtcattgaagaaaatcctgctgcgcggaaattttgggaaacactcgtcaatacactctggccgggcagacatcagtcaaccgttctggacaatgaacaatggcaggggccggtattctcgg

SEQ ID NO: 80808 - DNA, 1026 bp, Homo Sapiens
ggcctgggtggcgaattcggcacgaggctgccatccagtttcttgtcatgtccaaatgcaacaatgaagctttcacactggctcagcaacacaacaaaatggaaatctatgcagatattattggttctgaagacactactaatgaagactatcaaagcattgccttatactttgaaggagaaaagagatatcttcaggctggaaaattcttcttgctgtgtggccaatattcacgagcacttaaacacttcctgaaatgcccaagctcggaagataatgtggcaatagaaatggcaattgaaactgttggtcaggccaaagatgaactgctgaccaatcagctgatagaccatctcctgggggagaacgatggcatgcctaaggatgccaagtacctgttccgcttgtacatggctctgaagcaataccgagaagctgcccagactgccatcatcattgccagagaagagcagtctgcaggcaactaccggaatgcacacgatgttctcttcagtatgtatgcagaactgaaatcccagaagatcaaaattccctccgagatggccaccaacctcatgattctgcacagctatatactagtaaagattcatgttaaaaatggagatcacatgaaaggggctcgcatgctcattcgggtggccaacaacatcagcaaatttccatcacacattgtacccatcctgacgtcaactgtgattgagtgtcacagggcagggcctgaagaactctgctttcaccttcgcagctatgttgatgaggcctgaatacccgcagcaaaatagatgcccaataccaaaaagaagatcgaggggaatgggcaaggagaccccgatattatctgaaaatagaaaggagggccaccgactcccatggttccaattcctgcacaatatttctttctctccccaggagagggggaaacctccctccctgggccccgggggttgtgtaacaaacacagggaatccccccataacttggccccatttgggcaaccagggcggt

SEQ ID NO: 80809 - DNA, 865 bp, Homo Sapiens
  misc_feature (190)..(206): n is a, c, g, or t
gggaggctttgcaagttaactgctggggttataggatcaataccatacttgctagacaaagctacccagatttgtcttatattataatttttgagttaaccgtagtatacctattatgattatagtaaacagactagtgggtagtaatgctaaattaccatcacagttatgtgccatctccccaccccannnnnnnnnnnnnnnnngatcagcaaagaaatacaggagaccagtctcgagtggtgctgtacttgttatgagtggggcagcagcacagtgtgtggcatttacatggtacccaggctccacagagtaccaagatgttgccctctgggaccacacttagctcagagaatatggggtccttacttgtattcttttatcagctgattttgaaacatataataatgattttcttgttcccttctttaactagctgcctttagattttgataatcacagtcttaaaatactaggaaagaagtggatgggaattgtaggcatagatttcatatcaagggcatttcaagacagaatttttatttcctgtagtaggcttgctggagcaaaggaaatgtgctgctaaaaatcaacttatgccattttaaaattagataaaatatggagtgccatcctgctaggtgagtacagaccagaagaaaatttagttgggaaaatacttgtttttccaaattccggtgttttattacaatcaaagaagaggaaagcaaggtattttttcacctcagattctaatatattctagatttgtttctgttttatagatttaattcaatacctccacatagatgtttttatattacatgaatttaataataaactaaacttttttttgtctcccgtt

SEQ ID NO: 80810 - DNA, 1069 bp, Homo Sapiens
  misc_feature (79)..(79): n is a, c, g, or t
  misc_feature (87)..(87): n is a, c, g, or t
  misc_feature (89)..(213): n is a, c, g, or t
  misc_feature (217)..(217): n is a, c, g, or t
  misc_feature (223)..(223): n is a, c, g, or t
  misc_feature (233)..(233): n is a, c, g, or t
  misc_feature (246)..(246): n is a, c, g, or t
  misc_feature (727)..(736): n is a, c, g, or t
gaaccaacgccttcccagcgtgcagatcatatgcagtgccagacagtttccgatgaaaagcggcatggcgcacgcaatnattgagtngnnnnnnnnnnnnnnnnnnnnnnnnnnnnnnnnnnnnnnnnnnnnnnnnnnnnnnnnnnnnnnnnnnnnnnnnnnnnnnnnnnnnnnnnnnnnnnnnnnnnnnnnnnnnnnnnnnnnnnnnnnnnnaatntgcccntcgagccaangaattcgcacganggactatgcataattatacctgaccatgaaaaaaataagtacctcaaatgcatgcatttgcactggtgattccaactgcacaaatctttgtgccatcttgtatataggtatttttaacatgggttgacatgcacacaacaccattttcattcagtatgaaccttgaggctgctgccatttttccacttaaccaaaccagcctgaaggtgaacctcgaaacttgtttcataaatctttcaaaagttgttttacatcaatgttaaaatttcaaaatgctgcagggtaatttaatgtataaaatattagtaagaaaaagtatgtattgcatacttagtagaatagatcacaacatacaaattcaattcagtgcatgctttaggtgttaagcatgagattgtacatgtttactgttaggtccttgcatctgtggtgctaggtgagtatgagaagatgtcaaggactggacgtattttgttgcctnnnnnnnnnnggctgtttgtaggcgttttaaatatgcttattttgtgtgtctctcactacctattacacactgttgctttgtgggtttgttttgtatgtgcgtgtgttatacagtagttaaatttccatgcagaaaaataaatgtcctgaattctcatattagtattctttattgtatatcatgcatgtaatttatttagaaatgtaggtcttactaaatgtatatgcatgtatttcagattatactaggatttcttggattagaagcagattgtgttaactgtaacttaaagaatgaatgttaaataaaatgatacagatttattttcttcattacaaaatg

SEQ ID NO: 80811 - DNA, 925 bp, Homo Sapiens
  misc_feature (67)..(101): n is a, c, g, or t
  misc_feature (879)..(879): n is a, c, g, or t
ctatagggcgctagcgtctcgtagccgaacgacgagcgcagcgaagtagtgagcgaggaagcggcgnnnnnnnnnnnnnnnnnnnnnnnnnnnnnnnnnnncagtcgacggtaccggacatatgcccgggaattcggccattacggccggggggaacagcggcctctgacaccagcacagcaaacccgccgggatcaaagtgtaccagtcggcagcatggctacgaaatgtgggaattgtggacccggctactccacccctctggaggccatgaaaggacccagggaagagatcgtctacctgccctgcatttaccgaaacacaggcactgaggccccagattatctggccactgtggatgttgaccccaagtctccccagtattgccaggttaggcggggcttgggcgccagctactttgagaccatagctgccctcatccctggccctgggcccccccttcccagctccatccttcttggccctccctggggatgcttgtgcacgctcaacctgggacaaggggagtgctgaaatccagcctgtgccgtgcttccaaaccaaaatgagtccacaggggcgcctcttccaaaagtggacagaggcgtggcctgggggagcaccacctctccccgcatcctaggtcatccaccggctgcccatgcccaacctgaaggacgagctgcatcactcaggatggaacacctgcagcagctgcttcggtgatagcaccaagtcgcgcaccaagctggtgctgcccagtctcatctcctctcgcatctatgtggtggacgtgggctctgagccccgggccccaaagctgcacaaggtcattgagcccaaggacatccatgccaagtgcgaactggcctttctccnacaccagccactgcctggccagcggggaagtgatgatcagctccct

SEQ ID NO: 80812 - DNA, 1070 bp, Homo Sapiens
  misc_feature (44)..(81): n is a, c, g, or t
  misc_feature (84)..(118): n is a, c, g, or t
caaagacgttgtcatcctatagggcgctagctccgttattgctnnnnnnnnnnnnnnnnnnnnnnnnnnnnnnnnnnnnnncgnnnnnnnnnnnnnnnnnnnnnnnnnnnnnnnnnnncagtcgacggtaccggacatatgcccgggaattcggccattacggccggggggaacagcggcctctgacaccagcacagcaaacccgccgggatcaaagtgtaccagtcggcagcatggctacgaaatgtgggaattgtggacccggctactccacccctctggaggccatgaaaggacccagggaagagatcgtctacctgccctgcatttaccgaaacacaggcactgaggccccagattatctggccactgtggatgttgaccccaagtctccccagtattgccaggtcatccaccggctgcccatgcccaacctgaaggacgagctgcatcactcaggatggaacacctgcagcagctgcttcggtgatagcaccaagtcgcgcaccaagctggtgctgcccagtctcatctcctctcgcatctatgtggtggacgtgggctctgagccccgggccccaaagctgcacaaggtcattgagcccaaggacatccatgccaagtgcgaactggcctttctccacaccagccactgcctggccagcggggaagtgatgatcagctccctgggagacgtcaagggcaatggcaaagggggttttgtgctgctggatggggagacgttcgaggtgaaggggacatgggagagacctgggggtgctgcaccgttgggctatgacttctggtaccagcctcgacacaatgtcatgatcagcactgagtgggcagctcccaatgtcttacgagatggcttcaaccccgctgatgtgggaggctggactgtacgggagccacttaatatgtatgggactggcagcgccatgagattgtgcagaccctgtctctaaaagaatgggcttattcccttggagatacgcttcctgcacaacccagacgctgcccaaggctttgtgggctgcgcactcagctccaccatccagcgcttctac

SEQ ID NO: 80813 - DNA, 344 bp, Homo Sapiens
gcggccgctccaacatcagttaagagggtcttgtagcactgtgcttcccaggagaatgagttgttaagtgctcactccgcatttttcagtaacatatacttaaagtaagcacacaggggctacagacgctattttttggttcaacatgacctgagcagttaattatttgtaaagggaagaagcaagaataggctcagggagggagacagagaaagactgggtagggcggggagggagggagagtttcacctgtatctaaaacagatcagaagcaatttcttcctccaactcctcacttgtctatttctactaataaagagcaaaaccagacaaaatagattatt

SEQ ID NO: 80814 - DNA, 847 bp, Homo Sapiens
gcggccgcatccaggcgatccgcgaagccctggaactggccggccacgtcaatgtgcgcatcatggcctactcggccaagtacgccagcgcctattacggcccgttccgcgatgcggtgggttcggcgttgaacctgggcacggccaacaaggcctcgtaccagatggacccggccaacagccatgaagcgctgcacgaagtggcggccgatctggccgaaggcgccgacatggtgatggtcaagcccgggatgccttacctggacatcctttatcgggtcaaagaggaattcaaggtgccgacctttgtctatcaggtcagcggtgaatacgccatgcacatggccgcgatccagaatggttggttgagtgaaggggtgatcctcgaatccctgactgcctttaaacgtgcgggtgctgatggcattctgacctacttcgccgcccgcgctgcccaattgcttagagagcaacaatagccctcacaggaacactcgatgaataccgaaggactctccgaagttgctgtaaaagacgctcacccgggtggttgaacaaatcgccgaaaccccaccggagctggagccggctgcgcctgctgtggtggctgaagcgcccgcgccggccccggtggcagcggtgaccaacctggatgacagcagcctgtacatccatccgtgagctgtcacaactgcaattcaacatccgcgtgctggagcaggcgctggatgagtcctacccactgctggagcggcttaattcctgctgatcttctccagcacctggacgagttcttcgagatccgcgttgccggcctcaaaaagcaaatcacctttgcccgcgaaca

SEQ ID NO: 80815 - DNA, 209 bp, Homo Sapiens
gtcaatgaatgcaggagtaaatgaattaacacgtgaagcaattttagaaaagcatgttaacgtaacagactagcaagccacacttcctaggcccacacccccagctcgggagggagactccatcctactccaccccacgctcccgctgtccgagtcgcccccagcacctggcgccggcaatccccggctgatgcagccaaaagcggccc

SEQ ID NO: 80816 - DNA, 1414 bp, Homo Sapiens
  misc_feature (859)..(859): n is a, c, g, or t
  misc_feature (1047)..(1047): n is a, c, g, or t
  misc_feature (1058)..(1058): n is a, c, g, or t
ccattcactttgtacttatttttttcaaaataaatgcaaaatttaatgaaaaaaataagtacaaagtgaatggaaaagaacaaaaacagtcaatgaatgcaggagtaaatgaattaacacgtgaagcaattttagaaaagcatgttaacgtaacagactagcaagccacacttcctcaggcctcgtatccatgagccccacttaacagggagcccacatttacacatacacaaacatatgcagtcagtaatgcacaattacaaaccacctagatcagggtacccacaactagaaagaacatatttccacatcggcctgggacaggtctggtttatgccttttgatctggtgtaattaatagcatcccctttctctctcaatagtcccaatttgggcaacgaattatatggtgattcttctacctcaaacaaacatggtttatgataaagacatgatagtaaatgccaacatgatcctgtaagacagccctaataaagccaacaaatgacaatgagaaaaagaggggtaaatgagactctgcagacagggtcacattctatgggggctaacttactaaacagtggcaagttttaagctcactttatgcaccaaggtttaatttggtctcagctaaagaagacaaaattccaaacacaaacagcaggggagaggtgcagtgaggcttgctggagggacctgtggaggcagctcagaccagaaaacacaagtctgtcaagtgtcctgaagatcctgggaaggcttaggcccgcaggcagccagccacgagtatggcctttcagtatgcctggggtgcgacccgcaggccacaatggacgaatggccaagtctgcatactccnagagtccgtaggttggcccatgaaccaggaattctcatttcttatgtatccaatgaacctgctgggtcaccaggcctcatcttcataaatatgttagctgagagaggctatcttaaaggtcatgctctgacccaactgcatacactttcagacataaaattaccctagagatgagcccattggcagcnccacatttgcncctggatatgccagtttacctttttagataccctcactgaagcatcagttttcaattgcaaccagatacggacttattgtgacgctaaggaagcttaatcttcagggccccttccaagaccctgtacctaattttatattaacattgtttttcttaaagaagtctttctaaataattcaagctttcagccccataaaatttagatccacccctggtcatagcataaaaagttgaattgtcactagaacctgctctgctgctggagcatggagcccctcacaggtaaaggctgcctcttcctggccgtgcctcagtggacacacacagctcacccctccacttctccctgagcagcc

SEQ ID NO: 80817 - DNA, 674 bp, Homo Sapiens
acgagggcgatgggcattgcgctggtgtcgggcatcggcctgatgtatctgatcctcgtcatccagttcaactccttcacggcgccgctgggcgtcatgctgtcgcagccgctgtcgctgatcggcgtcgtcgtcgcgctgctgttgaccaagggcacgctgaacctgatgagcttcatcggcatcatcatgctggccggccttgtggccaagaacgccatcctgctgctggacgccgcgcgccaggaggaggccaacggcgtgccgcgcgaggaggcgctgatgcatgcgggccgcaagcgcttccggcccatcctgatgacgaccttcgcgctgatcgccggcatgctgccggtggccatcggcatcggcgagggcggcgagttctaccgcccgatggccgtggccatcatcggcggcacgatcacgtcgaccttcctgacgctgctgatggtgcccagcttctacgacagcatcgagatcatgcgcgaccacctgggccagaagttccagcgccgcgccgcgcgctggggctcgctggtgtcgggcgtgctgtgcttcctggaggtgctggccttcctgacgctgctgcgcttcctgttccgcctgctgcgcgcgctgctgcgctggatcggccgccgtggcggccgggtgcaggtcggcggggcggccgc

SEQ ID NO: 80818 - DNA, 737 bp, Homo Sapiens
  misc_feature (63)..(63): n is a, c, g, or t
cgaggtgcctcatagaacaccatggggttgatacagacaatacgtgaccctcaggacctaccnagaggacagtgcctaggaacatagtacatggagccaaggatgtttataacccactgtggttccacaagaactttaggtgacttgaaaaccttatgatccattgacatgaaagcactaacccattcatttgtgtacatgatcaacacatgtcagttccttgaggatggggactcgccttgttcactgctgtatccccagggcttagaatagtacctggtctataatagcaagctcccagtaaatatctgctgtttaatgaagtaatggtaattttgaaacactttggaaaatacctttcttgtgctttagtttttgcattttgtaaacctctgtacattaataaaaatttatgattaataatgtcttgtagaacacatttgcctcagaaactttgattatttgatgtaattcttctgaattcaagtgtgttaattaaagcagaagaaaaagcttttcttaattatttagaaaactagtgataacattcggatgttctcttggctaaccaagacttctttctagtatttatttttgaactaaatgctttaagcaaataaagcactctgggatatatttgaatgttacctaacaaccactggcacctagaataatttctcattttatagacttttcactttggacacttgaatttatctaataaaactctgaaggat

SEQ ID NO: 80819 - DNA, 1134 bp, Homo Sapiens
  misc_feature (1018)..(1018): n is a, c, g, or t
gcggccgctccctggggatcacatggtacctgctccagtgccgcgtgcggcccgggaaccctgggctgctggcgcctgcgcagagccctctgtcccagggaaaggctcgggcaaaaggcggctgagattggcagagtgaaatattactgccgagggaacgtagcagggcacacgtctcgcctctttgcgactcggtgccccgtttctccccatcacctacttacttcctggttgcaacctctcttcctctgggacttttgcaccgggagctccagattcgccaccccgcagcgctgcggagccggcaggcagaggcaccccgtacactgcagagacccgaccctccttgctaccttctagccagaactactgcaggctgattccccctacacactctctctgctcttcccatgcaaagcagaactccgttgcctcaacgtccaacccttctgcagggctgcagtccggccaccccaagaccttgctgcagggtgcttcggatcctgatcgtgagtcgcggggtccactccccgcccttagccagtgcccagggggcaacagcggcgatcgcaacctctagtttgagtcaaggtccagtttgaatgaccgctctcagctggtgaagacatgacgaccctggactccaacaacaacacaggtggcgtcatcacctacattggctccagtggctcctccccaagccgcaccagccctgaatccctctatagtgacaactccaatggcagcttccagtccctgacccaaggctgtcccacctacttcccaccatcccccactggctccctcacccaagacccggctcgctcctttgggagcattccacccagcctgagtgatgacggctccccttcttcctcatcttcctcgtcgtcatcctcctcctccttctataaggggagcccccctgggagtctaccaggggccatgggaggacagcagccgagtggccccccagcaaggagcaccagcaacatcaccaagcttgaatggcagggtngttactggggaaagaggtgtgggggacgttggcctcggggcttccacctaagggggggcccccccttggcaagggccttgcaaggggcctttttttccgtgcgggaagcattccaa

SEQ ID NO: 80820 - DNA, 426 bp, Homo Sapiens
tcgacattcgtccggtcgagctcctcgaaatcggtggtgtagaagcggggcgacaggaaggtcgtctcctgcgcggccctggtcgattcgttgaccggcgtcttcgggaccggctgtccgatggtcggggtgacgggcgcgttcacagcttcctcctctcggaaaagctgacctcgtagagttcggtcagctcgagatgggcgatgagcttggtccaggcccgctccagcgctccggcccgggtgattgtggcggtgcggcgcaccgtcagccgctcgccatagggcaccgaggtcggcgcgtcgtgaacctggacctcgtcgccgggctcgatctcgaagccggcatcgaggatcacgtgcgcgtgcaggctctcgggcgtctgctcgatctccaccgtgcagggcacggtgacggtgcggccgc

SEQ ID NO: 80821 - DNA, 1003 bp, Homo Sapiens
  misc_feature (280)..(280): n is a, c, g, or t
  misc_feature (774)..(790): n is a, c, g, or t
aaagtcactgaagagcttcacaattctagtgatacaatgttgactatatattgtactttatattaaatataggtaatacagaattagatcgtttggataggttttgagttagtgcagaactcaagaagaaaaattaggaaatattctgaaggccagaactctggaagaacttagaaagtttgggaataaattaaacttatgtagatttaaaattaaaaggggtttatttcccaaaccccttgagtcttttcttttccttggtatttatggaattcttacnaaagaaaaatttgcagaagtactattttcgtgaataaaacatatgtatcattctactaccattagcaaataacttacgttgtagttaatataattgttaaaaggtttagctctgttacaaataaaaacataaagatctggcaaccagactttcatgatgttacattaccatgacaagaaactctgggcagtaaaagttggacccacatggagtacataagcatctgatacctggagatgtatttaaaatttttcaagttatcttccatgatttaggaaccatttagagacatgaagtctttatgggttgggggaaaggttgataattagtttgattaaaggtaatgattaatatccctttttgttcatacttccttctgaggctgttttcccctaaacagtatcttaatctgttacatgtaattgaaatattatttgaagcagtgagttattgtaacctcagattagttacattgatcaaaacattgatttatnnnnnnnnnnnnnnnnntacatatgtagcttttatatttagtctggttacattagtgaccatggtatttactttcttcttaaggagcctttgaatttcttgtccagataaaaatccgaatatttctcttagactcatacataaagggacacagttatcgttaggtagcatatgttttactatcggtttgtcaaaaaagttaataaaaagtgcttattgatttatttctct

SEQ ID NO: 80822 - DNA, 704 bp, Homo Sapiens
  misc_feature (55)..(55): n is a, c, g, or t
acattccatgttcatggatcagatgcttgtatcatcaaagtagcagtactccccnaaaattatctatagatttattgcaatctttaggaatttcctatccaggttgaaatgtgctaggcagagggtgctgatatgagcagttctgaaccaaactttggacactgagtttctaatgagcttctctgggcagaaacatcacatacatattgctgcaagtgtactctgtgactccttatgggaaggaaagagcataaggaagcctgcacatagattcctctggactgtatttttccttaatgatccacctatgtactgttattttattgttaaaagtcttacctgggagtacaactatatgctgtgcgctttaagtcctagcatatctccaaatttaggggtaaccttggggaccccaatccatttaccataatttacaatgttaaactttaagccagcatttaccaagcttatttgtccaaggaatcctcttttcccaaagttaaacctattgtcatcccacaagtttgctttgagtaatgtcaattaaactatttttctctgcattcactaaaccccaaatatttcctccaaagaatgctttgtcaccagaaaacagataagatgacaaagagaaatgttaaacccgataccctccttccaatgcaaagcaaagcacttgaaaacctgtcctgtcataaccctcg

SEQ ID NO: 80823 - DNA, 1056 bp, Homo Sapiens
  misc_feature (998)..(1015): n is a, c, g, or t
tctccacgctgcaggctacccgtggtacaagggacgagagactggagcgctcagtccgccgggccgggcctatggattgggacgctgcgcggggaaagtgcttcgacgctgtgacgcgtgagcggcgatgtgcatcatgcgccgtgtgtgaaacgcgagccgacgcagctctggagagctgatatgcccggtagtgacgccgcggagctgagctcgcccctgcgaggaccccgccggatctgtgaaaagatgcctccgccgcagagcccgcgcccgccgagcgggttcttggagatgtcccgggggcctgcacgcccgtcgtacccacccgcatccccgcgatagtcagcctgagccgcggcccagtctcgccgctcgtgcgcttccagctgcccaatgtgctgttcgcctacgcgcatactctcgccctgtatcacggcggtgacgacgcgctgctctctgacttctgtgccacactgctcggcgtttccggagccctgggtgcccagcaagtcttcgcctctgcggaagaagccctgcaggcggcagcccacgtgctggaagcaggcgagcacccgccggggcccctgggcacacgaggggctatgcacgaggtcgcccgcatcctgctgggcgagggcccgaccaaccagaaaggctacacgctggcagcactgggggacctggcacagaccctgggccgtgcccggaaacaggccgtggctagagaagagcgagatcatctttaccgggcccggaaaaagtgccagttcctcctggcctggaccaacgaaaatgaggcggccctcacacccctggctctagactgcgccagggctcaccaagcccatgctgtggtagccgaggaggtggccgccctcactggggagctggagcggctttggggaggccccgtgccacctgccccaagaactctcattgaggagctccctagctgaacgggttaccctggtcattaataaagctgtgactggtcnnnnnnnnnnnnnnnnnncctgagcaggcggccgcaagcttattccctcttagtgaggg

SEQ ID NO: 80824 - DNA, 917 bp, Homo Sapiens
  misc_feature (93)..(93): n is a, c, g, or t
  misc_feature (118)..(118): n is a, c, g, or t
agggaaaagacttcgtccctgacatcgtcaccatgggcaagtccattggcaacggccaccctgttgcctgcgtggccgcaacccagcctgtgngaggggcatttgaagccaccgggtntgagtacttcaacacgtttgggggcagcccagtgtcctgcgctgtggggctggccgtcctgaatgtcttggagaaggagcagctccaggatcatgccaccagtgtaggcagcttcctgatgcagctcctcgggcagcaaaaaatcaaacatcccatcgtcggggatgtcaggggtgttgggctcttcattggtgtggatctgatcaaagatgaggccacaaggacaccagcaactgaagaggctgcctacttggtatcaaggctgaaggagaactacgttttgctgagcactgatggccctgggaggaaaatcctgaagtttaagcccccaatgtgcttaagcctggacaatgcacggcaggtggtggcaaagctggatgccattctgactgacatggaagagaaggtgagaagttgtgaaacgctgaggctccagccctaagccagccctgctctgcctaagtgtactccagaagaaactcatctcatccaaatacacgctattgagaaggcgagcctgacctccctcttacagataaagtcagctttcagaggctcagggtgggggggcctgcccgaggccataatgctacccaccccctcctcctaaccactggtctgttggaataacccagatgtctgcatcccctcaagtcagtcaatttcctttctgtccactgggggtggaatggggtagggtgggatactttaaagtgctcctgcttaaataaattagaccagaccagtgtatttctaaagaaaatcctgacatgcacacccattaaaaatagtacatttt

SEQ ID NO: 80825 - DNA, 1553 bp, Homo Sapiens
  misc_feature (162)..(162): n is a, c, g, or t
  misc_feature (1177)..(1223): n is a, c, g, or t
  misc_feature (1417)..(1427): n is a, c, g, or t
tgatgcagctcctcgggcagcaaaaaatcaaacatcccatcgtcggagatgtcaggggtgttgggctcttcattggtgtggatctgatcaaagatgaggccacaaggacaccagcaactgaagaggctgcctacttggtatcaagacatggaagagaaggtngagaagttgtgaaaaacgctgaggctccagccctaagccagccctgctctgcctaagtgtactccagaagaaactcatctcatccaaatacacgctattgagaaggcgagcctgacctccctcttacagataaagtcagctttcagaggctcagggtgggggggcctgcccgaggccataatgctacccaccccctcctcctaaccactggtctgttggaataacccagatgtctgcatcccctcaagtcagtcaatttcctttctgtccactgggggtggaatggggtagggtgggatactttaaagtgctcctgcttaaataaattagaccagaccagtgtatttctaaagaaaatcctgacatgcacacccattaaaaatagtacattttacagtgtcccagtcatacttttaattggcaaattaaaataatgcaatctgatatattctatcctactaaattaaaaatactgaatataaccaactaaatatacttactcctaagactcactaccagtagtttcacttaaactctgccttagaggctcttcccacccatttcccattatggcacatagagaaaaaggcctctatcactgtccactggagtaataaccactgcttcccctaactgcctcaaagactgtcattttatagaaaatttaagactatcctaatccactctttccaaactcccagccaggatagagacttccaggagttccacctgtcccaccttatctggctgccaactcctgctcagaaacagaacctgccacaccctgccactgcaggccgcaccctcaactcccaactgccaacttgaagcctgaactaccctttccctgaccagagttcaggaggggaagagctacacctccctgcacatgaatccactcatttgaaagcacaactgaccctggatttaagctggccaggaccctgggagatcttttggaaggatttttgccctgggttaagggttaacttaaaagaggtgcccaaaagaccannnnnnnnnnnnnnnnnnnnnnnnnnnnnnnnnnnnnnnnnnnnnnnaaaagatggctttaaccccaggcaacatggtgaaaccaggcttttaaaaaaacatatgagcccaggcatggggggtacattgccctgtggggtcccaacctacttcaaaaaggcttgaaaatgggtagggattccgggccccccccaatgaaggtccaagggttgccaagggaaccacttaattgtggttttannnnnnnnnnnaaccctgggaacaacaaagcaaaaaattctgttcttcaaagccgacggagaccaacaagaaaaagacggtggctctccaaaggggtaggggaaatggggcaaaaaacactttggctttgataaaaa

SEQ ID NO: 80826 - DNA, 935 bp, Homo Sapiens
ggtaccggtccggaattcccgggatatcgtcgaccccgcgtccggctaaagcaccagtgcatgtgcgggaacacacacgtgcaccctgagcatgctggccggatccagagcatctggtcccggctgcaggagacaggcctgcttagcaagtgcgagcggatccgaggtcgcaaagccacgctagatgagatccagacagtgcactctgaataccacaccctgctctatgggaccagtcccctcaaccggcagaagctagacagcaagaagttgctcggccccatcagccagaagatgtatgctgtgctgccttgtgggggcatcggggtggacagtgacaccgtgtggaatgagatgcactcctccagtgctgtgcgcatggcagtgggctgcctgctggagctggccttcaaggtggctgcaggagagctcaagaatggatttgccatcatccggcccccaggacaccacgccgaggaatccacagccatgggattctgcttcttcaactctgtagccatcaccgcaaaactcctacagcagaagttgaacgtgggcaaggtcctcatcgtggactgggacattcaccatggcaatggcacccagcaggcgttctacaatgacccctctgtgctctacatctctctgcatcgctatgacaacgggaacttctttccaggctctggggctcctgaagaggttggtggaggaccaggcgtgggggacaatgtgaacgtggcatggacaagaggtgtgggacccccccattggagacggggaagtacctttacagcccttcccggacagggggggaatggcccatttgcccccaggaagttcctcaacctgggagggtgggtccttaagtcctcccccccgggggatttgaaatggccggtgtggaagggggacacttccgtgggccctccctcctc

SEQ ID NO: 80827 - DNA, 912 bp, Homo Sapiens
aacggcagtagagacctgggtgtcgaatcggcacgaggggaggattgatcaggttatggacgaggagggcgagagtggtgctgaggaggggcccgacttggaggagcctggtgctggatacaataaaactgttctcagatgcccagccgctgcagcctttgcaggtgtaccagtgcgcccctcagcctggccactgtgccccaccaggccctgggccgtacccagtcctcccctgctgcccctgggggcatgaagagccccccagaccagcccgtcaagcacctcttcaccacaggtgtggtctacgacacgttcatgctaaagcaccagtgcatgtgcgggaacacacacgtgcaccctgagcatgctggccggatccagagcatctggtcccggctgcaggagacaggcctgcttagcaagtgcgagcggatccgaggtcgcaaagccacgctagatgagatccagacagtgcactctgaataccacaccctgctctatgggaccagtcccctcaaccggcagaagctagacagcaagaagtttgctcggccccatcagccagaagatgtatgctgtgctgccttgtgggggcatcggggtggacagtgacaccgtgtggaatgagatgcactcctccagtgctgtgcgcatggcagtgggctgcctgctggagctggccttcaacgtggctgcaggagagctcaagaatggattcgccatcatccggccccaggacaccacgccgaggaatccacaacatgggattctgcttcttcaactctgtagcatcacgaaaatctacagcagagttgacgtgggcaagtctcatcgtggctgggccttcccctgcatggccagggcgactacatgacctcgtgtctaatcttcgctgttgaagggaatcttcag

SEQ ID NO: 80828 - DNA, 780 bp, Homo Sapiens
  misc_feature (47)..(47): n is a, c, g, or t
  misc_feature (73)..(73): n is a, c, g, or t
  misc_feature (85)..(85): n is a, c, g, or t
  misc_feature (129)..(129): n is a, c, g, or t
  misc_feature (164)..(164): n is a, c, g, or t
gatgtgtagctggaacccatatgaccacatcccagtgagtggatcanggagatgaccagttcaggaggctgtntgagaagtgcanggggaaggattctgagattactgccaatgcactcaagatacttntgaatgagggttttccaagagaacagacataaatntcgatggattcaacatcaacacttgcagggaaatgatcagtctgttggatagcaatggaacgggcactttgggggcggtggaattcaagacgctctggctgaagattcagaagtatctggagatctattgggaaactgattataaccactcgggcaccatcgatgcccacgagatgaggacagccctcaggaaggcaggtttcaccctcaacagccaggtgcagcagaccattgccctgcggtatgcgtgcagcaagcttggcatcaactttgacagcttcgtggcttgtatgatccgcctggagaccctcttcaaactattcagccttctggacgaagacaaggatggcatggttcagctctctctggccgagtggctgtgctgcgtgttggtctgacccggggtttcggacatcagtgacactccctgccccactgcttgcttcttgtcaccccttctctacaattttgtgaacatttatgctccagtggcattcactggttgttcatacctttcttgccctgggtctctttcagcagcactgagctatgagctatgtaagccgacccggtgggcccagtggagggaaagcaatcaattaaagttgtgagccag

SEQ ID NO: 80829 - DNA, 794 bp, Homo Sapiens
  misc_feature (32)..(33): n is a, c, g, or t
  misc_feature (130)..(130): n is a, c, g, or t
attccattcatattcataagagcatattatcnntgcattgaaaatgcattacttttgcacattgatattaactgttgtccaacaaataagtatcggagtacgtgagaatattcccagcccagtgatgatntggttcttgaggctgatgtgagaaagctgatgtaaaaaatgtatgcatattggcttaccttactcaatttaaagtcaaaagccaacagccaggagcagctcaggtacttcagatgtgcttaatatggagtgaaaactggaccagaggtggaaagatgtatttgccccagttcacttcaaagcagcaaacgttgtttaagcattttagtttgaaccaggcattgtgttaggaatccagggataaagatgaatgaaatgtatttctgttcttcaggagttcacattctagcatatgccttttttcccccagtcatgcactctttttagcagtcttatatgtactagaaaagattttttaaagtttatttaaagctgtgtagatgaaggcttgatctaaaatagtataaggtctccagcttcagtaaaagtttttagtgtttacttaaattagtaatttctcactttctgtctggttaaaatgtcttaaaaagtagaattttcttctttaatccgtttagtagttacctcccttttacttttcaaattcacaaaattacatttctcataaattgtatagtatttaacttataatagttaatatttgtctttttaagatgactgtacatgtaagaaaaaagcttattaaaaacttgatcaaagaataa

SEQ ID NO: 80830 - DNA, 470 bp, Homo Sapiens
ggaacgagggcgtgccagggcttcgatttcccggcgttgggtcagatcaaggtagttggccatcggtagctcagagcaggtgtttcctgctctgtgcagtgaggcgcaaaaatcttgcagatcgtttggttctaagcttgtaactcagtgaccgaacaggccggtttcagtctttttggcttttttgtcggcgcgtttttcatcggcggtctttgccggctttttcttcgcggctttctttgaatccatacctttggccatgatgcatgctccacgtgaaggggatgtaacactgggtataccacctattgcccggcagaaggcgcttataatcggcggcccttgattacgttgctcaaacaccatgcccgaactgcacatccaactgctggcagagccactgtggccgctgctgaacaagttttaccgccgccataattcgccgatgaaggcgctcaaagggcggccgc

SEQ ID NO: 80831 - DNA, 1060 bp, Homo Sapiens
  misc_feature (893)..(906): n is a, c, g, or t
agcatggactataacagtggtacaaaaagcaggctggtaccggtccggattcccgggataatcgtcgacccacgcgtccgaaatctctgaaaaatggagaaaccctctgactagtccatgtcaaattttactaaaagtcttttgtttagatttattttcctgcagcatcttctgcaaaatgtactatatagtcagcttgctttgaggctagtaaaaagatatttttctaaacagattggagttggcatataaacaaatacgttttctcactaatgacagtccatgattcggaaattttaagcccatgaatcagccgcggtcttaccacggtgatgcctgtgtgccgagagatgggactgtgcggccagatatgcacagataaatatttggcttgtgtattccatataaaattgcagtgcatattatacatccctgtgagccagatgctgaatagatattttcctattatttcagtcctttataaaaggaaaaataaaccagtttttaaatgtatgtatataattctcccccatttacaatccttcatgtattacatagaaggattgcttttttaaaaatatactgcgggttggaaagggatatttaatctttgagaaactattttagaaaatatgtttgtagaacaattatttttgaaaaagatttaaagcaataacaagaaggaaggcgagaggagcagaacattttggtctagggtggtttctttttaaaccattttttcttgttaatttacagttaaacctaggggacaatccggattggccctcccccttttgtaaataacccaggaaatgtaataaattcattatcttagggtgatctgccctgccaatcagactttggggagatggcgatttgattacagacgttcnnnnnnnnnnnnnncttgcagtttgttttggagataatacagtttcctgctatctgccgctcctatctagaggcaacacttaagcagtaattgctgttgcttgttgtcaaaatttgatcattgttaaaggattgctgcaaataaatacactttaatttcagtcaaaaa

SEQ ID NO: 80832 - DNA, 482 bp, Homo Sapiens
ttttataggtctcattcaaactgaatggtaatttattaataaacaaacaatgaatatgttcaacaaaaagaaagaaaagaggatagaataagattaatacagtttccctttttataatgagaaaaaaagcacaatttaaagtttcaggcaatttaacgtcaggttttgggaacactttctggcgtttggtccacgacatccaactacaaattaaaaataaattactatgttgcaatttacattttaaaacaagtccatgaataaaaagaaagcgactttcataaacggggactttccccctcccttcaacataggataaaataatatcttacaggtgagaggcaaggaagaaggcaagagaggggagacgggaggaggggaaagcaggtctctgaaaagcaagaagaaacttacgtgttatctggagtaacactgtcctttaataaaccaagattttgctgactctgtataaaacagtttac

SEQ ID NO: 80833 - DNA, 599 bp, Homo Sapiens
tcttttctagtcagttctaagactgctagagagagataccaggcccttagccttgctctcagtagcgtcagccccagttctgagcctccccacattacacttaacaagcagtaaaggagtgagcactttgggtccttagactcatgtctggggaggaagagcaagtagaaaagtggcattttcttgattggaaagggggaaggatcttattgcacttgggctgttcagaatgtagaaaggacatatttgaggaagtatctatttgagcactgatttactctgtaaaaagcaaaatctctctgtcctaaactaatggaagcgattctcccatgctcatgtgtaatggttttaacgttactcactggagagattggactttctggagttatttaaccactatgttcagtattttaggactttatgataatttaatataaatttagcttttcttaatcaccttgcctggcttggagtcatgactaatcctgcacctgctctgtctggcagacccatgctgtggaaaacctgcttacagacatcacttttaagtcctttgtggatgtgggcacagtgaagagcaataaagagtgtgaggttcc

SEQ ID NO: 80834 - DNA, 365 bp, Homo Sapiens
ggcacgagggcggcgtatttgatgtcttgcaggttgcggctgttcaccgccgtgaccttgagttgccagtcgtcgttgaagtggtgggtgaggtcggcaaacagcgtagtgcgttggctctgccagtcgttccaggcctggcccaggcaggtggaacggctcaggccgatgctcttgccgtcgctgtagcgcggcacaccgccccagcagggcgttgcatcgacatcttcgtagctggcaccgatgcccagggtggtgtcgggcgagaggtcaacatccagtgcgaggtagacagcttggtcctggcgcttggagacgtccatgtacgagccacggttctgttggctgaccaacggcgcggccgc

SEQ ID NO: 80835 - DNA, 717 bp, Homo Sapiens
  misc_feature (674)..(674): n is a, c, g, or t
agcaattgtaatttatataatactttaccattcataaagcatggttttctcttgattcctatcactgaaatttcatcaattcaggtgctctaatttcccaaacatataaaactctcaaaagcttcccaaaattgattataacataaacttatttatgtcccaagatcattaatggaactagactgaaaccaagctacagtctgtaataaggtaatacagttactgtccttgcccagtagagaagtatggtatttgcatagcattttcaaagttagtcttttctcccttaacaaggatccaactgtataaataattaaatctgaaatgcagtcagtctgaagaacattatctggccaacttaaagaagtgtccctaccaagatagaagagcaaagaggaaagagtcccccactgcaaggagtactgcaataatacagggaagtagctacatttcatcttcattctagaaatagggagacttggcaaaaggacagacaaaactctagacactataaatttggttctggaagggattaccatccatttattgcattttttcaagcatcaagttccctagaatattaattgccttttaaccattattcatcaagacagactgaagatggcaaggatcctgatatcaccagaagacagcctcacaagtgccttcttatncccctgaaaacttatggtctacagctaaacagtttggtcctcg

SEQ ID NO: 80836 - DNA, 941 bp, Homo Sapiens
gcggccgcctgctgcccctggcgcaccagatcaaccaaagcctggcgttgtgcggcttcagcctgtgcaagggcaatatcatggccggcaaccccgagctgtgcctgtcacgggccgaatgggcgcggcgctttggtgcctttatccgcgaagccacgccggagaacctgctcgggtcgagcatctatttcgatatgcgcgtggtgtggggtgacgagcgcggttgcgagcaactgcgccagggcattctggatcaggtggccgataaccgcttattccaacgcatgctggccgagaacgccttgcgccagcgcccgccggtcgggcgtttccgcgactttgtgctgacgcgcaaaggcgccgaaaaggccacgctcgacctcaaggtgcagggccttacgccctttgtagatggcgcgcgcctgttggccctggccaacggtatccacgccaacaataccttggagcgcctgcgccaactggtggtcaaggaggtcattgagccgctggatggcgctgcctatgaggaggcctatcactttatccagcaaacccgcatgcagcagcatcagctgcaaacccgcgagaacctgccgtattccaaccgcgtcgaccccgacagcctcaaccacctggaccggcgcatcctgcgtgaatccctgcgccaggcccaacgcctgcaaagcagcctgacgctacggtatcagctgtgagcctgttcagttggctgcgcaagaacaagcccgggctcgacgcggctcagcagcagcggctggcacaattgcccaagcccgcattgctgggcgaagggtcgttacgcagccaacgttgggtggtggtcgacctggaaaccagcggcctgaacctcaaccgcgaccaagtgctgtccatcggcgcggtggtgatcgaggatggcgcggtggatttttcgcagatgttcg

SEQ ID NO: 80837 - DNA, 784 bp, Homo Sapiens
  misc_feature (35)..(35): n is a, c, g, or t
tgaccagctagctaggagagctgagacgccagtcntcaaatggcgttcttaccaatagtctatttccagactactggaaacgttggggttcttcctccagtgacagcagcctcagtagctttcctgggctccaggcggctggctgcacaccctgcctgccatcacccttgcccctgcttgtcctggaccacttttaaaggggaagtcccttatttggaagagagaaaggatgtgtgtagcacacactcatcatggattgctcagagttcctttagggcagagctgagggcctgggatccaggaaccagtgggattggatgggagaagaaggaagggggtggcccgtcacccccgcaagacttgcatccaggtagcctaaggactcctggtcactgggtagggtggctgctgagatgcaggtcggaagaggcaggggaaggctccaggcctaacttggagcatgtcactggccatgggggtgaggggacagactctgctctcactggctggcagccccaggagcctgttcccttgcctctcctggatgggttgtcagccctgtgtttcactgtgaccaattcattataacatttggatattactgaaaatgtaaggaagcaggaaaaattaactactttcattcagagatagcctctatcaatagtttgacatttttccctcttttacattgagatcataccctaggtactgtttagtatgcaatattttcattttcgcagtataataattgcacctgttaaataaagttttgtaaacatttaaa

SEQ ID NO: 80838 - DNA, 922 bp, Homo Sapiens
  misc_feature (12)..(12): n is a, c, g, or t
  misc_feature (23)..(23): n is a, c, g, or t
  misc_feature (122)..(122): n is a, c, g, or t
gcggccgccccnggtttgcaccncgagaaaggcgctccagggtttcgttgatagcattcagtccaccggccaccttgtgcgccagggcgttcagggctgggatcccgagcacgcagttcacnggatgctctcggcgccggcgttcagctcgttcaccgcccgcccatggaccaggtagtcctgcacctgctgcaaatggcgccgaatctccaggtggtagaagttcttcgccgactcgacatagagcggcaaactgaagccttggccgttggccgcccgattgcggtattccagattcagtcgctcggcgaaaaaatcctgccgctcttgcttcgcaatggctgcgggcaggcccgcgacttcctggcgtctcatcatctgttccagctgctcccggtacaggtaaatcacgtcggcagcgatgctgtcttggatccgcaccaacacgttgcggtccagcccattcggtacggctgcgacagcacgcaactcgtcaatcaccagatctctcacgccgatcatcatctctgccccttatgcggctacttgttcggtgtacttgcaacccgaccggaagccctcgcagccgataaacggcccattgcctcccattcgtttcatcaattggctgccgcattgcggacaggccttgccgaccggctccggtgcgacacgagggcccgagcttccacctttgcctgcccccgctttcgccggccccgtgtaggggatattcaggggtttggagcggatctccgcgatcaccttggtaatccacgagcgctgcatcgcctcaaatcgatcgatggtgcttcctgcccgcctcgatctcgcgcatcgccgtttcccacaacgcggtcatgtccggtttcgcgatctcggcaggcagcgcctggatcagcgccctgccggcttgagtcga

SEQ ID NO: 80839 - DNA, 886 bp, Homo Sapiens
gcggccgcggctgtatgccttgaaatatcttttttaggatctgttaggaataagattgatattgtattgtgtgtaacctgcacaatgtggaaagctgatatacctgtgcaaaatctttgcctctgtgctgtcagtgtgatgtgctttctgcatggttatatactactagtgattttatcaaaacttctaaaatttaaattacgtggtaaaagatctgtaaaaggctgcataaatgttagttggcacataaagacaattgtagaagttgaaaaatgattgctatatttcaatgtttattcccactcaacatactgccttctaagcttccctttttttgttcaaagcatgatcttaaagatatgtttaagttaatggatgtaatgcagggttcctacactgtattttggcgcatgttggtggccctctgtgccctagatatatgcacacagggtgcaagttaaaagctacagagtgaaagttggtttggatcctcttcatttcatttgtttagcttttctgttatttttctctacttacatgtattcctgtgaataaatccttgttaagttaaccctttacttttccttccatgtgtattttcttatatactgtgaatgtgaaaacctaactggtacacttgatcttgtgttcatatgaaagtgcaagtctttattaatttggattgcctgaacagtgtatcccatgatgatgaaggaaaatggagagatttttctttttaactctgctggtcagagatgaagccacgcctttccatttttcaatgctgcatatttaatctgcaacaaaaatgttaagccataacagcctttttatattttagtttgtcacctttgcattgcagaataaatactgaataaccattttt

SEQ ID NO: 80840 - DNA, 569 bp, Homo Sapiens
  misc_feature (264)..(278): n is a, c, g, or t
ggcacgaggcagaaatctttcagaacaaaagctatttctaacacgcaagaaaacatcttaagaagtcatcagatatttttccttggctttaaacaagactataaagccagtgtgcttgcacacacctgtagtttcagctatttgggaggcagaggtgggaggattgcttgagcccaggagttctagacaggtacgcggtgcatgcctgtgaatagcttctgcactccagcctgagcaagaaagcaagaccctgtctccggaagnnnnnnnnnnnnnnnttagttaattctagtatctaaacatagcaatttacacctttaataatcaggctataggccaatgctgtggctcacgcgtgtattcccagcactttgggaggcaggaggatcgcttgagctcaggaattggagacaagcctacgtaacatagtgaaacctctgtctgtacaaataataaaagaattttccaggcatggtggcgtgcacccccagtgccagctatttgggaggctgaggtaggaggaatgcttgaagccaaggagttgaagaaaagcctacagccgcggccgc

SEQ ID NO: 80841 - DNA, 1347 bp, Homo Sapiens
ctggctctcaggcctctgcaggcacagaaggaacctcgggaagcggctcctccaccctactggcctgaccacccgtggtgtgcattcagcaggtgccagtttgaaagtccacatcagggtctctgggagtcagtcccccgtgtggagtcagcagaccccactgcaggacagccagccatcgctgggtggtagggtagcgacttccccgccagcttcaggccctctgagcctgtccctgctccgtttgcacacagcacccaacacgcaccggttcccatgagccctcctgccagtggcttccaagagtcccatctctgagggagaacttgctgtagtgatggctgactctactaagaacgtccatgaattctgctgagtcctgggtttccacaaagggaatgggaccccctcacattcaatgcttttgcttttgctttgttttatctgtggcttagttttctattgaaactgaacttttctcactgtgacccacaaggattgcagtgacaactgttcctaaagatttctttgaaagatgcatggaagtaccccggagcacagaccgcagcggctgatgctggctttcgggggagcaggtggctgtcgtcaggagcacatcgtctctcccaccaacgttccttggacaccgatcagctttgtggttctttgtggtgagctgctcatcagctcagcacatgtttctaacgtgtgtacagcatgccaagtttcatgcaaaaggaacagacatgagcctttttcctgtgaggccagctctctggctaagacacaatagctaagatcggtgtttattttttaaagtaggctttaaatcatgttgttacaggaaaattgaatgcatttggcaaggctgagatggggagattccttcagggcacaggaaaccgtttactgtgagaagggcatgctggcaagaaaactggacaaaagttaacttagacccacactgcagagccgaacctggattctgtccgatggccaccagtgggggcccacctggcctatcttccacttggtcattgacgcctgggctccagtgaccactcacaggcttcacaaaaacctagggaagctcccactgagtctctgagccacacgtggtgtctctgtgactttaggagttgggtgttccaaagaggacgggaacaggcaaactggctttctgttctgagcagccggtctgtggccaatgcaaacctgtctgaacttgtgtctgagtactgcaggctcttcacactcagagctcacttcctctcatgaattagacgtagcatcagcctctgagactgagcaaggccctgctgcaagagtcactgcttctgcggccgc

SEQ ID NO: 80842 - DNA, 533 bp, Homo Sapiens
gcggccgcgccaagcacatctattccatttggcgcaaaatgcagcgcaagggcctggccttcagccagatctacgacgtgcgcgccgtgcgcgtactggtgccggaaatgcgcgactgctacaccgcgctgggcatcgtgcacacgttgtggcggcacatccccaaggaattcgacgactacatcgccaaccccaaggaaaacggctatcgctcgctgcacaccgccgtgatcggtcccgagggcaaggtgctggaagtgcagatccgcacccacgccatgcacgaagaggccgagcttggagtttgcgcgcactggcgctacaagggcaccgacgtcaaggccgggtccaaccagtacgaagagaaaatctcctggttgcgccaagtgctggaatggcacgaagaactgggcgatatcggcggcctggccgagcagctgcgggtggatatcgagccggaccgggtctatatcttcacccccgacggccacgccatcgacttgcccaagggcgccacgccgctgcctcgtgcc

SEQ ID NO: 80843 - DNA, 1197 bp, Homo Sapiens
  misc_feature (446)..(507): n is a, c, g, or t
cccgtgttcgcctagtttcctggtttcgccttgtttccccgcgcggcgctcgcctcggccggcgcctagcagccgacttagaactggtgcggaccagggaatccgactgtttaattaaaacaaagcatcgcgaaggcccgcggcgggtgttgacgcgatgtgatttctgcccagtgctctgaatgtcaaagtgaagaaattcaatgaagcgcgggtaaacggcgggagtaactatgactctcttaaggtagccaaatgcctcgtcatctaattagtgacgcgcatgaatggatgaacgagattcccactgtccctacctactatccagcgaaaccacagccaagggaacgggcttggcggaatcagcggggaaagaagaccctgttgagcttgactctagtctggcacggtgaagagacatgagaggtgtagaataagtgggaggnnnnnnnnnnnnnnnnnnnnnnnnnnnnnnnnnnnnnnnnnnnnnnnnnnnnnnnnnnnnnncgcggtgaaataccactactctgatcgttttttcactgacccggtgaggcgggggggcgagccccgaggggctctcgcttctggcgccaagcgcccggccgcgcgccggccgggcgcgacccgctccggggacagtgccaggtggggagtttgactggggcggtacacctgtcaaacggtaacgcaggtgtcctaaggcgagctcagggaggacagaaacctcccgtggagcagaagggcaaaagctcgcttgatcttgattttcagtacgaatacagaccgtgaaagcggggcctcacgatccttctgaccttttgggttttaagcaggaggtgtcagaaaagttaccacagggataactggcttgtggcggccaagcgttcatagcgacgtcgctttttgatccttcgatgtcggctcttcctatcattgtgaagcagaattcaccaagcgttggattgttcacccactaatagggaacgtgagctgggtttagaccgtcgtgagacaggttagttttaccctactgatgatgtgttgttgccatggtaatcctgctcagtacgagaggaaccgcaggttcagacatttggtgtatgtgcttggctgaggagccaatggggcgaagctaccatctgtgggattatgactgaacgcctctaagtcagaatcccgcccaggcggaacgat

SEQ ID NO: 80844 - DNA, 941 bp, Homo Sapiens
tcgacgagtgtgtatggtcctcccctggggcaagaatacaatttaaacttagacattatagagaggtcattacaaacagcaggtctcaattcattaaagaggaatctcaaacgtttgatgacaggagcgcagacctccttgtaagaacggccctgttcttgatgagtcttaatgagcgaacattttgcttggtacgacaactctacaaacatccaccactgacttaggcaacgttctgtgctttacttgctcaatatcaagtgcacctgcatgaactaaagataatgccacatgacctaaatcttcatgttttaagaggcaacataacagcaagcgaccgacctcttccacgggatgctcggggggaaacatgatcggtgtggtcaaatggcacagcctacagtacctttctatttgacacaaaaagtccttcacgttgtgatcctgaatgttgttgtctgcaatggcttgcagaaatgcctgggaatggtcccccagggcccgtctgtgggagcagagtcgagatttgctggcaggtgtcctaaggcgagctcagggaggacagaaacctcccgtggagcagaagggcaaaagctcgcttgatcttgattttcagtacgaatacagaccgtgaaagcggggcctcacgatccttctgaccttttgggtttaagcaggaggtgtcagaaaagttaccacagggataactggcttgaggtgcgtgatgagcttcttggtggtacggccatccacatccagtgtgagcccattgtactggatcttgtagggtgtgggtgagttgtagttgtcagggaactcccagctgagcagaactgatgtcttcatgatcattttcaccttgaagttcttgggcgagactgccggggaggcggccgagcagggagagagcagaagagaggccccatgagtgcctggcactg

SEQ ID NO: 80845 - DNA, 889 bp, Homo Sapiens
tccccatgcgcgtcacagtatggacgtgcgcagcgaatgttacttactataagtgataccgatggcgttcctgtgaaagacatgcatcgcacagaaggtgaaaatacggtcagcctgacttcttcagagatggcatttaggccagggtaggaccacattcatgaacaggaacattgtatctccctaatctgatgggttgagagcacgatggagtaatgcgaatattaggagacggagagtctgaaaggggggggtccgggtcacaccatctccggcgttgggggcctcagtcatcttaccatcgatgtgtcagaatcctacacggcctcgagtttctaatcacggttacgggcatcattcttccggcctctgagaacactcggcagacgccggttcaagctataccaggagctaagaaaagccggcccggcaccgtgcaaatgcatttctccctgcgaggttgtgtccggccgcgggggggcatacgcctttagtgccaggtggggagtttgactggggcggtacacctgtcaaacggtaacgcaggtgtcctaaggcgagctcagggaggacagaaacctcccgtggagcagatacccttctgaccttttgggttttaagcaggaggtgtcagaaaagttaccacagtgataactggcttgtggcggccaagcgttcatagcgacgtcgctttttgatccttcgatgtcggctcttcctatcattgtgaagcagaattcaccaagcgttggattgttcacccactaatagggaacgtgagctgggtttagaccgtcgtgagacaggttagttttaccctactgatgatgtgttgttgccatggtaatcctgctcagtacgagaggaaccgcaggttcagacatttggt

SEQ ID NO: 80846 - DNA, 1921 bp, Homo Sapiens
  misc_feature (342)..(356): n is a, c, g, or t
  misc_feature (693)..(709): n is a, c, g, or t
cctcagctgcagacccaggggatcccaatcctttatctctgcctgaaaagtggctattgctgcttcgtatcctccagtgtcacaggaatgctgtgcctgagacatcccactttagtttttagttttccaaacctgtcactgactcttcattgtggtgacagatcctctggttcccccattgctcagcctcaggtttattttgagggtaactcagtgtctgactgcccaagtcttttaggggttagttggaccattgtgtaagcttgtttgtatgtctcacctctttctggttggtacttactgtctcacactgctctggcaaacttgtacacacacacacannnnnnnnnnnnnnnacctggctaaggcttttaaaattatgaagataaataatctgtttcaccagctggagtgagttgcaaggaagattgctggagctactcaatctagcgctaatggtttggattcattactgcaaacctacataatttaacatatttgtttactttagtgtgacaactgatgaaaaaaaatggagcaatctgaattgtataaaataacttaagaaggaagaaaagtgatatataaatatattttgcaaatgtcacattaatttaaaaatgagtatgattgattttatttttaaagtgggcattcttcactgtttcgagacctttgtatgtatttgtgtannnnnnnnnnnnnnnnncaggccattattataaggtgttatttggccctctaatgtagaagttatgtttaaatacaaccaatcaggccctaagtgcaaaaaagttctgtcttggtgcttatcactggtataattattattttttggttttcctaactttgctcttaggagcatgagcctctttgtagctttatggtaatgcaatatttctggtcatttactgtcaaaaaatttttttacattgtgttagtgaagactgtgttttcagggttaaatgattggtatcaatgtatatagagtaaaattattgcaaaatttaaaaatgatttttcttggcattctttttaaatactctgaaacatatatgcaaatgagaaacctttaatcatactaaagccagttatgttaagaatttttcctttggattttataattaagagttgcttataaatacttatgacattgagctcttactgttttagttgtcttaaaacaatgggacatgtcatgaactggtttctttttttaaaaaattcttgatgtgaattccactgttacctgaccatgtatattcagatgaatgtactctttcttgttccttgttaccagattaatctgagagaatgtggattcatcctgtcatctttctcatactcaaatacttaaaatggttcttttgcccaaaagtctcagagtcttcattttggtacagtggagtcacaacttgtaaggtggttaggttttaaagaccgtgcctaaggacaaaattgagcatgctcagaatggtccttgaaaatctcctaaattaccaataaatttctctttgtagtcttaaagtttaaatccctgtggagtgatatgtaggtatgaatatattatgcttatattaagtacaaaaatacaaactgcatatcaagagattcttatagcattaataatttccatgcatgtgtctttttccagtaggtatggttgaatttatgtaaatttattgctaatcccatcccttacgatctagagtataagctgcgcaagggcagaagtttttatctggtttgttcatggatgtattctaagagctgagaacagggcctggacacaataagcattcaataaatatttactgaatgaatgaactcctacctatattcctatttataatttggctccactttatcctactttagctcccattcaattcaataaaaaaaacatttttttgaacacaaa

SEQ ID NO: 80847 - DNA, 381 bp, Homo Sapiens
taatcgagctcggtccgactgtcatcaacgccgcggccgggcgcgacccgctccggggacagtgccaggtggggagtttgactggggcggtacacctgtcaaacggtaacgcaggtgtcctaaggcgagctcagggaggacagaaacctcccgtggagcagaagggcaaaagctcgcttgatcttgattttcagtacgaatacagaccgtgaaagcggggcctcacgatccttctgaccttttgggttttaagcaggaggtgtcagaaaagttaccacagggataactggcttgtggcggcgttggatgcagtcaagcaggaggtgtcagaatcccgcccaggcggcgttgggtgcagtcagctagcggcgttggatgcag

SEQ ID NO: 80848 - DNA, 317 bp, Homo Sapiens
aactctagacatcccgttagcgggattcctcggcggccgcgacgtatcggggacagtgccaggtggggagtttgactggggcggtacacctgtcaaacggtaacgcaggtgtcctaaggcgagctcagggaggacagaaacctcccgtgagcagaagggcaaaagctcgcttgatcttgattttcagtacgaatacagaccgtgaaagcggggcctcacgatccttctgaccttttgggttttaagcaggaggtgtcagaaaagttaccacaggaatcccgtgttgccgaggataccggagctagaaatccgtaact

SEQ ID NO: 80849 - DNA, 371 bp, Homo Sapiens
cggccgggcgcgaccgctccggggacagtgccatggtggggagtttgactggggcggtacacctgtcaaacggtaacgcaggtgtcctaaggcgagctcagggataacgctgggaggactcaggctcagggataacgctgggaggaactcaggctcagggataacgctgggagaactcaggctcagggataaagctggggagaactcaggctcagggataaagctggggagaactcaggctcagggataaagctggggagaactcaggctcagggataaagctgtggagaactcaggctcagggataaagctggggagaactcaggctcagggataacgctgggaggaactcaggctcagggataacgctg

SEQ ID NO: 80850 - DNA, 753 bp, Homo Sapiens
gcggccgcggctgtagcaactattacctgtacagtatttgcattccacagatggaacggtttgggagaagcactttttcatacttttgtgaaagtatacatgttggcccagtctctcgtatctgtacctttgtccctagtactgtaactgccaatctgtctgtgtaagctggaatctgtggcaactattaccctgtgttgtatttcccaagtgtctggatggatggagaggtactcaaacaagttactttcagttgtcctgctggattttaaaaaaatagaaaaagaatctcaaaactactgttttacatagattgtttgaagagtccttcctcttgtgcttctgtaccactttcccagctcttagatgtggtagctaaaggcacggaatttagacggccttgtaaatagggcatgaggaactcatctgtgtattgggatggtattagagagagaatcaggaaagaccaactcatgaagtgaacttggtttgatcttactcaactagaaagcttgaaaacatccctggggattctgaaggcttaattttgcaaaggaggatgcattgtctgaactttgcaacttcatccagtgcaagtttgatgcaagaatgtattaggacataaaatagaggctgaccttaaaagggccaggacagaagcggctgccagctctgaatctttaactgaaatgcacatggcaccaggaggtgtctctcataagttgggtgctagcctaaacatcagaatagaac

SEQ ID NO: 80851 - DNA, 493 bp, Homo Sapiens
aaatccagcaggacaactgaaagtaacttgtttgagtacctctccatccatccagacacttgggaaatacaacacagggtaatagttgccacagattccagcttacacagacagattggcagttacagtactagggacaaaggtacagatacgagagactgggccaacatgtatactttcacaaaagtatgaaaaagtgcttctccaaaccgttccatctgtggaatgcaaatactgtacaggtaagatgcaggcctgcttcccgaagtgcacatgcttctgtcagacgttactttcaccgtgcctgctgtttccacaggaagagtctgtctgttccatgcgctcacagtcgaggctgacctcactcgtgtccatactacagtctgactcactgtccgattggtccatctgctcaagttttgtttctccctgtagctctctgctcccggtggtgggatttaggaacgatccctcggagtcaagcaccccagct

SEQ ID NO: 80852 - DNA, 480 bp, Homo Sapiens
cccagtgccctgcccggtcccacggctcccacgctgccaccctgtcctgactcgccacctggtcttgtgggcagactgctgatcgagttcacctcacccatgcccctggagcgggtgcagagggcctggaagggtgggaggtatgtctaggggccagtgtctcttccagggggaattctcagctcttgggaacccccttgctcccaggggaggggaaacctttttcattcaacattgtagggggcaagctttggtgcgccccctgctgaggagcagacccaggaggggaccagaggggatgctgtgtcgctgcctgggatcttggggttggcctttgcatgggaggcaggtggggcttggatcagtaagtctggttcccgcctccctgtctgagagaggaggcaggagccccagggccggcttgtgtttgtacattgcacagaaacttgtgtgggtgctttagtaaaaaacgtgaatgga

SEQ ID NO: 80853 - DNA, 2209 bp, Homo Sapiens
  misc_feature (102)..(229): n is a, c, g, or t
  misc_feature (543)..(564): n is a, c, g, or t
cgccccaacggcaccccaccggcccggaattttccggatgtagcgcgggagggaggcggtggcgctgtggtccgtgggtccgccggtccgtgggtctgcccnnnnnnnnnnnnnnnnnnnnnnnnnnnnnnnnnnnnnnnnnnnnnnnnnnnnnnnnnnnnnnnnnnnnnnnnnnnnnnnnnnnnnnnnnnnnnnnnnnnnnnnnnnnnnnnnnnnnnnnnnnnnnnnncatgggggacggaaccgtccgcagccgccggagccgggagccctgcccaagtcggagcggcggcccctgctgagccccgagcgccgggccagcagccggatgcccgggcccactgggcgggccaggggccgccggcgggatgagcacactgatgggggggacgctggagcgcgtctgcaaggctgtgctccttctctgcctgctgcacttcctcgtggccgtcatcctctactttgacgtctacgcccagcacctggccttcttcagccgcttcagtgcccgaggccctgcccatgccctccacccagctgctnnnnnnnnnnnnnnnnnnnnnnactgctcccggcccaacgccaccgcctctagctccgggctccctgaggtccccagtgccctgcccggtcccacggctcccacgctgccaccctgtcctgactcgccacctggtcttgtgggcagactgctgatcgagttcacctcacccatgcccctggagcgggtgcacagggagaacccaggcgtgctcatgggcggccgatacacaccgcccgactgcaccccagcccagacggtggcggtcatcatcccctttagacaccgggaacaccacctgcgctactggctccactatctacaccccatcttgaggcggcagcggctgcgctacggcgtctatgtcatcaaccagcatggtgaggacaccttcaaccgggccaagctgcttaacgtgggcttcctagaggcgctgaaggaggatgccgcctatgactgcttcatcttcagcgatgtggacctggtccccatggatgaccgcaacctataccgctgcggcgaccaaccccgccactttgccattgccatggacaagtttggcttccggcttccctatgctggctactttggaggtgtgtcaggcctgagtaaggctcagtttctgagaatcaatggcttccccaatgagtactggggctggggtggcgaggatgatgacatcttcaaccggatctccctgactgggatgaagatctcacgcccagacatccgaatcggccgctaccgcatgatcaagcacgaccgcgacaagcataacgaacctaaccctcagaggtttaccaagattcaaaacacgaagctgaccatgaagcgggacggcattgggtcagtgcggtaccaggtcttggaggtgtctcggcaaccactcttcaccaatatcacagtggacattgggcggcctccgtcgtggccccctcggggctgacactaatggacagaggctctcggtgccgaagattgcctgccagaggactgaccacagcctggctggcagctgctctgtggaggacctccaggactgagactgggctctgttttccaagggtcttcactaggccccctagctacacctggaagtttcagaacccactttggggggcctcctgcctgggcaggctcttcaagtgtggccctctttggagtcaaccctccttcccgaccccctccccctagcccagccccagtcactgtcagggtcgggccagcccctgcactgcctcgcagagtggcctgggctaggtcactccacctctctgtgcctcagtttcccccccttgagtcccctagggcctggaagggtgggaggtatgtctagggggcagtgtctcttccagggggaattctcagctcttgggaacccccttgctcccaggggaggggaaacctttttcattcaacattgtagggggcaagctttggtgcgccccctgctgaggagcagccccaggaggggaccagaggggatgctgtgtcgctgcctgggatcttggggttggcctttgcatgggaggcaggtggggcttggatcagtaagtctggttcccgcctccctgtctgagagaggaggcaggagccccagggccggcttgtgtttgtacattgcacagaaacttgtgtgggtgctttagtaaaaaacgtgaatggagc

SEQ ID NO: 80854 - DNA, 787 bp, Homo Sapiens
ttcggcacgaggggcggcgagagcgatttcgctgcccgcgaccaaggcctgcacctgcgccaggtagggcgccggcacggccaccgccacgccgcaaccgggcgcggcgcccaagccatcacgcaacgcctgcagcagcgccgcattcgcctgcaggctgccgttcatcttccagttgccggcaatgagtttctttttctgtgtcatgtcgtccatgtcaaaacaatcttgcccacgtgctggttggattccatcagcgcatgcgcctgcgcggcctgcgcggccgggaaggtggtgtggatgaccggcttcaccgcgcccgacgccagcagcggccagacatgctcacgcaatgcctgcgcaatggcgcccttgaacgccacgggacgcggcctcagcgtggagcccgtgatggtcagccgcctgcgcagcaccagccccgcattgaactgcgcatccagcccgccctgcaccgcgatgatgaccacgcggccgtcctcggccaggcactcaacctcgcgcgccacgtaggagccggccaccatgtccagcactacgtccacgccgcgcccatcggtaaggcgccgcgcctcggccacgaagtcctgtgtcttgtagttgatcgcgtggtgcgcacccagcgccaggcaggctgcgcacttttcgtccgaacccgccgtgacgatgaccgtggcgccgcgtgcacgcgccaactgaatagccgtaacgccaatgccgctactgccgccctgcaccagcaggacctctcccgcctgcaggcggccgc

SEQ ID NO: 80855 - DNA, 1103 bp, Homo Sapiens
tgcccatgctttgcgtagggccccggccgggttcaaggtccgccacgtaaagctgtttggtgctgggccccagtcttccaccttccccgctcattctgaggcatctggtgccagtgagacttcgagtctgcataaacccctggggagacctggaggcaggggccactcttccctgtggtgtcatcagcctgcagtgcctgaactcccagcctgtgcacctctgccaggatgccccacactgctccacaggtttggcggtgagttatttttaaaccagcgtcctgctgttcttgccccccgcgtcccctctgctgtgcctaaacacctctcaggaacacttggcagcacgccattgtcagttccaggtccactcatcccctgcgtgttgccgggacccaccttcctgcgctatcccagcacaactctccaaccacaccattgctgaacaaagctggggagtgacggccagggcaggctgtaaggcaagtgaatggaaactggctggaaaaagagaaagggcccagagcacaaaatcgccacgcacaaagactaagccagcctgcctgagtgtctggtgagcgaagacggagcaggcacctctgtgggaacatgtatctagggatcacgcataccccagacagggcaggcccatcctcaggagctgcagtcacactcagcccggcctgaggcaagggatgcagggccttgcctaggcagagaatgatgctctccgaggcatctaggcatggagtgtatggccaaagagggtctatttacaacatacctgacaatcaactagcactgtattcctagaactgagaccccttgcttctcatcttaccttgcttaaatattagttattcccagagtcagggaagtgggagagaaagcctgggtagggcagtgagggaagtgataaatggtgagaaagaaaaggagactgaaaactaacagggcggctaccgaggggtgcagggcacagttaccatggagacgtaaaacactacacagaatgcgagccatcgggtccatgcggccagaagcttgagtgctgttctctcatggaactctccagtgagccatgctgagcggtccttgtgaag

SEQ ID NO: 80856 - DNA, 562 bp, Homo Sapiens
gagcgagccttcctcactagccatgtccaaataatgagcgtattttcatgtggtcttcactgcatttggttttgtttctgatttcatgttcctttgaggtacagtcagatgaaaatgctgagttctgagagagttccaatgaggagctgcctttcagctttggaaaatatgcatctaaaacaaaaccaaacattattgtaatctgacacaggcaaaattatggttcccacaccccaaccccaaatgaaacctgggattttgaatgtggctctaagagttaacattgctgtctgtatgtcgtgtatgctaggtgatatcctcagtagggattgactactagactgtgtgttttatcaaagtgtgtaagaataaaaactcacttgcacgaattgaaacgtaaagaaatgacacttgtgaacgtgtgaacgttaacactgtagttgatagatcttaagctgctaattgttgagagagatttaaatttatgttctgtctggtcgctgcagattctcagcagcacttttactgtatatagaaattgaaataaagacctcagctatta

SEQ ID NO: 80857 - DNA, 758 bp, Homo Sapiens
ggcccaaagcacacttgatcttgtccccactccctgcccccatctcagatcaaccttcagaaagtcccggcttgttggcaaaggcacacattctgtgttactcttaagtttcattagaaattcaagtcctctggggccctgttcccttgtgggcttgtgcaactgactttgtttcttgtctgcctttctggaaccaaatccaaggaaattcatgggtttggggagacagcgatgggaacccagcagggcacaggatgctaggataaagctgtggcgccccaaaagtggcctgctctgccaacatacataaatacatacagtctgagcttgacactgtataatttggcccagaacaatatgtattttgagctcatttaggtgaatgactttggcattcccatgttacccactaggggaagctttatcaggctgcatttgccttatgcagaagtatgcctttgttctgagaaatggcctcagaacacactgttgagctgtctcctttagtgagtgtcatcctctcatccatttcaaaagattgcagatgccgtcttgaagtcctgcttgtaagaaatgcaggggttgggaatggaggagatgacgatgtagttttgcttttagttttcccaaacctgtttacattttttaaaaatgtaaccaacccataattgcattttacttgtcgtggttcgatctgattgtattgtcgaaggactatttttgaacctgtccaaataaactctgcaaagtatttccac

SEQ ID NO: 80858 - DNA, 1094 bp, Homo Sapiens
gctagattgccttaatacctgtaatctgcattttacagggaagactagttttaccaagcatcagacatgcagtgaacttgcagggtataatgcctagttaacagcaattttgaacatcactagaagctcattagttatctcccttgttctttttggttggactaaatgaaatgagcagctttaaaaacactaacacagacacaaagagaaaactatttgataaattatttatatacagatacacattctttacattggtctaggatctgtcatcagtctgaccaccattcccccacatctcccaccccattccctctcacagatttcccacaggttgctcgaaccacagtttgctacagcacttaagatgaataaaccaaatctcaccctgtaaacaatatttatggaagcagtgactagtagtccaccatgaaggtatgaaaatgctgtgacaaaaattgatcagtgcatcacatttaacaaaaagaaaattttttctaaaactgtttcagaacttactcaatattggataaactgaaatactcttggggatgaaattctactttctgataggtcattttattgaaaccagaatatactgtcagcttttcttttattcacatgtgctatgtacacagatcatgctccatctttagttaaatgccattattttgtctacaattattttgcagctgagaatttaaaaggaagtatatccatgtatcactattactgagaattttgcattatttgttctgccttttcttgaaaataccaccttaacccttaaaaatggaactgtttttgaacatcaaattaaattctaatttatgcttcactggatagtatctgctagtatacattctatgtggtgtgtcatgcaattagcagggcttttaaatttgaacaaaaaaacatgacttactatactcatgcaagtgcttcattatcagaccgtaaaacctcagagtaaggttactacaaattatttcactgaactagaaatatatcagcattgcaacagctgatagaaacaaaacattgttagcacattttattgtgaactgttaccattctgatgttggagcggccgc

SEQ ID NO: 80859 - DNA, 724 bp, Homo Sapiens
ggaagcgctgccgtcaaagcagcagcttgtcctgggtcttccccagacttcgcagtgacggatttcagagtgtttcctgttacgagaaggctgtggattcgctttggaacatgacagatttttcttctgtgctacgtggagtgtgagggaaggaagtgaaactggtgttaatttttcagcagtcacatgtcaaagtgagtggctagcaagcaggggggtccaggctgtggtggccctggtcagccttccaggagtcaggaccctcctgctgccctcctgtgtaaacagaccagccagggcaatccgagccagccccggtggagagaaagggccagtgctgggcttgggagctcaccccaagttcctcgggtactcatcctggcagtgcagggaagggcaccgggaacaggcctgtggaaaaatccactgtgcaatgagtccgtgaatcccagacatcctctcagcagccctctggtcctgcccgggatagaggctgtggcttctggtgtaggtgggcacttctgggctcagaggggtcatttagctcacctgaggtcacacggagtgggacccaccccaatttaagcctgtacacttttttcttttgtctcttttggtaacagctttattgagaaatcactcccacgctgtataactcagtggttttcatacattcacagagctgtgcagtcgtcaccacaattttataacatttcatcacccc

SEQ ID NO: 80860 - DNA, 834 bp, Homo Sapiens
gcggccgcccacccacccttcctcaggccgtttggactaggatacagggattctaaccctcctcctcctttgaacttgctgccaaagttatgcaactataggaagagacctccagagcagggacatcctgggcactggctccacaaatgcctcctctctgtgggttgtccatcaaactcagagactggtttcgttcagatctacatctaattgccgggcccagcccagcagctgtgtggatgctgccactagtatgggccagattccaaactggtggctttgcagactctagcagacgtgacctagaactgcagccatgcctggagggaggacttgcctgtcatcatggccatgctgagcagtgctgagcccagaggctggacttggcctgttgagctgggctggggacggtgggacacagtgtctctgtgactcaccagctcccttgaagtcagctcttcttctgagtcatgctgtcccctcagaggtcaactgaatcatctcacagaaaacctctgaacctgagaaacaacatcgtcaagtccttttccacccagtccctttagggcctgaagcctgggcactttccccaaggccccacccggtgtcccaggcgttgcacggggccttgagagtacagccttgttaatgactgctagacgtgaataccccaaaggaaaggacccctgattgctctccagacacagcatatgattctttgggggaggagaagggggtgagggggataaaagtgtgcagaagggttggggttcaggaggccatttgtgcaccttggcgatggcaatatcacatggtgtccctgtgaaatgtggg

SEQ ID NO: 80861 - DNA, 1591 bp, Homo Sapiens
  misc_feature (1498)..(1498): n is a, c, g, or t
  misc_feature (1514)..(1514): n is a, c, g, or t
gttttcccgccaccgccccgccctccctggggcccccacctcaccctctcctggcacccttcaccgtcaacctgtcgggccgggtctgagcaggtctggaggtgggcggggagccctggcctccccacctcctcccgtccccaccctgttcccagcactcaagccttgccaccgccgagccgggcttcctgggtgtttcaggcaaggaagtctaggtccctggggggtgacccccaaggaaaaggcagcctccctgcgcacccggttgcccggagccctctccagggccggctgggctgggggttgccctggccagcaggggcccgggggcgatgccacccggtgccgactgaggccaccgcaccatggcccgctcgctgacctggcgctgctgcccctggtgcctgacggaggatgagaaggccgccgcccgggtggaccaggagatcaacaggatcctcttggagcagaagaagcaggaccgcggggagctgaagctgctgcttttgggcccaggcgagagcgggaagagcaccttcatcaagcagatgcggatcatccacggcgccggctactcggaggaggagcgcaagggcttccggcccctggtctaccagaacatcttcgtgtccatgcgggccatgatcgaggccatggagcggctgcagattccattcagcaggcccgagagcaagcaccacgctagccttggtcatgagccaggacccctataaagtgaccacgtttgagaagcgctacgctgcggccatgcagtggcttgtggagggatgccggcatccgggcctgctatgagcgtcggcgggaattccacctgctcgattcagccgtgtactacctgtcccacctggagcgcatcaccgaggagggctacgtccccacagctcaggacgtgctccgcagccgcatgcccaccactggcatcaacgagtactgcttctccgtgcagaaaaccaacctgcggatcgtggacgtcgggggccagaagtcagagcgtaagaaatggatccattgtttcgagaacgtgatcgcccacatctacctggcctcactgagtgaatacgaccagtgcctggaggagaacaaccaggagaaccgcatgaaggagagcctcgcattgtttgggactatcctggaactaccctggttcaaaagcaccatccgtcatcctctatctcaacaaaaccgacatcctggaggagaaaatccccacctcccacctggctacctatttccccagtttccagggccctaagcaggatgctgaggcagccaagaggttcatcctggacatgtacacgaggatgtacaccgggtgcgtggacggccccgagggcagcaagaagggcgcacgatcccgacgccttttcagccactacacatgtgccacagacacacagaacatccgcaaggtcttcaaggacgtgcgggactcggtgctcgcccgctacctggacgagatcaacctgctgtgacccangccccacctggggcangcggcaccggcgggcgggtgggaggtgggagtggctgcagggacccctagtgtccctggtctatctctccagcctcg

SEQ ID NO: 80862 - DNA, 578 bp, Homo Sapiens
acgaaaaagaggtggttcttctatcccaaagcgaccgcttcacccgtctgcactatccatcccacgccgcaatcgtcgttcggtggagcagccggtcataaccgtcgtagccgccggtggcgcggtgcaggaccgagcggttgtcccacatcaccagcatgtcgggctcccaacggtgcgcgtaacgaaattcctcgcgcccctgccactggatgagttcgtagagcaaaggcagcgcctcggcatcgtccagaccatcgaagccgatgatgtaaccggcgcaaccgaacaggccgggacggccggtttcggggtgcgcgcgaatgaagggatggcgctgggtttccagcgcctcgtcgcccgagcggatgtccatgctgcggttcttgtcgttcgcgccgtacatgcctgacggcgcgtagccggcgcgggcgctatggatcgcctgcaagccttcgatccttgaacgtagcgcggcaggcatcgcgtcgagcgccgcgtgctggttcgcaaattcggtgttgccaccgacgggcgggatggtgatgccgaaaaggcaggtgcctgcgggcggccgc

SEQ ID NO: 80863 - DNA, 688 bp, Homo Sapiens
caagaattcggcacgaggggcgtcagggcgcggggaaacggccgccgcgaggaacccgaagtcggcgtcggtgaggtgttcgagcgggagcaggctggcggtcaccgccgatccctcctaccctattttaatccaggcgtagcggcccttgccacagcggtcgacgggatacgaagggtgagacgtgattgatttgggttttcgtaacatcgtggccgaatagcgaggtcattcacggaatcttcggcacgtctccgctcccgggccgtccggcggggccggcccgaggggatgggagcccgggcttgcccgcccgttcccggaacgagccggccggcggaaccaccagggcgcccgaaccggctctgccgccggcaacggcggtcgcccaggcgatccccgggacatcccgcggcccggctcttggcccagcggcacggcggggtggggaggccgccgcggcaccggctggatccccgccccctgcgctgccgatggcgatgccccgccgggacctgggcttgccggccggcaagccccaaggcccggggcagccggccggtggggtttaccgcgattcgccgcccggacccgtcgttcctgccgccccgggcgcgtccccggtggaaactgcgggcaattcggccctgggtgcgcccgccggctgggcgggcctggccgcggccgc

SEQ ID NO: 80864 - DNA, 942 bp, Homo Sapiens
  misc_feature (172)..(172): n is a, c, g, or t
  misc_feature (174)..(174): n is a, c, g, or t
  misc_feature (225)..(225): n is a, c, g, or t
ttgtttagtataagttgacttgatctaagtatacgtcttatgttgtatggattttagggaggatgaataacagtagagtaggagtggtaagaaagtctgagatatgaggaggagttcttgttttttcaaggtagtgcgatatggtagatgccaagtagaattgggagagagngnttaaagaagagaggagacccagtcctcctcaccttagagagtgcttatgcntcctcttaccaatagtcagtcaccttgctcctctccagaggcaaagtggaagagatcctgcaagacacatctatcctttcacagtgttcccaagggaacttggaaaggagagtcaggtattagaggaaagagaagggtatttgtatacaaagccctggccttaaagaatgttacttagtagctactcccaaattgtcagccttcttacctggccaaggtgtccaagccagaaaggaaaaaaggttatggagtctttctcaccctaaggacagggtggaagagggtggtatatagggaagggccagataggcaacttcatttggcttgtgtgcatctggcctggaactggtgttaagccaggcttttgcttgtttgttgccatccctcaccctttgccatttcccttttcagagaatgtaaatgattttcatgttaggccaaaataaacaacttatagggtacatatgttgtcataaaaggtaaaagtgatgcatgccaaaccaaactaaaccaatttggattatctgctattcgggtaatcttcacagaaatgactgagagaagaatctgcagtttactgagggcatttcagttcctcctaccacctcaacaggactttgtccagactctcctcctcttacctttgtgccttgactgtggttctttgtggcaagatactttggttggttaaaataatatggaacaaaggatcccctg

SEQ ID NO: 80865 - DNA, 1271 bp, Homo Sapiens
tctggtgcacagatgaacagttctccactgcctcaagatgcagtgagcagtaatctaaggaaaagtggcctgaaaaagcctgtggttgcttcctcgttaaaaaggcaggcctgtggtcagctgttagatgaggcacaagtgactttatccttccaagactggctggccagtgtcacagaacgcatccatcaaaccatgcactatcagtttgatggcaaaccagaaccattggtgttccacattcctcagtcattttttgatgccctgcaacaaagaatatctataggaagtgcaaaaaaacggctccccaactccaccacagcttttgttcggaaagatgccttgccactgggaaccttttccaagtatacttggcatatcactaatatcctgcaagttaaacaaatcttagataccccagagatgcccttggaaatcacccgtagctttatccagaaccgagatgggacttatgagctatttaaatgccctaaagtggaagtagaaagcatagcagaaacctacggtcgtatagaaaaacaaccagtgctgcgacccttggaactaaaaacttttctcaaagttggcaacacttccccagatcaaaaggagccaacacctttcatcatcgagtggatcccagatatccttccccaatctaagattggcgagctgcggatcaagtttgagtatggccaccaccggaatgggcatgtggcggagtaccaagaccagcggccccccttggaccagcccttggaactggcccctctgaccactattactttcccttaaagcaaaacaagataataatcttttgctgcttaatttgcacatccccaccccttgacaactttaaatgctagttaggcacttagatggccctgttccttggtaaactgctcttagctaagatgcaaattctcagtgctttcaagtggattctgttgaagaaaatctcttgtaaatagcctttttgatgctgctgtgtacagtcttcattatgcattgggcagtatttctggctagagttttaaaaggaacagaaagaaaaccagcttattttccttcttacggactcatctttagcgtttatttcaaccttttgctaattctctgagaaatctgcagcactcagccatacaccaacagtgttggaaagttaacaccctggttagggcagaatgttaaagaccatcttggcagagttccagccacgctctttattctgttctcaaataaagcagtgtcactagtttttcctaaaaaaa

SEQ ID NO: 80866 - DNA, 592 bp, Homo Sapiens
caagaattcggcacgaggcccgcgcgcaaactgcggcgtacacatagaattggttacattggcttacatcgccccccgatttcatgcacgccttcgctctgcccgccatcagccacagcacgcacctgccggagttctccgacgcgcgggctgcgcgtgactggctgcagggcgtggacagcaaccagccgctctccacgcaggcccgtctgctcggtcagctcaacctgctgaaccgctgcagcatcagcgccggcgagcggctgcgcatcgccgaggagctgcgcgacacggtgctggaagtgcagaccgccaccgccaaccgcttcgtcggccgcccactgccgctgtccgccggcgaacgagcggccttcgatgccaatcagggcatgtgggacacactggtcaccgcctatctgcactgcctgtctgccgcgctcgacggcgacggcgcagtggtgggccagaccggcctgatcgcccatcgcgcgctgagtgcgctggcactgatgcagctcgacgcgctgcgcaccgcccatctgccgccgcccggttactggcgacgcgtacacgcctgctacgacgcggccgc

SEQ ID NO: 80867 - DNA, 459 bp, Homo Sapiens
ggaacgagggcggaaacggcggagggggcttggtccgagttgctgcggctgggcttggatgtcgtcaccgccgcgcgccaaggctgatatcgcattttcgttgtgctcggacatgcggcacagcaatgacgacattaagcattttcagacttcgccgtcgattgcgctgaccggcagcttcgtctgtggtagaacggcaccagtcgaagcaagatctgtcgccgttctacctctctgacctgacatcgcgtgtcctgacctatcgcccatagtggcggatcttgatgcttcggctgtccctatgctgcaggcttccgtgcgtctgtggggcaggtctaggtcgatgggtcgcgatgcgacactgagaaggagccgtccaatggcccgagcaactgcgaagacctccacgaaagcatcagaaaagacatccgcgaagccgaagagcaaacaggcggccgc

SEQ ID NO: 80868 - DNA, 1102 bp, Homo Sapiens
acctcaaagtagctgcggattttgtctcctgcactgccaatatgcaactgatcccgcttttattaattttttgaagaagtacacagaatttttacagaatgtagtattttgatatcattaagtaaaccaatcagaaaactccttgagcaatagttgtttctttgtcagtttcagttacaatcatctttacccattaagacttacattaacattccttttatataaagagttgtatatgtccacctaaattcctatgtccacacttaacctttaaagatgtacattgagggaatatcaaaaaatagcgttcatggctacgaatatgtagaatgttaaaagcacagcaaactgcactgcacttataaagcaaatctattagaaaaaaagcatttttctaaatgctcaaatgttatcaaaatactatatttatagaagtaatcttctctgttaacagccaagatttgctgttagaaataactcttgtgagttttatattgtgctttttggaggttctaatcatttcagcagtagcgtcttaaacagcagtattactataagcagttgcttcaaaatgtgaattaacttgttgaaactgtggctttaacatccatgtgactagtgtatatggtatttgctctccattagcaaaataattcattgttaggtaaacttcactagtgcaaattgcagatctgtgagcaatgtttcctattgaatataaactactgtctaaaatatacatatcagcagcccagcctttatcaggaaaattatacttggcaagttgctgaaaatgcacaaagttatgaaagttaaaggtatgctgcaaataactagccattattctatgtattattaaatatttactagttctgttaaaagcagagcagaagttagacactaaggatctctttgtgaactctgtgttctctatattagattgctgtttatatgtaagaattttattgcttatgtggcatacaatatttataactataaactttatagaagtacagtattaaagtcagtggtacacagacattctgtacatatcctgtgaaacgtgctgtcatatgaaataaatatatctgtctttaccatg

SEQ ID NO: 80869 - DNA, 822 bp, Homo Sapiens
gcggccgcggtgcaggttgcgctcgaccgccgacatcagcatcgcgtgcaatgccgccagcgtgaacaggctgtaggcggtcatcgccatgacgaagtgggcgcggaaaagcagattgtcggcgttgccgatgtcgtgccggccaggccagatcaccggtaccgctgcgcacagcgctgcggcagggagggccagcatgtgcagaccgtcgagtcgcgatgacaggctctctatccagtagaacaccagcgccagccaggtcatcaccgccagtgcgtctcccgcaccgaagcgcatgcggccctcagggaagatctgcagcgacagcaccgcggcgtgcaccagcagtgccgcggccagtgccgccggccgcacaccgccggccgcggcgtgtgcgcctgctcgcgccgggcgcatgaaccagaaggcgagcgcagcgtagagggcggaaggaagcagttcgattagaatcattggcttcagtttaacccaaggcgcacgccgctctttcatgctggataacctcacccaacggctcgccaaggtcgtcaagacgctgcgcggacaggcgcgactgaccgacgagaacatttcggacatgctgcgcgaagtgcgcatggcgctgctcgaggcggacgtcgccctgccggtggtgaaggaactggtcacccgcatccgtgaaaaggcggtcggccaggaagtcgtcggctccctgacgccgggccaggcgctggtgggcgtggtgcacgacgaactggcggcgctgatgggcggcgccacgccagctcatttcgcgacgcagccgcgggcatcgtgctgatg

SEQ ID NO: 80870 - DNA, 701 bp, Homo Sapiens
  misc_feature (686)..(686): n is a, c, g, or t
gcggccgcgccgcaggaggttgctttctctctcccggcacgcggggtcgctgcaggccgtgctcagccctccaggagccggccggtgtccgcgctcgcgggcggctctgggaccgggagaggctgcggctccccgctaaggctcctgcggccggcgcctcctggacccacccacccacctcggaagacagacgcctctcttcagctgtaccggccccaggctccgccaaactccctcctcgccctctccttccgaccccctagtaataacaaattcactgttgaccctggacagatggtgttcaaaaagctacgtgcagggggccagtacacttaggtcgcagggaaactcccacgtattaagcaccgactgtgaactggtacactgtggggttctttatagacattaattccccagaacaatcccacgatacgctatactgcccattttagtaagaagaaaacaagctcagagaggttaggttatttgcccagggccacacagcgagaaggtaagcaacagaactggtggtccaaacccaaggttgacccagaaggccatgtcttcccctatacctgccaccatcttcccatgccaacccccacagggtaaagagtttgggcaggaggaggtggctactccagcaggtttgctggagggacttctgaagagcctggggagactangagttctgtagcttg

SEQ ID NO: 80871 - DNA, 1087 bp, Homo Sapiens
  misc_feature (63)..(63): n is a, c, g, or t
tatctttagtcactttgtacaggatgatatccatgagtactttagtgtttgtatatgtttttncttttaaatagaacttgtttttataattgatttaaaatagggctttttttctataaaagccttaatgagccataattttaagaatataagaataatgactatgatattggtcagtcttagaacatgaaaatgtcagacaatgaatttaatcgggcccttggtggaaacatttatatatttaatgcagatgcatagtgtttttcaaatctttaacatcattttttcaacttttaagatataatatcaactattctaaatacaggtaatggtatatttaaggctaccataacatcctatttagagggtggttttttttaatttatctaatggctacgatatagccagattcaaataacatatgtactcaataggtttcaatcatatatataatatattttttgtaactatgaacatacacagttttccagaaatagattttacactgtttagaattccaacacctacagtggaaagactgtttattgtagtaatgcatggctgaagcataaaagggagagagaatttctttatatacacaaacatacatgaatatgcatatctatatgcatagatgtacctatcctgcacccaaaaaggtgcctggtattggcactaaaatcatgtagttatactgggcagcaataataattgggcatgaggctgattactcaatggtgagggtaggtatatgtagatagatgtgcatgtatgtgtttgtatatataattttataagtttcacgcataaattaatacatgcctgtgtgcatacatatgtatgggatatatttgtatatatatgtacaggtaataaacatccccaaggtttgtggctggccatacacataggcatcagtttaacaaccatcagacctcagctgtacaataacaggtgttttgtttaattaaaattatactgttctgcagcatttagacatttgtcacatttcattagctttgacaaccatactgtaacattaaacctagcattccacaagagaataaatataagattgaaactgtaa

SEQ ID NO: 80872 - DNA, 824 bp, Homo Sapiens
aacaaatgtccacacagttaggaagcccaagggccctctgccctttcctctctgccttcctggagcatgaacccacacagggcacacagcagcaaggcatccccgggcagtgccgtgcccactcaccagcttcttcctgcggtcatcgatctggcagaagttctcctcatctatccccaaacatgggcttccttgaggcacagtcattcaaccaaccagccagcattcattgagcaccatctatgtcctgggcactgctaggggatggtgataacagggagaagactctgtccctgccttccaattgtgtagaggaagacatccccctacatgatgggtgagacatagcagaagtgagtaggggatgaggtgggggctcagaggagggcatggtcagcctgtctgggagggagttgcatgtgtgcatctgaggtagggacaggcatgcatcttacaggatgaatatcgagcagagttacagagagggggaaactccttgaggtttcaggaatcacctaatccactgtgactcacaaattcctgcctcttggctttgcctgcagcatatctcctggaagtgtgctggggcaaaactcatcccagaccaccatctccatcctcccccaatacaccctggctctccctggctacccttgagcacggtgcacgtgtgcatgggtgcatgcctgcatatatagctatcccccatgtatttcccaaagccctacataatgcttcagtttgctaaggaaaaaatgttaattactgcaaatgtgtttaaaactgtaaaagtacattaaacaaactctgtaaagtgtgaaaaa

SEQ ID NO: 80873 - DNA, 1036 bp, Homo Sapiens
  misc_feature (679)..(679): n is a, c, g, or t
  misc_feature (892)..(892): n is a, c, g, or t
gcggccgctccaaagcaccaatgtttgcactcgatttgaagactctccatcgtatgtaaaatggggtaaactgagagattatcaggtccgaggattaaactggctcatttctttgtatgagaatggcatcaatggtatccttgcagatgaaatgggcctaggaaagactcttcaaacaatttctcttcttgggtacatgaaacattatagaaacattcctgggcctcatatggttttggttcctaagtctacattacacaactggatgagtgaattcaagagatgggtaccaacacttagatctgtttgtttgataggagataaagaacaaagagctgcttttgtcagagacgttttattaccgggagaatgggatgtatgtgtaacatcttatgaaatgcttattaaagagaagtctgtgttcaaaaaaatttaattggagatacttagtaatagatgaagctcacaggatcaaaaatgaaaaatctaagttgtcagaaatagtgagggaattcaagactacaaatagactattattaactggaacacctcttcagaacaacttgcatgagctgtggtcacttcttaactttctgttgccagatgtgtttaattcagcagatgactttgattcctggtttgatacaaacaactgccttggggatcaaaaactagttgnagaggcttcatatggttttgcgtccattcctccttcgtcgaattaaggctgatgttgaaaagagtttgcctccaaagaaggaagtaaaaatctatgtgggcctcagcaaaatgcaaagggaatggtatactcggatattaatgaaggatatagatatactcaactcagcaggcaagatggacaaaatgaggttattgaacatcctaatgcagntgagaaaatgttgtaatcatccatatctctttgatggagcagaaactggtccacctttatacacagatatgcatcctagtaccaacagtggcaaaaatggtggttttagaccagctgctccctaagttaaaagaacaggttccc

SEQ ID NO: 80874 - DNA, 899 bp, Homo Sapiens
  misc_feature (844)..(844): n is a, c, g, or t
gggagtagggggttggagaggttgcattaaaaacaggtggacggtcggattctccgaatcgtcgaccccgcgtccggcgacctgcgcggcgcgggggcgatcctgcggccggcggcgcgtggtgcccgggacctgaacccgcggcgggacatctcctcctggctggcccagtggttccctagaaccccagccaggtccgtggtggccctgaagacccccatcaaggtggagctggtggcagggaaaacctacaggtggtgtgtgtgtggccgcagcaagaagcagcccttctgtgacggctcccacttcttccaacgcactggcctatctccactcaagttcaaggcccaagagacccgcatggtggcactctgtacctgcaaggccactcagaggcccccgtactgcgatggcacccacaggagtgagcgcgtgcagaaggcagaagtgggctccccactctgagggggctgctgctgtccagccacaggtggccttggctccaggcctctgacaggcacccccttctgtgggaaaggaaacaggtgctgagcccaagagactctggtacccactgctggctcatgaaggaagaattattccttataacctaaaagtctccagtctggggcaggcgggagtgggccctggttcaatgtttgctgatggggaagatggcaaaaacaagcctgcccaaccccgggaggggcggccttcggagattctgaaaaaccttggtcggcccgcttcgggccccctcgagaaacttttttctaaacccctttccgttttggcggccgccggggcccccagttagggtgaacggggaaacatgggtggccanaaaacttgtgttttcccctatgggagaggaattcccgggggccaccatgagacct

SEQ ID NO: 80875 - DNA, 877 bp, Homo Sapiens
gcggccgccgtcacggtacgcctgcctggctcgatatgcgccacgacgacgcgccggaggccttgctggaacgcggcaaaaagctcgtggtgcaaatggtcgagaccttccaggaaggtggcaaacccaccttcgtcgaaaccctcgacgctgtggaggtcgcgcgcaaaagcggcatgccgctggcgccgatcatgatctacggcgacgacgtcactcacctgctcaccgaagaaggcatcgcctatttgtataaggcacgctcgctggaagagcgccaggcgatgatcgccgccgttgcaggcgtcaccgccatcggcatgcgccacaaccccaaggacactgcgcgcatgcgccgcgaaggcttgatcgccttgcccgaagacctcggcatccgccgcaccgacgccacccgcgagctgctcgccgccaagagcgtggccgatttggtggactggtccggtggcctgtataacccgcccgccaagttcaggagctggtaaatgcgcgccctcaaactgcatgaactgagcctcgccgatcgcctggcggatatggctgtggatgccttgattgatgaggctgacctgtcacccaaacccgcattggtagaccgtcgcggcaatggcgcccatagcgatttgcacctgggcctgatgcacgcctcggcgctgtcgttgtggccgatgttcaaggaaatggccgaagcggcgcttgagttcggtgaagtgggtttgcccttgcgcgaagccctcgggcgtatcgggcgcgaaggtgagcaagccatgctcgccaccacccaaggcgtgaatacccatcgcggcgcgatctgggccctcggtttgcttactgccgcagcggctctggagccacgcgc

SEQ ID NO: 80876 - DNA, 445 bp, Homo Sapiens
gcggccgcggctgtaggctttactgtatacgttatgccttagtttaaaaaactactcatactgttttctcctgcaacctgcccatgtaaatttggtaacagaaatacatctatacatcgagaaatccacttaatcctgatcttgacccagaaatagttgatagctccctatttttggcacaacactctgaaatgtgtggtgttcacagtggattatgtatttcctgtgtgtatacatgaaaaaaatttgtgttgatcagttctcacgtaacttttgaaaagtgtaatttggataaagcatcatgagacctactacagtcacagctgcctctagatcaatgacttttttacttctttttttaaactgtagccaacaatacaaaatacattgtacttagcaacccagagccaatttgtgtgtaactagaataaatgtttcgtgaaat

SEQ ID NO: 80877 - DNA, 1515 bp, Homo Sapiens
ggctaggtacgaggctgggtggttaattcggcacgaggctgggcagctagggttcttgttgcttcagggccaggccaacatctgggggagggggtcatcctggaaaccagtggatcttcatgggaatgaaatcctgtcagggggtggaggacctgggggagcaggccaggccgtgcatgggcctgtgaagctaggggggacaccccctgcagatggaaaacgctttggttgcctgtgtgggaagcggtttgcagtgaagccaaagcgtgaccggcacatcatgctgaccttcagccttcggccttttggctgtggcatctgcaacaagcgcttcaagctgaagcaccatctgacagagcacatgaagacccatgctggagccctgcatgcctgtccccactgtggccgtcggttccgagtccatgcctgttttctccgccaccgggacctatgcaagggccagggctgggccactgcccactggacttacaagtgactgctgaggctatacactagcttctagaacaagataaccactgctgctgatggatacttttccctcactgccatggcacaccagtcatggatcttgtaatcatgccaagagaatagatacattatggacctcttgttcttagatatgggcctctcagcctggcagatgtggaaactcaaatttctcgtcccactccaggttttggctagccaaccctgcaggaaagtggtttataggccattcatacttaagttgatcacttgcccatggtggacatttttgtggtggtgatgtccattaaggaaaccagattttcaattatttagtgagagaagagttagagcaaaagacagtggtaaatgttttattccgtctccatgaggaattgaaggagttggtctccacctagagatacatttgatttacagcttaagtaattcagaggctaagctctaagcttttttctctcattgctggaatgatttaagcagaagtccttttgtgtacttttaaaattgtatctttccaggagcccctcagattgtaccttgctttctcaccaatagacaccttcccgacacttttttaatgttgtagctgagcactttaacaagttgagcattccatgtttcattcttagaaccttctttaatagagggtcttccctcaacagcctgtgcctctggtctacctttgaccaccactgataactaatatattggtcacaatgactggaatgtgactagtgatctcaggagatggcactgtcctaaagtgctgtcagggtggcaccactgctctctgaacaacttaccttggtcagagggactcaggtttgggacagcacaagctgaaggctggagagtaacttgcatagtaggaccatacctcttcctttcccatcccacccacatatgatagacagcccctctgttgagatatggaggggacagatactggaatcgggggtgggacttgcagttacttaaaattttttaataaactgtgccctgaaacct

SEQ ID NO: 80878 - DNA, 548 bp, Homo Sapiens
gcggccgcgccaggcccatggcctcgaagtagccgcgccgcgcgacgaccgagcgccgcagcgtgccgatgcgccgggccacgaggctggagtccggctgctcgccgatgcgcactgcgatgtcgatgccctgctcgatgaggtcgatgaagccgtcgtgcagctgcagatccaccttcacgcccgggtgcagcgcctggaagctgcgcaccagcggcatcagcttcatgcgacccaaggtgcccgacgccgccacgcgcagccagccctgcaaccggtgctcgccggcccgcagctcactctccgcctcggcgatctcggccactaggcgcctggcctgctccacgtagcgctcgccggcgtcggtcagcttcaatgaccgcgtgctgcgcgccagcagctgcgcgccgagttgatgttccagcgccgccacctgcttgctgacggcgccttgcgtgctgcccagctcgcgcgccgcggccgaaaagctgcccagctccacgacccgcaccagggtctgcatcgactgcaaccggtcccctcgtgcc

SEQ ID NO: 80879 - DNA, 1158 bp, Homo Sapiens
gcggccgcgcaagcgtttgctgaccgccagagcagtactgtcgcggccttccagagcctgacaagtgagccaccttcgcagacgagcctattgattgatcaattggttctgttgtttcccgaaatgacgcgggatgagatcgccaagatcaagttgacgctggtgaccgacaaaccgtatgacgccagaaacgagggccacctggaaacacgtaccccgttgttgaccgagttgatccttgccggagaacctgaggaggacccttttttcgtggctcagcagtgggtgaatacgcgactttttggcgagaagaaatacgcattcacgcaccccaccatctcccaggaaacctttgaagaaagaatcaagaagcttccacgtatcaagccgctggtagcgccggcagtggaccaatacctggccgacagtcgtcgcgcacaggaaacggtgatcaaactgatgatcgccaatgcaccgctggatgtacgcacagggttggagtccggcgatgtggagattttcacgttgcgtgaggaaaccggggaatccctggcacaggatcaggggagcgactcgaaggtggtcgaaaagagggccaagcagggtgtgttgttgcgctacaaaaacaaggggccagagggaggctatacctgtctcgaaatgttcccggggtccatgaaagtgtgcaagcgtaacttgctgttctctacgttaaagttggacggggtgattgaaaaggggacggtcccgtatggtccttttgcccaatgtacctgcggactaaggcaacacaagtagattttgaccttcaggcctatcagacaggcagcgagctgcgtcccggcgtgcgaaccaaggccattatcgaaaagttcggagagacgttgccggggcagagttcgtcgaggtgggccagcagcacgccaggtgctgtgcctaacagttgggcgtcgaaaaaaaccaacgatatagccagggccatcgtcaacgctacgttcgatgtgaagcgcgagacgctgttggaatacgccaacgcgccgacaacgctacagagaagacgcagttatccgtttgattccggaaaggtctttacccgtgaaaacctcaggatggtattaagcctgatcccatttgtgggggcgattgccgatatcgccg

SEQ ID NO: 80880 - DNA, 1082 bp, Homo Sapiens
gcggccgcgactttgccaatccccttcacagacatgagtcgcctggccttttctgcatccaaatcaaacatgccctgaacgaggtgtttttccagggctttgatctgcgcttgcaggtagcgaatatgatctttggtagcgctgacaacggtgggcaactgagcctgctgaagtcgacgcttattgtcgtcgcgctgctgaacgaagtgctcacgtaattggatcagttcgcgcagagcttcgcgctcaggagaaatgaccttttcgtgagacccatgcagcacttcggcaaaatcagccagaactgccgcatcaatcgggtcggtcttggcatttttgcccatggccaccgcgaaggctctggcccgacgaggattgattcggagcacttggaaattcgtctgttgcagtgccgccatgacctggcgctcgtagcctcccgtggcctccagcaatacccggccaacctcatagcagctcaatcgtttgatcagctcaacaaagccttcagatgtgtttggaatctcgaagccttctttctgaggttgaacccagacaacaaggtttaatttagagatatcgatgccgacccaggaaatcatggcaaaaccctcttacactcaggagtgagagtgctctggctatgcccacgcttgtgattcgagtggtgctcgtccaactgttcgggcttgtcggccagagtggaaaggtggatggcagctttgctcccactcgtgcttctagcaccgcggactcacagcttgccatccaccccctctcacctcagagtttattcccagatcaagacacaagcgggcttgcccgcgatgcaggcacctcggtgtgtcagacacgctgcggtgatgctatcgcaggcaagccagctcccacctttgatctccacaaggcaaaagttgaacgcccataaaaaagccccacctgatcactcaggcggggctttttagtagcggatggaatcagacgaggggtttaggctcgtgctctgtttccaaggccttgtgctcaaccggggctggagcctcgatcacttcggcagccggtgcggcagcggctgcagcagc

SEQ ID NO: 80881 - DNA, 1328 bp, Homo Sapiens
  misc_feature (71)..(88): n is a, c, g, or t
  misc_feature (332)..(344): n is a, c, g, or t
  misc_feature (665)..(675): n is a, c, g, or t
  misc_feature (763)..(787): n is a, c, g, or t
  misc_feature (968)..(976): n is a, c, g, or t
ttatatgcgcttcatgggactgagtcaccaccttcccttacatacttcagttcagattgtagccatacttnnnnnnnnnnnnnnnnnngccaaaagatgatgacaacatttttatcagtattgtgaataaacttgaacacaaatacacgaagttccatgtcatgtcttcagttgtagaagtttttcctctttaaggtaaagcgaccaacttgaactttctctggcaacacgattcgcagttatataagggaatcagtgttcacgtctctgtatatatttatttatgtgtaatttaatgggaattgtaaatatggtgagtctgttttaagccnnnnnnnnnnnnnatttatctgatcttgtttacctcttgtttagtgggttttgaatcttccctattagttcttcatgtggttcatggtactgatttagaaatccagtgtttgggggatttttttctctgggattcatgaatttagccctgttgtagcatgttaaaggtgacaaacagctggacaaatttttaaaaagtaaaataaaattttatctataattagtattattacatttagcttttcattgaaccgaaagaaaaaaagtgatattggaccctggaaagattttgaaacttgagtggtttgataacccttctatgtattgtagggagnnnnnnnnnnngtttattttattccactgtcctcccttaaaagcatcatttgagcaataaatgaatattgtctttaaaccaagggttagggaattttcnnnnnnnnnnnnnnnnnnnnnnnnnttctgttcaaagaacttcaaacatttgggaccacctggtattctgtattttcactggccatattggaagcagttctagttgcattgtattgagttgtgctggcagtagtttccatgcctgtcaatgtatcatagtcctttgttgcccagataaataaatatttgatacgctttatgtcgannnnnnnnnattcagtggctgtctttacccaggcgtatttttgttcttggcagtattttttattcagtatggttacagtaattgagtttaactctcccttggcaattgctccttgcaataagcagctgaacccattgtttccctcaagtataataaaaacttactttcaacttggagttcagagcagggtatcatttagatattccactgtgtctgtattcagacaaatgacacaataaaacccaatgtattcttttggataaaagattgtttgtactgctaaaggaatgacatactgtcttttccttactagaaacattaattttattattaaaaataaagttttattttatttatgttg

SEQ ID NO: 80882 - DNA, 1027 bp, Homo Sapiens
  misc_feature (797)..(797): n is a, c, g, or t
gcggccgcggcttatcgcgacctgctcggcgagagcagccaggtgtcccagtcgcaccagaactgcgacaaggtgcaagacccgtattccctgcgttgccagccgcaagtcatgggcgcctgcctgacccagttccgccaggctgccgacgtgctggtggtagaggccaacgccgtgtcggataacccgctggtatttgctgccgagggcgacgtgatttccggcggtaacttccacgctgagccggtggccatggctgccgacaacatggcgctggctatcgccgaaatcggctcgctgagcgagcgtcgtatctcgttgatgatggacaagcacatgtcgcaactgccgccgtttttggtcggcaatggcggggtgaactccggtttcatgatcgcccaggtcaccgctgcggcgctcgccagtgagaacaaggcgctggcgcatcctcatagcgtggacagcctgccgacgtcggccaaccaggaagaccacgtgtccatggctccggctgcgggcaagcgtttgtgggaaatggctgaaaatacccgtggtgtactcgcagttgagtggctggcggcatgccagggcctggacctgcgcgatggcttgaagacttcgaccaagctggaaaaagcccgcgggatcctgcgcgacaaagtggcgttttatgagaaggacgcttctttgccccggacatcaatgccgccagcgaactgctcgccagccgctgcctgaatgagctggtgccggccaagctcctgccgagcttgtaaccgcaacgcaacccagtgtgnggagctggcttgcctgcgatagctatctgtcagttgaaacatgtgtgactgacatacgatcgttcccacgctctgcgtgggaatgttgccctggacgctccgcgtccgctttaagagtcgtgacgcggagcgtcacaggatgtgttcccacgcggagcgtgggaacgatcttctcctcataaaaataatagggacgagaaatgcaccagcaagaaaagggtttgaaacgc

SEQ ID NO: 80883 - DNA, 699 bp, Homo Sapiens
acccggttgcccacaggatatcaccgcccccatcccagggcccaccagaaccagcagggagagagaggcaggaaatgccgtctaacgggatctctggatggagaattccacagctgattggaacctatacgagagaaccaaatggacatcccagggctgcagaagccaccccatctatgactaagacaccctcccaccttcatgctactgagtggacaagcttacatgaaatgactgttttcacatatgtggcaccaggcagcccagggatgccggtgaaatctctgggagaacggcatgttccagagagccacagcttgctcagcctggaccccagaacgaaggaggcatcagaagctgagccacccgtggccgacaagaaacctgagtgggaggggaaacttggttgctgtgatcgacccaggcttgcgagttgttttggcaacacaggcctagcaagagccgaccaatatgtcattgatgaaagaaagtcaacaggcgtgtagaaggagctgtctactgagcatgtctgcacttttctgaattatgttgcacttgagtaaaaagtaagcaagcctgtctatttactttaaatgatgtgtgccagatatgtacagtatgcagagttaagaaggtgccaccccaaaataggctgctctggcatagtcactattaggaattaaaggcagttaaaacaat

SEQ ID NO: 80884 - DNA, 1398 bp, Homo Sapiens
  misc_feature (577)..(577): n is a, c, g, or t
gctttactaaaagaaccaaatttacttcagtttaaggcaaattccacacagagactgtctcagagacgggcacagaaccagacaccgtagaaacaccaccaccatgcatgacggggaagcagaggcaggcggaagacgggggcctggcctgcaccaggcacggagaggtcagtgggctgaggagctccatgcggcaacagggattggcatgcatgatctgctccccgagtgggcaaaggctgggcagctgggtgggcccgggagggagatccccttcttccccacctttcccacagcaggggcaggagctcgggctcagatgccagagccccaggctgaaggactagggtatgtttggggtgatgggatgagacagggtgacccaaaagccaaggcggcctcaagtagggtcacatctgttaggagtaggatggggggaactgggcatgggatgaatgaccctcaggatgtcagacctaaaggaaaacctggggccatctggtcaaccctcttgtggtacagacatggaaactgaggcccaaaaggtagaagggccttgcttgggttcccacattangcagtggggggaggcagggctcaaacccaggactcctgtctcctagcctcatgggatacagggcaaagagcaggagcagtgtgggaacgtggggctgagccactccttactcaggcctccagatgggcagaggcgtgggcaccgagggcactgggaagcctctggagggaggaagggattcctgaagccaggagtcaaccatggaagtacctgtgggcccacaccagggagaggcctccacaggccatctgtgtgtctagaacttgcatcgtactgagttcgagaggcaccagaaagggctctgtgctgagcagcctccacttcaggcccatcacatggcctacggtccatgattacagcaccccatggggtccccggggctcccagctcatccagtgtccctgggagggtgcacatgttcaggccttcctgcaaacccatcagcttcatggggttcactggaaatcgggcacaggatagaccacagggcggggctcagggacaggagtagacaccatgggaggatgggacggagatggggggctggaggaggccaagcccaggcttcagggtgacaggtaagcaaataggattgccgggggtgggcgacagggaccccaatcacccttattgtttacaccttcctggctgggttagagccaggtattggggaagaagagaagggctgggtcccctgtgtacccctctttcacccgtacccccctaactcctgggtttgggcaataagtgaggccaagaaattgaggaggggtcttcagaagcctcgtgccgattcacacacccaggcctctacctagcca

SEQ ID NO: 80885 - DNA, 487 bp, Homo Sapiens
ggcacgaggccgagcatgagcgccgtggcgtgcccggtcttccacagcggtgccaggccgcgcaccggcagcgccacgaggaacagcacagcgatcaggcaggccagcggcaacagccagcccagcacctggagcatcgaacgccagaaacccgccaacgcttcttcccgcgccgcgtacagcgacaaccccatgctgaacgccatcggggtggccatgtagacgaacgggcggctggtgaatgtgtccatgaagagcgacacgcccagcaccttgaacagcccggccagcaggaacagcagggcccagaacaaccccgcgaacaggcccgccagcagcaactggaaggcatggcgccaggccgtggcgaagagccgggcgtagtcgcgcgcccaggtgccgctggccaggcgttgctcggcaaagggcagcagcacgaaccagctgcaggacagcagcaccccgagggccatggcggcgcggccgc

SEQ ID NO: 80886 - DNA, 781 bp, Homo Sapiens
gcggccgcacgttcagcttcagccccacctcttcgcgctgtacggtctggaacgggttgttgctggtgccgccgccaccggtgacataactgccggtgacaaacggaatggtctggccgacaaaaatgctcgctgcttcgttgtccagggtcagcaggttcggcgtggacagcacgttggtgccgcctttgctcttgagggcgcgggccagcaccttgaggtcgagcaccttgccgatccccggaatatccacgctgccgttgaccaagccgatattcagccctttgggcaacacatcgatgctggttttgccggtggtgaccagcccactgccgcccaggttgacgccgccgaatccgcccttgccgcccaggttgccagcctgccattgcacgccgaactcactggcgtcgtcttcgctgacttcaacgatcaggctttcgatcaccacctgcgcgcggcgctggtcgagcatgtcgatcacttcgcgcaggttgcggtacagcgggtcgggcgcggagatcagcaaggtgttggtggtagcgtccgcctggatcgtcacaccaccggcgctgaacgcagtgttctgatcgctgggggtgctgctgttggcgctgctgcccgaactgctcgactggtcgtagcccgacgactgcacaccactgccggtgggcgtgccgctgctgttctgagtactactgccctggttattctgggagccgcgcccatcgagctgagtttgcacggggctcatcgctgacccggactcgctctcacgggt

SEQ ID NO: 80887 - DNA, 774 bp, Homo Sapiens
  misc_feature (82)..(123): n is a, c, g, or t
gtggaccggccggatttcgggatatcgtcgaccccgcgtccgggcggtggcgggcggcggcggcaccgggagccgccgagtnnnnnnnnnnnnnnnnnnnnnnnnnnnnnnnnnnnnnnnnnngtggcccgcgcccatggccgcgcgcgctccacacaactcaccggagtccgcgccctgcgccgccgaccagttcgcagctccgcgccacggcagccagtctcacctgggcggaaccgcccgcccaccgccccggccacagcccctgcgcccacggtagcactcgaggcgaccgcgacagtggtgggggacgctgctgagtggaagagagcgcagcccggccaccggacctacttactcgccttgctgattgtctatttttgcgtttacaacttttctaagaacttttgtatacaaaggaactttttaaaaaagacgcttccaagttatatttaatccaaagaagaaggagcccagccagaaagcactacaatcatggtcaagttcccaactgagtcatcttgtgagtggataatcaggaaaaatgaggaatccaaaagacaaaaatcaaagaacagatggggtctgtgactggatcttctatcattccaattctaaatccgacttgaatattcctggacttacaaaatgccaagggggtgactggaagttgtggatatcagggtataaattatatccgtgagttgggggagggaagaccagaattcccttgaattgtgtattgatgcaatataagcataaaagatcaaaaaa

SEQ ID NO: 80888 - DNA, 1103 bp, Homo Sapiens
cagtcgacggtaccggacatatgcccgggaattcggccattacggccggggggacggctgtggatggaaattcgcccgctcagatgaactgaccaggcactaccgtaaacaacacggggcaccgcccgttccagtgccaaaaatgcgaccgagcattttccaggtcggaccacctcgccttacacatgaagaggcatttttaaatcccagacagtggatatgacccacactgccagaagagaattcagtattttttacttttcacactgtcttcccgatgagggaaggagcccagccagaaagcactacaatcatggtcaagttcccaactgagtcatcttgtgagtggataatcaggaaaaatgaggaatccaaaagacaaaaatcaaagaacagatggggtctgtgactggatcttctatcattccaattctaaatccgacttgaatattcctggacttacaaaatgccaagggggtgactggaagttgtggatatcagggtataaattatatccgtgagttgggggagggaagaccagaattcccttgaattgtgtattgatgcaatataagcataaaagatcaccttgtattctctttaccttctaaaagccattattatgatgttagaagaagaggaagaaattcaggtacagaaaacatgtttaaatagcctaaatgatggtgcttggtgagtcttggttctaaaggtaccaaacaaggaagccaaagttttcaaactgctgcatactttgacaaggaaaatctatatttgtcttccgatcaacatttatgacctaagtcaggtaatatacctggtttacttctttagcatttttatgcagacagtctgttatgcactgtggtttcagatgtgcaataatttgtacaatggtttattcccaagtatgccttaagcagaacaaatgtgtttttctatatagttccttgccttaataaatatgtaatataaatttaagcaaacgtctattttgtatatttgtaaactacaaagtaaaatgaacattttgtggagtttgtattttgcatactcaaggtgagaattaagttttaaataaacctataatattttatctgaaa

SEQ ID NO: 80889 - DNA, 1207 bp, Homo Sapiens
gcggccgcggcttgcagcgcgccattgccacacaccaacaacgcgacgagcagtaatgcagtctttagattcagcaaaacgccgggctccttcagcagggtctgtaaggaactgacgggtttgagcgctgatcgttcccacgctctgcgtccatgggacgcggagcgtcccgggctgcgttactacgcggagcgtgggaacgatcggttaacagcaccgcctgtaggtcactcgaaactttccgtcaacacccgcagtcagccaataacatcagccaataaaacaggcttcaccctttacttatccacaggagcgatcatggctgcgattgccgactgggtgcccgttacgcccagcaccgccatcacccgcttcaccgtgctgacggtcaatatccataagggtttcaccgcgttgaaccgacgcttcatcctgcccgagttgcgtgaggcggtgcgcaacgtgggcgccgacatggtgttcctgcaggaaatccacggcacccatgagcggcacccgcagcgttacagcgactggccgaagatgccgcagtatgagttcctcgccgacagcatctggccgcagttcgcctacggccgcaacgcggtctacccgcatggcgaccacggcaacgcgctgctgtccaaattccagatcatccgctacgacaacctcgacatctcccagagcggccatgaaagccgtggcctgctgcattgcgtgctgcgcttgccgggcagcggccaagaggtgcatgcgatctgcatgcacctgggcctgcgcgaggtgcatcgccagcagcaattgcgtttgctggagcagcgcattgccgagattccggctgacgcggcgctgatcgtcgccggtgatttcaatgactggcgccacaaggccgacctgagccaaagcgggctcagggaagtgtttatcgaagcccatggcaaaccggcgcgcacctttccggcgcgcctgccattgctgcctttggatcgcatctatgtgcgtaacctgaaggtgcataaccccagggcgctgacgacgcggccctggtctcacctgtcagaccacgtgccgctgtcggtggagatcgaactatgaatgtcgccgtggaacacattgccaccgaccaaccaccggatgatgccaaggcccgcgacctggattacggctggcaaccgggcaaccgcattgagctgctggagaacgg

SEQ ID NO: 80890 - DNA, 733 bp, Homo Sapiens
  misc_feature (270)..(278): n is a, c, g, or t
  misc_feature (702)..(702): n is a, c, g, or t
caaaattaataccgtttaattaagtatctacaagacaggacacaagtcataaactgaaccctttaatgtggaatgcaggtaaatattaatatgtatgatagagtgtgggattcagcctttaaaatgcaaagctccctaaggtcttcaaatgtgccatccccaaaagttctacacatccctggggaaagaaagggtccccaaattgatgtgagattacacttctaccatgtggggaatgggggaggaaaacagaaattcaggtcagatatnnnnnnnnnttaagttatgttcctcactcatgttcctttgtaaacggagctcctgagtcactgcagctgtcaccgtgcagtgccatcttcagacccttcatccctcagggctggggggactcaccctaccctctcacccttcacatttcagccgttgggttcaccagcctcctatcccttcactcatctagaggggaaatctgcctccccttcttcctttggccctaaatgagttcatcagtgtgactctaaggagtgatggcagggagctgggtttgagtccagccccgccagagattccctgtgtgaacctaggcaggtcccatcttccctctggccaagtctcagtctctttgttgcgaaagggaataaatgctgcctactggggctgctgagcagatccaggccacagctatgcgacactacttcttanacagactgcactgcactggggtttgaccaac

SEQ ID NO: 80891 - DNA, 502 bp, Homo Sapiens
aactaaggcctaaatcattcatttagcatattttctattttatttcaataacagctcaattttgctattgttatctattccagttttcaaaaagattagtgaagtttgacttctcattgaaatgagctccaaatgggttgtaagaatggaattgcagagtctttagctcctgaatgccaaaaactgatactaatggtatgatccgtttctttttttcttgaaccttgctatttcctctgctatttccacctgctatttattcttctcctgttgtaagaaaatactagtgatgctaggaaaagggaagaatggaaatgggattgtgtagtggttttgttggagaggagcgatggctggggaacattgggtagttaagagcaaactctgagagcctctgagccatgaaatgataaggtgatagcattatgtatttttatgagttcttgttaaataattgttataattcagaaaatacagaattgggtaaaatgttcctcgtgcc

SEQ ID NO: 80892 - DNA, 560 bp, Homo Sapiens
gcggccgcccttcaggacggtgcgcgcgcgcccgctgtgcgaatggccgctgtggccgcgctacgtggggggcgatgtggcacaggcggcgagcttccagtgcacgcgctagcgccgggccgatcttcaagcggcgcttgaaagagtttccgggcgcgagggctttttcatgcacgggcctgctcgcacactgcggggtccctgtcacaccctccacgccccatgaacacgacccccatcatcggcatcgccgtcctgaaagcccggcccggtcggcgcgaagcccttcgcgccgcattgagcgcgctggtgccacccacgcgccaggagcccggctgcctcgactacacgctgttcgaactgcgcgacgaacccggcagcttctacatgcgcgagtcgttccgggaccaggccgcgctggatgcgcatctggccacgccgcacttcaaggccttcgagcagcgcttcgacgaactgctcgaggagccgatccggctggtctttctggagcaggtcgcgtagcgctcagatcgcgcagccgtccgggccgccctcgtgcc

SEQ ID NO: 80893 - DNA, 1067 bp, Homo Sapiens
  misc_feature (835)..(835): n is a, c, g, or t
gcggccgcctgctcaaaagtccaagatgacttttaaaatctctgagtgcatttccaccaccaggaaggagagctttaaaaacaggcccactctctctttctttgatgatataagatctttggggcaccgttttgcaaaaaggatgtttcttatatttgaaaattaggaggcaggtaacccttctttcttaatactcccgcaagtattgcagagaatgtttcaaatatgctatgtttattacttggcaaactaatgaatcctgtaggtttcacaattgctacttatcatactttcatttttttctcattttaatattataaaaggatacttcgctgctctacatctaaaatagaacagacgcagagcagctgttgcagaatcagacagatctggacttatgaaactggagttctggaccaaggttttgtccgcagcacatttgctgtccttagtctttgagctttaaaacacactcttagttgcttcctgaattagcattaagctaataggcatctgatggttatcttctaatccatgtattcaaaagtgttgtctattttgtcagtttcccctcaatatcccgccaattactgtcatctgtatgggtacagtgctttgaacacaatgcgtgagttatcctccatccctcagttattccttaaactgaacagttcatctcatgtacacatgaaccaggtatttttactacttgctttctttaaattatcttacattttttcctatcatcattgtataccttttcttactagtactttcagcatgctcactgcctttgcatgtgtcagatctgacgcggttatgaattatgttaaanataatatgaagcacagacacgtactccagacagtgtgcatggaagtgatgtcactgggcactaaagtgacagtggttgctgccaacaccatccactcatggtagttggagatgattgatgattttccttttctttgaaattttaggttttgtctttagtataccaaaactcacaagcttgttcttgagtagaattttagcataaaaactcattaggcccatgcgtggtggct

SEQ ID NO: 80894 - DNA, 640 bp, Homo Sapiens
  misc_feature (12)..(12): n is a, c, g, or t
gcggccgctccnggtctggggcgccaacatcctcgccgcgcttctgggcacactgacgcccttctgctcctgttcgtcgattccgctgttcatcggcttcaccgccgccgggctgcctttggcgatcacgttctccttcctgatctcgtcgcccctcgtggacctcgcctcggtgatcctgctcgcctcgatcttcaactggccgatcgcgctggcctatgtcggcgtcggcctggttgtggcggtggttgggggcacggtgatcggtcggctgggcatggaggctcaggtcgccgacttcgtgcgcacggttccggtcacgggcgaggcggcgacaatgaccaggcgccagaggctggcctatgcccgcgaccaggtgggggagatcgtccaccgcgtctggccctatgtcctgatcggcgtggctataggtgccgcgatccacaactgggttccgcaggaggcgatcagcgcgctgctgggccaggacaaatggtgggccgtgcccgtggcgaccctcgtcggcatcccgatgtatgccgacatcttcggcacgctgccgatcgccgaagctcttgtaggcaggggcgtgggcctgggcacggtgctggcattcatgatggcggtgaccctcgtgccg

SEQ ID NO: 80895 - DNA, 730 bp, Homo Sapiens
  misc_feature (65)..(82): n is a, c, g, or t
  misc_feature (694)..(694): n is a, c, g, or t
gcggccgctccaacatcagaatggtacacctcgttccgatgttggagcggccgcggctgtaggcnnnnnnnnnnnnnnnnnnctacttaaagggtaaatttctatagtataaaattatgaagacatagtagatatgaggtaatgcatgagagtgtgacagggtgaggggacctcaaggtgccaggaaagctggtcctgggctccccagaaggagccgtaaccaggacactcactcataaatctcatttataataataatacaatgaccgcatatgtaatatattaaaatataatcaaatgataacaaaaataatgtggcacagctgcaaacccctcatatatactaacgcttttcatccacccaaccacaagaaataaatgctgttagtttccccatttcatagatgaggaaactgaggcaccaagtgggaaagtgctggtgagacctgggcagggagttgaattctggccatctggctgcagagtgtagctgccctcagtggagccagtagacccaggagttgacaccagagactgaaatcccagctgtgcactgccctggtggtctcctgtcccaaccgggcgttgatccgggccttgcaggctcacgtgctctcctttctggcccttgatatgatccagggtcctcctgagctcctgcccattctctgtcaagtcttcagtctctgtgtcncaggtctcagctcccaggactgcttctgcccactgt

SEQ ID NO: 80896 - DNA, 842 bp, Homo Sapiens
gagagagagaaagaagtagagactcagaaaattaagtatcttacccaaaatttacaagctcataagtggcaggtataaactcataagtttagacttcctcttgctatactccaaaatattaaaagttcacaaatatctcacaaacgaaaaaccacttcctactcttggacacatttcaagagctcagtcctatacggtgttgtaatattaccaagatgcaggccatttcaatttgtgtgtatcaaagcttctttctgcaattgttaacagtttgtaaacagtttttggaattgtgtgaaaccaaaattggcactttgtttttgttgtctgaacaacagaagagtcctggagagaggaactatggcatagagagttgtgaagacttgcaaaggtaagggtgagcaaggttctgaatttcaggaatggagaagagaaaacagtgaggaaagaagcataggcataaggccaagcatacatctttgaaaggaaagccaactttagaagctggggaaatccctcaaaactgtaagcatattgcacactgaaggtgttcccaaaagcagcccttggatgattctaagataaaatgaagcgcacaagaaaggaagaagaggagaaaatgaaatgttatggtaaatcattaacaaggaaatgagaaaatcaagttggaaaatgacaaatagtgagtaaaatttgtgaactattttgcattgacattttctgttaaggaaaatcaactttggactggagcagttagatgaaaccaatggtgagatcataaaacaaagcaaaccattcagtatacattgtccgccagatgaattaagggcagtttagggaag

SEQ ID NO: 80897 - DNA, 519 bp, Homo Sapiens
gcggccgcgggtgtaaattttttttaaggtctaggagagacttaatttggttcagaaaaaaaggtgagacaaaatataaaattattcagctccctatttggactatatatttagtactttaatcttagcattcatagcatgtagtttgaaattctgggaagatggagttcacacagtatggaggttattcttaagtagcagtgatatcagttgtcttgtgcacaaaatcctcacgacatctgctttatgcaattggaacattctctcatattactctgtaaaacaatatgtgaattactgatgctgaccatttggctaatgtatgttgacatattaagagaaatagttagaaatgagtattctacatctaaaggaaactttttgatccttcttaaatggagaaagagaccaagcaagatccataattctattcagataaataatttttattttattttccctctatgtgatacttttaaaataaatggcatactggccctgcatttcaaaataaaaatt

SEQ ID NO: 80898 - DNA, 933 bp, Homo Sapiens
  misc_feature (818)..(852): n is a, c, g, or t
attataattggtaatgccataaatacaatgttcaacttaaaataaacaattttaaaaatgtataaaataaaaatgagctaacatttttgacccacaatgtcttttatttttagatatattgcctaaaaaggataattagatattcccatattagagttccaagagtgttatacacaccctaaaagcaaaaagctttttcaaatgacgttagagagctcaggatagagacgaccacataacttggttttgttaataaaaacatttttacattactatctacagtgaaagtttacctggaattttaaagacaaagtgatcagctactactcggcaagttctgcctttgtgtataaatattttagccatgaaatagtaaaaatctataggaatagctccatgataaaaaattataagtgctggtccatcttctggtattttttccattccatgaacttcataacctgtttgaatgactaaatgcaaacagcttcgaaataataatcaatgaaattcgatgcttacacgtaagagcgtactcgtgtttgatatagcatcactcttattcatcaccaaaagcatccactagtcatcctgtctctacttccccgtttcccccctctgcgttccgctcctcttctaattccttcgatcatactcttacaatctacctagaacataatccagtcactacagtcattagcatggtccaaaacatgaatgcacgacaactctgtgtggacgacggtaccctaggaaatgttgtacccccgtccgtagatggccgaattcccgggcatatgtccggtaccgtcgactgnnnnnnnnnnnnnnnnnnnnnnnnnnnnnnnnnnncgccgcttcctcgctcactactcgcttgcgctcgtcgttcgctcgacagctatggccctatatagtcaatcaagggttctt

SEQ ID NO: 80899 - DNA, 1121 bp, Homo Sapiens
  misc_feature (55)..(55): n is a, c, g, or t
  misc_feature (93)..(128): n is a, c, g, or t
  misc_feature (156)..(180): n is a, c, g, or t
  misc_feature (187)..(432): n is a, c, g, or t
  misc_feature (1101)..(1101): n is a, c, g, or t
  misc_feature (1103)..(1103): n is a, c, g, or t
tgactataacaggtggtacaaaaagcggctggtacggtcggaatcccgggatatntcgacccacgcgtcgccacgcgtcgccacgcgtcgatnnnnnnnnnnnnnnnnnnnnnnnnnnnnnnnnnnnntgagacactgcacccaaaccccaccacnnnnnnnnnnnnnnnnnnnnnnnnngagacannnnnnnnnnnnnnnnnnnnnnnnnnnnnnnnnnnnnnnnnnnnnnnnnnnnnnnnnnnnnnnnnnnnnnnnnnnnnnnnnnnnnnnnnnnnnnnnnnnnnnnnnnnnnnnnnnnnnnnnnnnnnnnnnnnnnnnnnnnnnnnnnnnnnnnnnnnnnnnnnnnnnnnnnnnnnnnnnnnnnnnnnnnnnnnnnnnnnnnnnnnnnnnnnnnnnnnnnnnnnnnnnnnnnnnnnnnnnnnnnnnnnnacaggagtgagccactgcgcctggctgatcccagcacttttcaaatgatgccgctcaaagccgtgacttggcctactttgaacagcaaacttgttgctgctgttgtcaacctgaaggcctctcaaatgccagcttcaagcagggtgtgaatgggccagtgtcagatctcaggagtcctgtgttgagagtgtggctttcagctgcggggagctgcactgtggtggggaaagccaggcaggtcaccctcacagccagataatgtggaggtcagaacccaaggaagggagtgagacctccactcccagtgggggacctggccacccatccttggggacctgagaaagcgtacttcaccttggggtgaaggctgggtggggccagagggaccagtgccctcctcagtgcttaggggcagagccacctgcagcaatggtatctgcatatcagcccctctccaccttctttctcccgctgaatcatttccctcaaagcccaagagctgtcactgcttctttctccctgggaagaatgcgtggactctgcctggtgatagactgaagccagaacagtgccacaccctcgccttaattccttgctaaggtgttctcagatttatgagacttctttagtcaaatatggaggggaggtttggatgtgggtggcttttgncntggaaatcccagcatttt

SEQ ID NO: 80900 - DNA, 633 bp, Homo Sapiens
gcggccatgagtccaggtaactggggatgcactcctcttctcctggacttgggttccttaaggactgtaccaaggcttcagagtgagcagggggacatctggataggttagccagggccacagagagaagagctgcttacacctgaattgtttcacccttttcaagaacagggttgtccttctccccatctggatccttgggctagatctctgccgaggggctccgtcaagtcccgcaaggctagagaagggagccccacatcatttccactttcaaagagggaagatgctcgtcattcaaattacttctgttgatttccatggtatccccctgtccgtcccacaatctcttaccaggcgtcaatgcacatgcaggggatggaaagaggatgagccgatgagcagactttgcattaatcaaggagaaagaaaaagcagatggaaggaggtaggtagatggagaaagcaacagctccttttagcccttgatgatggccctgaaggcctgtctcttttagtgactcctctttgggtcctcttcccctacctctcagtgactaggttcctcatattaattccctgctgtgagtttggctccttgtgctgggcaattcagtcatcctcagaaagagc

SEQ ID NO: 80901 - DNA, 113 bp, Homo Sapiens
ttgggccaccaaaccttgtgagttcgaatatgcattcaagaggttaagtgctcaaagcatgtggttcacagaacaaccaaaaacacatggagtctgctgggattcaaatccag

SEQ ID NO: 80902 - DNA, 456 bp, Homo Sapiens
  misc_feature (51)..(67): n is a, c, g, or t
gcggccgctccaacattcacctcctgggtgacagagtgagactctttcacnnnnnnnnnnnnnnnnngaacagaacaaacataagaaaatgaaacatcagtgttcttgaacccagcaatcctaccccttgataacctcagcaagagcaattctcccttctcgctaaggccacattccgtgccatggccttcgtggcatggtttgtggcacaccaggagctgaagccctggggttgcatcactcagggtgggaatgatcaaatgtgttgcatccaagctctgaaatcctctgcaggagcacaggagtcaactgtacgtctccagggccacagacaaagagctgagaaaccctgttgaatgacggaagcagtcagcagaataggaatgcagcacagggacagttacggtgggcaaaaccatacacacaaaaaatccacaggtgcagggcagtggctca

SEQ ID NO: 80903 - DNA, 710 bp, Homo Sapiens
  misc_feature (64)..(64): n is a, c, g, or t
  misc_feature (79)..(79): n is a, c, g, or t
aaaattgacaaccagtatacttttcataacactgatattctgcccagtaagaacatgaaaactntgctgggtcttcttnttctgtgaatgtgagataatgtattatgggtctcttcttggagaaagtctcttcttttagcaccagtctttttgctaaccatgatgcctttgtgtaagtgagaaaaagacatcctacctggaccaattaactatgcaaagatgctgttttttactgggctggaaccacagtaggacatatctttgcctacccctgtgctgggaacccacttaaaatgcacaaactgggtaattgtacacagtgtccctgtccatggcccacatagcttttctacttttccaggatttagttgtgggttacttggcaaattgagtgatttttaagtggcatctagaactactcaggcctgttgtgctagctggaatacacagcaatgcgactcctactctgtctttcccaaggttgtataaacaaagttgtacttattgaaacatgtgaacatgaaactgaatgttgctttctttatctgaataactaaaacgtgtacttgatgatgataagtaatttctgtcataaaatctactaatcttgttgataaagtattgcttttccaaataggcatataaaaatgatacaattttgttttctttaacccgtgaaaataaagatgaagactccctaaatgtaaaaa

SEQ ID NO: 80904 - DNA, 484 bp, Homo Sapiens
ggcacgaggagcagctgctgatctctgttatttaatgatgataaggagcaaaccgattataccagtcacatagctccacctaccccacctattcccaaggagcagagagtatatatgacatgaagccctgatctcaaggaaagaagataggatgtgaatgggagtggggtggaaagtcactcacttggttgacatttcaaattttaggtccacttaaaaaatagctaataaaagaactacttattcctcatctgtgttctgcagggagtgagacaaggtcaggattgaccagatatttaccagagtcccatttttctgtcagaccctcccttatttaaggctaagaaaggaatgacctcatacccaccttgaaccatctgagaaggtcaataccccaaagccattaaagagcccattctcaaaatgacccaggtaggtgccaccatctgcaaacatcagttgaccaaaaccatgcctgcggcct

SEQ ID NO: 80905 - DNA, 554 bp, Homo Sapiens
ggcacgaggcgttctcggcggtgatcgaatgcctgaacattgcccggcgtaaccgtcacaaacgcttgctggcagcccgcccgtaagcgctgaagcaaaaagccggctgtgctcacaagagcccagccggctttttgctgtctgttagaatcggcccacttgttaccttgaggtccaccatgaacgagccgattcgcctcacccagtacagccacggcgcgggttgcggctgcaagatttcgccccaggtgctggaagtgatcctcgccggcagcggcgcacagaacctcgaccccaacctgtgggtgggcaacgcctcgcgtgacgatgcggcggtgtacgccatcgacgacgaacgcggcgtggtctccaccaccgactttttcatgccgattgtcgatgatccgttcgacttcggccgtattgccgccaccaacgcgatcagcgatatctacgccatgggcggcgacccgctgatggccattgcgattctgggctggccagtgaatgtgctggcgccggaagtagcccgcgaagtgatccgtggcggccgc

SEQ ID NO: 80906 - DNA, 532 bp, Homo Sapiens
gcggccgcagatttccgaaggcggcacggtgaagctggatatttaccaggaggtcagcagcgtcgacacgcgcgcctcggtggaggcgggcacggtgacccaaaaacgcgcgatcgacaccagtattttgctggatgacgggcaaatcatggtgctcggcgggttgctgcaggacggctatagccagagcaatgacgcggtaccgtggctggcggatatccctgggttgggggcgctgtttcgcaatgaaaagcgcagcgtcaccaagaccaatctgatggtgtttttacgcccctacattattcgcgacagtggcgctgggcgcagtatcaccttgaaccgctatgaattcatgcgccgcgcccagggcgggttgcagccggagcacagttgggcgctgccggatgtgcaggcgccgcagttgccttcggtggagaaggcgattcccggggcgcagcagcaggggccaagggcggtgattcgggcagtgccggtttcgcaggtgcggccgtgatctacctgaagtatgaag

SEQ ID NO: 80907 - DNA, 1139 bp, Homo Sapiens
cccaaaacacttcactgccacgtgtctctcaggggggaaggtttttactgctacgtcaagggctgtgtctgttccggatcccacgacgtcccggctaggtgactcggccatggcgtcggcaagtcgctcccggaggccctcctccgtgtgctccatggaggacatgtgccgcagcccgaagccctcaggccagctcccgcacacctccagcagggtcacgctcctgtcaaaggtacctgaggcagcatcaatcactgtggaaactccccttcgatcagagactggacgggatgaccctggcatgctgacggggtcagagcggactggctggatcctgagactgttgagatcaagatcatctgtatcaaaatccaaaagaggctgtggcgtgtcactcggaccatgagactgcaacacagatgaactggatgagataactgtggtttggcctgagggatggatggttttgaactggaactgtggacccatccacagacgtctatggggtccagtgtgtgttacaatttcaacctgggaaagccattcttcatcttcctgtccactatggtcagaagctaaactgtcgtaagacccatgtcgagtaatgggcccaggacttccagggggaaccaggccagcaagcaggaactgataatactgtactgcatctgcagcgaggagcagagggtggtttgcattaaacggtggctgcaattcattccattgaggggttctaaccagagtccagctggctcgaggcgatgtcatcatttccagtggtgtgtcgtcactaatcttgggtgcagtgctgaggggtcgcggctccatcatgtgttccactaaggtgccatagcaactgataatgtacagggactcaactacaacttgtttggactgatctttttctcttttcagacctgcattatttgcaaaccatgacctggatgttccgaagatagcagccacacaaaattctccgcccatcgatttgctgggtgaaatttgtggaggaggtttaactttgcaaattattggtgccttaagatgtctgatttgggatgaagttttgctgaaaaacacagcaaatgccacagactcaattttatgtctgcatgcagcaccaggatcttaatatatac

SEQ ID NO: 80908 - DNA, 515 bp, Homo Sapiens
  misc_feature (25)..(25): n is a, c, g, or t
gctggtggagcctgagctgttactnagagtctcgatgcttccctctcgctgaagttctgttccggatcccacgacgtcccggctagatgtgactcggccatggcgtcggcaagtcgctcccggaggccctcctccgtgtgctccatggaggacatgtgccgcagcccgaagccctcaggcgcagctcccgcacacctccagcagggtcacgctcctgtcaaaggtaccttgtcgggtgacctggagatgaggagttatgcttgagatcttttctttggcaactgggaatgagattagctgggagaaatacttttgacaagcaccagagaagagaaaacttaactctcggatagagatgtggatggagaattggttccaatctctggtagttccaaaaagagcaacatgtgaaacttcaataagtcattgtgctctccctgtgacaattacagctctttgaaaatctgccttagtgccttcagaacaaattgagattaatgaaaccaaagtcccaa

SEQ ID NO: 80909 - DNA, 773 bp, Homo Sapiens
ggccccccttgtgaattggtaaggagagacttatgttgaaagtggtggctgggaaacacttcttggcatacgaagacccagcatctaagacattttgattggtctcctacgattacgcaatgtgttcagaagaaactttccgtttcgaattgggtggaggtgtctccatagtacgagagctgcatgtgtatgggagtgtggtccctgtgagcagccgggatcctactaaatttcagcatctacggattcggcgatgctgctgatggaggaagcagaaagaatagctagagaagaacatgggtctgggaaaatcgctgtgatatcaggggtcggcaccaggaattattatagaaagatcggctacagattacaaggcccgtacatggtgaagatgctgaaataatggccacaccagtccactcttctgcagtatcctccctggcagaacacggagaatcaggatttcttaaatactcaacagagaggctgagcagagcaaatggggggcttcaccctcatcccgcagctgcagagactggaaactgccttcaaggccacggctggtcatctgctgaccacaccccagatccgccctctcctgcgtgcaccccaaaaaatcacttgcgtttttgaggcttaaatcatctatccagtttctacattttgcatgaggcctgcaggtggcctattttgactcagacggtgaaaaaagcaaattaactcatttggacaccataactcatgcaataaaactgattgtcattcgaggagca

SEQ ID NO: 80910 - DNA, 1097 bp, Homo Sapiens
  misc_feature (15)..(15): n is a, c, g, or t
  misc_feature (42)..(42): n is a, c, g, or t
  misc_feature (61)..(61): n is a, c, g, or t
  misc_feature (83)..(83): n is a, c, g, or t
  misc_feature (98)..(98): n is a, c, g, or t
  misc_feature (127)..(127): n is a, c, g, or t
  misc_feature (144)..(144): n is a, c, g, or t
  misc_feature (170)..(171): n is a, c, g, or t
  misc_feature (1018)..(1040): n is a, c, g, or t
gggctgtgtgtcctncacggttcagtgcttgagtcctcgctntggggggggtctctcaccnccagccacataggccagtgtangggttcctcatgtcnggcagtctgaggctgggatgctcttgacnccagctggagccacacntaagggctgcatccacatcattcacnntgcagtgaggaagagccagcagtggcagcacagccacacccgtcccacgtcagaggaggcaaggctgggtactcagcagccactctgagccggactccttccaggagctgaaatccacctgtcgccatcttccttgcctgcctgggtactcatgccaagcagagactgggattaggggttctgtgctcttgcctaattaggaacattctcccatgtctcttgtgtggtcccagaaggagaagtgagtttgccaaggatatggggcaggaggctccctctgctgaccccctgcagcctggagccagcccggggactgtcctgggtggagggcaggtgaacacaagctgctgccggggactgtcctgggtggacggcaggtgaacacaagcggctgccgcatgtagccactcactcgactttttttcagctgtgaccattcctgggagctctttgagcctttctgtctcatttggaaccagggggaaccaggaaggggctcctggcctctctgtgtcctctgcagtgggggttgtggggggcgcagcatccacgccttgctgcccttctttcatgaagtctgttttttaagtgctggttcccccgaatattttatgcagaggagggaaaatttatagtggcaattattttctcacagtctggtgagcaggcaattaattaggagtaagggggcctagtagagcgtggcgtgtggcagaatcgcaccgccccggctccccagcccaccgccatgcagggctcgcgtgcgggaaaactaatatgccggcgtttaagcctgtgcccctctgctgggtgtaactgcgctgaaataaatgatctgacaatgtgnnnnnnnnnnnnnnnnnnnnnnncctgagcaggcggccgcaagcttattccctttagtgagggtaattttagcttggcac

SEQ ID NO: 80911 - DNA, 1040 bp, Homo Sapiens
gaagttgtgtgggacaagctgctcctgacagaaggatgtcgctgctgagcctgtcctggctgggcctcgggccggtggcagcatccccatggctgctcctgctgctggtcggggcctcctggctcctggcccgtgtcctggcctggacgtacgccttctatgacaactgccaccgcctccagtgtttccagcagcctccaaaacggaactgcttttgaggtcacctgagcctgggatgacctggcccacttgcccttcctgaccatgtgcctgaaggagagcctgcggctgcattccccagtctccaggatccaccgctgctgcccccaggacggggtgctcccggatggccgggtcatccccaaagggaacacttgcaccatcagcatctttgggatccatcacaacccttcagtctggccggacccggaggtctatgacccctttcgcttcgacccagaaaatctccagaagacatcacctctggcttttattcccttctcagcagtgtccagaggttcgccatggctgatatgaacgtggtcctggcgctcacgctgctgcgcttccgcatcctgccggaccacgcggagccacgcaggaagctggagctgatcgtgagcgcagaggatggactttggctacgggtggagcccctgagcgcggatctgcagtgacccaccactgtcaagtctcagaaccacccgcgccctcctcaggcacctttgcagattcccggggaaatcaatctgtgcctgagtcccacagacagccagcagggggcgtcggagaactgcagggatccagggcctggcgaggggaaggcggagtatttctgagccaagaccctgacagcctctctggttgagcacagtggccccgtgctgagggcgggttgtcccagagcgcaggtggggacagtatcctgtgggcgatagggagccatggcgggtgtttgagcaggagagggaccagggttgaggaggcacctatggggcaggtttgaggctctgagtcactgaggaaaaccagagcggcac

SEQ ID NO: 80912 - DNA, 895 bp, Homo Sapiens
cccggtcaaccgcaccgtggtcgaggccatgttgcgcagcctgggctttgaagtgagcctggccaccgatggcgccgaggcaatccgcagcgccgagagcctgatttttaccgcgatcctgatggattgccgcctgccgctgatcgacggctacgaagccacccgccggattcgccaactgcccggctgcgccgacctgccgattatcgcgttgacggccaacgccttgcagggcgatcgcgaagcctgtctggcagccggaatgaacgattacctggccaagccgttcaaacgcacggatttgcagcaaatactgcagcgctgggtgcaatagcgccgcgccatcaaccaactgcgactggcgcgagagacgaaagtgcggcagtcttaggcacccaaacgggccgataaacaggctcggtttaaaatttcagtgaacaagtgtacattgagtaccttgacgctgtgactttcactacaacgcaatagtctatgtgtaggctgccggtatgaggcatgaacgcttcattcggtccgggaagatttaccctgccctgccgcatgggattattgaggagctcgcatgaccaaacaaaacgcctttactcgggaagacctgctgcgctgcagtcgcggtgagctgttcggcccaggtaacgcgcaactgcccgccccgaacatgctgatggtggatcgcatcacccatatcagcgaagagggtggcaagtacggcaaaggtgaattggtcgccgagctggatatcacccctgacctgtggttcttcgcctgccatttcgaaggcgaccctgtgatgccgggctgcctgggccttgatgccatgtggcaactggtcggtttctacctgggctggcaaggcctgccaggtcgcggccgc

SEQ ID NO: 80913 - DNA, 767 bp, Homo Sapiens
  misc_feature (686)..(686): n is a, c, g, or t
gcggccgcggctggagccgcagatggccagagtgccgatgatgcgcgcgaggccgccgagcaactgcgcgacgctattgaaaaaaaccaaggacacctcgaagccgccacaagaacactcaccggtgcgcgctacgaactgacccagcgcaacctctatgcaccggcggacgccgaagtcgtgcggcgcctgacccaacctggcgctaccgtttcatcggagtcagggcctgccttcgtgttgctgccgaacgaggtacgcatcgtgcgagccgagctcaacgagtcgtttattgcgcaggtccacgccggtatgaaagccgatatatcgaccgaaaacggcaacgaccaaccgtcgctgtccggtcatgtggtgcgtatcagctccgtgctgggtaacagcacgcttgaaggcgacccacaggcacgagccaatatgcgtaccgtggaatgcatagtagcgttcgaacaacctgcacctgcgtcactgcgtgtgggccagcgcatgctggtacggttcggggcaccttaaagcctttggcggctgcccgcgaccgccggcaaccgcctactcgccatacgcccacgtcatccgaaacgacgccccgccccactccgagtccagcacttcaacctgcccgccatgccactggctgacgcgtttgaacaacgccaggcccaagccanagccgccggtgcggcgatcgcggctggcgtccaggcgcaggaagggttcgaatattttggaacggcctccatcggcacacc

SEQ ID NO: 80914 - DNA, 411 bp, Homo Sapiens
gcggccgcctgctcattagagctctgatatgtaattgaaatctgagattacttatctggcttgtcgtatttaaaccactgattatggctctgacatttttgttactcttcaatcaaccagtatataaaggattcagaatctcttggaattaagaaaaagctattatcttcctggtatcaattatagcgcaagtaaaaagcaatgccttttttagccaaaactttgcaaaagtacatgctgggatctcagatctttccttgatgcccttcactttaacccctacttttatgtgtgacacaaacccggccacttctcaccttggaggcgagcaagctccatacccttcttccactcctgctcctgttgctgttgttacagctgtcagaatggccttctaaaaacaactcaggg

SEQ ID NO: 80915 - DNA, 969 bp, Homo Sapiens
caggcactgcataaaaaaagatggaagcaaaccaaatgcctatgtgcgaagggaggggggggcgggaaaaagagaagagtgaaggaatgatgcatgcactttttccttccccaaccatgcgctacaaaagggaagactaaatgagcccaagtaaatgctcaaagtgctgaaaagacactgatcagagattgtacaaccggcaccttgcttaatattaacttattttagtaatcaatatcccattaattgctaagacaaagtgatgcccaacttggcatgccccctccccccaatttcaaggtatcatgcaaatcattattgtgctgcaattatgttgccagataagggttggttacatacagtggttaacatacaaatgatccattgggcaaacaggaatcatgacattagaaaataggtaaagaaaaattagctaccatctacagtttggtagcattgtgaccataattagggttgttgatgaagacagttgctaggtagatggggagaggctgcttacacatcagacctcctcaggtataaagcgagttcatatgctttcttgttaagtgtgcctccgtggacaccttcctttcccatgactataaccaatgctctaccagctctgccgacagccacattgtatgttggctccccaccttgactctttgtccggatgtccattgtgcagtcaccatcgacgtatagactatctctgatcactgagcatttcttcgcgccaagagtcaaaccgttggtaaagaaaccttcccggtcttttccgtaatgctctgaaagacgcccccggccgtggctgcccagacgtatttggcgtcgcagtagccgacaatggcggcctcctggcagcagccatcgcacatcaggttatccacgtagctctgccaaccggccatcttcgagcggacgcgtgggtcgacgatatcccgggaattccggaccggtaccagc

SEQ ID NO: 80916 - DNA, 885 bp, Homo Sapiens
gggctcgccgtccgcgctgcagtgcgaagggctcgaaggatggccggttggcagagctacgtggataacctgatgtgcgatggctgctgccaggaggccgccattgtcggctactgcgacgccaaatacgtctgggcagccacggccgggggcgtctttcagagcattacgccaatagaaatagatatgattgtaggaaaagaccgggaaggtttctttaccaacggtttgactcttggcgcgaagaaatgctcagtgatcagagatagtctatacgtcgatggtgactgcacaatggacatccggacaaagagtcaaggtggggagccaacatacaatgtggctgtcggcagagctggtagagcattggttatagtcatgggaaaggaaggtgtccacggaggcacacttaacaagaaagcatatgaactcgctttatacctgaggaggtctgatgtgtaagcagcctctccccatctacctagcaactgtcttcatcaacaaccctaattatggtcacaatgctaccaaactgtagatggtagctaatttttctttacctattttctaatgtcatgattcctgtttgcccaatggatcatttgtatgttaaccactgtatgtaaccaacccttatctggcaacataattgcagcacaataatgatttgcatgataccttgaaattggggggagggggcatgccaagttgggcatcactttgtcttagcaattaatgggatattgattactaaaataagttaatattaaccaaagggccgggttgtacaatcctctgatcagtgtctttttcagcacttttgagcatttacttgggctcatttagtcctttctttttggaaccgcattggtttgggaaggaaaa

SEQ ID NO: 80917 - DNA, 971 bp, Homo Sapiens
gctagtagggcccgcgggttaatcggcaacgaggggttggcagagctatgtggataacctgatgtgcgatggctgctgccaggaggacgccattgtcggctactgcgacgccaaatacgtctgggcagacacggcgggggcgtctttccagagcattacgccaatagaaatagatatgatgtaggaaaagaccgggaaggtttctttaccaacggtttgactcttggcgcgaagaaatgctcaggtgatcagagatagtctatacgtcgatggtgactgcacaatggacatccggacaaagagtcaaggttggggagccaacatacaatgtggctgtcggccagagctggtcagagtcttggtctttgtcaatgggaaaagaaggggtccatggaggcggattgaataagacaggcatactcaatggcaaaatacttgagagactctgggttctagctgctaggcagactgttaagtattaggggaaaattgctcttaaactttcctagctataagcttaagtcttaattactggaaattttattagcaatgcagggtgatggggtatgaacctgtgtctcctttgtatccctctgtggtggggaaaggtgtctttcatttctgccctccccccccaaaatattctgttcacttctggttgttacttgtgtactccagacatggttatagtcatgggaaaaggcaggtgtccacaggaggcacacttacacaacgacaggcatatgaacttcgctttataactgcaggaggtccgcatgtgtcagcaggctctcccaatatacctagaactgtcttcatcaacaaacctaatcatggtcacaacggtaccaaacagtagatggagctaattggttaactattctactgcacgatccgtcgccagcctcattggatgtaaacacggtgtacaactcactggaatatgcgacaaagatcgctgcctgatgggg

SEQ ID NO: 80918 - DNA, 955 bp, Homo Sapiens
gcggccgcgcctcgttgcagggcatcggcgatatgtgcacggccatcgagcttgccgccgggcaccgccaggaacagatcaccggcgcgtacattacggctgtccaggctcaattcacgaatcagcagatcgcgtccggcgtgggcaaaaatcttgttcaggctaagagacatcagccgcgccctccattggctttgacagctgcggccggtggtcctgcgttcgcttgttgagtcggcggcaggttatccggcgtgatattcatcaggcgcagggtgccggacatcactttgctgaataccggagccgacaccaggccaccgaagtagccggccttgctcggttcatcaatcactacgacgatggcgtagcgcggatcgctcatcggaccgaagccggcgaacagcgagcggtaagagttttcggcgtagcccttggtgccgaccgaggttttacgtgcagtaccagacttgccggccacgtgataagccggcacctgtgcccggaacacaccgcgcggggcttcgatcacttgttgcagcatgccttgtatggtcttggcgactttttccgggattacctgagtggctttcggcgcttcgtcgacgtggatcaagctcagtggaaccatacggccattattggccaatacagagaaagcatgggccagctggatcgcggttaccgacaggccgtagccgtaggagagcgtggcagtctcggcttttttccagtcgcggtagttcggcaggttgcccacgcgttcgcctgggaaatccaggccggtgggttggcccaaaccgattttttgcgccaggtgatagatggtttcgccgccgatatcgaaggcgaccttactcatgccgacgttactggagttgatcaggatgcctgtcaaatccaacaccggcccttcgctgcgggacacgtcacgaatggtgtatttgcccagctg

SEQ ID NO: 80919 - DNA, 640 bp, Homo Sapiens
gcggccgctatcgccacaagaaggacacctaccttgccccgatcgaccccaatttcggcggctgcgggcggacgctgacggatgcggacggctattattacttccgcacgatcaagcccggggcttacccttggcgcaaccatgtcaacaactggcggcccgcgcatatccatctgtcggtcttcgggtccagcttcacccagcgcctgatcacccagatgtatttcgaaggcgatcccctgatcccgatctgcccgatcgtgaacacgatccccgacccggccgccatcgaccagctgatcgcacccctggacatgaacgccggaatcgcgctggactgcctggcctacaagttcgacatcgtgctgcggggccgccgctcgaccctgttcgaaaaccgtctggaggggaactgaccatgccgcagccgctgcattacctcaaggaatcgccctcgcagaccgccgggccctatgtccatatcgggctggcgccgggggccgcaggcttcgacatctatcgccgggaactgggctgggacatcgccgggccgaaggcccagggccagcgcatcatcgtggaaggcgtcgtgaccgacggcaccggcgccccggtcaaggacgtgctgctgcctcgtgcc

SEQ ID NO: 80920 - DNA, 1031 bp, Homo Sapiens
  misc_feature (86)..(86): n is a, c, g, or t
  misc_feature (112)..(112): n is a, c, g, or t
  misc_feature (125)..(125): n is a, c, g, or t
  misc_feature (131)..(131): n is a, c, g, or t
  misc_feature (153)..(153): n is a, c, g, or t
  misc_feature (159)..(159): n is a, c, g, or t
  misc_feature (164)..(164): n is a, c, g, or t
  misc_feature (169)..(169): n is a, c, g, or t
  misc_feature (178)..(178): n is a, c, g, or t
  misc_feature (185)..(185): n is a, c, g, or t
  misc_feature (208)..(208): n is a, c, g, or t
  misc_feature (226)..(226): n is a, c, g, or t
  misc_feature (237)..(237): n is a, c, g, or t
  misc_feature (250)..(250): n is a, c, g, or t
  misc_feature (253)..(253): n is a, c, g, or t
  misc_feature (267)..(267): n is a, c, g, or t
  misc_feature (271)..(271): n is a, c, g, or t
  misc_feature (293)..(293): n is a, c, g, or t
  misc_feature (452)..(452): n is a, c, g, or t
  misc_feature (518)..(518): n is a, c, g, or t
  misc_feature (970)..(990): n is a, c, g, or t
ggacctttccacaaaagtccccactctttataggcgagaggtgacacaatggtgagtgaaagagagacactacccttgtcaccccnaccagtgggagtgcacctttgagtgntgcagagacctgntgaggntgtggtgcccaaaaccttcccncagtcntccantgacncagaggccnagacggntgcccccaaaatcccagcctggnagctaggcacctcactcntgtctgacctntccagccaggctntcnctcacccatgcccntggnccaaggtcctaccagccatgantactgcatgacaagaggtggggggtacagacctcaggtacatttgaccctgaggttaaaaagggttcaggtcaagaggtgggagaggaaaggggtagatgggaggtggaatctgtaggaaagagaaaaagcaaagtcgttcactgactgagtagccccncagggagtggagacgggtccctggggagggagcagctgacaggtcagcagtgcccccagccccacnccaagaggagggcagcgtgtgcctgtggtctgggacgtgggctggatggcagcccagggtcacaggcataggataacatgtgctttggacctgacaagggagtaccttgggggtctgatggggtcatggccagccgagcctctgtagagatggaggctacagccctcagaagggaggggaggaaagagactgagggccctggcctggggcgtcgatggggaagcggtggcccccagtcctcttctgctgctcccagccccctcctcctggggccctcagggatctcatgaagtcttccttggcccaaccaggcagatgccccgggctccacgtggggggaggggtctggggtctggtccgggttccccgctttctctatgtcccccctccctctttctccgcagtgcggataaaaattggactcgaataaaacccttggtgcccggatggtnnnnnnnnnnnnnnnnnnnnncctgagaggcggccgcaagcttattccctttagtgagggta

SEQ ID NO: 80921 - DNA, 1618 bp, Homo Sapiens
  misc_feature (1486)..(1486): n is a, c, g, or t
cggtaccggtcggatattccgggatatcgtcgacccacgcgtcgcccacgcgtctgcacacctccaccgcgctcggaacccaggcctggggggcggtggggccgcgtatggagcccccgcccccggagtctgccaacattgccaacgccaccgccacgctacacacagcctcaactttcaggagacccgtccgtggccttatttattccacccttcctgtacatcgtagcgaatcaatccgtggcgccgcactcctccgcatccctctttaacagtacccctgggatggcgtgagcactcccccagcgatggacccatctgtgacgctgtggcagtttctgctgcagctgctgagagagcaaggcaatggccacatcatctcctggacttcacgggatggtggtgaattcaagctggtggatgcagaggaggtggcccggctgtgggggctacgcaagaacaagaccaacatgaattacgacaagctcagccgggccttgcggtactactatgacaagaacatcatccgcaaggtgagcggccagaagttcgtctacaagtttgtgtcctaccctgaggtcgcagggtgctccactgaggactgcccgccccagccagaggtgtctgttacctccaccatgccaaatgtggcccctgctgctatacatgccgccccaggggacactgtctctggaaagccaggcacacccaagggtgcaggaatggcaggcccaggcggtttggcacgcagcagccggaacgagtacatgcgctcgggcctctattccaccttcaccatccagtctctgcagccgcagccaccccctcatcctcggcctgctgtggtgctccccagtgcagctcctgcaggggcagcagcgcccccctcggggagcaggagcaccagtccaagccccttggaggcctgtctggaggctgaagaggccggcttgcctctgcaggtcatcctgaccccgcccgaggccccaaacctgaaatcggaagagcttaatgtggagccgggtttgggccgggctttgcccccagaagtgaaagtagaagggcccaaggaagagttggaagttgcgggggagagagggtttgtgccagaaaccaccaaggccgagccagaagtccctccacaggagggcgtgccagcccggctgcccgcggttgttatggacaccgcagggcaggcgggcggccatgcggcttccagccctgagatctcccagccgcagaagggccggaagccccgggacctagagcttccactcagcccgagcctgctaggtgggccgggacccgaacggaccccgggattcggaaagtggctccggcctccaggctccgggggccgggcgctgaccccatccctgcttcctacgcatacattgacccccggtgctgctgacacccagctcgctgccctcctagcattcacttctggagcaccctgagtcccattgcgcccccgtagcccggncaagctctcccttcagtttccattccagtggcagcggccccagttgcacatccccttctaactagcgtgggatgggcctctccaacccccgtgggggctcttccccggggcccccagaaagccatggattac

SEQ ID NO: 80922 - DNA, 1042 bp, Homo Sapiens
ggggtatcggacgaggcgccagctcgccccggcactgcgcacttgccagccagtccgcccgtccggagcccggctcgctggggcagcatggcggggtcgccgctgctctgggggccgcgggccgggggcgtcggccttttggtgctgctgctgctcggcctgtttcggccgccccccgcgctctgcgcgcggccggtaaaggagccccgcggcctaagcgcagcgtctccgcccttggctgagactggcgctcctcgccgcttccggcggtcagtgccccgaggtgaggcggcgggggcgctgcaggagctggcgcgggcgctggcgcatctgctggaggccgaacgtcaggagcgggcgcgggccgaggcgcaggaggctgaggatcagcaggcgcgcgtcctggcgcagctgctgcgcgtctggggcgccccccgcaactctgatccggctctgggcctggacgacgaccccgacgcgcctgcagcgcagctcgctcgcgctctgctccgcgcccgccttgaccctgccgccctagcagcccagcttgtccccgcgcccgtccccgccgcggcgctccgaccccggcccccggtctacgacgacggccccgcgggcccggatgctgaggaggcaggcgacgagacacccgacgtggaccccgagctgttgaggtacttgctgggacggattcttgcgggaagcgcggactccgagggggtggcagccccgcgccgcctccgccgtgccgccgaccacgatgtgggctctgagctgccccctgagggcgtgctgggggcgctgctgcgtgtgaaacgcctagagaccccggcgccccaggtgcctgcacgccgcctcttgccaccctgagcactgcccggatcccgtgcaccctgggacccagaagtgcccccgccatcccgccaccaggactgctccccgccagcacgtccagagcaacttaccccggccagccagccctctcacccgaggatccctaccccctggccccacaataaacatgatctgaagcagcaaaaaa

SEQ ID NO: 80923 - DNA, 385 bp, Homo Sapiens
  misc_feature (194)..(232): n is a, c, g, or t
gcggccgctccaacatcatttccagagcgtgggtggatacagtaacaagctctggaaatgatgttggatgaagagtgagggctcgagtcaggtcctagggagtaaccatgggactgagcagctgaggtaggaaggaagagaagactgttggcagaggttaagtccaagaattaaactttaatcattcaaatttnnnnnnnnnnnnnnnnnnnnnnnnnnnnnnnnnnnnnnnctgtataattttaatgattttagatatgcattagagatgcgttaataacaggttttgctggggaaaatctctagctcatgtatgcacagctgggggccctctttagtaaaatacaaagaccgttttacttagaacacaaaaagaaagtatcct

SEQ ID NO: 80924 - DNA, 710 bp, Homo Sapiens
gcggccaaaacccctcccatttactcaacatttggcatgattttatctgaaccaatctcttaggaggctgggaggatactgaagcgtcctgtgtttaaaataatttgtaggtctttggggccagattttgatggcatttttagattagatcagaaggtaggatgtagcagttctttttggcacaagaaagaggcatctgagcattcagcaagaaataaatatatattcccagacacacatgacagatgttgggcagtgtcctcacgtgacccactgagagaaaggatactacgtgtcctgccaattttagtatttattctggaatcccaggcttctgcaagctgttgggttgggtttttttaatgtgtgtggttttccttagttgttgaaggagtttcagaaaaatcttagatgaggataagaagggcagtataaacccaaaatcaccttttcttccctttcccttcctttttttgctccatctcagcttcctaggcttgattcatggagggagggacaagccctggggagagaaaagcacagaatttgagtcagtagatctggtttccattcctggttcaccctcttgctgcaaccctgagaagttacttcacatttctcatccttacctgaccccatctataaaatgaaaatcaagagatccatctcacagggttattgtgaataaaaatgtcctcgtgcccgaatct

SEQ ID NO: 80925 - DNA, 678 bp, Homo Sapiens
  misc_feature (24)..(24): n is a, c, g, or t
gatatgtgatgtgtttgtaacacnagggtgtgcacttgagcctggttttactgtttttattagacagagttgtttatatgctgtaactgtaacgcagcgagactggttctacagccatgtgtcgtaatcttgttccccgtccaagctgttgtatctgaaggtacccagtttgcacccaggatgagggaacgcattcaaaagtgaaatgtaaagccagtgcacgaatattatagtaattgagattttcccaggcttcactgatacagttgttttgcatttattcacaataatacagcagattcttaaatgccgatttttaattgtcttaaattttgctgctgttctcataattaaggacttgaaaaatgttttagtctgtcaagtatgtaaagtttgtgtaaaaacttttaaatgtcattcttaagttcattgccatagccattttccatttatgtcttcattttccaaaaatcaaatgccatgtctgatacctttaagtccataagcattcaattttctcatttccaccttcatctttggttaacagaataagtaaaacagggtattatttatttgtagtctagaaatgttgaatattgttttatttccttcaaaatgttatgattagtgcagatcagccatgtttatctttttaaaaaataaacaggttgctttatt

SEQ ID NO: 80926 - DNA, 1337 bp, Homo Sapiens
tgtggggcagctgcctggagccagaaccggtttggatgtcccccctagactcccaggagtctgtttatttacattcccctctccacgtgatgtcggtcccccatcgcctgctgagtcacttgtctgtccacccacccagcccagttctaggtcgttccccagcacctccaggttggcccacacaggtaccataagctgcctcggctccctgtggcttgtgcccatgcacctgccaggcccagcaggccaacccatcatctagagtagtggccatcagcacccgcctaacgggcaccatgccaagcactttcatcattatttatacatcgtcaccacaccccctctattcatgagaagtaaagctgagaaaggaccagattgaccaagcgccagagacaaaatgtggcacaacgagaaccccagccctgtccaggtggctccgcgcccaggcccaggcttagcagtgctccctgccctatctttgggaaaatcttgcttttatggtcttcccccctctcgccctcaagaacaagggccttgtgcgtgggccttcccattgctgctttcccaagaaggcctggattcaggggagaggccttcccagggccactccccttacaccctcccagaggcctgagcaacccctctctgggtggtttggggctggtgctgcctggcggaaggacagtgagggcggccctagccgcctccaccctcttgcgcctctgccctctcccagtccccctgtggcttctgaaaatctcagggacagatgaggctgagcccctagtcccctctgtgtgctttgagcctccagactcgaggctggtcactgcaggtcccaggtggaatttggacaactggcctggccgctcccatcctgtaagcccccaccacggggagaccctcatccctgcccctgtgtggctgcgcaagtattctgcccgcctcccaccatcagccttcgcccaaggggcccttctgcctctgcttccctcccttctcctctgtcttgccctggcccacgcacgcctgtctcgtcttccttgttttgctgcactcacttttttatactctgacaacgaaaagaaaaatcagaaacataaaagcgtgggttcccccaaaagggtgaaaccgaacagccgcactcacatattacctcacaactacaataaatacgatagcacagacctagcgatcccatgtaactgagactgcccactcacaccgcactgatcagagcagccactgagtgcgccactcacgtcacagcaacgacaagatcatcgcttatataagtcgctcgacacacgacgacacgcgagccacccagcagc

SEQ ID NO: 80927 - DNA, 963 bp, Homo Sapiens
  misc_feature (68)..(94): n is a, c, g, or t
cagtgttccttaaaatgtaattaagtctgctggagtcactaccacttgagtggtttcatttacgtgannnnnnnnnnnnnnnnnnnnnnnnnnngtattggtaggcagtctgccccatgtaacctatcatattgctagctcccggaggctgtgcacaactgttgtgacatcatgtgactgtaggctgctgcccacgaccggcctatcccactgaaactgctaggctagagctgctgtgaacttactgcccagcttggagctgtgctgctactagctccataagtgccagcaccatattcttgagctgtatagctactggtgccataagcagctgccccataggtgccttgaccataggtgtattggcctgcttgtgctccaaaggcagaatttggacttccatagccactgccattagcataaccagctctatcggtttcactacgatcccgatagcttgcagagtctctccggccaccatccttgactcctcgaagccttcggtcacactcatcctgatacatcagattgggattgttggctgaagaagtggtccggtaacgagaacgaccacccttacccccgcctccgccgcctcctctgtggtccacaagctgcatcagttttggattgatagcctgattggcctcttccagcactttgataagctctctggcctgttttaggttccctggggtgaagaaggtataggcggtacccttgttggtgctacgggctgttcggccaatacggtgcacataatcctctgagctgtttggatagtcatagttgatcacaaacttgacatcttccacatcttccacgtcaatgatgagtcagtgtgtaggttgatgtggcagggaaagagaaggtaaaggacatgccaacaacaggtgggaagcacgaatgcagatgacagcaagaggaaagaaggtgaagttagtaaccactctgaacagaaac

SEQ ID NO: 80928 - DNA, 681 bp, Homo Sapiens
  misc_feature (414)..(440): n is a, c, g, or t
  misc_feature (515)..(578): n is a, c, g, or t
atcaggatgagtgtgaccgaaggcttcgaggagtcaaggatggtggccggagagactctgcaagctatcgggatcgtagtgaaaccgatagagctggttatgctaatggcagtggctatggaagtccaaattctgcctttggagcacaagcaggccaatacacctatggtcaaggcacctatggggcagctgcttatggcaccagtagctatacagctcaagaatatggtgctggcacttatggagctagtagcaccacctcaactgggagaagttcacagagctctagccagcagtttagtgggataggccggtctgggcagcagccacagccactgatgtcacaacagtttgcacagcctccgggagctaccaatatgataggttacatggggcagactgcctaccaatacnnnnnnnnnnnnnnnnnnnnnnnnnnntcacgtaaatgaaaccactcaagtggtagtgactccagcagacttaattacattttaaggaacactgtctttccnnnnnnnnnnnnnnnnnnnnnnnnnnnnnnnnnnnnnnnnnnnnnnnnnnnnnnnnnnnnnnnnccccccaaccatcgtgatttgtcttttcatgcagattagttagaattcactgccaggtttcttctgcccaccaaaatgatccagtctggaataacattttgta

SEQ ID NO: 80929 - DNA, 615 bp, Homo Sapiens
  misc_feature (575)..(575): n is a, c, g, or t
ggggaagaggccaatcaggctatcaatccaaaactgatgcagcttgtggaccacagaggaggcggcggaggcgggggtggtcgttctcgttaccggaccacttcttcagccaacaatcccaatctgatgtatcaggatgagtgtgaccgaaggcttcgaggagtcaaggatggtggccggagagactctgcaagctatcgggatcgtagtgaaaccgatagagctggttatgctaatggcaagtggctatggaagtccaaattctgcctttggagcacaagcaaggccaatacacctatggtcaaggcacctatggggcagctgcttatggcaccagtagctatacagctcaagaatatggtgctggcacttatggagctagtagcaccacctcaactgggagaagttcacagagctctagccagcagtttagtgggataggccggtctgggcagcagccacagccactgatgtcacaacagtttgcacagcctccgggagctaccaatatgataggttacatggggcagactgcctaccaataccctccctcctcctccacccgctcctccttnacgtaaatgaaaccactcaagtggtagtgactccagcaga

SEQ ID NO: 80930 - DNA, 763 bp, Homo Sapiens
  misc_feature (570)..(570): n is a, c, g, or t
  misc_feature (698)..(698): n is a, c, g, or t
gcggccgctttcgagggtcaacttgagcaacagctgaaatgcatcgccgccttgtttaagcgctatcacctcggcgttcgcggttttgccagggtcgatcaggccggtctgcggctccagcagtttcaacaactcgccggtcggcggcagcggggcaggcccgggcgtcggtgctggcggcagcgtaggaaggttgatctcaccggtcatcgtgcgcgtcgtctctggggaaattgccctctttagagtagggcatcacatgtataatgccgcccgtctgcaaagagagcggtaaaaacctcacaactatttgatccagctctctaaaatcggtcgccaaagccgttattgtgcacttctctataacggccgctgcaccgccgacttgaaccgtaaaggcccgcgatcttttgaccagccctcttctagaagccgtagcgcttgcctgtgaacgcgacctgcgcctgctgttcgagcacctcgaactgcggctggcgggcggcgacatggtgcagatcagcggccccaatggcagcggcaagaccagtttgctgcgcctgctggccgggnttgatgcagccgacggccggtgaggttcgactcaacggcaagcccctcaacgaacaacgcaccgagcttgcgcgcaacctgattctggatcggccacgccgccggcatcaaggacgtgctcacgccgngaagaaactcagctggctcagcgccctgcatcatccggcgccccgcgatgccatctggcaagcct

SEQ ID NO: 80931 - DNA, 550 bp, Homo Sapiens
ggcacgaggggcaagttcaggtccgctgcccagttgaggcgaccgcccggtgcgaagccgccggggttgtcggtggcgatcaggttttccaggacttcggcgcccttgttcggcgtggcgcctttttccagggtgaggtggcggcgcatgtcgacgatggcgtcgacgtgctcgatcatcatcgggcactcttccacgcaagcgcggcaggtggtgcacgaccacagggtttcggcatcaaccaggccgttgacgatcggctggtgcgggttgccgccgtgctcgccaatcggtttacctggataagggctgccggcgaacttggcatcggtgccaccggccaggccgaccaccatgtcctgaatgagttttttcgggttcagcggctggccggcggcgaacgccgggcacgccgcttcgcacttgccgcactgcacgcaggcgtcgaagccgagcagttggttccaggtgaaatccttgggtttttccacgcccaatggcgcggttttatcgctgaggtcgagcggcttcaaacctgtagagcggccgc

SEQ ID NO: 80932 - DNA, 702 bp, Homo Sapiens
  misc_feature (26)..(26): n is a, c, g, or t
  misc_feature (52)..(52): n is a, c, g, or t
gtgctcagacaatatttaaggacatntcagcgagacaaagtgcatgttttantcgagtaccctgtgcaccacattatatctggcaattctttttgtttcattatgtgcatcaatatttttctcagctactattacctgaaacttgtttaacatgtattagacctagaattttcattttctttctcacatagttgcttcctggtatctgatttagaaataacatttaaatgccaagtatctgggggattgaaggaagggtctatatgagcaggtgaattagcagtactgtttttgtttagtggatattgttagtgactttttgtgtgtgttttgctttgggacctttttattttggtgttgcaaaaagtaacatattttcatcattgcttcatacgacatggagttaggacagggaaaaatcattcaacactccttatgcattaaatgatcaaataaaccagtgtaggatattaagactatcaattggtgggattaggcttgacattttatttttataaatatatattttttctgaatgtgtctgagtccaagagtgggcaaaaaataattttctactttggactaatctatagaggtttttgaaagtctgcattactaacttgttgaattcatgatattctgcctatggcacaaattgtaaacctttgtttttctaaaataaagtaattgaaaacctgcaaa

SEQ ID NO: 80933 - DNA, 663 bp, Homo Sapiens
cggcacgaggcggaccggtgccggagaactcgctgtccttgtccaggctgagcgtatcgaccacacgccgcagcatcgcgtcagacgagatgatggccacctggctgtcgacgatggcgagatcggcgcccgtactgttcggcgccggcgctgtctcgttcaccacccggttggggctgggattgatgtagaggacggcattcgacgtgtagctcggcgcggcaaagacgagatagaggacggcgagcaggagtgcgagcgcggtcgtcaccaggatctgcggaaggccgcgacgcaggatgtcgaccagtccggcaaggtcggtggtttcgcgccccgtttcttgtccggagatcgaatacggcgaggtcatcagcatcgtgtacgcgtaccttggaaagcctctcgcgcttcagggatgctccaccaatgtgctcattcgacgccgaatgaaaggcatcgttaatcaattggttaccgatggcggatcacaggcggtaatgagggccttcgcccgccgcgaatgagatcagacggctgattggcgagcgaagttaaagcaattttatgcgttgtgctttagggtgatggcgaaatctgctcatttcgaccccgaggagttccgtccatgcgttctagggtctttgccctttttgcggccgc

SEQ ID NO: 80934 - DNA, 638 bp, Homo Sapiens
  misc_feature (180)..(188): n is a, c, g, or t
  misc_feature (575)..(575): n is a, c, g, or t
ccactgcgccaggcgtatccccttcaattttgctgaaactatcagccattctccattttcggcatcatcatatttgctgcttccacctcctgggctgctatgcatgacagattcacagttggcagcctcagttgagcttctcagtgttgactggaaattctttaacttgttgtgatcccnnnnnnnnnccccacccatgcctccatctttgtcctccacaaatgactgagctcactgtctacttcacagaagacagcccctaaagcaagagcttccttgcctgctgttcctctctcccctctcattcatctgtgtctgtaactctccccaacccctccattcttgctcctatttaattctctatatcttgaatcctgttgtatgtcctccaagactgctccctcgcttactccactgctcccactccctggagtctccagcctctgtctccactggttacctccacacagcctgcaaacaagttctccacaagattaaaacagcatttctcagagtctgttaccccttacacattttccttgttaaccaagttacttttaaaaagatcctttttnaactgattcttcctcagctgttcttcagccctctatactttttcataaaagtcaccagtgact

SEQ ID NO: 80935 - DNA, 843 bp, Homo Sapiens
gcggccgccgcgttgctgggcgggcggctggaagccagcgacgcggatctatggcccctgctgtatgtgctgcccactaaagagactcagcagcatggccgcgaggtgctgcgcgacctgtttgccgcgtccagcaacagccatttgttcagtgcggtcgaagaggccaccttgcaaccgatgtcgcgcttgaatcgcttgctggaaactgcgcaagactacctggcccgcagcgagccgcccgacagcccggtcctcgaagggctgctgcgcgagatcgacgccaacttcaatagcgagacaatgccggaaaccttgcagcaggtacgcgggcaactgtcccgaatgctgacgccatgagtgcagaccactacgcctggacctggcgcccaaggccggtgcctgccgagccacaagcagccgtcggatggggcgacgccgcgcgccgcttgcttgcgcgcttgctgctgctcgcagatgaacaggctgcccgcttgcacgctaccgccaatggcgatgtattggtcgtcactggggcggtggcggatttgccgtgggtcgacggtgtcgaatacgccgcagtacaccccggcgcgcctggcgtatggctgcccaccagttgggagccgacagtgccggtagacttgctcggccagacgctgtcggcacgtttcaagcgctcgcccttgctgttgtggcgcgaacgcaagttgtagtgccgttggatcgcctgttgccggtgacggttgaacaccttcagcgcatcgcgacgaattggggcacccgccatgcaactgcctgaagccttgcaaccctggcgccagtggctggagtggtttgcgc

SEQ ID NO: 80936 - DNA, 440 bp, Homo Sapiens
ggcacgaggaccagtacagcacgggaatgcatgagagtgagccttggtttctttaggggagtcactgcgtaattggagagcagtgttcatgggcaagacaaaggagggccggggcaagtaagggaagatgagaagatgatgttccaaactactctcggtataaaatgtgctttgaatattttggattatttttccaatggtagagagagttttccctgagacactggttcatcaccaagtcaggtgacgctgggtctggggcactctgcatctacagcctggaacacaatcgtcttctctaggcaaaaccacgtgactcacatgaggctcaaagctggacccttcttgccgtctataccatacttagcaaagacaacaggcttaactgctctgtgaaaaatgctaaacaacttctcaaaaacaataaacatcttctacct

SEQ ID NO: 80937 - DNA, 1001 bp, Homo Sapiens
  misc_feature (729)..(729): n is a, c, g, or t
ttttaattagagcttcttatgaatttacatttgtgattccacaaatgttaaaattacctggtcttttggtattttagggctctgtttcaatacagcaatttttcagacaaaagttttgtctactgaattactgatgtgctactcattttgctcacctgatctttaaattaggattttaaaatttaatcaatgttgaaaggccaccatgctagggaatttgaaagcagcagagagggtatgtgtgttttaactggggccactaaaggagttttatacttctaacgaaactatcctgttcacagatgaggactgcctttttagtaactaagcctgttttaatctagaaaagtaaggtaactgggtacttcaaaaattttttcttgactgaatgaatgactaggctttctttacttaaatgatcaaaatgggtgtattatccatccttaagaacaatttatttgcagacaattgttcagaacctaggtaacaagtaaaatattgaagttacagaacattatagagactattaatcatcccaaaaaacaagtgctaggaaagagttaaatatgcgcagaaaaataaagttagaatgaaatctcttttagaagtacctcttttagtcttcatcagatttgcttttctctaaaagtgccaccttgtgaaatataccggaataaaacaagaaagctcatctcttaggacagtgtgaatgtttagaaagacttctgncaagaaaagtcaccttcctttcctaccacatcaacttcaaattgctgtaacagtatttcagcagatgctcgaaaagagcctgtatttattttcaggtggctcttgttttcttcctaaggctagacaaggtaacaatatgttgaaggaagtccacttctactcatttagctaaacgttatcacttcctggaaatgctgagaaatagaaaacattttgaaaagctgattggcacctcattaagaaaataaaaatccccagaaaggctacttgag

SEQ ID NO: 80938 - DNA, 1139 bp, Homo Sapiens
  misc_feature (229)..(287): n is a, c, g, or t
aaaatgcccatgcgcgttttattaataaaaactaacagtgccaagttaaacaagtcaaacaattaaagtctctttatataccataaaatattacagaaaagtttatttgtgtttcaataaaaagactatcgttttagaacaggcagctaatagcaactgtgcagttaatgggttttgtgaataaattttaaaagagactactgcctgtccttaaattcctttttctttnnnnnnnnnnnnnnnnnnnnnnnnnnnnnnnnnnnnnnnnnnnnnnnnnnnnnnnnnnncattctctatatttaatttcaattttataatagattacaggaagatgcttatgaaacaaatacatttgtttcagtacatgtctttaaatgatagacttataagtatgtaaacaactatataataaaaggtttccaaacgctgcctgtaagaaatcaggcaaattttaccataagcaataaaccattccaagccttccagacagtctccatagccgcaccagcatggcaataagctttaaccaaacgaaaacaaacaaacaaaagcacttcgcaatttgttgctgcaaaacagggagagaaaagagtgtacaaacttgatggaatcacaacagtcaatataatttaagggacaataaagtcaataaggttgatggtgtttattgtttaaaaagttgaattctgctgtttgcttggggctgtttagaaagttgcattctgctgtttgcttggacaccgtaccactgaacaaactccacagagtcttgctatccgccagcaggggtgccgtccaaactcacggcaaataagcggcatcaggggctcaccatccacaacaggaggtgttttattttcatggatgtggttgaaatacaatttcttcagcaaactcagcaaaaacttttcaggggcaaaaatgaactctgcacttaaagaaaaatagcaaatgaaaacacaaaatcctaacaagtaaataaacgctctgcatcagcacactggtatcaaaacacacatccacagcacgtcctaatcctacgggaaacaatccttgcttatcagaggtgcatatctaaaatcaataccccaccaatatcttcttgggagtaggccaaaaggaaacagaaaacccacatt

SEQ ID NO: 80939 - DNA, 992 bp, Homo Sapiens
  misc_feature (39)..(39): n is a, c, g, or t
  misc_feature (729)..(729): n is a, c, g, or t
  misc_feature (738)..(738): n is a, c, g, or t
  misc_feature (845)..(845): n is a, c, g, or t
  misc_feature (931)..(931): n is a, c, g, or t
  misc_feature (940)..(940): n is a, c, g, or t
  misc_feature (943)..(944): n is a, c, g, or t
  misc_feature (967)..(967): n is a, c, g, or t
aggaggagtgtgagcacctgtcacagaaaaagaaaaaanacaacccgcgccacggagaagcagggcctggtcccccacgatgaaaagccttcccatcagctcctgctctgggccctgtggaccctggagaccctggttcaagccacgggtgggcctcgagcccgctaggggtacccccgtgcgcctctctgcgcctgcgccggcgccctgtgcctttgcgagggcggagctgccttctcctcagcacagacccggagagcattgccagggcggagctgagttctcctctgcacagacttcggagatacagcgaagcggagcatgttctcctcagcacagacccgggcgggcgggccaggggcaccgcgagggcggagctgcgttctgctcagcacacacccgggagacaccgcgaaggcagagcagccttctcagcacagaccttgtgggcactgcctcgctttgggactactcggagccgcatcaatggtgaataaaatccttcctgtttgcagcccttaataatcagggtcagagaccagttagaagggttcagtgtggaaaatgggaaaccaaaagcccctctgaatcctacccaccgaggttctccccagccaaggcgaggcggccgcagtgcgagatccacaccgcagcctcggaagacaagcgggcagaaatcccatgaggggcagttgaggtttgaggaaggcgaggtgaggcacctgtagnagaaaaaantaaaaccgcaccacggagaagcagagcctgggtccccaactgacaaaagtgtcttcccattagcccttgcgctgggcccaggtgtccctggcattcctggttcgagnccagggtgcgcttcaggccgctaggggtacccaaaagcggcagaaggcccatgaggtgaaggtgatgcacctggggcagagaaaantaaaaacanacnngccgcgtataagcgggcctggtnccccacagaagaaactgtcctcaca

SEQ ID NO: 80940 - DNA, 528 bp, Homo Sapiens
ggcacgaggtggggcgtgccctacctgatggcggcgcacggcatggaacgcgcggtcgccgcgcagcacaccacgctgctgctggtcatcttcgcctgcagctgcctgggcatcggccggctgtccgaccacctgcgccggcgcaagccggtcatgctgagctatgccgcgctctacgtcgccggctggctgcccttcgtgctcgccgacggcgcgctgccgccgctggcgacctacgccacgtgtgcgctgatcggtgtttccgccgccgccttctcgctgacctgggcctgtgcgaaggaagtgaatccgcccgcgctgtccggcatggcgaccagcctggtcaatgtcggctgctttctcggtgcggcactgctgcagccgctggtcggctgggtgatcgagctgtattcgccttcgatcgccgaagcgacgcacgaagcggtgaccatgggcatacgggtgctcgctgtcgccgcgctgagtggcttcgtcgccacctgcttcatccgcgaaaccggcggccgc

SEQ ID NO: 80941 - DNA, 2305 bp, Homo Sapiens
  misc_feature (2030)..(2092): n is a, c, g, or t
  misc_feature (2100)..(2181): n is a, c, g, or t
cattgcagtgagtcggacaaagcttccccacacgcccgtctgacctacacttgggcgcacaccggcacgatgccgcacttgcccctgccgcacttcgccggcgcttcccgcacctcccggcgctgctgctacaccggcgccgccagcatctgccagacggccccgccgctgcccgctgtgcgcccgcaccttccggcagagcgcgctgctcttccaccaggcgcgggcgcaccccttggggacaacctctgaccctgctgccccaccccaccgctgcgcgcagtgcccgcgagccttccgaagcggcgccgggctgcggagtcacgcgcgcatccacgtgtcccggagccccacgcgaccccgtgtctcagacgcccaccagtgtggcgtgtgcggcaagtgctttggcaagagctctacgctgacgcgacacctgcagacgcactcgggggagaaacccttcaagtgcccggagtgcggcaagggcttcctggagagcgccacgctggtgcgccaccagcgcacacacacgggcgagaagccgtacgcatgtggcgactgtggacgctgcttcagcgagagttccacgctgctgcgccatcggcgcagccatcagggcgagcggccacatgcgtgcgccacttgcggcaagggtttcgggcagcgctccgacctggtggtgcaccagcgcatccacacgggcgagaagcccttcgcgtgccccgagtgcggccgccgcttcagcgaccgctcggacctcaccaagcaccggcgcacgcacacgggcgagaagccctaccgctgcgaactgtgcggcaagcggttcacgtgcgtgtccaatctcaacgtgcatcggcgcaaccatgccggccacaagccacacaaatgccccgagtgcagcaaggccttcagcgtcgcctccaagcttgcactgcaccgcaagacgcacctgggcgaacggccagcggagtgcgcagagtgcggcaagtgcttcagccacagccgctcgctgtcacagcatcagcgggcccacacgcgcgcccgcaccgctgccgccgttgccatccagtccgcagtgggcactgccctcgtctttgaggggccggctgaacaggaaaagccagggttctctgtgtcctagttgagggaggcttgctgaggcttctctaaaggtggttgggcaagcacctatatagtatcacggggacagttgaggcaactcgtagatggagatttgggaaaagacgatgtggcctcctacctttccagtttctgttggcagcccttcacgtagcctcctgcctcgcctctacacctactaccctgtcggcccttttgccatgctgtcctcgtataactcggattctctcctcaggtgtaggtgcagggagtcagggaacccttagactcccctgtgtgcaagagcccaggtgttggtgtgtccctttaatgctactgtgctctctggtgtttctgattttcctgcctttattctgtcttctcttgtcctatctcattccagcccacatcttctcctttcctgattacttttgttgtcctgcctcttcaggtaatggtcacagatttggctgtaggcacgttaccagccctgtggcttcttgactcttggttccctgttaactctgtttctgagaaatgtgggtatggaggtgggtgggaaagctcacttccatgaaggatgtctccatgctaggagctgcctgcaccctggcagaggtggccagtcacgtgaaggtgggcagggcccttagcatggccacacatgtccccagggcagatcaaggggcctctcagaaccatgttccccagccaggtgaggaccattttcactgggacccaggccaaaaccatgtgggtgcacaaagccaggcactgccaagtggaacatgaggttatttccaaatcatgggagccaccagcagggagagggcaggatggaaaatcccctggagccggtcaactttttgctcatggctagtgaaataaagttgtttgagtactacgatgcnnnnnnnnnnnnnnnnnnnnnnnnnnnnnnnnnnnnnnnnnnnnnnnnnnnnnnnnnnnnnnngccgcggnnnnnnnnnnnnnnnnnnnnnnnnnnnnnnnnnnnnnnnnnnnnnnnnnnnnnnnnnnnnnnnnnnnnnnnnnnnnnnnnnncctgcgcgtcccccgctcctccatcaaacttctttcccgccctttccctcgtggggagggagccctctccaactattccctgttactcggcgcgcgaccactcctcaccaacaaaatcacctgg

SEQ ID NO: 80942 - DNA, 638 bp, Homo Sapiens
cccacaccatacccagcaagtgggtgggggatggaggggtagtaccccttctccacgttatgaccgcatgtccagtcggttcatgtactcctgcaaggccttcaggcgtgcgtctatttcggccatgtcagccgcctggtgctccgagctgtactctttgatggggacccagcccccggagttggccagagatttctgatggtggctgcgttccacggggggagacttcatattggacccactccagggcgttgggctgggaggcttcccacggcggcggtgaccccctctggagagcgactcagagaaatcctccaaatcgctgcaggagctggcagacgagcagcggctgcggaaactgtccactgaggagctgcggtttcgggagcggttaggggcgtcccctcggccagtcaaggcagcagggggccgggtctggcgagaccaggagacggacggaccgtccccgcttcccccactgcctaagcggttccgctgctgctgcttcatctggatctctctctgcttcctttccttggctttcacaaaggccgtggggtcgaagcggagcgcgcgaccacctgtgggcgagggcgaggggcgcgcagggcggccccgaccccggctcccgcggccgc

SEQ ID NO: 80943 - DNA, 686 bp, Homo Sapiens
ggcaccgaggggaacccttgacggtatcgtacatgtgccagcgccagtcatcgttcgggtcggcggaggcgatggcgcaggtgatgccaccctgggccgacacagtgtgggaacgggtcgggaacaccttggtgatcacggcagtcttgtgaccgccctgagccagctgcagcgctgcgcgcatgccggcaccgccgccaccaataatgatggcgtcgaaggaaatagttggaatgttagccatgaatcagataccccaaagaatctgcacaccccagacgaagtacgcgaacatcgcaacgccgcagactgcctggaagagaaaacgtactgcagtcgcggacttgcccagcgccatcggcgtcaggtagtcggtcgcgatggtccacatgccgacccaggcgtgagcgcccagggctacaagggccagcagactgaagattcgcatcgcattgtgggaaaacaggccatgccattgctcatagccgatgcccgggtttgcgacgaggtatccgatcaggaaaatgaaataagccgcgagaacgaccgcagacacacgctgtgccatccagtcatagaggcccgaacgcgaaaggttcgtaacgctggttaccatatccaaactcctgccagaacgatcagcaccacggaaatggcgatgatgattttcgagcccaggcggccgc

SEQ ID NO: 80944 - DNA, 761 bp, Homo Sapiens
  misc_feature (117)..(132): n is a, c, g, or t
  misc_feature (261)..(287): n is a, c, g, or t
tcggcacgaggcaaataatgaactgactatagaaaagtattgacaaaatatttgagtataaatattttaaaggtgtgaattattaagggattttattattgtgagagaaattgtgcnnnnnnnnnnnnnnnnttatctgtgtattttattggacactatggtttacacttataaatagtaaacataatgttttcagtattaaatgtacatgaagctctcttttccataatatcctgtaccatgaagagctaaactaaagcnnnnnnnnnnnnnnnnnnnnnnnnnnntacatcctgttaaatttcattagattgagttgtatcattgtgaccaaagatggtgtcgactgttggctgctaacaagaatacataaagtcaatatagcaattgatttaaatagcatatttgtgcttaatatgtaaaaccaaaagaagtttctaagtacaacaaactacaattcttctaaacataagcagcaagccatagacatgcaaaagataggaactattcagaacacgcaaatgaattaggaggatcaaattatttctcaagcatgttcaatacttttgtgtagtatgccatgaatttaaatggtaggaaaatttaaagttgtaataggtgctttaagttttaattaaactaacgttttaaaaagaaatcatattatgcaaaatataaaatgttgagaaaatatgataaggacaattgatcaacagatgtttaaaccagctagcaatgtttatatataaaaatttagggct

SEQ ID NO: 80945 - DNA, 2150 bp, Homo Sapiens
  misc_feature (1720)..(1745): n is a, c, g, or t
gcgagggagacgtggtgggcggtccttcctgtgacacgacccttgagtgacagttctatttgattgcctccggtactgtgaggaaaggacacgactctatggtgaggactgatggacatacattatctgagaaaagaaactaccaggtgacaaacagcatgtttggtgcttcaagaaagaagtttgtagagggggtcgacagtgactaccatgacgaaaacatgtactacagccagtcttctatgtttccacatcggtcagaaaaagatatgctggcatcaccatctacatcaggtcagctgtctcagtttggggcaagtttatacgggcaacaaagtgcactaggccttccaatgagggggatgagcaacaatacccctcagttaaatcgcagcttatcacaaggcactcagttaccgagccacgtcacgccaacaacaggggtaccaacaatgtcacttcacacgcctccatctccaagcaggggtattttgcctatgaatcctaggaatatgatgaaccactcccaggttggtcagggcattggaattcctagcaggacaaatagcatgagcagttcagggttaggtagccccaacagaagctcgccaagcataatatgtatgccaaagcagcagccttctcgacagccttttactgtgaacagtatgtctggatttggaatgaacaggaatcaggcatttggaatgaataactccttatcaagtaacatttttaatggaacagacggaagtgaaaatgtgacaggattggacctttcagatttcccagcattagcagaccgaaacaggagggaaggaagtggtaacccaactccattaataaaccccttggctggaagagctccttatgttggaatggtaacaaaaccagcaaatgaacaatcccaggacttctcaatacacaatgaagattttccagcattaccaggctccagctataaagatccaacatcaagtaatgatgacagtaaatctaatttgaatacatctggcaagacaacttcaagtacagatggacccaaattccctggagataaaagttcaacaacacaaaataataaccagcagaaaaaagggatccaggtgttacctgatggtcgggttactaacattcctcaagggatggtgacggaccaatttggaatgattggcctgttaacatttatcagggcagcagagacagacccaggaatggtacatcttgcattaggaagtgacttaacaacattaggcctcaatctgaactctcctgaaaatctctaccccaaatttgcgtcaccctgggcatcttcaccttgtcgacctcaagacatagacttccatgttccatctgagtacttaacgaacattcacattagggataagctggctgcaataaaacttggccgatatggtgaagaccttctcttctatctctattacatgaatggaggagacgtattacaacttttagctgcagtggagctttttaaccgtgattggagataccacaaagaagaacgagtatggattaccagggcaccaggcatggagccaacaatgaaaaccaatacctatgagaggggaacatattacttctttgactgtcttaactggaggaaagtagctaaggagttccatctggaatatgacaaattagaagaacggcctcacctgccatccaccttcaactacaaccctgctcagcaagccttctnnnnnnnnnnnnnnnnnnnnnnnnnngacttcccttttcttggggtatggctgtctcagcacaatactcaacataactgcagaactgatgtggctcaggcaccctggttttaattccttgaggatctggcaattggcttacgcaaaaggtcaccatttgaggtcctgccttactaattatgtgctgcccaacaactaaatttgtaatttgtttttctctagtttgagcagggtctgaattttttcatttatttccttttttgccagcagacagacttgagtctgtaaagacaagcaaatacactgacagaagtttaccatagtttctaaaatgtaaaaaagaaaacccccaaaagactcaagaaaattagaccacaaattttgcattgttcattgtagcactattggtaataaaataacaaatgtttgtgc

SEQ ID NO: 80946 - DNA, 1067 bp, Homo Sapiens
cgctctctgtaacggccgcgtaggagcagcaagcctccctgtgagtcggtgggagacaagacggagcggcggtaagggcggtagggaagtgaagcgcctctctccaccttgttagaagcgcgctgaaagcggcctgcctacccaccccatcgctgccgttttgcagtcgtcgctcccaccttccgctgccgcctggagggaagccggagcgacgggggtcacggcggcggtcagagggtaaaggtcttgctcccagcagcctccgcggtggatacgtcgccatcttggatccgcgggacaagaaaattcatgcgagggagacgtggtgggcggtccttcctgtgacacgacccttgagtgacagttctatttgattgcctccggtactgtgaggaaaggacacgactctatggtgaggactgatggacatacattatctgagaaaagaaactaccaggtgacaaacagcatgtttggtgcttcaagaaagaagtttgtagagggggtcgacagtgactaccatgacgaaaacatgtactacagccagtcttctatgtttccacatcggtcagaaaaagatatgctggcatcaccatctacatcaggtcagctgtctcagtttggggcaagtttatacgggcaacaaagtgcactaggccttccaatgagggggatgagcaacaatacccctcagttaaatcgcagcttatcacaaggcactcagttaccgagccacgtcacgccaacaacaggggtaccaacaatgtcacttcacacgcctccatctccaagcaggggtattttgcctatgaatcctaggaatatgatgaaccactcccaggttggtcagggcattggaattcctagcaggacaaatagcatgagcagttcagggttaggtagccccaacagaagctcgccaagcataatatgtatgccaaagcagcagccttctcgacagccttttactgtgaacagtatgtctggatttggaatgaacaggaatcaggcatttggaatgaataactcccttatcagtaacattttttaatgggaaccgaacggat

SEQ ID NO: 80947 - DNA, 1554 bp, Homo Sapiens
  misc_feature (99)..(99): n is a, c, g, or t
gcggccgctccaacatcagaatggagaaccttctgcagcttcttgttcatctcccgaaggttctcgtcgcctggcttcactaggtctctcaggacgctncccagcccgctgcggtctgtgtggcctgctgccacagacacatcgatccggctgtccatgacgtaggtctcaatgatggcgctcttccggcagaggtcctctgccatggaagcactgctcacttccaggtgcttcaccttctcctccagcatccatttctcctgctgtgtctctgccagccgctgaaagagctcagccacttcctcatctgacagctctgctggccgagggggctgggcttgagggctgctggataaggacctggctggaacagccgagctctccttttcccgcaagatctcccggtagctgaaggaggagatgctactgctgtcccctgtctgggtccggcttggtgagttcatctctgagagaaccagctcctcaaggcctgagcggctcttgctgttagtgaggatgtcctgcagtcgctcctgcagcttatctgcccgtttccgctccaaatgcagctgccgcttgaggtccttgagcgcagcactgcccttcttctccaggatcctctgcccatccactgtgtccttcacctcctgcttcaggctgctaatggtcttcaggtggcagtcccgctcctcctgggcctgctcgagctgatcccgtacatcctgtagctcctcctccttgcccttcagctcggcagcgtgctgctcccgacactgcttgagggcttcctcttgttcctgctgctgctgctgcagggattcctcggcttccttcaagcgccgttcaaaccagcccttggctccatccatggaatgtacctgagcttgaagttcttccactgtctgctggagagtctccagctcccgtgtccgggccttctcctcccggatctgcccacggagctcctcctcctgacgcttcttgtcttcatgcagctctcggagctcacgctcatagcgggcacgcacccccagcacctccttctcatgccgtagacgaactgctcccagctcttccttgtgctgggacttctcttgcagcgtttccattgctagctcatccagcatggccttccgcttctccgcactcttccgagcctcctgtaattcctgggtcaactgctccttctcctgccctatttcttgaagttgttccagcagtcgactattggcccgtaatgactcctggagctgggagttgaggtcatctttctgtcccataaggtcctcgtactcagcctgctgctgctgcaactcagctgccagcccagtggtctgttcccggagcatattcagttcttgggtctttgctgtttggatctgctccagggcagccaggctagtcctcaaggcattgttctcagccaaaagcccttccacttgttcctgtgcatctgcactctggatggatacctgatcttgtagggcccgcaaagctgctgcatgttccaggcgctcccctgccgctgatctctcagctctgccaagctctgat

SEQ ID NO: 80948 - DNA, 353 bp, Homo Sapiens
  misc_feature (145)..(175): n is a, c, g, or t
gatttatgatgactccacccctcttcatcacccccgctcccaggccaggctcagcgattaagccgagcccttgcgtcctaggaaggggccttgccaacctcagccctcctgccccacactcctactgcggctcaaaccaagggcnnnnnnnnnnnnnnnnnnnnnnnnnnnnnnnatggaacagcccgggtgctctgagggggctgggagggcatggcttggctcccaaagggggtaggggcccggggcacccaggcaaggtggcccctccccgtctagccccctcctccccaaccctgcacttagtttctcctctggatcaaacacgtaataaagagaatgtttggaatctg

SEQ ID NO: 80949 - DNA, 715 bp, Homo Sapiens
cggcaagaggcgacatcgacgaactgcagatcgccaaggtggcacgtccggcgggattcatcaggctggccgcgatcgggcagggagccgacaacagcaagctgatctcatttagcgtcgacgaggagaccgcgagctggttgagcggatacttcgcggtgattctgagatcggtgaccctcgatggttgggtcgtcatcggaattctggcaatcatggccgtgatcagctgggtcgtgatgatcgaaaagatatcgttgctgaaccgggcctcgaaaggaaacaagctgttccgcaagcacttccgtgacgggagcagtgatctcgataccttgctgcaagtggacgcggacgattcgacagcgaccctcggcgcgcatctggagaaaaagacgcgcaaactcatgcatggtgcgcccctctaccggatcttcgatctcggcgcggaggagatccggcgtcgcttctccggaaatagcggacatcgcatcctgtcgccgcagtcgatcgaggcgattcgggccgctcttgacagtggctttgtgcaggagacccagcggctcaaccggatgatggtaatgctgaccatcgcgatttccggcggtccgttcctgggacttctcggtacagtggtgggcgtcatgatcacctttgcagcgattgctgcgagcggggacgtcaatgtcaacgcgatcgcccccggcatcgcggccgc

SEQ ID NO: 80950 - DNA, 566 bp, Homo Sapiens
gcggccgcagcacctcgctgcggccccctggcaccttgtccctctcttagcccgtccgtggagctgctttggtggtaactgaaatcgcttcccgcgaccgtctgcaaccgtccctgctggaccggctgaccgacgatgacccaaccaacctcaaggaaagcgccgacaaacgcgtgctgtccctgacccaattaaaagcctcggtgctgcgtgacctggcgtggttgcttaacaccacgtcgctcctcgacgccgatgccacgttgcacaccccggctggcacatcggtggtcaattacggcctgcctgcgctggccggcaacagcgtttccagtgtggatatcaaagccctggaagccttgatctaccaggcgattgccacttttgaaccacgtattttgcgccacacgctgcgcgtaaaagcccgcgtgggccatggcgagatgaaccacaacgcattgagtttcgagatcgaaggcgacctgtgggcgcagccggtgccgttgcgcctgctgctgcaaaccgacctcgatctggaatccgggcatgtgcgtgtgcctcgtgcc

SEQ ID NO: 80951 - DNA, 786 bp, Homo Sapiens
gcggccgcggctatcgaagccgagcggccaggtaccttcgccaatatgacctttgccgaggtcatgtgcgatgcacaaaaatgtgcaccatcggctgcgaatgcgcacgctcagacccgcgcactggtggattggggagtcgccaacggtgtattcgttgcaaatgcagaggacagctatagccccgaacgactcaataccctcaaggatgcattcaacagacaagtcagcaagcggttggttgccagccagacattggacaaagcactacccacgcgagaaggtattgcgcggaccaagctcatcgagcgatttggcgacctcggagcgcttttcgacttgaaggtgctcggtacagacccgtatcgcggggagcctggtcaagtcgggctgggcggcatgcattcgctattggacatcaccatgatggacatgccgaatctgcgcccctttatgtcaactgacccgcgtatcccattggaagccttgaacagtaacccaaggtttggcgtccaggaggcgttcgatcagcaatttgcacgcgcaatcgctgataaaaaggacgcggtcgctacgaccgttcagcacatgatctcccaacttctcgtagaggaccgagaaaaattcgatttcgggaagctcgagtttttttatgagcgcacatccaggctgtcgaccggcttctggggcagcacgccagattaaaatcaaccggaactgttggtcaaggttgagctggaggggcagataactacctacgaaatcgacctgaaccgcgcctcgtgc

SEQ ID NO: 80952 - DNA, 1561 bp, Homo Sapiens
  misc_feature (36)..(36): n is a, c, g, or t
gcggccgctccaacatcaaggaatcaacatttaccngaaagccacccatctacaaacagcatggacctgacatgaaacgcagatctagtggcagagaggaagatgatgaggaacttctgagacgtcggcagcttcaagaagagcaattaatgaagcttaactcaggcctgggacagttgatcttgaaagaagagatggagaaagagagccgggaaaggtcatctctgttagccagtcgctacgattctcccatcaactcagcttcacatattccatcatctaaaactgcatctctccctggctatggaagaaatgggcttcaccggcctgtttctaccgacttcgctcagtataacagctatggggatgtcagcgggggagtgcgagattaccagacactcccagatggccacatgcctgcaatgagaatggaccgaggagtgtctatgcccaacatgttggaaccaaagatatttccatatgaaatgctcatggtgaccaacagagggcgaaacaaaatcctcagagaggtggacagaaccaggctggagcgccacttagcccctgaagtgtttcgggaaatctttggaatgtccatacagaagtttgacaggttacctctttggagacgcaacgacatgaagaaaaaagcaaaactcttctaagtcccactcgtgaatggcaattagagaaaggactgacagtggcggtgccccataggatgtcatattgaggcccaaacttgattggagaatttgcaaactaccgtcgctcagcaacaccaaaaagagaaagtctggttaaaacaccatgagtcaaatgtcgggccagccaacagtaacacttgccaagaagcatggcgtagaaatttctatgttccgaaacacagagtagtgtccacatgtgagcttttcacattaccttatgtatacaacaggagctgcgttgttttcttctttttcttttcctttatctgttgtccaacaacagtgctgactgtccggataagagctggcaagtgcccttaggatgccgcatgggaaaaatcggttatcataatttcaaagtataaatatatttattaagtagcgctgcggctaagaaggaagagtgaggggtctgtccatggggtggcagtgatttcacacccgcctttcttgaatggcttcgtgttactcagccgtgccctggcaggaatggaactccatcagggaacagggcagctctgtttgaatggggtgaaaaacagcaaaattaattcttagcaagctccttgttctctactgttcaccgggacctggctggcaaatgacttagctattagtatatttaaaaactgttcaaaagcaaaagagaaggaacaggaatgaaaggaaaccttcccttaactctttctgcttcccatagcaggtctggttcctgctccccgcctaggacaggagctgtctggagctccacctttgcaaagaaaggaaaaacacaaattgcccccagattggcccagtggcatgccattaggtgattttgcgtaggggccatatcattcatggccaaaaaaaac

SEQ ID NO: 80953 - DNA, 438 bp, Homo Sapiens
gcggccgccttcatcccgcaggactgagacccgcccgcccctcgcccgaaggcgaggggcaagccaaaggccccgcacgacgtcgtgcggggccttgtgcgtgtccgtcacccgatcgttgcctcgcctccctttcggcggcgcggacgccgcgcctacgctgggcgcctcaccctgcctgccgccgtgctcctgtctccttgcgtgtgaagggatgaacccatgaactggcgtgttgtcggtggcgccctgcttgccgccctggctctcgtggttggatcgagcgtcgtggcgccggcgccccgcgccgccgccatcatcgacgggcgcaaggcggcggcaacggacgccccgtacatggtggcgatcaacgccgtggacggcgccgtctcgccggacgcgctggacgggagacccgatcagtggtgccctcgtgcc

SEQ ID NO: 80954 - DNA, 1335 bp, Homo Sapiens
gcggccgcggctgtaggctttttattttcaagctcaaaagacgatagagaaagaatacttgaaggccaagaagcttgagagaagaaaaatttcagaaaaattgtctcaatttgactagaatatcaatgaaccaggaaaactgaagcaccttccctaaagaaaacttgggtatacaattactccacagacagagctgagggttttttacccaaatcagtcactggattttgctgcctgatacgtgaatcttcttggaatttttctcatgtggatctaaggggaatgctttattatggctgctgttgtccaacagaacgacctagtatttgaatttgctagtaacgtcatggaggatgaacgacagcttggtgatccagctatttttcctgccgtaattgtggaacatgttcctggtgctgatattctcaatagttatgccggtctagcctgtgtggaagagcccagtgacatgattactgagagttcactggatgttgctgaagaagaaatcatagacgatgatgatgatgacatcacccttacagttgaagcttcttgtcatgacggggatgaaacaattgaaactattgaggctgctgaggcactcctcaatatggattcccctggccctatgctggatgaaaaacgaataaataataatatatttagttcacctgaagatgacatggttgttgccccagtcacccatgtgtccgtcacattagatgggattcctgaagtgatggaaacacagcaggtgcaagaaaaatatgcagactcaccgggagcctcatcaccagaacagcctaagaggaaaaaaggaagaaaaactaaaccaccacgaccagattccccagccactacgccaaatatatctgtgaaggaagaaaaacaaagacggaaagggaaacacaatttatctttgggagttcttactggcactgctccaggacaaggctacttgtcctaaatacatcaagtggacccagcgagagaaagggcatttttaaattggcggattctaacagcagtgtccaggttgtgggggaagcacaaaaacaaacctgatatgaattatgagaccatgggaagagcactcaggtactattaccaaaggggtattctggcaaaagtggaaggtcagcgcttggtgtatcagtttaaagaaatgccaaaagatcttatatatataaatgatgaggatccaagttccagcatagagtcttcagatccatcgctatcttcatcagccacttcaaataggaatcaaaccagccggtcgagagtatcctcatgtccaggggtaaaaaggaggaggcactacagttcttaaac

SEQ ID NO: 80955 - DNA, 786 bp, Homo Sapiens
gcggcgcatataaccgctgcggcccaaaaggccagcatccaggatggacaaaacacctatgctctcgacctagagacgcgcgagcagttgctcgacacccttcgccgctttgtggccgagcgcctccggcccctggaggccaaggtggccgaagaggacaaggtgccggacgaggtgatccgcgagatggccgaactcggcctcttcggcatgtcgatcccggaggaattcggcgggctcggcctctccatggaggaggagtgcctggcggtgatggagatctgcaaggcgagcccggccttccgctcctgcttcggcaccaatgtgggcatcggcagtcagggcctcgtcatgttcggcacggccgagcagaaggccaagtggctgcccggcatcgcggcgggcgagatcatcacctccttcgccctcaccgagccggaggcagggtcggactcagccgcggtgcagacccgcgcgcgccgcgacggcgaccactatgtgctggacggggccaagcgctacatcaccaacgccgggcgggcgcaccttctcaccgtcatggcccgcaccgacccggacaagaagggcggggcgggggtctcggccttcctcgtgccccgcgatgcgccgggcgtgacggtgggcaagcctgagaagaagatgggccagcagggcgcccacatccacgacatcaccttcgacggcgtgcgcgtgccggcggagaaccgcctcggcgaagagggcgagggcttcaaggtggccatgcaggtgctggaccgcggccgc

SEQ ID NO: 80956 - DNA, 1007 bp, Homo Sapiens
  misc_feature (956)..(966): n is a, c, g, or t
caaaaagggctttcaggccaggggaaatggccctggcccacctccccgaaggcagggaaaggaaaggaggaaaagggagaagtttttttactcctggggccaaagtagggggacaaacacccagtcgtatatggtttcagctctgaccaaaggcggatagggagctctcctggggtaggagcagggagccaagggggaggcagtggctgtgcctgggtgggcacagacagatctggtacatggccctgagccctgggcagagggacaaccttgccggtgagtgggcaggcagagaggaggcggcaggatgctgtttccccgattccatcctcagggagtggagactggaggggaggtgcactgactcagatgaactgttctcccccttctttgataagaagtaggtggcagcagcctctggaaaagtcagggccctggaggttacctggcccagggctactacagccacaggccccagtggcaccatgccaccccttccatggctccactcaagggggccacacagccaccgcctcttcctcctttccttcatcccaaactgggacaaaagacttcaagttctggctaagatgtagcagcagcggatgcccgggcatccaaagtggaaagccagggccccgtgtcaccggtgtgggcaaacacacatgcacgtgcacacatgttctccctgaatcactcagcagcagacaggctgccgccctgggggtctcagccctgctagggctcaccaggtggaagcctaggtggtctgacctcagtttaggagtgggtcatttacgtcatcttaccatttggggacgagacaggaatggtatcccttagggacccagagacactgcaaacagtgggtggccatgtagggctgcatgtccctgggtccaggggaatggagggagcaataacttgaagaaggggggaagggtttcttttatccnnnnnnnnnnngtgtgacttctatcaaaacacagaaatacagccgcggccgc

SEQ ID NO: 80957 - DNA, 582 bp, Homo Sapiens
ttggtttaatgcctttatttctctttaaggaccagaaccaggaatactatatcgaaaaattagtctgtggatttaacactgacttagcatatagcttaaagttgctcttttggtttttaacttcctccatacataagcttcaaggacaataagatgttaaaaaggaggaaataattatttttattttgacactgtgacagttttggtaactaggatcctagggagggaaatgtttgcctgttgaacttctttctgttatgagaggatttagttaggtcattaagatgttgatcacacagcttcaatcacaatatgccaagtataacctggtttcgttagaggtgtctacagtccagatgttcttcgtaataaaagcaaagtttttgaacctctgagtccaaagcaggctggttggcataatatgtaatttgaaaaataaaatcttatcttgcagcactatcagtatgttgaatttattatgtatattatttctaatatccgaaactaaatacttgattttttaatatgtgtgtttattttatgatattgctattaaatttttattatctacctgaagtaaaa

SEQ ID NO: 80958 - DNA, 731 bp, Homo Sapiens
  misc_feature (64)..(64): n is a, c, g, or t
ggcatgaacggctcacggggacctcgggagatgcccaggctgtctcgcaggccctaccactggngacctgatggggctaagcatctccccttggcaggtgctgagatgcccctcagtgcccagcacaaataattctgcagagatgctgcccatttgccggctgccatccagcagacgccagggagacgctgcgtggtgatgagtgcgcaagaaccagcgtgggctccactcctcccgcctgtgcccttgaaaaaagtgtgtcattgtgtcacttgattttctcagtgacaaccatgtggggctctgcaggtagaaaagtgaccacttgtgtcaggcactgagctgagctgaatccaaattcagcaaaacctctcctctctggtgcctggcgagtctcttaaagctgctcggagacctgtaagctcgccggcttcggggcaagttccttccgtttgaccggccaacagtgacattcgttggacccaaaggaccctggacagacccctgagggaaagtgatgggcaattgttttgaactctccaaaagggagctggaacagaatatattaggagcaactttcccatcccagcgagacttgggtgaattccccgggagctcacgctttctacattggtccttttcgttagattgtttaaggacacgcagcttgttaaagcagcaggaccctgtgtccctttatgtgcaaattaaatctcaggtcgatgcctcct

SEQ ID NO: 80959 - DNA, 775 bp, Homo Sapiens
gcggccgctgcttcgtcataggcaaccaccgccaagcccgaggcgagggcctcgagaacaacgttgccgaaggtttcggtcagactcggaaacaggaacaagtcaccgctggcatagtgctcggccaatacctcgccccgttgggcgccacagaacacggcatcgggcaactgctgttcgagcgtttcgcgctgggggccgtcgccgacgatgaccaggcgcatgcggcgctgtggataagccttgcgcaaggcctccatgcacggtgcaagcagccctaggttcttctctgcggccagccgccccacgtgcagcacggcaatgtcgtccgcgcccaggccccagcgctcgcgcaacgcctggctgcgccgggccggattgaacaggcaggcgtcaacgccgcgggccatgagcgccaggcgctcgaaaccacggcgctccagctccaggcgctggctcgcgctcggcaccagggtgatggcggtgcgccggtgaaaccagcgcaggtaatgagtgagcaggcgcgtcagcaggcccaggccgtactgccgcgaatattgttggaaattggtatgaaagccgctgaccacggcaacccccaactgccgcgccgcacgcagtgcgctgaggcccagcggcccttcggtggcgatgtagagcacgtccgggcggtgcttgcgccagcggcgcagcagtgtgcgcttggtgatctcgccccattgcaggcctgggtaacccggcagtggccagccccggcagagcagcagatcatccc

SEQ ID NO: 80960 - DNA, 994 bp, Homo Sapiens
  misc_feature (699)..(707): n is a, c, g, or t
tttatagtagagtttattatagttgttttagcagttttaccttgtctgattgctcactgctctacactcagcatttactatgtttattccttcaacagatattgcctgtaatggttgctcaataaatgtgttgactagttgaatggattgtgtaaacacttcagattttgttgccattatcaataaggagaaagtggaaacacagttcaaattaagaaatgattaaaaccccaagtttaagaggctagtgaaccatttcagttgactgctatgatgaaaaaggataaattttacaatatagaataaattaaatgttatattttaaactttgttgtgaaaactttgcaaagcgtgcttcaaggaattatatccagtatctttaatttttaagacataaagttcttatactttcttgtttggtatattatttatctttgaaattgatatggcttatatattgaacatgagaactaacgttcttacaggaaatgcattaacttgaaagaagcctgctttcagagagagttgtagatacctggaaaccgagtagtacaattccagggtggtggaattcccttaggaatttaaattgtgagcattttgattggataagaaggaataaggatttttcttttacatgttttctttgagatgatggcccaattctctacatgtctcattgcaaaatagttctatagnnnnnnnnnaaatatagctctctatgtatttatagtaggaaatttagaagatgcagaaaacataaagaagatgtatgtatatatgagtattttatatacatttttgaacataattgattcaatataagattttataatctgcttttctcttaagattatatacttatctatcacttgaactttaataattgggtacagaacatggattgtggattcttcgaaatcctttgttggattcagatttctaaattcagtttgctctgtatttgatgataggaaataaaatttctgggtgt

SEQ ID NO: 80961 - DNA, 1138 bp, Homo Sapiens
aaatttcagcctgtgaaagctgcagagaggccaagccacaggaagccagcatcagacgaagcccctcctggggcaggagcctctgtgccaccacctctggaggcgccgcctcttgtgcccaaggtacccccgaggaggaagaagtcagcccccgcagccttccacctgcaggtcctgcagagcaacagccagcttctccagggcctcacttacaatagcagtgacagcccctctgggcacccacctgccgcgggcaccgtcttcccaccaaggggactttctcagcacttcatctgctacaagccccgacagcgatggcaccaaagcgatgaagccagaggcagccccacttcttggtgattatcaggaccccttctggaaccttcttcaccaccctaaactgttgaataacacttggctttctaagagctcagaccctttggactcaggaaccaggagccccaaaagagatcccatagacccagtgtcagctggcgcttcagctgccaaggcagagctgccaccagatcatgaacacaaaaccttaggtcactgggtgacaatcagtgaccaagaaaagaggacagcactgcaggtgtttgacccactggcaaaaacatgactgagcagctttgaaggctgcagtcctatagaatgcataccttcctccctctagacatccctccaccagaagagacatctatttaaaggcacactggccaaaacgtttgtgcatctgtcactctcgtgtagtttacaaaaatcgtgtctcttattcagtaagatggttactcagccaccaaaaatatatttcactcaaggcttgtacatctgaagtttgctcttcaaggaatgggaaccttcctgttaaattcggtgtatggattttaagaaaggaatctagccaatgaggtccaagaagttctcacccattgaatttttaaatggctgttcagttcatgttgtacgtgatggagatttgtcttttgttttatttgcattttacagatttggtataacattttgggggagccacctgaaaggttgatgtataaaggtaaggatttaaaggaaagaggtccgttggtgacccattagtagcctggtccttggccccactttaaaaccaaggggttac

SEQ ID NO: 80962 - DNA, 461 bp, Homo Sapiens
caaagactaccaaagtatgtatttgattttcacatgcaaacaacttaaaaccttataaatctcatgtcaactctgcatgatgccttgaaggaaatgacatacaaagtttgctaactgtgcaaaatattaaattgctaaaacattttacataatgaaataatacatgtaaatgttgaagttgacacatgaaattaacatggcataagaacttatcacatttcagatattttctttagtaacaagtttttgtttttatagttcctggtacacagcaaagtttatcacgaaagataaaaatccttttaaacaaatccaacaggaaattcttgaggcaccttctcatataaaacacaagatgaatgcaattatcaatccatctgagaaaagttttcaatctaaatgaacatcattttttccatttaagtatattttacagaactttaataaggcaagacaaattt

SEQ ID NO: 80963 - DNA, 659 bp, Homo Sapiens
  misc_feature (277)..(317): n is a, c, g, or t
gcggaatgggaagcagtttatggagttaagtggggctctgctatttcccccaagaaggactcggaagatgttgattccagggcagagtgaggggcagacgggatgaggctcttctgtaaagtccaacagacgctcacagatgctgggaggctggggactgccaggttgggagcctcacccagagagcctcactgcattgaccccacacccaccactcacccagcacacagggggcctctcctcacgctcccaggccaccaggatggcccccaggttnnnnnnnnnnnnnnnnnnnnnnnnnnnnnnnnnnnnnnnnntgaagggcatcacagccccaagtctgggtaagaaattctccaccaaaggtgttaaggaatttgctttgctgaggagaactggatgggtgggggaaaacagcaacaaacaaacaaaagaaatgcacagggcctcttctcatctggtgagatgagctcacactgctcaggggatgttggggaacagcgaggtgtgaggtgtggcctcagagcccggctgcacctgtcctgttccctctgacttctcacttttccacattgcaggcttcaaaacagagcttggggaagcccctctgcggggcagccctagggaatcctcagaggggccagaagtgcgcctgggtg

SEQ ID NO: 80964 - DNA, 893 bp, Homo Sapiens
gcggccacagtgcgcacgtcatgagtgtgatgctggaacggttttgtccgcacccactgcttctcactgctggtagatgtcacagagaaccagctgaaaatggaagactggttccctcggctgtgcccaccacgaaactgtcttcttggtcagctacagcaatggactgcacgtcagcattagcgatgagatggctcttcacaagcgtcccagtggctgagtcccagaactgcaccttcccagcagagtccacacttatgatagtgccatcggacaagaaggcgacaccccacacgatgcacttccgcttagacacgcccatatactgcctgtccacaatcatcttatgaacagcgctgcctgatttgacatcaaacacactaatgtagtctatggaaccagctgcaatgtgggtaccagagggatgccagctgagactcaggatgcgacttttctgccgatcaaaatttctttcaaactggattttgtctggggtaatttgaaatagtttcacagatccatcttcacaaccaaccaaaagttgagagccactggggctggcagccatgctccaaataggtcctccaaaggcatccatagcatacttgatgtttaacgcctgtaaatcatactccataatctcgccattgagcccagcactaaagagtcgctgtccttctgcccagcacaaagcttctgtagcccgagactcatgacctgggaaaaatttctcctgaaagtagtttgctgacaagttataaatttccacagtgccatctgttcgtgaaacagccaatctgtttgactggttattgtaagccacacagcggattccagcggccccacgctccccttcccggtgctcgcctctctccgccccggccccacgtccc

SEQ ID NO: 80965 - DNA, 926 bp, Homo Sapiens
gctggtaccggtccggaattcccgggatatcgtcgaccacgcgtccgagcgcgcgcgcacgtggggccggggcggagagaggcgagcaccgggaaggggagcgtggggccgctggaatgggtgaatttaaggtccatcgagtacgtttctttaattatgttccatcaggaatccgctgtgtggcttacaataaccagtcaaacagattggctgtttcacgaacagatggcactgtggaaatttataacttgtcagcaaactactttcaggagaaatttttcccaggtcatgagtctcgggctacagaagctttgtgctgggcagaaggacagcgactctttagtgctgggctcaatggcgagattatggagtatgatttacaggcgttaaacatcaagtatgctatggatgcctttggaggacctatttggagcatggctgccagccccagtggctctcaacttttggttggttgtgaagatggatctgtgaaactatttcaaattaccccagacaaaatccagtttgaaagaaattttgatcggcagaaaagtcgcatcctgagtctcagctggcatccctctggtacccacattgcagctggttccatagactacattagtgtgtttgatgtcaaatcaggcagcgctgttcataagatgattgtggacaggcagtatatgggcgtgtctaagcggaagtgcatcgtgtgggggtgtccccttcttgtccgatggcactatcataagtgtggcactctgctgggaaggtgcacgttctgggactcagcccactgtggacgcctgtgaaagagccatctcatcgctaatgctgacgtgcaggcccattgctgtagctgaccaagaagacaggtttcgtggttgggcacaggcgagggcacagcttccattttcagctggtcctgc

SEQ ID NO: 80966 - DNA, 1115 bp, Homo Sapiens
gtggcaacatttggcagtatgcagctgtgccatcaacaaatccagagtccaagggcctggattgtctgccaaattcttaggagttatttgatcagcacgttgattaatccagcctggagctttcctgaaaggtactgcaagtgacataacctaagggacaaaatgaccaagcataaaatggacacattcacaaaatgaagcctgtggactgaagagtaacagaaagcagtcagtggagggggaccatcaacctcatgaaaattgcaactggaacatgtcactgagaaaacccagggaaaactcacaaaggcattctagagcactgcttcctaaatgttactgtgcttacaaactacctaagtatcttgctgcaatacaggatattcggtaagctatggcaaactccaaaggtgatggctgatgtgtctggttcaaaaactacacttcgtatcaaaggtttaaagaaaaagacttggcttcaagtgcctgccataccaagaggagactgacagcagattctaccagcattacctttataaagtctgtgctcccctttctgctgttgtctctctcccagtgctagatctctagagagtgagaaatccaagttgataaaggttagaaaaaagtagggaaaataaccaccgaaagactgaatatacaaagggacaatggccagaccacttatggtaatataacgctgatgactcacattagatgcccaggaaaccaaaaaacaacttctgtagcaatcaatccagaaagtcaaatgacagcctttgtaataaccagctcagatggtcaggactaagtcaatgctgccaacttccctgtatttgttctcactttcaatcaggatgaacaaaaagaaagccaaatataaaatcaattccataagatgacatgtgtccaggtaacctgtcccagtccttcccatgacaacaacctgccatcaaggtctctacatagcctctttttctttttgcattactaaaaagcttttccactgtctgtcagtctttgagtctccgccaaacatggataatattaatagataatggtagcccactcccttgttacagtaacctctaaataaatagcttcacttgtttgtt

SEQ ID NO: 80967 - DNA, 1238 bp, Homo Sapiens
  misc_feature (38)..(38): n is a, c, g, or t
  misc_feature (41)..(75): n is a, c, g, or t
acgacgagcgcagcgagtgcgttatgcgaggaagcggncgnnnnnnnnnnnnnnnnnnnnnnnnnnnnnnnnnnncagtcgacggtaccggacatatgcccgggaattcggccattacggccggggagagctgcttggagagctaagctggaagggtgcttatccctgcgtagaaacgcctgccaatgctttctcatttggacccagactccagatcgggagcagtcttatagctggatcagctaccaagagaagttctaaaccaagaagagaaaagcatttcaatttgggacatttatttgcacctggaaatggggaatgggctgtcagaccagacttctatcctgtccaacctgccttcatttcagtctttccacattgttattctgggtttggactgtgctggaaagacaactgtcttatacaggctgcagttcaatgaatttgtaaataccgtacctaccaaaggatttaacactgagaaaattaaggtaaccttgggaaattctaaaacagtcacttttcacttctgggatgtaggtggtcaggagaaattaaggccactgtggaagtcatataccagatgcacagatggcattgtatttgttgtggactctgttgatgtcgaaaggatggaagaagccaaaactgaacttcacaaaataactaggatatcagaaaatcagggagtccctgtacttatagttgctaacaaacaagatttgaggaactcattgtcactttcagaaattgagaaattgttagcaatgggtgaactgagctcatcaactccttggcatttgcagcctacctgtgcaatcataggagatggcctaaaggaaggacttgagaaactacatgatatgatcattaaaagaagaaaaatgttgcggcaacagaaaaagaaaagatgaatatcaatacctattatatctgtgtggagtaggttttctctggtctgattttgacaaatagaagagtgtctacagcgtggtttgcctgtctgccctcctggatgctattaaagctttgttttgttgaacaatcagatgcccaactctgttgccttgtggaagatgagtaaatgcagtgcttcttaaagtggtctcttctccctaccccacaaatcttttggtactaccatttggggaagccaagcaaggatagtaaattgaccagaacacagttgtgggaatttggtctgaagttagtgaaataaaactttaaagagtgaaaaa

SEQ ID NO: 80968 - DNA, 779 bp, Homo Sapiens
gcggccgccgccatgaacatcgcacgccagccaaagtggtcagccaccaggctggacaccggccgcgccagcaggatgcccagcaacaggccgcccatgatgctgccgactacacggcctcgggactcggcgggcgccaggtgcgcggccagcgggataagaatctgcaccgagacggaactgaagccgatcagcaacgacacaagcaggaacacattcggctgctcggcaaacgccgcacccagtaggctggcgatggccacaaggttggtgatgatcatcagcttgcggttttccagcaggtcgcccagcggcaccagaaagaacaggcccaaggcatagccgatttgcgtgagtgagacaatcaggctcgccagtgccggggtcaggccgatgtccggcgcgatcaactcgatgatcggctgggcgtagtagatgttggcaacaatggcgccgcaacagaacgcaaacagcatcaccatgcctcgggtcatggtgcttgaagcgtgtgaggtagcggtcatggtgttctcattcaagcgaaggaaggtagcgggcgagagtaaagacaacgtctgcgccggtgtagagcgtgcgcattgatatcactcatgccgcaaattaatgactgaatcgttaacttttggggcgagcgccaatgatacattcaggcataactgtcgaaacaggaaatccactgcgatgaaaatcacgctgaacaagatgctcctggcctccaccctggctgcggccatggccatcgggctggccaacgccgc

SEQ ID NO: 80969 - DNA, 613 bp, Homo Sapiens
  misc_feature (489)..(513): n is a, c, g, or t
gcggccacgtaagcacccagaacttgctggaaaggagctctaccaaggacttggcaaacctgtgacctctccagatatcgtttccttgtctagattcttggctgtatttggtgagaactacatcagggatacaaggactcaagcccaggcctggcacttgaccgtgctcgagactggaaactatcactattatacacgaggatccctgcagtggaacgaggcttttgtaacgccacaaagctgtgtcctcgaggagccagtgtggctcctacaccctcttacctcttacctctttgcctagaaaacagctgatgcatggggccagctcctgcagaaaggatgccagggccctgcagcttgcaccagccccagcctctagcaccacccgacaggcaacaacttctgtaaaaatcctgtcacttcaatgaaaggccctcttagaacagtttctcaaactagcagaagaaaggggcattttctggacactannnnnnnnnnnnnnnnnnnnnnnnngtgaggtgaagtttcactcttatcacccagactggagtttcactcttgtcacccaggcagctctctgcaaactccacctcacaaagaaaaacctcgtgcc

SEQ ID NO: 80970 - DNA, 463 bp, Homo Sapiens
atagaggcaaggtcttgctatgttgtcaggcgggtctcaagctcctggcctcatcagttctcctgccttccaagtagccggaactacaggtgtgcaccattgcacctggcctcatgagtattttagttagataagatttgtttggttcagagggtcttagttttttaagacctgttaatttgtaattagacatcttgggccttaaactgtatttttgttttagtggtgaggttgggttttactttgtgtattccagcgttctcaactttgtcagatattgctagggaccagtgagatagataatccaaaaataataatttgactttggttgagtatgtcattaccacagtgttagttgaattgcactttaggttagaaaagttaattttcacatctgtgctgcgggttaggtgatattgtcctcagcacaatagatgaggaagaaactgaatcagaacagtta

SEQ ID NO: 80971 - DNA, 867 bp, Homo Sapiens
caacccctggttcacccagtggcctcgtcccagaagaagccagaggtagcgccccagccccagagagtgggggtgagtctgtgtttggggagacccacccgggccctgcagggggccatggagaagctgcaggtgagtaggtcctggcatgggccaacaaggggggcggtggggcaggacaaggcaggtgactcctgacatgtgaccccattattttggctccacagcgactttatggaaggagaaggtggacctgaaggagcgggtagagaaactagagcttcaattcatccacctctcaggacagacagacaccatagtgagcgagaggctagggcaccgctggggggagctgccaggccgtccgaggggccccagcatctgagccatgtcctcctgcaggaaagtacatcagccagggggcagtgtcagagacgcagcactgggagaggaggacatcgtcaggctggcccaggaccaggaggagatgaaggtgaacctgcaggagctgcggggcaggtgttgcagcttgtgggagaccacaaggaggggcatggcaaattctgaccattgcccagaaccctgctgatgagcccactctaggagccccaatagcccaggagcttgggtgtgctgacgagcagggtggcttttatcctagatcaccactggattgctgacagatagaggacgtgggaccctgactatcacccctaatctgcagtggatttggctctcggcactcccaggctgggagctggatacctgccctggcagcatgactcagactgcatgacaggtacggcgtgcccaggatgatgtgcccaggcctctggccacctgagtccagccccccacacaaccccc

SEQ ID NO: 80972 - DNA, 1554 bp, Homo Sapiens
tcgctgtcctccatcctccattccgtccaactcctagcccagtcccgggggcgcctacttcaggtctgagagtctgaactccgagatgctctgggtgtgtggatttccttcagctaccctgatgtccccacttccaagtcctgactcctttgagccatcccagggggtgtccggccactggaccacaggagcagaggcgagtctgtgactgtgtgaccagcaaggtgtgtgatgtgtgcgtgagcgagcacacgagtgtaaagaatggcacccagacctgagctaggacagagggagcctgggggccacaggcaagctcatttcttctccacacccctccccgcccgaccctgtctaaactaatggggtagtggtagccgcaagggcagggatgggagtggctgaagcctacttcactcccaaagatttctaaggaaaatggttctactgcatcctttggctgggccttgttgacccgtgaccctctttcaagaacattcactctgatttccagtgtgccgtctccactggccacgttctctgtcatgcagtctgagtcatgctgccagggcaggtatccagctcccagcctgggagtgccgagagccaaatccactgcagattaggggtgatagtcacggtcccacgtcctctatctgtcagcaatccagtggtgatctaggataaaagcctgagagtccaccctgctcgtcagcacacccaagctcctgggctattggggctcctagagtgggctccatcagcagggttctgggcaatggtcagaatttgccatgcccctccttgtggtctcccacaagctgcaacacctgccccgcagctcctgcaggttcaccttcatctcctcctggtcctgggccagcctgacgatgtcctcctctcccagtgcggcgtctctgacactgccccctggctgaggtactttctccctatggtgtctgtctgtcctgagaggtggatgaattgaagctctagtttctctacccgctccttcaggtccaccttctccttccataaagtcgctgcagcttctccatggccccctgcagggcccggtgggtctccccaaacacagactcacccccactctctggggctggggccgctacctctggctttttctgggacgaggccactgggtgagccaggggctggcagcacaccctttgttcctcctgggcattggctccagcggagttgaaaaatgccaccatggcctcccggctctccaggtcccctgggatgttcggcatgggccgaggcgcctcctgctcactgtccagatgtcctcctccatctccgtgcggctcccggggctcccccgcgggccgagccgagacagctcctcaccttcgccgcggagaaagacaataggctgcctctcccccggcggcggcagcagcggctgcggctaaagcggcggcaaccgaggcgagcaatgggcacggcggtctcggccgagccgaggggcttcaccgctgctttccggctccgcgacagctctgcacgtagcatcccgggaattccggaccg

SEQ ID NO: 80973 - DNA, 685 bp, Homo Sapiens
gcggccgcaagaccaagaccagtttcagccagggttactgctacccgtgcatgaccaaactggcccagtgtgacctgtgcatcatgagccccgagcgttgccattacgacgccggcacctgccgtgatccgggctggggcgaacaattctgcatgaccgaccacgtggtgtacctggccaactcgtcgggcatcaaggtcggcatcacccgtgccacccagttgccgacccgctggctcgaccagggcgccagccaggcgctgccgatcatgcgcgtggcgacccgtcagcaatccggtttcgttgaagacctgtttcgcagccaagtggccgataaaaccaactggcgtgctttactcaagggcgatgcgcaatcggtggatctcaagcaggtacgcgatgagctgttcgccacctgcgccgacggcctgctggggttgcaggaacgctttggcttgcaggccatccaaccggtaaccgacatcgagccgatcgaaattcgttacccggtcgagcaatacccggccaagatcgtcagcttcaacctggacaagaacccgattgccgaaggcacgttgctggggatcaagggccagtacctgatcttcgacaccggcgttatcaacattcgtaagtacacgggctaccagctcgccgtgcatcaagtaaaaaggatgctatcccc

SEQ ID NO: 80974 - DNA, 917 bp, Homo Sapiens
  misc_feature (52)..(52): n is a, c, g, or t
  misc_feature (268)..(308): n is a, c, g, or t
gcggccgctccaacatcagaatggagaacgggacgacggtgggctcacaccnggagattggaccctcccctgcaggggcactcgagccccttcttggtgacatccagcagctggtggcctgcagacctgctctgttcagccactcacccagaggcagcctcgcctcgctggcctgggaagggctggctggggctcctggactcggcccctagccagactcagcccctcccctgaactctgtcccctctgccagcccagatgaatggcnnnnnnnnnnnnnnnnnnnnnnnnnnnnnnnnnnnnnnnnnagcaatctgttcactttttgcaatctattttttaaaagtttcttggaggctgctcctggcaggatggagggtttcttgggggtggaggtggctgtggccatgcactcctttggacgtgtcctagatgacattctcaaacagctgcatggagctcatgatgttctcatccttctgacaggcctccaggaactcttcaatggtcactaccccatcctggttccggtccattttctcgaagaacctctccacgtgctccgccggcgcgtcctcccgcaggatggggtaggtgtggcggcccatcatgtcatagatggacttcatgatggccagcatctcctctttggtgatgtagccatccttgttaatgtcgtagagattaaaggcccacttgagcttctcgtggactgtgccccgcagcaggatggagaggccaaccacaaagtcctcaaagtggatggccccgttcccgtccgcatcaaaggcgttgaagaggaagtgtgcataggtggtggcatctccctgagggaagaactgcgcgtaaatgagtttgaaggtgtcttcgtccaccaggcccgtgggacactcattcttaaagcccctgtagagaga

SEQ ID NO: 80975 - DNA, 827 bp, Homo Sapiens
  misc_feature (331)..(340): n is a, c, g, or t
gcggccgcgaccattcccgggtccatacacttacgtattctcctttgattacatcgcatggtcactgccgaagtggaagagcattttagatgctaaaaatactctgccgactgcctctagcaaagcctttactttgagtcagctctcttccctgaggcaggaaaaggcctgtttctctacaaggtcgtcaataccagatactatgcttccctttataaagccgatttgatgggctagaaatggcaacttgatacatccttcaatttttcctttgctggtgaagttagtcataactttaattttgaggaatttgaaaggttgatactaaaannnnnnnnnnaattgcagtggcagctgcattacacagttaataaatgagatctatttgcatctgtcttatttccgtctgtcttttgttgaatgctggcacttagtatgtgcctctaatctaaaagagctctctgctcttgaagttatttcattggtcacacattaaaaaattactgagcacttactttacaccaagcaggcattgttttaagtgcaggggagcgagaggtaaacagtctctgttctcatggagctcacatcctaggtcaggcaataagcaataatcattactttgatgtctgtatgggtaggtctggcaggatgcagtctaatgtgtttgttaatacagtggtttaaagagtgtgcagaaaggggtgttcgagatagataaaagtggggcagaaaggtgacaacagttaaagcatactgataggtacacatgggctttgtttaaagctattttctctacgttggtacactttgaatattcctcgttc

SEQ ID NO: 80976 - DNA, 1330 bp, Homo Sapiens
  misc_feature (937)..(953): n is a, c, g, or t
aaggtagcgaggcctgggtggcgtattcggcacgaggcgactatgggatctttgggaaagaaaacagttagctttcttagaaaatgtaaagaggtcacttacacaaggaagattatggaaaccaagttttcttaagaaccctggcttcctaaaagatgatttgaggaaccctcccaacccctcagagtcattaagctcaaattctcccagtagtcaggtgccagaagatggcttatctccaagtgaaccgcttaatatctatgaggatgacccagtggactcagattgtgacacagacacaaccacagatgatgaatactacctggatgaaaatgacaaagagtcagaactgtgaggctttttcaataaaatgctttacttttttcaccaaaagcttataatggaactaaggtgtacatgtgcatgtgcatggaaggataaaagatctagtctgggcagtgtctgctctgaaatgtcccacatctccttttttttcctccacaccctatatagacacttcctgaatgctagaacaatgaattcttgttttgagagagtctctgctattttctatctctggaaatgttcttagcctgcctttccaccactcccacttaatccctgattcactgtctgatttgggctttctgctttacttccctcctaacatttttcatctttaattgtgatttacaaccctaatatcccaggcacatacaaaacttatgaattacccagcacaactgtgaaactctgtattgcttcttccggtccacaccctatactcatgacattaaataaaaggtagggatgataacagtggggtaaatattatcatcctgtttgactcatgaacatttaggaagtttaaggtggtgatcttctctttcaaacaaagataaaggaatttattttttaacctgagaaactgattgcnnnnnnnnnnnnnnnnngataaaggaattttgtaagtacttcctgttatatccgtagtggagcctgggaggcacatggtcaaagcacatgttgaggttatagattaggacctgaatccctagtaagccaatagaaggttagcagtcctagaaattcctctgaaaccgtgggggactggctggattattaagggcttttagtcaagccaaggacttaggccaggcaacctgaccatacagaaagttgcctggtcacagaatttctgcttatgaagagaacatagctgaggagcagaggtaggaagtaggtatcccttcatgggaccgacttacctttactgcagttctctcagcaactggcttttcccatttcctcagaactatccattttcaca

SEQ ID NO: 80977 - DNA, 1196 bp, Homo Sapiens
gctagagcccgagtcgcagctccgggccgcagagcgctgggcgagcgcgagcgccagggcaccggcagggcaggcagctgcgcgcggctggagtcatgctatactgaaaagacacttcatcaagataactctgggagaagcagaaaaccctgtgccagggacaggaaagataggagaaagaaagtttatcagaattttttaaacctgtctcagaaataacaacatattttaatcagagatttatgttgctatgaggacagattcatcaaaaatgactgacgtggagtctggggtcgccaattttgcatcttcagcaagggcaggccgccggaatgccttaccagacatccagagttcagctgccacagacggaacctcagatttgcccctcaaactggaggctctctccgtgaaggaagatgcaacaagagaacagatgaaaaaacaacacaagaccacattggaaaagccctcaaaatgaagaaaaatgaaggctcataatctatcaagagtgctgaatttctggcatgttgaaagacttagtggttctgttttcttgagacatttaatctggtggtaactgtggtaacattgcagccctaagcagcatgtgtatattagataattgtgttgtgatgctactcactttgattgcaatgatgatgtccaaggtaagctattaaaaggcaggttacttccaaaccgcactgaagggcaaaaggttaagaataatacatgatcacagaaaatgcataccactgtctgtaaacccaacaaaattcactgttctcttttggatttatttagcctgatgtatttttaattcaatttttatggtgatgggcaaatcattcttggtaaatgtaaatcaaacatgattgatttaaaacttcatggaatttgtagaaaattatggacatttttggtgagaaagaacaatagtcaaaactcacatggatagagtgtgtttgttttttgccaaaaatgccccagactttttcccaaacctcaaaaacgtcttggaaaaattgtaaaagtttgataacagaaacatctttaggatatttttgtctgacatattttgcttctagtatgtgcctactgtgatttttttcatgtggaaaatgcaaaatttgtaacaaaatggttatatggaacatgcctattaaatgaattttactatcttccctaaaaaa

SEQ ID NO: 80978 - DNA, 1055 bp, Homo Sapiens
tatatctgtatcggtgcgtctgtcggttcgagttgtgtgtcgctcggttgccgccctttgtccttccacgagtgtttggtgctgtcccaggcgtggttttgcaggccttagtacggtctgcatccccgacggtgtgggcattgttatagtttcacatgtagcccattttcggttttacggacagaggttagatctgagacctgcttccgaatgcctctttccgactggcctggctctgcatatgcttactggttggagtgcattgataggatggtcccccttaatctggaagcttgtttcactcctttttcctggagtgcaccgggcatgatcatggtagtctgggcagtaggctgttttgttcataactgtttgtcctgaatttttctgtagagtttgctggtcaaacgccattaaatttggaacaaacagtagtaggcagcgtcttttctattaactgccttcaaaggcaggattctttgcaaacttgtctaaattgtacatgttcccatatttctgccatttctctcataaggaggactttgcaagaagtagtctatctacaggcaaacttacaggtctaatcttggtccttggagtatgcctctccacattgtttgttgacctatcagatttcagagaaagtggcttaggggttttaccatcttctatcttttgggatgctgattcagcctcttggtctagaagcaactgtgctttgtcactgagacatgcatcacattttcctaacgcattttgcttgcgttctgattcctcaaatgatgtagctcgttcaaaaattttgctttcactctctgaagtatggatatcttcctttgaagaaaaaaatagtgacttcatggaacgttcaatgtctctttcttctggtgataacagaggctttggaaaacagccttgatcaacaacacctatgctacacataacatcttgtggttgtagggacccatcgaagatcttctgcgacgcgtggtcgacgatatcccgggaattccggaccgtaccacctcttttttaacacggtcatatcacattcg

SEQ ID NO: 80979 - DNA, 1008 bp, Homo Sapiens
  misc_feature (899)..(933): n is a, c, g, or t
ttgaaaggaagctcttcaccagccctgttatggataggctgtggaaggtcgccagtttgctccacaagagggcaactgggggcctcgttcgtcagcacctggagaggaggctccgcagcttggccatgtgggtcagagctcacggtcatgggctccttcagcagcagcccacacgatggcattcctcgcaggctggcgtggtgaatgagccctggtaggtccagtagtcccggcatgccgggaacaggcaggatgggtcaaactttgtgaagggcgcctccttgccctttgtcttaatcttgtccaatgcatcaaggaaaatctggaactcgccattctcatgtcctatcttcagaaaaatgccacatcacagcgatcccatcgcgctgcttcagggcttctttaaaagtgttatacttcgggttccagtgaaccaaatgaagctccgctgcatacttgactccatccacggtgtgctcagagccatgatcatccgaagagccccagtgaagatgaaactggcgaagtcggtagggtccagggagaggaccccctctcagcattgacctatcataagtatcatcaaatacaactcggcaggtcttcccattattcaggatggtcttggcagagccaccatcataagacacagaccatggctgcagagaagggtcatgcctgatgtctttagtatgcagctcaatgggcgactggttttcccccttggcatttgggaaaagttcatgccagtggtcaggaccgttgtgactggcgtagccccactccttggccatggtcgccttcctccgtgctggacggctcctgctttctcttccctgcgtggtgcccccggccgtaatggccgaattcccgggcatatgtccggtaccgtcgactgnnnnnnnnnnnnnnnnnnnnnnnnnnnnnnnnnnncggccgcttcctcgctcacatactcgctgcgctcgtcgttcggcaaaaacgaccagcgccctatagtgatcaaca

SEQ ID NO: 80980 - DNA, 675 bp, Homo Sapiens
  misc_feature (48)..(48): n is a, c, g, or t
  misc_feature (90)..(90): n is a, c, g, or t
agaattcggcacgaggcaaactaaaagacaagaaacacatctctattntggaaggaacctggatgactcctattcctttcattattgctntgaaagaagctggactgaatatctttcctactagacactctcatttttatgttattataaacaataaggttcctttggtagaagtgaaagcttatcgacagatggccctactaagttctgcttttgcatttggttggagcaagtggaacctactatgtaattctacaaaagtcgtatttaaggtgagggaacaccttactgaagaatgtactgagaatcctaattgggcccttttaatgtttagtggtgacagagcacaaagactgaagatcaaggaagagagtgaggcattttctgaagcacttaaagaagaaactgagtttcattctactttatatcacatggtgaaggattttgcttctgaggaagcaatggagaaagtcaggagttccaactgtcagtttgtcaactctgtgtgccacatgctgctctctaccagattgctcagctactcctaacctccacttacaaactgtattgtaagtatgaagaaccaagcatggtgaaagacaggtatttctgcaacacaatgtaatgagtgaatgaatacatttcaaatcaactattaaaaattttctaatctgc

SEQ ID NO: 80981 - DNA, 408 bp, Homo Sapiens
  misc_feature (73)..(81): n is a, c, g, or t
gcggccgctctggtaggcggcgcgggcctggatcgcgatcaggcgttgctgttcaacgcgtgcgctctggagnnnnnnnnnctcagcgtcgagtcgctccagttccgactcgctcttctttaattctttttgtagctcctggacctgcttctcgagcttgcccatctcggtttccgtgccgcgcaggtctttctgcaccccggatttttcttcctggagcttgccgagcagctttttcagctcggtaatgtcctgacgcgtagcgtcaaactgttgttgggtttgtgcgcgctcatcggcaaacgccggttggagcaggcagacaagagcgagggaaatcaaggcgcgaagcatagaggcgggcgacaccagggaaatggacggcctagtatgcccgccaagcgccgc

SEQ ID NO: 80982 - DNA, 790 bp, Homo Sapiens
  misc_feature (67)..(76): n is a, c, g, or t
cgggcagtgcctagctaaaattaaccctcaactaaagggaataagcttgcggccgcatacgcggtcnnnnnnnnnngaaactgaaggaagtcccgaccttcctggattgaagtgcacactcatggactttaggtttagaaacctcctcagccttcatttgttcgtggatgtgtgagctctgagggtggccctgctattcctctgtgtgcctgtagtgtccccagcataggggtcttaggcatagggctgaacagtccttccagagccctcgttccaatccctgccgtccttgcccctgaggggccctgaccactgtgagcaggagggtggcagagctgggacaaagctgcctttgccgctgggctttccgggactgtggagggagcacaggcggggaagctccacttcagacagggcttggtggggcaggacatggctcccattttgaagggaggtctccatgtggtccgagtgaggtgagacggccctcgtcctggtgttcctgatcatcttgaaaggttcttctggaactcctgtccccttagtcatgagaacagaaagtgcaatatttcctttcacctggcaggggaggggggatttatttctgaaagaaaaatatataaacagatcttctacatttatatttttaatcttctgttaaatacactttccgatattgccttgccttttgagctcttgctacagtcgcctttgctactgctttaagagaatttacaggtattgataaagaacaagactgttttattaaaagctttattcaacttgaaaa

SEQ ID NO: 80983 - DNA, 1508 bp, Homo Sapiens
aatagctagtacgaggctggtgttgaatcggccagaggaagagtggatggcgggaattctcgcttctggcctgggtgagctagaagggagaagcaaggacattggagtccctatcaccggttgcctagacaacttcatgggaaggccctggggaatctgagatggagcaggcgaaccctttacgtccagatggcgagtccaaaggaggtgttttagctcacttggaaaggctagagacccaagtgagcagatcccgtaaacagtctgaagagctgcagagcgtgcaggcccaggaaggtgctcttggaaccaagattcataaactaaggcgtctgcgagatgagctgagggctgtggtgcggcaccggcgagccagcgtgaaagcatgtattgccaatgtagaacccaaccaaacagtggagatcaactgagcaagaagcattggacagagaaacttggaaaatgtgaaagccattctgcaggcatatcattttacaggcctcagtggtaaactgaccagccgaggagtttgtgtctgcatcagtactgcttttgaggggaacctattggattcctattttgtggaccttgtcatacagaaaccactccggatacatcaccattcagtcccagtcttcattcccctggaagagatagctgcaaaatatttacagaccaacatccagcacttcctgttcagtctctgcgagtacctgaatgcttactctgggaggaagtaccaggcaggaccggcttcagagctgacttttgcagccctcctgactgggcccttgcagagaaacccactgtgtaacttgctggcatttacttacaaactggatccagggggtcagtccttcccgttctgtgctagattgctgtataaggacctcacagcaactcttcccactgacgtcaccgtgacatgtcaaggagtggaagtattatccacttcatgggaggagcaacgagcatctcatgaaactctgttctgtacgaagcccttgcatcaagtgtttgcctcatttacaagaaaaggagaaaagttggatatgagtctggtctcctaatagattgttttcactgcactgggagcacatcagagaaataaatcccccctcccctgccaggtgaaaggaaatattgcactttctgttctcatgactaaggggacaggagttccagaagaacctttcaagatgatcaggaacaccaggacgagggccgtctcacctcactcggaccaactggagacctcccttcaaaatgggagccatgtcctgccccaccaagccctgtctgaagtggagcttccccgcctgtgctccctccacagtcccggaaagcccagcggcaaaggcagctttgtcccagctctgccaccctcctgctcacagtggtcagggcccctcaggggcaaagacggcagggattggaacgagggctctgggaagactgttcagcccctatgcctaagacccctatgctgggggacactacagggcacc

SEQ ID NO: 80984 - DNA, 1151 bp, Homo Sapiens
ttgatggtcacgcgcatattatcgatggcgtagggcgggatcgaggtgcggtcgcccatctcgaacatcgccgccaccggctccacccggccggtgagcaacagcgccagggtcggcgcgccgttggacgggtagctggtttcaaagtcataggcggcaatgctgccgtcggcattgagcccgccgtcaacatccatcaactgcgcggtgcccttgggttcccacaggtgttcctgttcgcgggtcagttgcacgcgcaccggcttgcccaccgcgcgcgacagcagcaaggcatcggcgcacacatcgtccgcacagttgcgcccgtaacagccggcggcttccatgcggatcacgtcgatcagcgcttcgtcgcattccagcaaccacgcaaggtctgcgcgcagcaggtgcgggttctggctgcccgaccacacgcggctgccggttgcttgatagtccgccacgccgcacgaaggcccgatcgaaccatgcatctggtacggccacaaatagctgcgcggcatgcgctggctggcgcccgccaaggcttcgtcgacgttgccctgatcgagcaccgtgcggcgtacccgtgggttgtcgcggatggcctgctcgacatcgctcatgtccggcaaggcgttgttccacggtttccagtgcacctgaagttcgtgggcggccttgatcgcctgttcttcgcgcatcgccactacaccgacaaaatcgcgaatcaccaccaccgcgacaatgccggggatatgcgcgatggatgcttcatccacactcaacaaactgttgccgacaaactcaccgcagtcgaaccccgcatacggcgggcgtaccacgcgaccatggagcatgtccggcacgcgcatgtcgtgcacataggtcaactcgccggtcgccttgccgggaatatccacgcgcgcggcgcccttgccgaccagacggtaatccgcaacaggttttaacggcgcgtcaccgctgatgcgcaactggtcatgctggccgctgaccaactctgcgtaggtcgtggtgcgcccgtcggcagcgtggacaaccccggcttcaaccttgaggctgcccgtgctcacgccccagcgtcccgctgcgcgcgcgagcaaaaagcgccgggcttcggcggccgc

SEQ ID NO: 80985 - DNA, 686 bp, Homo Sapiens
  misc_feature (43)..(77): n is a, c, g, or t
  misc_feature (396)..(404): n is a, c, g, or t
cgaacgacgagcgcagcgaagtagtgagcgaggaagcggccgnnnnnnnnnnnnnnnnnnnnnnnnnnnnnnnnnnncagtcgacggtaccggacatatgcccgggaattcggccattacggccggggtagtggtcgtcgtggttttccttgtagttcgtggtctgagaccaggcctcaagtggaaacggcgtcaccatgatcgcacggcggaacccagaacccttacggtttctgccggatgaggcccggagcctgcccccgcccaagctgaccgacccgcggctcctctacatcggcttcttgggctactgctccggcctgattgataacctaatccggcggaggccgatcgcgacggctggtttgcatcgccagcttctatatattacggccnnnnnnnnngctggatattatcttgtaaaacgtgaagactacctgtatgctgtgagggaccgtgaaatgtttggatatatgaaatcacatccagaggattttcctgaagaagataagaaaacatatggtgaaatttttgaaaaattccatccaatacgttgaagtcttcaaaatgcttgctccagtttcactgatacctgctgtttctgaatttggatggaacatgtttcttatgacagttgaagcttatgctaatctgtatgttgacaccttgtaattaaaatacgtacc

SEQ ID NO: 80986 - DNA, 825 bp, Homo Sapiens
cagtcgacggtaccggacatatgcccgggaattcggccattacggccggggggagtccggcgcgcagaggaggaggagaaagctgaccgcttaggcccgggtagtggtcgtcgtggttttccttgtagttcgtggtctgagaccaggcctcaagtggaaacggcgtcaccatgatcgcacggcggaacccagaacccttacggtttctgccggatgaggcccggagcctgcccccgcccaagctgaccgacccgcggctcctctacatcggcttcttgggctactgctccggcctgattgataacctgatccggcggaggccgatcgcgacggctggtttgcatcgccagcttctatatattacggcctttttcttcgctggatattatcttgtaaaacgtgaagactacctgtatgctgtgagggaccgtgaaatgtttggatatatgaaattacatccagaggattttcctgaagaagataagaaaacatatggtgaaatttttgaaaaattccatccaatacgttgaagtcttcaaaatgcttgctccagtttcactgatacctgctgtttctgaatttgatggaacatgtttcttatgacagttgaagcttatgctaatctgtatgttgacaccttgtaattaaaatacgtaccatgagtactctgactctttattgttgtaagaaaaatagttcatcatcagagaatggtcagtttccattcacccatctgaaagattttaagatgaggttgaattctagtttagaggtagcagactacccaaatctggcccactgccaataaagtctcattggaacccc

SEQ ID NO: 80987 - DNA, 624 bp, Homo Sapiens
  misc_feature (83)..(143): n is a, c, g, or t
  misc_feature (156)..(212): n is a, c, g, or t
  misc_feature (412)..(412): n is a, c, g, or t
tgtgtacctgctgcaagtcaaatacatggcatggtattgtttccttgttcacaccacagcaaatgagaaaatgagacattatnnnnnnnnnnnnnnnnnnnnnnnnnnnnnnnnnnnnnnnnnnnnnnnnnnnnnnnnnnnnntgctccagcccannnnnnnnnnnnnnnnnnnnnnnnnnnnnnnnnnnnnnnnnnnnnnnnnnnnnnnnngaccctgtctctgaaaaaagggaaaaagaccttgtgagctgtctacgtgtactctatgtctcaggagactcatatcctgtaatttttctaaatggcgtctccatgtggtctttcatgaatgtttgtctggtattctctatccttttactttccaactttttctttaccttctactgaaattatgtcttttgtaaacagcnccatgattatttatttagttatttatttttacccccctgcactatttgtcttgtaattggagtgtctgagtccattatgtttaatgtaattattgacctcattgggtttaagtctgtccattgtcatttgctgccttctaatattatctctttcttgctcaactatttttcttatgttaccttctttagatgaataaaaacctttgcattat

SEQ ID NO: 80988 - DNA, 469 bp, Homo Sapiens
ggcaagaggcgcggcggcaactgtgctgccgcgcaccgcatcacacttgtgcgctgcggctcgcctggcggcaggccgcgcgctagattcggcgctcctgaacatcactggagcctgtcttgagccgcccctcgattctcgtcgcccgctacgtcctgcctgaactgatagaccgtctgtcgcagcatttcgacgtcgacgccaaccaggaagaccgcgtgctcacgcagcccgaactgatcgcgcgactgcagggcaaggccggcgccttcatcaccgccaacgagaagatcgacgccgcactgctcgacgcctgccccggcctgcgcgcggtgtgcacgatggcggtcggctacaacaacatcgacgtcgccgcctgcaccgcgcgcgacatcctggtcagcaacacgccggacgtgctgactgaatcgaccgccgacttcggcttcgcgctgatgatggcggccgc

SEQ ID NO: 80989 - DNA, 1221 bp, Homo Sapiens
  misc_feature (1110)..(1144): n is a, c, g, or t
cagtcgacggtaccggacatatgcccgggaattcggccattacggccgggagggagacatgagacattaatcaatatgtaagaagtacattagttccagaaagaaaggtggagactgctcaaatcaaggctcccaggctcaaagcactgggggcttccaggtcacagataggtgagagacagatggttgcattcttttgagtttctggtaagtctttccaaagaaggcaatcagaatatgcatctatctctgtgagcagacaaggatgactttgaatagaatgagagacagatttgtactgagcagttcccagctcgaagaggcccaagacactttcctttcacatttaccccattttctatttaaaaatcttctggagaaagcatttgagaagaaaatgagtatctggcctcagatttcatctgatctctcaaggctaggactgtttattcctaaatgggtaggtcccaaaagcttatttttagcaggctgtgaagtctcatgtccacaagtcagaaaccctgtacggggactgtttacacaaaatatgaggccagtttttccaagggctttattggatccataagtcaagtttgattcaaatagtttccacagtctgaagaaatcaggtagagagaaacaaatatgctccaaattttgttcataggagtatactgagttgttagaagctagagatgggtctcaagctgaagactgctctctagcatccttgtataataagaagtcctaggttatggtgcctccaggattggttagtgtagctcctcagtggcatctccaagggctcagtatggctctgtctttttcctctgccatcctcagcatgcaggctcctgttagaaatgcttcttccccagtgctgtaaagaaatagcacttgaacataaattttaactacctcagcaaggccatttttactttctgcagaaagggtacactggccagcagttttgccacaagagtacactgaacaaaggagacagggtcatttataactttacgcgtccacgctactgctgtgtccggtgtctgttgtctccccggccgtaatggccgaattcccgggcatatgtccggtaccgtcgactgnnnnnnnnnnnnnnnnnnnnnnnnnnnnnnnnnnncggccgcttcctcgctcactacttcgctgcgctcgtcgttcggtaaggcgagtagcgccctataggagtctatacat

SEQ ID NO: 80990 - DNA, 633 bp, Homo Sapiens
  misc_feature (107)..(107): n is a, c, g, or t
gcagagtgtctcagggttcaaggtatccatgtcccatctaatgctggcattccttctgcagcacccctgacctgtggctgtccagctttcatgtacacatctccagngacaggaagcttgctcattctagaggcagctgctcccaactctggactgctctgacttagaaatgcttttccgagtggaaatgcagtggtgtccctttgacttgccccctttggcattcacaagtatggctcctttccaccagaataagcatcctcggtttcttcctggacttggcatctggtctcttccctagcctagtcactcaggtttgcatgcgcctagcctatcaaggatctggcccaggactggccagtccttcatggacagcaggtcttctggtggtgggtaggggcctagcttttgccatggcatgacccataggagagagagagtgctgtaggttgaggcaatcaggagaggcttcctggaagagacaggacttaagagtctcagagttttagagccaggcaagagcatggagtctaaccccctttttttcacagaggacgaagctaagacccagaaaggatgtgacttacccaaggctacacacagcaaattaggggcaagattaaaagctgactc

SEQ ID NO: 80991 - DNA, 842 bp, Homo Sapiens
  misc_feature (26)..(26): n is a, c, g, or t
ccttttcctacccgcttttaacactngagaaaagtctgcagagtgacagtggcccatttttaccagcaaagacattgaacctggcgtgtacagctttggtggttggtacctgtcaccatctgctcttctgtcttgatgaccatatgtcttggactgcaccctgagatgtgggctgctcgtgctgccccagtactgaacacagctacttgagcatagtaggtgttttgaaaatatttaacctgaattgagaaaagatagtcagcagtggcccaaagataacaacatacatcaaaagtcatgtacaagattcagccagtcaccaagatgctcccaatattcaggggcttggtacctcactaatcaaaactgaaatgtcacccgattggtttttctctgaatgttttagagcagaatagactcagccatgggaagagacatttgagtggactctattcaggttgattggagtctcctccaggttaatcattccacttaagtcaatgagtgaaattttatacacctgagactctagcctatggcaattcctggaaatcaagtggtttttttgatggggagccgggggatggtcagtgggatgcaacttgctgatgatgagagatgaggtgtaagatattatcaggcaaacaccaacgaaacaggctttactataactcagatcaccgcgctttttgagtgtgtcagtgagtaatccataatcacatttatagatacttctttcacatttataataatgtccccaacataaacatgtaatcatgatcaacatatatgcttagcagttaggatcctatagttatcaataaaaagtggaagctgtcttt

SEQ ID NO: 80992 - DNA, 1043 bp, Homo Sapiens
  misc_feature (90)..(90): n is a, c, g, or t
  misc_feature (94)..(94): n is a, c, g, or t
  misc_feature (117)..(117): n is a, c, g, or t
  misc_feature (173)..(173): n is a, c, g, or t
  misc_feature (220)..(220): n is a, c, g, or t
  misc_feature (263)..(263): n is a, c, g, or t
ctcttagtttcccatggagagatcggtcttttagactgatgctgttggtgcagagtacgaggcactcagcccatcttgcttccagctttnttgntgacgtgtcctatgattgtctcnccaagctctgcctactcgcccattgatttctcatcttatgtagtcccccctccccncccaaggagactcagctgaaacagctgttgggaaactggtgcacagngagatactccctgggctcctgctagggagcctcctagcttctntactagtcctgaatttaagaagtgtcactctaaaggagctttgagcgggcaggaagctgcgcctagagacaaagtcagcagcaccagataattgtgatggaaaggcttctgactcagcttccctgggtcgggaactccgagtgccggctgtccccagccctgctgttctggccccagatgcgtggtgccccctcctcatccgttagtcctgcccatcccttccttcttgactctgcccaccccactgcccttgcccagaggccaaggtcttggggcccagagaaaagtagggctgtgcggtcaagatcagggtcacttaccagctatgtgaccttgggcaagttccttaatgtctctgagtcctgatcttttcatctctaaacttgggaccacgtccgatcttttgaggaggctttccaaagtggaggctttggttgcccccgtcctaatgctctggcagtggggtgatgttgaggtttgtaggaataaggttgtagatgcctggctctgctgaggttcagcctgtcagatatttaggttacaggctctagacctgcacagtccagtacagccactgacagccacacgtggctactgagcttttaatatgtggctggtcccaattgagacgtgccgtgagtgtaaaatgcaccctggatttcaagacttagtatgaaaagaatgtaaaatacctcgttactaattttatattggttatatgttaaagtgataagattttagatctgttgggttaaataaaatatactattaacattaaaa

SEQ ID NO: 80993 - DNA, 526 bp, Homo Sapiens
gcggccgcaactgctgatgctggacgagcccaccgccggggtcagccccatcgtcatggacgagctgttcgaccgcatcatcgagatcgcacgcaccggcatcagcatcctgatggtcgagcagaacgcccggcaggcgctggagatcgccgacatcggctatgtgctggtgcagggcgcgaaccgctacaccggcacgggggccgaactgttgtcagaccccgaggtccgacgcaccttcctggggggctgaggcgatgatccggctcgcattgattctcgccgcgctgtcagggggctccgcgctggcccagccggacacggcaatgtccgagccgcgccgcgaagcgccgccgccggccgatgccattctgcctggcgacgagcggatcgcggtcatcgtctgcgaggccgacccggccccgatcgacgcctccggcgcgcttggcctgtccgaggaagccgcagaaagcctcgccgcgtcggcggcgccccgcgtcgtcaccgtcgagaagccatggaacgc

SEQ ID NO: 80994 - DNA, 691 bp, Homo Sapiens
  misc_feature (471)..(510): n is a, c, g, or t
gcggccgctgcattcgatcatcgcgaccttcggccccgagaccgaagagccggaaatcgtgaagttcgacgtcgccggcatcgaagccggacagacgacgcgcggccatcgtttcatggcgcccgctgaaatcactgtgcgccgcttcgacgattatgtgtcgaagcttgaagccgccaaggtcgtgctcgacccggagcgccgcaagaacatcattctcgaagatgccaaggaactggcgttcgcgcagggctttgaactggtcgaggatcaggtgctgctcgatgaggtcgcaggcctggtcgaatggccggtggtgctgatgggctcgttcgacgaagaattcctctcgatccccggcgaggtgatccgcgccaccatccgcaacaaccagaaatgctttgtggtgcgctttccctccccccacgacagtggtggggagggatcaagggtggggggcgcttcatcgtnnnnnnnnnnnnnnnnnnnnnnnnnnnnnnnnnnnnnnnnaggcggggggaggggagatcaactcgccaacaagttcattctgaccgcgaatgtcgaagccaccgacggcggcaaggcgattgttgcgggcaacgagcgcgtcatccgcgcgcggttgtcggatgcgaagttcttctatgagaccgacctcaagaccaagctcgaagaccggcctcgtgcc

SEQ ID NO: 80995 - DNA, 786 bp, Homo Sapiens
gctgcactgttcagggaaagccgacggcgcggtgaatcctcccgcagaagactgacccacctcagccaatgtgggagctggcttgttgtggcgagcaagcttgcttgcgctggggtgcgaagcgcccccaaaatgccggtgactgctgcgcagtcaaacgggagcaagctccctcgccacagcaagcgccctctccatagcaagccagctcccacacacgctgtactccaccagaaacaccgccacgacctcacgcctgtactccagcgacaaccgcccgtacaatcccaagtcatttcaagtccaagcaaccgacaacggcctaccatgcgtaccagtcaatatttgctcgccacacagaaagaaacgccttccgacgcggttgtgatcagccatcagctgatgctgcgcgccggcatgatccgcaaactggcctccggcctgtacacctggctgcccatgggcttgaaggtgatgcgcaaggtcgaagccatcgttcgcgaagaaatgaacgccgccggctctctggaagtgttgatgccgagcacccaaccggctgagctgtggcaggaatccgggcgctgggaagagtacggccctgagttgctgcgcttcaaggatcgtcatggccgcgatttctgcgccggcccgacccatgaagaagtgatcactgacctgatgcgcaacgagttgagcagctacaagcagctgccgttgaacctgtatcagatccagaccaagttccgtgacgaaattcgcccacgcttcggtttgatgcgcggccgc

SEQ ID NO: 80996 - DNA, 637 bp, Homo Sapiens
gcggccgcggcgtgctggaactggtgcgcgaagaaggcttgctcgacgacgccatgctcgacgacatcctgcgccccgaaaacatgattgctccacgtttggtcccgctgaaggcctaagcgtttgatgcaccgctcaccaggttgagggactagacacctctcaccttttgagggcctgaaggctcgttcttcaggcccttttttttgccccaaggttgtgaaatgacgcccataaaaaatccaatatcgccctgcaaaccctccttgcctgcaaccgcctggctgaaacctttaatcgccccgtgcagacggatcacgctcgcctaggtatagtgccgcccctcttcgcgtctgcggccgtcggtaacgaggcccgcagacatcgcgaaagcgcatgaataacaacacccgcaaaaggattggggcgaagcgtcgtgcactgcctggtgctgagcgacgcgtcggaccgtcctgcgtttgccattagaaaaatcagcgaggaacactccatgctcgaagtcatcaacgacttcctctcagggaaagtactgatcgtgctcattgtcgggctcggcggttatttcacgatccgctcgcgtttcgtacagttgcgtcaccctcgtgccgaattcttg

SEQ ID NO: 80997 - DNA, 2097 bp, Homo Sapiens
ggcggagccaagacggtcggggctgcttgctaactccaggaacaggtttaagttttgaaactgaagtaggtctacacagtaggaactcatgtcatttcttcggtgggtctcggaaaagttcattgttgagggcttaagagatttggaactatttggagaccaatgatgcgagctcagagtcaatagcatccttctctaaacaggaggtcatgagtagctttctgccagagggagggtgttacgagctgctcactgtgataggcaaaggatttgaggacctgatgactgtgaatctagcaaggtacaaaccaacaggagagtacgtgactgtacggaggattaacctagaagcttgttccaatgagatggtaacattcttgcagggcgagctgcatgtctccaaactcttcaaccatcccaatatcgtgccatatcgagccacttttattgcagacaatgagctgtgggttgtcacatcattcatggcatacggttctgcaaaagatctcatctgtacacacttcatggatggcatgaatgagctggcgattgcttacatcctgcagggggtgctgaaggccctcgactacatccaccacatgggatatgtacacaggagtgtcaaagccagccacatcctgatctctgtggatgggaaggtctacctgtctggtttgcgcagcaacctcagcatgataagccatgggcagcggcagcgagtggtccacgattttcccaagtacagtgtcaaggttctgccgtggctcagccccgaggtcctccagcagaatctccagggttatgatgccaagtctgacatctacagtgtgggaatcacagcctgtgaactggccaacggccatgtcccctttaaggatatgcctgccacccagatgctgctagagaaactgaacggcacagtgccctgcctgttggataccagcaccatccccgctgaggagctgaccatgagcccttcgcgctcagtggccaactctggcctgagtgacagcctgaccaccagcaccccccggccctccaacggtgactcgccctcccacccctaccaccgaaccttctccccccacttccaccactttgtggagcagtgccttcagcgcaacccggatgccaggcccagtgccagcaccctcctgaaccactctttcttcaagcagatcaagcgacgtgcctcagaggctttgcccgaattgcttcgtcctgtcacccccatcaccaattttgagggcagccagtctcaggaccacagtggaatctttggccgggtaacaaacctggaagagctggaggtggacgattgggagttctgagcctctgcaaactgtgcgcattctccagccagggatgcagaggccacccagaggcccttcctgagggccggccacattcccgccctcctgggcagattgggtagaaaggacattcttccaggaaagttgactgctgactgattgggaaagaaaatcctggagagacacttcactgctccaaggcttttgagacacaagggaatctcaacaaccagggatcaggagggtccaaagccgacattcccagtcctgtgagctcaggtgacctcctccgcagaagagagatgctgctctggccctgggagctgaattccaagcccagggtttggctccttaaacccgaggaccgccacctcttcccagtgcttgcgaccagcctcattctatttaactttgctctcagatgcctcagatgctataggtcagtgaaagggcaagtagtaagctgcctgcctcccttccctcagacctctccctcataattccagagaagggcatttctgtctttttaagcacagactaaggctggaacagtccatccttatccctcttctggcttgggccctgacacctaagtctttcccacggtttatgtgtgtgcctcattcctttcccaccaagaatccatcttagcgcctcctgccagctgccctggtgctttctccaagggccatcagtgtcttgcctagcttgagggcttaagtccttatgctgtgttagtttcgttgtcagaacaaattaaaattttcagagacgctgaaaaaaa

SEQ ID NO: 80998 - DNA, 442 bp, Homo Sapiens
  misc_feature (271)..(271): n is a, c, g, or t
cccagcagaatttaactgttatgttcatggctcacatttcttgatttttctctcatcagttccttctcagccaacctttctgactcactatggccaggacaccggaaacatggcagccacaaaggaaagatggcaaaagagcttctttcctggaagtttgatctcttcccatacttggcataaaaaaacagagaagacccacagaagcaagtctgtgcccatgaatcctcctaactagtggatggcctctgctgtacacacatctggggcntgctgagaaagctgcagcagcccctggagcagaaagcaggagagtaaggacggcccctgcacatacctatcacagtgagcagctcgtaacaccctccctctggcagaaagctactcatgacctcctgtttagagaaggatgctattgactctgagctcgcatcattggtct

SEQ ID NO: 80999 - DNA, 642 bp, Homo Sapiens
  misc_feature (335)..(346): n is a, c, g, or t
agaacaatgacaggagattagaatgtaaacatatttgggggaccgttattcagcttaacacaatacgtcccccttcatcaggtggagcttattttccctccttccttgagtgtgggatggacttagtgactaacttccaaagaacagagtatggaaagggaggaggagagtaacttcatagtacagaaacctggaaacactgtcttggccaggtggtcaaagttaatatcatcaagtcatgttgatagcatatactcccaatatactgtgatgagaagggcaattcacctctgtggtattctcaaaacctataacccaatctagtctaaacatgnnnnnnnnnnnntcaaactaaaattgaaggacattctataaaacacctgatcagtattcctcaaaactatcaacgtcgtggggaacaaggaaagattgaaatactgtaacagaccagaggaaactaaggaaacttaattgatgactgaatgcagtgtgctgtgttgaactggatcctagagaaaatagacattagtggaaaaactactgaaatatgaatagtctcaagtttaatagtagtgtaccattattactttcttagttttgacaaatgtaccatggttatgcaagatgctaacaatggtacat

SEQ ID NO: 81000 - DNA, 1023 bp, Homo Sapiens
  misc_feature (15)..(15): n is a, c, g, or t
  misc_feature (752)..(920): n is a, c, g, or t
  misc_feature (935)..(964): n is a, c, g, or t
ggtatcccccagccncaggaaatgtgggtcggccaggaccctcacagctctgaattgcttctgttatttatggcttttcgctgcttcttggtgccccatctcttgtctgtgtccttccaaccccaagctgcttatgtggcccaaccccactgctgtcaactaggcttgaaccccacagcggctgtgctcttctgggaggttcccgcttgctgccttcagccagggcgctcctcagagctctattttcctgcagacaccagctctccttcctgcctttagatcctgagaaggagggaaatgaggggtgctgacacagtccctctgggagagctctgcctagtctggtttggcgagggcccttgatcaccttgcccctcctccctgtcttctctgattcttttccctcaaaatagtcctgagaactaattgtcacactggctcatcatgtctctgtgggtggggtgggagaaacctctgctgcacacctctgtttggaacctgggcagagcaggaggtaaggcaaaggcaggcaggcaccaagaaccagaccccttgagaaggcgctgtgggtgggtctttgttctgctgttctgcctttcctgacaggtggggttggggcacacagacattggaatatttgtactgctctcgtgccatttgagaggctgctgccccaggcaggccagcccctactcctcttggctacactcatgttgctcagactatatttcaaataaaaaatcttctcaccnnnnnnnnnnnnnnnnnnnnnnnnnnnnnnnnnnnnnnnnnnnnnnnnnnnnnnnnnnnnnnnnnnnnnnnnnnnnnnnnnnnnnnnnnnnnnnnnnnnnnnnnnnnnnnnnnnnnnnnnnnnnnnnnnnnnnnnnnnnnnnnnnnnnnnnnnnnnnnnnnnnnnnnnnggtgggtgggggcgnnnnnnnnnnnnnnnnnnnnnnnnnnnnnnttttttggggccggccggccccaaaaaaagaggagaaaagggggagattcttttttgcc

SEQ ID NO: 81001 - DNA, 1234 bp, Homo Sapiens
cgaatcgtccggaccgagccagttggatttgtagtcagccacgtagtaacggccttcgtgttcgaaggtcaggtcgataaagcccttgaacatgccgttgagcagcaccggttcggcggccacgcgggatacgccattgtgagtgtgctggcacaccagtttgtcgagcgcgaggacatcgaccttgtgactggcaaaccagaattccatttcgatctggtagtgctgcaactcattgagggccatctgcccgttgcccagcggcagccgggcttgcaacaggtgcccgagccagccgctgagagtaccgatccagccttcccatccacgccggttacagcggcgggcgacagcatcttcgatggcctccggagtcacgttgaagccttcgccgcccgcccattccagcaagccgtggaggaaggtgccagggtttggcccacgtgggaaacggtgaatatctccaccggaagccggcacttcgcgcggggcatccgggtcggaggcgttcgtcgtcgaacagcttctgcgcttgtgggctctccggcgcttcaaggctcgcagcactcatgctctcgccgatacgcagggcgctgtaggacgcgatccaccagttttctgcggccttgcgtttgggcaacagcggcgcgagcaaagtggcttcgttgcgcggcgggtggaatatgaccgcatcggcttcgggcatttctgcgtaatgcagcgccgggcaaccttcctgcaggtcgagcagccagcgggtcaggccggcggattcgcccagtgaagcaccgccgccgagcaggtagcccaaggccgacaggtgcaacaccgagctgttgttattgccgcgcttcaggtctgcgatccccaaccagcaagcgtgtttggcgcgggtcagcgccacgtaaaacaggcgcaggtcttcggccaggcgctcgtcgtcggcttgggcgatcagctcggcggtgggcttgaggctgacttgggatttgccgtttgcgtcgtggtaatgcaatggcaagcggctgccgtccaccggctttgccgagcaaataaacggcaggaagaccaggtcgtactccagtcccttggacttgtggatcgtcactactttgaccagttgctcatcgctttccaggcgcaggatctgctcttcaccggcctgaccggagagcgcgagatgttcggccagatggcgaatcaatgcctgctcgccgtccagctccgcggccgc

SEQ ID NO: 81002 - DNA, 1231 bp, Homo Sapiens
gcggccgctccaacatcagaatggtatcggcacgaggggaaaaggtacgacagaagaaaaaacgtgatatcactgttttggacctgggatgtggtaaaggtggagatttgctgaaatggaaaaaaggaagaattaacaagctagtttgtactgatattgccgatgtttctgtcaaacagtgtcagcagcggtatgaggacatgaaaaatcgtcgtgatagtgaatatattttcagtgcagaatttataactgctgacagctcaaaggaacttctgattgacaaatttcgtgacccacaaatgtgttttgacatctgcagttgtcagtttgtctgtcattactcatttgagtcttatgagcaggctgacatgatgctgagaaatgcgtgtgagagacttagccctgggggctattttattggtactactcccaatagctttgaattgataagacgccttgaagcttcagaaacagaatcatttggaaatgaaatatatactgtgaaatttcagaagaaaggagattatcctttatttggctgcaaatatgacttcaacttggaaggtgttgtggatgttcctgaattcttggtcaatttcccattgctaaatgaaatggcaaagaagtacaatatgaaactagtctacaaaaaaacatttctggaattctacgaagaaaagattaagaacaatgaaaataaaatgctcttaaaacgaatgcaggccttggagccatatcctgcaaatgagagttctaaacttgtctctgagaaggtggatgactatgaacatgcagcaaagtacatgaagaacagtcaagtaaggttacctttgggaaccttaagtaaatcagaatgggaagctacaagtatttacttggtgtttgcctttgagaaacagcagtgagcacataggcagtagtcccagaggggccgtgttctgtcctgcacaaatttgaacaactcatctcgatatatttgatatttctctgtctgttgattttaattctaaatgtgcaggatgctgccagaaactccaatgtagaaattcaacatttgctgtctgtgacagatgaacttttgcatgtgtatataagaatgagttgggacctctgtctttaaaaatctatttttaggtaatgttctaagaattccatttgcctctatgatcttagctcataaaaatataatatgacttgataaagcaactaaactctttccacagtgttcaga

SEQ ID NO: 81003 - DNA, 539 bp, Homo Sapiens
tcctgtagagatttctctccatccatgacatacaattcttccttaagaagccagacaactggcactcctatatataaatagaagtaattaaaaacttatctgaagaagagaaaaggaaaaggaatctacttttctatatgccaattgctgggatcaaaataaactacaaaggatttatgaagaaaattgtgaatgttcacgttacaaattcttttaagaagtgcatacatttatgtatatgtatacaactatatgtaagagattttgctgtatgatatgcattatgggtgaaagttcacgataagttttattattgctttattactttttattggtatgttgacaggaatatcatggatatgtttacagtgacttttatattacagtggacgctttgatcttaaaacagccacaacaactcatctacggctgaaatataatatgcgtggacaagcttttgctgaagtgtagtgtgtcctttaagtttgttttttaaaaagtaacttacctcagaagaaataaatgataactataaagaa

SEQ ID NO: 81004 - DNA, 814 bp, Homo Sapiens
ggaaaatattctcttccattaatgtcagagtcaccaaaaacagacaataaaatttacacataaaattgaaaatatcatgatagtgtttacaaatgcacacaactttgagcaaagctttacaaatccttcataccatacaaagcaaatgagaaaataatgtcaattcatttctaccccaaacctagttcttaggagaaaattcgcaggaagagaggtatgagtagtttcacagaatacattttcaagaattttttaaaaactgaaactccaatgcccagaacaagataaacagtatccttagcagttagcactgttaataaatctcagatacacaaaaatcaagttccagagggcaaagcatttaattacagtccacaacgagcactgttgtgattcatataaaacatagttctctccaatttctacacaaaccgctcttttaatttatttaattagatgaacaatgaaatcgttttccttttcagcatttatctaagatgtagaaataacaaagtagttgcaataaagtgtatgaaatatttaataagaatgtacgaacatataaccaaaataaattgtgaaaaaagataaaagactttcatcttcaaacaacccatttttctaaaatgaaaatagctttccaatggagaaaatatctgtggctgaaatacaactctcaagcagtgctgaagttttttgcattgtctttggaatgagaaatgattacttaacattaacttaaattaaacagcatatacaaacgttatattgcttttgaaattgaggaggcagtatctagtgatcggtcaaagca

SEQ ID NO: 81005 - DNA, 784 bp, Homo Sapiens
  misc_feature (94)..(94): n is a, c, g, or t
tgagatatcaagtaatcagaagtataattaaaatagaacatgttggaaaatcccaacatttcctgttatgccgtcatacctccggtgttcagtntttactcaaaagttcccagttcttaggctgaaaaacattcaagtaaaaatgtagcatagattacactgaaatattttcagtatcaatgatttaatatccacacaaactattaggaatggtatctggaacttgttacaaggtcagataaactgttacagaattttagaaataattatctctgtatgtgactgtgtattacatataaaaatgaatttttcaggaaaagtgcactttaaaaatacttcctcttgctagttttttaaattgatgaaatagcctgtgctgctttggaatgcttattctttctttgatgaaaatacggtcattgattatgataattttaaaaatatctatttctgcatcgctgcaggatttcctacacttttctgttcctcatccctcttttatgtgtgcttggctcagttgcctgttacacagcctctgccttggttttgtgtattctaagataatttataaacacagatatttacagtgaagttcttccttttgaaactaatcttattcttttattcctctctctaaaaattggttggccatgctcactaatgattttttttcttaacaataagcatttcttggtattggtagatttggattgcatggtaagatgactgcccattttcaccatgtatacctttgtcaaataaagatttctgatctttggtcaaa

SEQ ID NO: 81006 - DNA, 655 bp, Homo Sapiens
  misc_feature (389)..(429): n is a, c, g, or t
tatacggctgcgagaagacgacagaaggggttggagtagtgggcgaagataatgacgcagccgcgagaggagcggaggcctttggcgacagtgaggaggacggagaggatgtgttcgaggtggagaagatcctggacatgaagaccgaggggggtaaagttctttacaaagttcgctggaaaggctatacatcggatgatgatacctgggagcccgagattcacctggaggactgtaaagaagtgcttcttgaatttaggaagaaaattgcagagaacaaagccaaagcagtcaggaaggatattcagagactatccttaaataacgacatatttgaggcgaactctgatagcgatcagcaaagtgagacaaaagaagatacttccccnnnnnnnnnnnnnnnnnnnnnnnnnnnnnnnnnnnnnnnnngcccagatgatctgaaaaagaaaaaagcaaaggccgggaagctaaaagacaagtccaaaccagacctggagagctccttggaaagtttagtttttgatttaaggacaaagaaaagaatttctgaagccaaagaagaactaaaggagtccaaaaagcccaaaaaagatgaagtaaaagaaacaaaggaattaaagttaaaaagggtgaaataagagatttaaagacg

SEQ ID NO: 81007 - DNA, 677 bp, Homo Sapiens
  misc_feature (499)..(533): n is a, c, g, or t
  misc_feature (614)..(631): n is a, c, g, or t
agcgtccttagagacctagtgaagccaggcgacgagaaccttcgggagatgaacaagaagctgccagaacatgctggaggagcagctcacccaagaattatccacttgcacaaggatatggaagttctgtcccaggaaattgtgcggctcagcaaggagtgcgtggggcctcctgacccagacctagagccaggagaaaccagctaaagacctgcaggctgcacccacctcctccccttcctaccccctaggatgctattcccttgggctgtggtggaaaaatgagggctggagccaaaatcaaatagcttgggagactggacattaaaggggctagaggcctgatggttagtgttaatgatcctgtcttagggcagaggccaccagggagtggggatcctgagggaaggggcagggatttctccttcttcttggtcctggctcccaagggcttctgtcttcatctctgcatgagctctccttcccagagaccaactcnnnnnnnnnnnnnnnnnnnnnnnnnnnnnnnnnnngtctggagcctggctactctgcatttgggattggggatgctgggtgggtgtgtggtccatgttcagcgttctagcaacacnnnnnnnnnnnnnnnnnnaaacgctatgcagccaaaataccatctgccagacgggcccacccac

SEQ ID NO: 81008 - DNA, 1556 bp, Homo Sapiens
  misc_feature (1392)..(1392): n is a, c, g, or t
aagagtatgaagtcgacggcgcgccgaattcggcacgaggcgtgctttcccgagccggggccatggcacctgcaaggtgtttctcagcaagattgaggaccgtgtttcagggcgtggggcattgggctttgtccacatgggctggcctgaagcccagccggctactgccacagcgggcttctcccaggctgctctcggtcggccgtgcggacctcgccaagcatcaggaactcccggggaagaagctgctctctgagaaaaagctgaaaaggtactttgtggactatcggagagtgcttgtctgtggaggaaacggaggcgctggggcaagctgcttccacagtgagccccgcaaggagtttggaggccctgatggaggggacggaggcaacggtggacacgtcattctgagagttgaccagcaagtcaagtccctgtcgtcggtcctgtcgcggtaccagggtttcagtggagaagatggagggagtaaaaactgcttcgggcgcagtggcgccgtcctctacatccgggtccccgtgggcacgctggtgaaggagggaggcagagttgtggccgacctgtcttgcgtgggagatgagtacattgccgcgctgggcggggcaggagggaaaggcaaccgcttcttcctggccaacaacaaccgtgcccctgtgacctgtacccctggacagccaggacagcagcgagttctccacctggagctcaagacggtggcccacgccggaatggtgggattccccaacgccgggaagtcctcactgctccgggccatttcaaacgccagacccgccgtggcttcctacccgttcaccaccctgaagccccacgtcgggatcgtccactacgaaggccacctacaaatagcagtggccgacatccccggcatcatacgaggcgcccaccagaacaggggtctggggtccgccttcctcaggcacatcgagcgctgccgctttctcttgttcgtggtggatctttctcagcctgagccgtggactcaagttgacgatttaaaatatgaactggagatgtatgaaaagggcctgtctgcgaggccccacgcaatcgtcgcaaacaagattgacctccctgaagcccaagccaatctgtcccagctccgggatcacttgggacaggaggtcatcgtgctgtcggcgttgaccggcgagaacctggagcagctgctgttgcacctgaaggtgctgtatgacgcctacgcggaggccgagctgggccagggccgccagccgctcaggtggtagccacgccagagcggggtcgcctctgggcctctgtctgagcaaacctggatgtgaattcggtggttttgaatgcataaagtgccttgtggacacgggggagttgtggtgnctctgggtctctgggccccgcctgctggcctgggatgccctcatgttgggagcattccgtgcccccacccgcctgccctcgtattcctgcactgtcagctgcgcgactgagagcagttgctattgtgcgattacaccctaaaagggtgggggcccaacgggtgc

SEQ ID NO: 81009 - DNA, 482 bp, Homo Sapiens
gcggccgcggctgtggagaagggaaactgccaacatgcgttgccacaggaagcccaatcactgagtatcaattctggatgtgcagtgtatgcaaacacggtgtccttgctcaggaaataagccactacagcttctgccccttatgccatagtccagtgggataaaggaatgataaactgtatataactgtaaaatatatgtagcatatatacatggctatatgctgtatatgtaataaggtttatttctgtgagttttgtatgaaaatcagcctcattatttatagttgaatttttgcacaaaatatatgttaataaaataatttttatggcaatacaactgtgaaataataaggccgattttcatataaatgtatgaaaatcaaccatgttttatctcaccctctctcttttgtttatcttgtttttggttacatgataccatggaaatattccaaataaatttttttctcacagtgaaaa

SEQ ID NO: 81010 - DNA, 683 bp, Homo Sapiens
gggagctacaggtgtcagcactgggctcagttcctctcatttccatcacgggatatgttgatagagacatccagctactctgtcagtcctcgggctgtgtcccccggcccacagcgaagtggaaaggtccacaaggacaggatttgtccacagactccaggacaaacagagacatgcatggcctgtttgatgtggagatctctctgaccgtccaagagaacgccgggagcatatcctgttccatgcggcatgctcatctgagccgagaggtggaatccagggtacagataggagatacctttttcgagcctatatcgtggcacctggctaccaaagtactgggaatactctgctgtggcctattttttggcattgttggactgaagattttcttctccaaattccagtggaaaatccaggcggaactggactggagaagaaagcacggacaggcagaattgagagacgcccggaaacacgcagtggaggtgactctggatccagagacggctcacccgaagctctgcgtttctgatctgaaaactgtaacccatagaaaagctccccaggaggtgcctcactctgagaagagatttacaaggaagagtgtggtggcttctcagagtttccaagcagggaaacattactgggaggtggacggaggacacaataaaaggtggcgc

SEQ ID NO: 81011 - DNA, 941 bp, Homo Sapiens
gcggccgcgtgcgcagcctcggcatccaggacaccggcggcaccacgcgcaccgtccaggccggcatcgccgtcgtcgagcagctcatcgccgaggcgtcgcttgcccgccgcgagccggtgccggtcagcgagttgatcgtcgggctgcaatgcggcggctcggacagcttctcgggcctcaccgccaatccggcgctcggcgccgcggtcgacatccttgtcggctatggcggcacggccatcctctcggagacgaccgagatctatggcgccgaaaatctgctccttcagcgcgtcgccactgaggatgtcggccgccggctgatcggccttctcgactggtggaaaaactataccgcgaaagaaccgaagggcttcgacaacaacccctcgcccggcaacaaggccggcggactcacgaccatcctcgaaaaatcgctgggcgccgtcgccaagggcggctcgaccaccttgatggaagtctatcgctatgccgagcgggtcgaggaaaagggcctcgtcttcatggattcgcctggctacgatccggtctcggccacgggccaagtcgccggcggcgccaatctcatctgcttcacgaccggacgcggctcctgcttcggctgccgcccctcgccgtcgctgaagctcgcgaccaattccgcgctcttcgcccatatggaagacgacatggacatcaattgcggcgtcatcctcgatcaggggaaatcgatcaaggagatggggcgggagattttccatcgcatgatccgcaccgcgtcgggcgaaccgaccaagagcgaaacactgggctatggcgacgatgaattcgcgccctggcatatcaacgcctggctctaggctctcgctcaatccaagacgcgtctgtctcatcgacattccgcaaagtgagaatcgatgttttgcggtatgatggcg

SEQ ID NO: 81012 - DNA, 646 bp, Homo Sapiens
tcgataggcatttccctttcaaacagctaatataccggtggcagaaattgtcacataattcgtgtaccttctctaattccaatagatgaaaccttaatacttgtatggcttgaatcatcaagttatccagttctggattagaagaaaattagaggtttttctgcgcgaatcttgtttggcgaacacgcctatatcttcagttgaatgactctgacgagcagacgtccccgcccggccaacaccccggctcgcggggggtacaagtagcctaattcacatttctcaaaaatcagtgctaagagagggaagagggggtgtccataaatggcatctttatctctctttaaagcgtcattgacagaggagcccatgctgggggccatggcgttggtatgagctgtgtgcgggtactgatgcgagtgcagaggaggcccgtggttcaggtggtggaccggctgcatggacctggctgcatgcgggtccccatacatcgtggaggggatgcctactccatccatgcccccgtaatggggtagatcgtcgtacctttgcgccatcggcctctctggctcccttcctacttcaacttctaatatatcctctttaaggccagtgtgaaaagaaacaaatattcaaactcccccgg

SEQ ID NO: 81013 - DNA, 725 bp, Homo Sapiens
gagaccggcgccgaactggtgatcttgcgcgctatatgcaagtgctgtcgccggagctgtgccgcaagctcgatggcaaggccatcaacattcaccactcgttgctgcccggtttcaaaggcgccaagccgtatcaccaggcctacaacaagggcgtgaaactggtgggcgccacggcgcattacatcaacaacgatttggatgaaggcccgatcatcgcccagggcgtggaggtggtggatcacagccactatcccgaggacttgattgccaaggggcgtgatattgaagggctgacgttggcgcgtgcagtggggtatcacattgagcggcgggtgtttttgaacgccaatcgaactgtcgttctttagattgctatcgcgggcaagcccgctcccacatttgatgtgtgaatacctttgaatgtgggagctggcttgcctgcgatgaggccatcagcaacaacacaaggaaacagcatctgtacccgagcacttaaacgcgccgcctgcctgggcgacgcggttccataaaaacaacagcgaggtgaaagcatgtctggtaatcgtggtgtcgtgtatctcggcaacggcaaggtcgaagtacagaaaatcgactatcccaaaatgcaggacccccgtggcaggaagattgagcacggcgtcatcctgcgcgtggtctccaccaacatctgcggctccgaccaacacatggtgcgcggccgc

SEQ ID NO: 81014 - DNA, 458 bp, Homo Sapiens
  misc_feature (360)..(386): n is a, c, g, or t
  misc_feature (408)..(417): n is a, c, g, or t
ggcacgaggcttcagtcaaattagcagctcagtgcacatggcattttgctaggtaccagggatacaaaaataaatgatgctgcccttttaagtgcaggagaatgctgctggagggcttccagtgttcttagaaagctctgtgtggagcatggactgagggggttgtcaagactggaagtgggccacggcaggggtcacaagtgagcaaattgataggtgagacctgaggccaactggagatggcatgcctgtcttgagggagcagccactcggccatttgggactggttggaaatgtaggcccagtgtggcagaggtcttggtagagaggcaagaaccagccagtaactcattcattttnnnnnnnnnnnnnnnnnnnnnnnnnnngcacagtactgttgtacttccnnnnnnnnnnagaacggagtctctatcacccagagggaagtgctgtggtgc

SEQ ID NO: 81015 - DNA, 537 bp, Homo Sapiens
gcggccgctgctggtcaagggcgaaccgggcaccggcaagaccatgctcgccgagcagttggctgaatccttcggcgccaagctgatcacctggcatatcaagtcgaccaccaaggcgcatcagggcctgtatgagtacgacgcggtcagccgcctgcgcgactcgcaactgggcaatgagaaagtccacgatgtgcgcaactacctgaaaaagggcaagctatgggaagccttcgaggccgaggagcgcgtgattctgctgatcgatgaaatcgacaaggccgacatcgagttccccaacgacctgttgcaggaactcgacaagatggagttctacgtctacgaaatcgacgagaccatcaaggccaagaaacgcccgatcatcattattacttccaacaacgaaaaagagctgccggacgccttcctgcgccgctgcttcttccactacatcgccttccccgatcgcagcaccctgcaaaaaatcgtcgacgtgcactaccccgacatcaagaaagacttggtcagcctcttgcc

SEQ ID NO: 81016 - DNA, 876 bp, Homo Sapiens
gctggttgacctgctcgggcaagcggactttatcgcaggcgagttcagtaccgggtttatcgccaaacactcaaatgacatcccacgtcacgccgcgacaaaggagcaggtcgcgctgcccgccgcactgtttaccaacacagcgccaacacccaccgccaaggcttgtcgggatggcgcaacaaggccgcctggcgctatcgcctggcggtgaacgacgaggtgcaggacctcgacgtcaacgtattggacggcaaccatctgcaagccaacggcatcgagatccatgacctgaccaccgacggccgctgggccacactggtgatcgacggtattcgccgtcgcctgccctaccatctggacgacactcagctctggctgccgggcgtgaagatcatcaaccgcacccaacacgtcgccagccgccaggccgacgccagcaccggcatcgtcaaggcaccgatggacggcgcgattgtcgatatccgcgtgagcgccggtgaaagcgtcagcaaaggccaactgctgctggtgctcgaagccatgaaaatggaacatccgctgacggccggcatcgacggtgtgatcaagggtgtgcaggtcgtcgcaggtgatcaagtgcgcaatcgccaggttttgctggagatcgaataacaccctaggcggaactacacggcccagctacgctctatccccatcaggaaaggacgagtacgggaacctgcacgatgccccattggctgattattgaccttgaagccacaacggatgaaggcggctggcccgtgacggagatggaagtcatcgagatcggcgccagcctcgtgaaccgccagggccgcgaactggatcacttccagcgctttgtgcggccgc

SEQ ID NO: 81017 - DNA, 850 bp, Homo Sapiens
gcggccgctccagcgacctggcggcaatcacatcccaggacggcgtttccagacgcagcttcacgcctaacttctgcgcgactgccttggccacgtcgacgtcaaacccatcgagttggttctgctcgttgagaaacgagaacggcgggtagctttccatcagcacgcccaccagttctttcttttgctcaacccggtccagggttgcaccgccaaaggcttgggtagaggcagccagcatcgtcaggcccagggccagcagcggtttaagtttcacaatcgacacctgaataaaaaagggttgttattaaccagacggtacgcattaaatagttataagaacgactctcatagtgagttattttcataagcttatgagtaaaaagcatatgggcacagtaagcgcagtaattctcgatggtggcatgggccgtgaactgcaacgccggggcgcgccgtttcggcagccggagtggtcggcattggcgttgagcgaagcgccgcaggcggtagaggcggtgcacacggcttatatccagagcggtgccaacgtcatcaccaccaacagctacgcggttgtgccgtttcatattggtgaagcgcggtttgctgccgaaggccaggcgcttgcggcgttggccggtgaattggcgcgacgtgcggtacaggcttcaagccagacggtgcgtgtggcaggctcattgccgccgctgttcggctcctaccggcccgacttgttcgaggccggccgagtcagcgaactgctgacgccactggtgaatggcctggcgccccatgtcgacttatggttggcggaaacccagagttcaatcgttgaggcacgggcaat

SEQ ID NO: 81018 - DNA, 730 bp, Homo Sapiens
gcggccgcggccctcgggtatttgcccctggcgacctgaaactgctgctaccggccttgatcgccgagcagccctgccatggctatgacctgatccgccagatcgaaagcctgttcgacggcgcctacagccccagccccggagtgatctaccccacgctgacctttctggaagagagcgagttgatcagcggcgacgccgagaatggaaaaaaacgctacacaatcaccgacgccggtcgtctcttcttaagcgagcaagccgttgccctggaaggcgtgcgcatgcgcattgatgtcagcaagcgctcgctgcgtggccacgaccgcccacccgagattcacgaggcggtgcataacctgcgccacgccttgcattcgcaccacgggcgctggagcccggaagaaatcgttcgtgtcgcggcgctgctcaacggcaccgctcaagccattgccgacgggaaaaaccaatgaatactcaagctatccatcgcgttacccacgaaatcaaacgccgccgcctgcaagtgctgcgggtggtcgacatcaccccacgcatgcgccgcgtcaccttgggcgggccggagctggccggttttatcagcctgggcagtgacgaccacatcaaactgctgttcccgcaaaacgccgccgagcaggctgcgctggaaagcccgaccttcaacatcaagggcgacggcccgcaaccggccatgcgcctcgtgccgaat

SEQ ID NO: 81019 - DNA, 727 bp, Homo Sapiens
gcggccgcgcactcgccattgaaggcgagatagggaataggttgtggcatggggtgctccagttgggcgcatgatctaagacgcacggcggcctcgaaactagcacccaatcgcagatgcgcgagccgcggtcgtcccgtctgctggccatcctcgacggcaggcgccactctgggctgatccacctgtccattccatggtgagtagagctgcactatggtcaaatgaaccttttcgtccggccgcggcgttggaacggtcgccgcgtcttaaatggttgagcgttggggaggtcatcgtgacgcttcgcattgcctgtgtcgtatgcgcccgcaacgagatcggctacctgcgcacgctcgttccctatctcctggatcaggacatcgacctgacgctcatcgataatgagagcaccgatggaacggccgagtggctggcggccagtccctacgccgggcgggtcgccgtacatcgcctcagctactccggcgtattcgacctgacatcccaactcgccctgaaggcgcaggtcatcgaaaccctgcgatctgactgggtgattcatcatgacgccgacgaaatccttcaaggaccggatggttgggggacccttcgcgcggcaatcgaggaggccgacgccgcggggtacgatgctttgaatttcgacgagttggtgatgctgcccctcgatcccaacatcgacgccccctatgtcaataaccgc

SEQ ID NO: 81020 - DNA, 489 bp, Homo Sapiens
gcggccgccgaccatggcgcggacgccgccgtcgaggtctgctacgacggtggaagcctgcgtggcgtgatagtcgcggccgaactggcgcaactggttctcgatcgcctcttcggcggcgcgctgcacgttcatgtcgatcgcggtgcggaccacgaacacgcgctcggtgtaggatttcgggaaggtgtcgaccagcttgcgcatctcgtcgaaggcgtagtcgagataatagttcggcgaggcctcgtcgcggcggtcgacggcaacggccgggttgcggcgggcgccgaacacctggccctcggtcatgaagccggcatcgaccaggttgtcgagcacgacgttggcgcgggcgcgcgcggccggcaggttgatgtgcggggcgtatttggtcggcgccttgaacaggccggccagcatggcggactcggcgaggttcacgtcgcgcgccgacttgttgaaatagaagtgcgccgccctcgtgcc

SEQ ID NO: 81021 - DNA, 557 bp, Homo Sapiens
  misc_feature (72)..(95): n is a, c, g, or t
gcggccgcggcagtgggctgagatcatgcattgcactccagcctgggcaacaagagtgaaattcagtctccnnnnnnnnnnnnnnnnnnnnnnnngaatgggactggtaaatcctgttctgtgggatgccgtgggagggagagaggataatggattgaggaagacatccatatccccttatggaaaatacctctttggttttggggaaccactcctttctagggaatttggttagggctgactcatttcctggcttcaggggctaccctgggcccagatttccagggcccggattaccagtgaagcgtcaatccctggatttttattgaaaccattggagaagagccatctcaaataaatctgccaagtatcctagctctttgcaactcactgtgtagtttttgggcatttccttcctctttctcattctgtttccctgttggtaaaatggaatggtgaccaacaagtgacctatggttacctcatagatctgccacttgtctgagggagtcagaatgcactagtctgttccctgtccaataaaaggcttcacatgc

SEQ ID NO: 81022 - DNA, 460 bp, Homo Sapiens
ggcacgagggcgacatcatcggccgcgaccccggcatcgttcactatcccatgcctgatggaagcgtgaagctggccgccgggtggatgatcgacgcctgcggctggaaggggaagacggtgggtggagcggcggtttacgagaaacaggccctggtgctggtcaacaaggcggacgcgcgcggcgccgaggtcgtgacgctggcacgcgccatccaggaaagtgtctacggccgctttggcatccggctcgagccggaacccgtggtggtctgatgctgacccggcgtgcgctgctggctctgctcggttcgacgggcctgcccgcggcggcgctggagccgctgctggcgcgcaacgcgccgccgggcatcgacccccgaccctatctggtcagcgaaaagctcgacggcgtgcgggcgttgtgggacgggcaggagctgaagttccgcagcggccgc

SEQ ID NO: 81023 - DNA, 583 bp, Homo Sapiens
ggcacgaggcgagcatcaaggccgtcccagagcgtcgaatcgattgcactgatggttattatcgaaacgagcgcctgtgtgattgccagcaccggttcctataatcgcctccactttccctccccttcgcctggcttcaggcgacattccttctggaaccgacactatgccaagccccagccaggcccacagcggccgtcccgaaaataatcaacaaagtgtcaaacagcagtggctggcgattctctcggtcgccgtaggcgctttcgccctggtaaccagtgagtttctgccggtgggcgtgctcaatgacgtcgccagcgacctgggcatcagtgccggtcacgctggcctgatggtcacgctgcccggcatcatggccgccctcgccgcgccgttgctgtcggtgatcattggcggcatggaccgtcgttacctgctgatcggcctgacgctgatcatgatcatcgccaacacggtagtggcctacgccagcgacttcagcctgctgctgttcggccgtgtcctgctcggcatcagcatcggcggcttctgggccacggccattgccctcagcggccgc

SEQ ID NO: 81024 - DNA, 979 bp, Homo Sapiens
  misc_feature (80)..(80): n is a, c, g, or t
  misc_feature (215)..(215): n is a, c, g, or t
  misc_feature (249)..(249): n is a, c, g, or t
tattgatagtctcatagccccagctacatttgctccgctgatgtgttggattgggcgatacgattcacacagaacagctngactgatccgatttataggatctttcaggaattgaccatcgagccaagatcgtcacgaggcagtttcagcagagttgcaatggacagatccagcgtatgtagtgtttgcagaagccacagatggggaacgttacntagaacctgttacaggtagaaggatgataaagcnttgttaccacaaatagctgcccagaagtcatcattgggtggtgacaagcatcagctgaccaagcatttcccaagccaccacagtgattcagctgcttcctctcctgcatctcctatggaaaagatggaccagacacagctaggacatctagctttaaaaccaaagcagccttggcacctcacacaatggccagctatgaacctcacctggatccacaccactccaatttgcaacccccctctcagctccccaggtactatctcctttagccatggtcctttaggcactggaaccggcattggcgtcattcttttcctccagcatggagtgcaacccttcacccactctgccccaaccaccccagtcccacctactacagcatctcctgtcatccctggtgagcctatgaaactatctggagagggtcctcgttgctacagtttgccagtaactctgccatcagactggagctataccctatcccctcccagtctacccaccttggccagaaagatgaccataggacaccgggagcagcagagaagccatcctccagttgctgctgatgctcatcttctcaacctctagcccagggcatacagctgtccactgtgacttctactttgtgtaaatatttatgtatatatgtatttttactattaatgtgtgcatttgtgttgagggaagataaatcctttctgattaaagaaatttttttatacctaaaaaa

SEQ ID NO: 81025 - DNA, 577 bp, Homo Sapiens
ggcacgagggtcgccgagatcagctatgccaagtttcgcgaactggcccaacatgatcccgacattctctacgccttaagcggtcagattgctcaacgcctgcgcgacaccacgcgcaaagtgggtgacctggcgttctttgatgtcaccggccgagtggcccgctgcctgctggaactgtgcaaacagcccgacgccatgactcaccccgacggcatgcagatcaaggtcacgcgccaggagatcggacgcatcgtcgggtgctcgcgggaaatggtcggtcgtgtgctcaaggacctggaagaacgcaacctggtacacgtcaaaggcaagacgatggtggtgttcggtacgcgttaagccggcaggaatccggccagcatctgacggtacaacacgtccagtcgggtgatggcatccggtgcgggaaaggcttcgtgcaacgcgatatggctgtcggcacgcacccgctggtcgaggccgcaggcctcattgaaacgattgaccgccgcaatcagctcatcgcggtcgttatccagcaacaatgcaccgtgcaccaaacctaccgggcggccgc

SEQ ID NO: 81026 - DNA, 1700 bp, Homo Sapiens
  misc_feature (195)..(280): n is a, c, g, or t
  misc_feature (1185)..(1185): n is a, c, g, or t
ataaaatatagtattactatatataaataaagaccaaggaatacatatttcccaaacgttttttccaaaataacacgccctagtgtttctctgcctgccactacaccggacccccttcacacctggtggattaagccccaacctgtgcatctatgtacggaccacatactacttttccaacccagctttgcccgnnnnnnnnnnnnnnnnnnnnnnnnnnnnnnnnnnnnnnnnnnnnnnnnnnnnnnnnnnnnnnnnnnnnnnnnnnnnnnnnnnnnnnctccctggcttccctcgcgatcctcccctggcttcccctcgcaatcctccctgtcctgagccgggcatcccagagcctcccggcagagtcccacccccaagcctgggaaacttcacgctacagccctgcgccaggccccgaggagcagtcaggggactcagggagtcacagcacaacggcagctcctcggtcccagacggaggagggggacagcaaccgtgcgcccagcaagacacaagcgatgacaccgatttacacacacccggtttagacgccaaagctctgcgggggaggagcggccctcaagagtcctccgggagctccgggtgagggtggggccctaggagggggccccgcgcagctgctccaggccgtccgcgtactggaaggcccgcccggtctcgtgctcatacatgtccagagccacctcgcagctctcacgcaccacgcgctctgggtcgtccgcgtgagcctgcagcgcggccaggcaggcgggccgggcaatggcgcccagggcctccgcgcactcgtgccgcaccatggggttctcggtgcatcgggccagggcggccgccagctggggcaccgccgcctcgtgctgcagctgtcccaggacgtagccgacctcgtggcggaagagggcgctcccacagtgcagaccctcggccagcgccagggcggcctcctcgcctcccgcgttgcgcagggcgaacatggcgcggtatcgctcgaagagcggccgggactcatccagcagcgcctcccgcaggcgccccacgtcacgctcctcagccggcggggcagggtccacggagaggtagggtcccgccgccggctccccgccgtgctgctgcagccactccagcctgcgcacggccagctggcaggtctcggccacctcgatngacggggtccgaggaatactgcttcaggatctccagaacttccgggtccccgatggcccccagggcctcccctgcctcatggcgcaccatgggctcctgacgggtgtcttgcagcacgtccaccagcatggggatggcgcgggcatcctgcatctggcccaggcagtaggccagctcgtgcttgagcagggcggaatcgtcatcgaaggcctggctgatccatgcaatggcgcctgggccgccgagcccacgcagcgtgaacagcgcccggaagcgggcctgcaggggctgcttggggtccaccagcgtctgcccgatggcatccacctcctgctccgtcaccatcgtgctgtcaatgggtcccggccttccacaaccctgctcaggctaaacctgggacgcggggatgtaagaaccgagctctggagactcaggacccgtcggcccggccagtaacacgcagcgcctctgccctcgtgccgattaacacgccagcctcgtactaccataatttt

SEQ ID NO: 81027 - DNA, 375 bp, Homo Sapiens
gcggccgcgcggacgcggttcgccgcctggtggccgaacggagcggcgccggccatcccggccgcggcgaccggtcccgtggtctattaccaggatccggacgggaagccggtctacgcgctcgccccgatgatgaccgcggacgggcgcgcgttccgggcggtgcgcgccagcgaggacgtccacttcgatctcccggacgacgctcccggccccgacgcggccggcgcggaggccgccggccaccggcccgcttccggcgcgcgcgcgatcctctactaccgcaacccgatgggcctgccggacacgtcgccggtgccgaagaaggactcgatggggatggactacgtccccgtctacgccgacgcggatgcg

SEQ ID NO: 81028 - DNA, 903 bp, Homo Sapiens
ggggcggccacggacctgcagcgggaggtcctgcagggtcgactcgagatgcccgtcatgttcagccgtcagcaggcaccggggctgcgatcgatcgaagtggcccgggcgcagctgaaggtgatgctgcccgaggggcatcggctggccgccgcgcacgaggtcgccttcgcggacgtcgctcaggagccggccatcctcatcgacctgccgcccagcacggagcggtcactggagttcatgcgcgccgcgggcgtcgagccgacgctgcggtgtccagcaacaacctcgccacggtcgcctccctcgtcggggctggcctcggctggtcgctgcgctatacgctgccgggcgagcagcccgccgcgcgcggcctcgtggagatacccgtggcagaccccacacctccgaacgcggtgtgcgccgtggtgccggacggcgaccgggtggatcagcgcgtccggcatgccctcgaggtgctccgccgggtcctgtctgaggaggagggacgccccgacgtcgactgcgcatgacgccatgtcgaggcgcctgccatcacgacgtcgtccgcggccggcccgaccccgtcgctcagcccttctcgtcctccgggtcgtccgcgatccagtcgtgctcggggtcgtcgaagctgcgcgtgcgcccggtgcgcaggtcggtgacgtccatgacgccggtgccgcggtccaggcgcacctgctggtgtgaggcggggtcgacgacggtgatcgtctgggtctgcgggtcgtagtcgtccacccgcacctggtcctcgtactcctgccgcggtccgtaggacccgtccgcgtcgtcgtcggggaaggcgggggcgccgggggagcgcagccggcgctcgagggtgcgctccacccggcgcgcggccgc

SEQ ID NO: 81029 - DNA, 523 bp, Homo Sapiens
  misc_feature (59)..(99): n is a, c, g, or t
gttgggcttattggccatctgtatattataagtttttttgcaaagggcctattcaagannnnnnnnnnnnnnnnnnnnnnnnnnnnnnnnnnnnnnnnnaaaacaaaaaagcccactgagattttgattgcaactcttgttttaaatcagtttggtgaagattaatgtgttgattatgttgagcctccaattcataaatacgatatgtttcttgatttattttggtctttaattactcctagcagagttttagtttgcagtgtacatattttactaagaattttataactgaatgctaatataaatggtatttttaaatttcttgttggttgctaatacatagaaatacaattaatttttgtatattggacttatgtcctgtggctttgctatactcacttattagttctagtagagttcttaggaattttttcataatgggtcctgttatagttgtagagttcacaggattgtcttcacagtggatcatatcttcagcaaataaaaatagttttactttttc

SEQ ID NO: 81030 - DNA, 838 bp, Homo Sapiens
  misc_feature (685)..(685): n is a, c, g, or t
  misc_feature (692)..(692): n is a, c, g, or t
ggttggaggaggtcggctggttatcgggagttggagggctgaggtcgggagggtggtgtgtacagagctctaggactcacgcaccaggccagtcgcgggttttgggccgaggcctgggttacaagcagcaagtgcgcggttggggccactgcgaggccgttttaggtaggttgctaagagggcgaggccgtccgggcctggcgggcgggggaggcgttgcatatctggggtttcccggggccccttcgttggtccggaggatcgagactccgaagtcggtccgagagggtgaagggatcacggccgcaggccactccgcgccacgcggctggtatgagtcccacacaaacgtggttgtagtgtggacgggcttcattatatcttgagatggaggtgttaaatcgtgttgcggacaagtttaaccttattacgtgatttaaatgatttaaccttcgtatgtgaggtacccattactcgcgccggttttctgcaggttaggcgctgccgggtgagaggcgctggtggtcacagcgttagctccgggtaaagcgccgctctctgcccacgtggcctctaagaattgcagaatccccacggaggcatcgacacccaagtaggagtgtcttctaaacacttcgaaaaagtgattattgagctagctttattttgataatccctactttanaaaaaanttaactacaggtataccgttaaagcatgggggcaaatttttgttgaattccgtttttgagcattcgatatttaatgactttgtagaatcttgtacttaaaaaaactagtaagaccttgtaccaggaaaataccaccaggcggccgc

SEQ ID NO: 81031 - DNA, 785 bp, Homo Sapiens
cagtcgacggtaccggacatatgcccgggaattcggccattacggccggggcttttcttccgcacggttggaggaggtcggctggttatcgggagttggagggctgaggtcgggagggtggtgtgtacagagctctaggactcacgcaccaggccagtcgcgggttttgggccgaggcctgggttacaagcagcaagtgcgcggttggggccactgcgaggccgttttagaaaactgtttaaaacaaagagcaattgatggataaatcaggaatagattctcttgaccatgtgacatctgatgctgtggaacttgcaaatcgaagtgataactcttctgatagcagcttatttaaaactcagtgtatcccttactcacctaaaggggagaaaagaaaccccattcgaaaatttgttcgtacacctgaaagtgttcacgcaagtgattcatcaagtgactcatcttttgaaccaataccattgactataaaagctatttttgaaagattcaagaacaggaaaaagagatataacaaaaaagaaaaaccgaggaggtaccagcaaacaggaagaccacggggaagaccacaaaggaaggagaaatcctatatactcactaatagataagaagaaacaatttagaagcagaggatctggcttcccatttttagaatcagagaactgaaaaaaaccgcaccttggagaaaaatttaacggtttgagcagctgttgcaagaggattttaactatattgaaaactgaagtatgaacacaactgaaagaata

SEQ ID NO: 81032 - DNA, 709 bp, Homo Sapiens
gtaaacccctttattttgtgtttttaataagttaaaggcccataatttctttttcagtctttttaatggatctcattatttagacgttttatataaaatgacagcagatgaccaaagatacagtggatcaacttacctgtctgatcctcgtcttacagcgaatggtttcaagataaaattgataccaggagtttcaattactgaaaattacttggaaatagaaggaatggctaattgtctcccattctatggagtagcagatttaaaagaaattcttaatgctatattaaacagaaatgcaaaggaagtttatgaatgtagacctcgcaaagtgataagttatttagagggagaagcagtgcgtctatccagacaattacccatgtacttatcaaaagaggacatccaagacattatctacagaatgaagcaccagtttggaaatgaaattaaagagtgtgttcatggtcgcccattttttcatcatttaacctatcttccagaaactacatgattaaatatgtttaagaagattagttaccattgaaattggttctgtcataaaacagcatgagtctggttttaaattatctttgtattatgtgtcacatggttattttttaaatgaggattcactgacttgtttttatattgaaaaaagttccacgtattgtagaaaacgtaaataaactaatatagactaaaaaaa

SEQ ID NO: 81033 - DNA, 953 bp, Homo Sapiens
  misc_feature (775)..(835): n is a, c, g, or t
gggcttctcacttttaaacctcctccagggcatgttctcagacatttcacaatccctctggggacattacagtagaagagaaacacatggaactgtaccagtgctttttgcccatgttcatcctaagctccggctttaggcagtgctttctgacctgggcggagtgaagacgctgctggtggctgaggccagtaacatggggcccctgcccagccaccctgaaggctgggtaggtccctcttttcaccaccagttttccacacctgtgtactctagattaacaaactctggataaacagatatttacattttaaactcaggcctacacagagtagttttccttataaggagcatgtatcacttagcaagaaactaaaaatggcaaatgagtttttcatcctttaagaaaaaaatcagctttagaattctctgcggtcagttgtgtgcaatgcaacaaaactacctttcagtaaattacttagttatttatttcagtgttttgtttcttttgatactaagtttccctttcaataatgaatgatgtgaccaaccaaggagaatttgtttgttctgtactaaaattatattttacagttaggaattataaaaagcaagggagcatctttaaatgttttttgtttaagcgatgtcttccatccaaagtaagaataatactctcggaaggtccttttggtgtcatgtcacttgctgtatgtggcagccttacagtgccacacttgggtaccgaaaaatcaataaaacgaaagttcatcannnnnnnnnnnnnnnnnnnnnnnnnnnnnnnnnnnnnnnnnnnnnnnnnnnnnnnnnnnnnaaccgagcacaacagacaaaaccacaagcagagagacggggcggccaagaaaaacacgcgcgggcccacacagcagacccaacccagcaaaaaaagaagcagccaacggagaacacac

SEQ ID NO: 81034 - DNA, 690 bp, Homo Sapiens
gcggccgctaaggttcagggtttgcgcgctggagagttcgccaccctggttgttgaggtcacgcaggtggttgatggtgaggttgccggcggtagtgatcaggccacccgcgttgttgaggtcgccggtggcggtgccgaagtccagggcaattgcgctgccgagcagcgagccgttctggttgtccagcgcggcgctgttgagcgtcagcgtattgctcgcgttgagcaggccctggtcgcggttggtcaggtggccagccacgttgagcagcgtgtcgccacggctggtgagggtgccgccgctgttgtcgaggtcggtggcgtgggcgtcaaccgaggcggcagcgatcatgcctttgacgttggccagggcctggccgatgcgcagggtcagcgcggcgttgctcagcagtttgccgctgctgttgtcgaggttatcggcggtgagtgtgaacgcctggctgctggagatttcgccgccctggttatgcacgttcttgaggttgttgagcatcagcagcggcgcgttgatcagcccgccctggttgttgaactcgccacggtgcaggtccagcgtcagcgcctctgcgctggtgatctggccgccttgctggttgttgaggtcggcggtgccgagggacagggcctggcgcgtactcagggtgccgttctggctgttgtcgacgct

SEQ ID NO: 81035 - DNA, 582 bp, Homo Sapiens
cggcacgagggccactggcaaccatcttgccgaccgtggccaattgatgactttccaacgccaccggcaatttcatctgcaaggccccaaggtgctcctccagcatcacgcgcaccgtcgagggccgttgcagggtgatgaacgggtgttccaacagggttttccagtcgacttcggtacattgcgccaagggcgaatcaccgggcaccaccgcaataaaccggtccaggtataaaggcgtgaatgccagggacgaaccttcggatggctcgaacgccacgcccaactccacttggcgatcgcggaccatttccagcacctgttcattgataaggtcatgcaccgtcacattcacctgcgggtaacgtgcgcggaatatcttaagaatcggtggcagcaggttgcccgcaaacgaaggcatcgccgccacggtgacgcggccacgctgcagggtgaaacgctgacgcagttcgtcttcggcattgtcccagtcggcaatcaaccggcgcgccaacggcagcagcgattcaccttcaggcgtcagtgcgacgttgcgggtattgcggctgaacaggcggccgc

SEQ ID NO: 81036 - DNA, 1849 bp, Homo Sapiens
  misc_feature (1263)..(1296): n is a, c, g, or t
  misc_feature (1774)..(1788): n is a, c, g, or t
ggtccggaattcccgggatggactgttctcaggcaagccggggagtaacttttagttttgctcctgcgattattcaactgacgggctttcatttccatttcacacaccctagcaacacttataccttgcggaattgtattggtagcgtgaaaaaagcacactgagagggcaccatgccggtggaaaggatgcgcatgcgcccgtggctggaggagcagataaactccaacacgatcccggggctcaagtggcttaacaaggaaaagaagatttttcagatcccctggatgcatgcggctagacatgggtgggatgtggaaaaagatgcaccactctttagaaactgggcaatccatacaggaaagcatcaaccaggagtagataaacctgatcccaaaacatggaaggcgaatttcagatgcgccatgaattccttgcctgatattgaagaagtcaaggataaaagcataaagaaaggaaataatgccttcagggtctaccgaatgctgcccctatcagaacggccttctaagaaaggaaagaaaccaaagacagaaaaagaagacaaagttaagcacatcaagcaagaaccagttgagtcatctctggggcttagtaatggagtaagtgatctttctcctgagtatgcggtcctgacttcaactataaaaaatgaagtggatagtacggtgaacatcatagttgtaggacagtcccatctggacagcaacattgagaatcaagagattgtcaccaatccgccagacatttgccaagttgtagaggtgaccactgagagcgacgagcagccggtcagcatgagcgagctctaccctctgcagatctcccccgtgtcttcctatgcagaaagcgaaacgactgatagtgtgcccagcgatgaagagagtgccaagggaccgccacactggcggaagaggaatattgaaagcaaacagtacctcagcaacatggggactcgaggctcctacctgctgcccggcatggcgtccttcgtcacttccaacaaaccggacctccaggtcaccatcaaagaggagagcaatccggtgccttacaacagctcctggcccccttttcaagacctccccctttcttcctccatgaccccagcatccagcagcaggcggccagaccgggagacccgggccagcgtcatcaagaaaacatcggatatcacccaggcccgcgtcaagagctgttaagcctctgactctccgcggtggttgttggggcttcttggcnnnnnnnnnnnnnnnnnnnnnnnnnnnnnnnnnnctctctgacacctattttagacaaatctaagggaaaaagccttgacaatagaacattgattgctgtgtccaactccagtactggagcttctctttaactcaggactccagcccattggtagacgtgtgtttctagagcctgctggatctcccagggctactcactcaagttcaaggaccaacaaagggcagtggaggtgctgcatttgcctgcggtccaaggcccaccaaggggggagtgggatgcctccaaaacgggacgagaaaaatgtggaacctagcctgggaattttttttattcctcgtgaaataatggaccattaggccagccacctaactagaccattggccaattctggccttcctggcaccctttatttcttaaaaagccacctttacaggaataaggggcccttcctttgggggaaaactttggcctctcttatttctctcaacggggcgaacaactcttctcgggnnnnnnnnnnnnnnntttttccttcctgtggaccccccactttttttcccccgaccaggaaagcccctttttcttc

SEQ ID NO: 81037 - DNA, 994 bp, Homo Sapiens
  misc_feature (21)..(21): n is a, c, g, or t
ctccagccggcaggtgaaagngatgtagtgcaggatggagaagatgtccagcagcaccgccacgtgtagggcagccagcagacaaggaagaccaccacgtaggagaagatgatcttccggctgctgtgcttctcctggtcactggacgccgagatggctctggccaggcaggaagtagaagacagcggatgaatggagaaagggaacgggcaaaggcccaagacaacggagaccagctgccatgccgatcaggccactccgttgatgctgtgctcggggtagaaggaccggcagtaggtctcattgttggacgcagacgtgacggtcttcaggtagtaggtgtcaggcagagacacgcagaaggccagcagccacaccaggatgcagacgacaacggcgtaccatcttcttcctgctgctgggggtgttggtgaagtaggtgatggagaggtagcggtccacgctcatgcacgtgaggaagaaaatgctgccgaagaggttgatggagaagatgaggtgtgtgactttgcacgtgagctcgcccatgggccactggttgtgctgcacgagactgaccacccagactgggatggtgaggacaacccacaggtcggcaatggccaggttcaagatgtagcagtgcgtgtcatagcctgtggtcttggcctggatattcacccagaccaccacggagttggcaatcatgccgatgacgaagatgaaaatgtaaatgaaggagagcgtgtagagcaggacgcttttgttgggcatgttgggacacatcaccgtgtccaccacgatgcagtcgctgctgttgcatggccagctgatgtccgagaagttccctggctctgagtagtcgaagagatgcagatccatcgttctgaggcgggcaatcaaatgacctccgggctggctgggctggctgggactggctgggctcgctcgccttcctggctgtgctgtgcgctggctcccttagtgctgagcactt

SEQ ID NO: 81038 - DNA, 825 bp, Homo Sapiens
gcggccgcccggcttgagtacgcgcagcatcgagcggatggcgtcctctttatgggtcacgttgcgcaggccgaaggcgatggtcacgcagtcgaaatggttgtccgggaacggcagcttttccgcatcggcctggacgaactcgatattgccggccacacctttatccagcaggcgatcacggccgaccttgagcatcgaaccgttgatgtccgccagcacgacctggccggtcgggccaaccagcttggagaacttggccgccagatcgcccgtgccgccggcgatgtcgagcacgcggttgccggtgcgtacacccgacaactcgatggtgaagcgcttccacaggcggtgcatgccgcccgagagtacgtcgttcatcaggtcgtacttggccgcaacggagtggaacacctcagcgactttttccgctttctggctttccggaacgttcttgaagccgaagtgagtggtgggttcggcatcgctgcctttgcgctgatcagtcatatcgctgtcaccaaaagagaatgcgggacatgataatccccaccgcctgctttgtcttggcaaggctgaaggtaagataggtgttcatcgagaccttttgccgcatggcaggtgttctgagtcgatataaagaggagtcattgcaatggcccgtattaccgttgagcgtgcacattccctgggtaaagaaggcgcgcgcgcgaaggccgagaagttggcgcacaaactcaaggagcaatatggcctggagtcatcgtggtcgggcgatagcctgaacctcaagcgttcgggggttaaaggcacggtgttagtcgc

SEQ ID NO: 81039 - DNA, 594 bp, Homo Sapiens
ggcacgaggggccattgcatcgctaccggccggcttgggccgtggtcgtagctcagttgctggccgtcgaggtcgagcaagaactgagtgatggtcgggtccatcgacaccggcttagctcgaaacgcacgatcggctgggtgccccccgatctaaagaacgcgtcacgaatagccgccgcacgctggaaggtttgcagcacgcccggcgcgatcccaagcttctgcgccgcgcccggctgccagcgccaggtctgtgcggacgtatccacgtaaggctgcaggtatttgcggaaatagttatccatcaccccgcccacgccgaagaactggccgaagtcatcgagcgtggcgtcccgcgcgctgcccggcgacatcggataacgccccgccagagactggcgatacacgttgaccacttcactcacccacgccgcattcagctggttacgcaccccgcccatcatgctgttggtggtggagttgaccaccgacttgaccatgccctgcaccagcggcggctggcgctcggcattcaagctgacccgcgtggccgcagcggccgcaagcttattccctttagtgagggttaatt

SEQ ID NO: 81040 - DNA, 1005 bp, Homo Sapiens
gcggccgctacgacacccgaccgtggtcacgcacgacgtcattgaggagtactaggaggctttgcggaacatccccgagggagtgttcggcccaccattggcgcactcgctcaccggtccacccggcatcgagggcacgacgcaggctagagcggttgaatcgcctgacaccggcgatcccggtggactcacggtcggcaagtagggcgaggtcggcagcggtgtcgggggtaagtgggccgggagcgaccgcggtgaggtcagattgcagaatcacctcgtcggtgcgttccggcatgtcggcacaggtgcgtgcatcgacgaggtcagtgcgcgcgtctagtgcgaccatcccgagcactctgcactcatccaggacagcctccaccaaagagtcgtcgacggtggtgcccggctgacgccaccggatccgattcgcgatgactttggtctcgatcggagtgcccggctcggcactgtgtagttcccggtgtatcaggcgacgccatgcttgagcggttgcgggtgctgaggcgtcgagagcgttgccgaggttaccgggcaactgcggaatgtgtcgccacgcttctctcaggctcacccattgcccccacagcgagtcggtacgccatcggtcggccaggggagtagggagccagctgcgtccgtcagccccgatgagaccgcctgcggcagccagggcgaggtaaacccatccgtcgtctccgggtgccacccgagacagcacgatgcgtgcatcccgcttggcaatgccaccgctggccagcaaagcgcagttgtgacgctccattgcctccaacaaagcagacattgcgctgacggcttcgagggcagttccgagtccggcccggttcaccaagttggtctgatgtggttcggaccatggcggtggggtagggctgggctgttcggcgaagaggcggttcccgcgcagcatgagagacacctctcggggcaagatgacggtgtcgtcgctaaggggac

SEQ ID NO: 81041 - DNA, 917 bp, Homo Sapiens
ccgagtgccgccgccatgaacggcgctgtacaaggtgccgcgatcgccaccgcgaggacaccagtgaagaatgagccaatgaagccaccacgtcgcgccaaaccgtctccagctgtcaccggactaatctcgtagacgccggagagattaaggccgactgcaaacatcagcagcgcgaaggcggcgacgatgatcggctgctgcaactgaaagccccagccgatggcggcgccgctcgcgcgcaagatgacgatcgtcaatccgaacgaaacgaaactcagtattgcaccggtgccgtaggccagactttcgacgggccacgccgcggtcgccgctatggcttgccaatgccagcgccttcatcgccagcactgggagtacgcaaggcatgagattgagaatgagcccgccaagaagcgcgaacagaagcgcaagcgccaaactcatctcgcctgtgtcaccgaagtccaccggcggaacgagtcccggtcgcgcttcgacgtttaatgcctgcaccgagccgtccgccgatgtcagctcgaggacgcctgcgagtacgccggtgtttctaaacttcttcgatggtgtggttctgagcaccagcccatcgcgggcgaaagcaagatgctgcggagctatacctttgatctggccgggcgtgagtggaaaatattctgccgataccggctttgccttcacgagcgccggcgcggcgacgaagagatcgagcgatccatgccgcgcatagcgcatcggccacggcgaggtcaccgggagtttcatcctggcatctgcaaattctcttgccgtcgcggggtcgaccggcagcgcctgctgcaccacgcgcagcggcagcgataaggttgcgtcttccggtacacccagacctctttgcagacgagccagttggcggccgc

SEQ ID NO: 81042 - DNA, 762 bp, Homo Sapiens
  misc_feature (37)..(37): n is a, c, g, or t
  misc_feature (199)..(199): n is a, c, g, or t
aggaacgtcttctctggtttccccacgactgtggctntggtatctgtggcatactctaaagcagtcacaaatggtccaggccccaggggtaagccatctttcctcttgtaatacctggctttgtggattgctatcagaggtgctccatccaggagtaaccggaatgcttgattcagaatttcgataagtgaaaatgttncctggctgccaagtcccagtgaccacagcattaggatcacttgtttgtattcctttgaaatcaggtagtgcccgatcatcaactagcagcatgggtctgacttgtttccgctctagtaaacttctggctgcagtcagagatgtgaatatttcatcttcagagatatcaaattccaattttctcaacctttctaacaggtcttgcttgctctctttggttgtattggtcacaaacctaatgattacagaagcaccacgtaacaaacatatttgtcagctgaacctggaggatagcttgccttttaagagcttcctgtgcgcctggcacagctgcatcttcaatgtgaagtgtgccactgagatctaccaaaacagcttttaatgcacggcatgctgccatccttcattccccacactccgtacgccgtcctcaggaaaggcccccgctaatggcaaagccagccacccgcactggccgcgggtcctcagccgggatagacagccccgctgctgcccgcctcgtgccgattcgacaccaggcctcgtacctagaccgtatagttt

SEQ ID NO: 81043 - DNA, 974 bp, Homo Sapiens
  misc_feature (63)..(63): n is a, c, g, or t
  misc_feature (124)..(124): n is a, c, g, or t
  misc_feature (163)..(163): n is a, c, g, or t
  misc_feature (175)..(175): n is a, c, g, or t
  misc_feature (226)..(226): n is a, c, g, or t
  misc_feature (229)..(229): n is a, c, g, or t
  misc_feature (241)..(241): n is a, c, g, or t
ccacctggttaattccacggcagtggcgtggtatacccgtgcggacagacagtgatccccagnggcagcgagtcgcgcaagtcggtggcgtcaaatccgccaaccacgccgcccagtgcccagnacgccatccacgttgtgtgcgtccggcagccgggatccncagccagccacntgcggcgcaccagggaattgagcccacaactctcgccacccccgatctcanagntcccgtggcccnaacgcagagagcggaaacgcagagaacgctgcatggggaagggcgcgaagaaggggcccagaaacccgacccctgagaactccagaaggctgggcaggcagggcgccctagtgcaggaacggagcttcaagaagtttggagcccgtcgagcactgaactcaccagttaagaaaacagagcagcaatttgggggcactcggctcccgggacataatggccgaactgaagctagggaccgggagcccctacgtcgccgccccacgccactcaccatccaccgcttccccggggggcgaggctccaaaacacatcggctcatggctctactcagccgctgtccggcgcccaaaaagccgcccggcctcatgctgcccccattcactccgacaccgccccctgacgtcatcaccccgcagcagccaatcgtgttgccaactgtttggcgtccaccgccaacgtccaatccgggccgggctacgtggccgccatgcttctgaggggcggaagcggcgaggcggtggccgagtccgggaacccaggcgccttcagtagcgcggcgtcacagtgtcccttcgggacttgtgtgggacgctcggagctcttgcttgaccttcggttgggaggccttgttatgccccccgctatggccctgacttgcggcgaaaatctggcaagtcctttccccgctgtaggcctcaacctctccagctaataaaagttttctacctccaaa

SEQ ID NO: 81044 - DNA, 912 bp, Homo Sapiens
ggcacgaggatggcccacccaaggagagccggcccagcatccagctgcccaggactgggtctctgctgccgcagctctctgacatcaccccctaccagccgggggatctaggcctggtacctcgccaggtccactatcccatcccaagcccccaggacctcaggctgctgtcatctatcacccgtgtggtggaccgtttccgggcagcagcagcagccctgaagatgcgtgcccctggttctcgtaaaaaggcttgaaaagtttagtcttacctgaagttcccctatcgtcccaagtaggacacagagagaagaagcctactccagaaatggactggtccaggtcacagtcacccccactttagatccgcaggcagcctggaacagtctagaggagatttgtataacaaagtagataccaagaaaacaatacaaatagaaaaagacgataaataaagaaagataaaggaactaacttaccaaagacacacagaggggggcccgagccgataagaccaccgcgagggggggacccgcaatcgaagaccccagtagaatgggttcaacaagggtgcgctcttccagcagtccagtaatgaaagctgagcgtggcggacgagtgacgtaaaaaacaagaggcgtagcgggacaagatgcggtcctaggtggcgcacatcaggagaagaagagggagccaaccctaaacgcgggggcgggaggtcgctcacatacaatcccgagcatacccatgttgccagccacccggggaagggaaataatacccccatggggggacaaacatcccacaggagtacagtagcgccaacaaggagcgactaaacaaccttcggaataaagtccgaatgccaaaggaaccatatcgccaaggtgagcatattcccggacggaagac

SEQ ID NO: 81045 - DNA, 1141 bp, Homo Sapiens
ctgctgccaccccaccctcaccaacagatgcaccgcgatgaagaggacagtgacgttgacgtgacgttccagccatggcacaaggagatgctgcagcaactgctggtcatgctcagctccactgtggccacgagacctcagaaggctgcgtgtccccaccaggagtcacagtcccatggcccacccaaggagagatgcgtgcccctggttctctaaaaaggcttgaaaagtttagtcttcctgaagttcccctacgtcccaagtaggacacagagagaagaacctactccagaaatggactggtccagtcacagtcacccccactttaatccgcaggcagcctggaacagtctagaggagatttgtataaaaagtagataccaaggctggcgtggcagctctgtggcagtggctgggttggtgggcactacagtcaggcaggcagccatggccactagtgtcacggccccagtgagggcccctggcttcgctcacggatgtggtccaagatcaggtcggtggctcgatccagcaacagaggcagcagctcctgctcagcaggggagaagcagcccagcacatgggcctgaaccgcctcagggtgcgccgggcgcccgatacccacccgcagccttggcattgcattggagttgaggcagctaatgcaggaacggactccattgtggcccctggcactgccccccagcttcagagccagtctccccaggggcttgtccagctcatcatgcaccaggtagacttcctcggcagtcagcccaaacagctccgcagcccgggccacgctgcgcccgttggcgttcataagccgccgtggccagagcaggaccagttgggcatcccccagcggggccagggcgaggtcggcggcacagtgccggtcgcgcgtccaactatacgccacacccagccgccgcgccagctgccccagcaccgccatgcccacgctgtgtcgcgtgccgggcagtccgggattccccaggccagccaccatccaccgcttccccggggggcgaggctccaaaacacatcggctcatggctctactcagccgctgtccggcgcccaaaaagccgcccggcctcatgctgccccccctcgtgccgattgaccaccagccctc

SEQ ID NO: 81046 - DNA, 550 bp, Homo Sapiens
ggcacgagggccgacgagaagccgacatggatcaccttggggccgccggccacctcgcccatcaggaacggcggcttctccacggtcgtcgtggccgatggcgatgatgaggtcggcgcgatcgatggcgtcgtggacatagtcgcgttctgacagcgccgcggtgccgagatagagatgggactcgccggtcaccgcgcccttgcccatctgggtgttgaagaacggaatccgggtacggccgacgaaatccgatagcggcgcgacgaggcgcggccggttgccggcggcgccgatcatgatgaggggacgcttggccttcaggatcaatccggcgatccgctccagcgctgccaccggcgcgatgggtcggtcgatcggatgcggcggcaccagggcggctgaaccgtcctcggccgcgatgtcctcgggcaactccagatgcaccggccccggacgttcctcgacggcgacgcgaaaagcgtcgcgcacgatggtcgggatcgccgccgccgccacgatctgccgcgtcatcttggtgagcggccgc

SEQ ID NO: 81047 - DNA, 769 bp, Homo Sapiens
gcggccgcggctgtatgtgtgtgtgtatagtttccatataaagtgtgtttttcccttgttcatatgcaaatcattattttgctcatttagcatatctcatgaagtatatgtggttataattggtaattcctcttttgcttcatggttaaagaaatcttgcaatgaacttgctctcacataacatagaaacccactccaatttttgtcccacaataattgtgtgacctcagcttgttccttatcttcagttcaatttcagatacttacagagtccaggatctctgtgatatcaaaaacctgtttgaatatttctttctcatttttccattagtttacttggtttcatgtacatagggcatttattttcctttctgaaattcctcatccataaattggaaatgaagactcttacatattttacaggaaatacaaaaaaaattatgctgcttaaaaatatcaagagccttaaaacataaatcttttggcctagtgttcctgcctctggacatctatactgaggaaataaactaaagtctgaaagagttttatgcagctctgggatacaactttatttataatatatatattctaatatttggaaacaacttgaatgtctatgttaggttatgtaaatgctgatatgtgatataggacaatgggatattattcatgcaatagaaaaataagtataaaactttttaatggcataggaaaatgtatgttttatgctaaaggaaagaggctgtatataaatctaatggagtacttt

SEQ ID NO: 81048 - DNA, 857 bp, Homo Sapiens
gcggccgccgtaacagtgctggtctatcgtggttttctaggcagctgataaaagttttttgctcagccgcttcccttcccggtttcgatccgttactatccgcggcgttagtaccaagctgaaagtcaattctggtcgaacaactcccctgaacaacacgggaccgaccacctcgatggtttccaggtatcacttgcgacgacactgcctttgaacatgcaaagggtgccgcgaagtctcaatactctgaccgaaccaacctgcaaattgatcaggatcttcaccccgggcccagaacctttgccactgttgtgctgcctgccctcctaagtacctacctgccagcccaagcgcgccaacttaatagcgcttcaaactggctgctttgttccagtcggttcttcgtttgatcaatggtgatcaacgttactggaacgttttaacgctgcacggttcttatccgtgtcatttgtaggaacaccaataatatgaacgctcaaatccacactcaggatgccattcgcaccctcaccaacgcttttgcaccaatgaactgcctgatcatggccgctcgcaaaggctgcttcagcttcaccctggtcaacgaacacggcatcgctcgtcacagcgaacgcctgtaccccgatcaatactccagcgcagagccgctgcaggccgtgatcgagcgtacccgtcaggcactgactgcctgatcgacccgagtcgctgaaacacaaaaaccctgtttaaaaagcagggttttttattgcctgaaattcggcattgaaacattttcgctaagttcaaatagatataaacgttataactaaatgaagaagatgttttaaaaacagtcc

SEQ ID NO: 81049 - DNA, 765 bp, Homo Sapiens
gcggccgcggtttgcgcacctgatagtatggcgtccccgggcagacgtacggggacgcgtttatcaatctgcggcaagcatcccgtaaatcaataaaattgctcgaataacccctttctccccgctgttcaaatcgtgctatgctgacgctccacattttctccattttgttatataccctatgaatttcaagttgcagccaggcggccagctcactcatcctcaggtaaatcatgagatgatcgagtgcaggtaacaacgctgcagtctgaaatacgacgggtattacgtactcgtaagtagaatataaccatgcggtctacacacaagatagcggctggagtactcggcatcctgttgtcgtttgcttccccggccggcctggcaagtttgttgtcggaagacagcgccgttaaatccgaatatatggaagcgcagcgcgacagcgaggtttattcgctgattggcgaacacgttattccggtcggcgaagtgaagcaggggcagctgattcaggtgttcccggcggatgcggagtattacgagttcaaattcggtcacggcaccgggtttatcgataaagacgatgtgcgcgatcttaaaaaatcgcgcaaggtgaaggacgatcttggtgagctgaataagccgctaaacaaccagaacctgatcactcaaaaggcgatcaacgtctataccgatgcggatacaccagtgatgtgtttggcgtgctggaagagatctgcgctaccgattatcggcaagctg

SEQ ID NO: 81050 - DNA, 622 bp, Homo Sapiens
gcggccgccgatggaggctgggagttatcttgagatgttgatgcgccaggggttggtgcagacgagtaaggtgcttgggccatatggggtgatgttgtaggttcgaatgagcgggcctatttgctgggcatcactctggttggcttgcttatctttggcctcctcgaaagaacaggcatttacccccgtaccagcctcatgacatttttcgtcacaaggctcggctttgatcatctgttttttaaagctaagttctcgctcgtcgctgcgaatcagcgaccgggcctggaaacccgtgggtataggcgcataggcgccaccatttatcacgaccgctggtgccatttttgtgccagcatatgcgtgttatggcggctgtgcgtgggagactttcgagtctgccgggtttgcctattcccccggtttccagcctgcgcacagctgccacccattcgcctggaaacgaatggggcagctctctataaagaatgggagctataccaatgatcatttctgaaaggttttatccttgtaatactgcaacccacaccaccgcccagcccggaggtgcccaatgatcaatccacctctcaacaaaaccctcggcctcgtgccgaattct

SEQ ID NO: 81051 - DNA, 378 bp, Homo Sapiens
ccgagatgcagtttgcgctgatgataggatgtcgccaccggcaggagtcccgccatggcatgagtgacgccgtccgcgtcctgcagcgtctgtccgaggaccatgtacccgccgcactccccatggacggggcgtgttcgggcgaagttgcgcagaccctcaaggaataaggaggcaccggcgattcggcccgcgtgcagttcgggataaccgccgggcagccagcagacgtcgcaatcctccggcggcccctggtcggcgagcggcgagaaggggacgagttcggcaccggccatccgccagccggtctccagatgcggatagaggaagctgaacgccgcatcccgggcgaccgccacgcgctgcccgggcggccgc

SEQ ID NO: 81052 - DNA, 1158 bp, Homo Sapiens
gcggccgcggcggcgtccacgtcatcggcgcccaggctttcagcctcgacgctggtgtagcgctcgtcgacctcgaagaccggcaggtggtagcgccccgccagacggcggccgaagttctgggccttggccgtcatctcgtgcggcgccccgtcggggtggcggggcacgccgatgacgagggcctcaggctgccaggtcttgatcagcgcggcaatggcgtcgaagtcaccgcccttgagggtgccgcgcggttcggccgagccgagcaggcgcgtgccgctggccacgccgatgcggcgcaggccaaagtcaaaagcaagaaaggattggagtcgggcaggatcggcggaggccacgtcaggcctcatgcgtgaccggcgtccgaactgagcatgcgcgggtcgatgcccagcaggcccagggccttctcgtagcgctgctcgacgggcgtgtcgaagatgatctccggcgtcgcatccaccgtcagccagccgttgcgaccgatctcttcctcgagctggccggcggcccagccgctgtagcccagggtgacgaggatcttgcgcggcccggcgccgttggagagggcctccagcacgtcgcggctggtggtcatctccaggccgccgggcacggccagcgtcgcgttgtagtggccgccctcctcgtccagcggctcgtgcagcacgaaaccgcggtcggtctgcaccgggccgccgtaaaaaaccgggctgtctgccagaggatcggcaggcgggttgagctcgaccttctcgaacaagctgcccagggtcagcgaggtcggcttgttgacgaccaggcccagggcgccgttgtcgttgtgctcgcagaggtagaccaccgtgcccgcgaaagcctcatcggccatgccgggcatggcgatgaggaactggttggtcaggacgatgcggtcggcaggcatgacttcattttattctgccggtcatgtccacccgaatcgaacgtgccctggtctggtttcgccgcgatctgcgcgtcgacgaccaggccgccctctaccaggcgctgcgggcctccaaacaggtgttctgcgccttcatcctggaccgcgacatcctcgacgccctgccccgggccgaccgccgcgtgcagttcatcctcggtgccctgcag

SEQ ID NO: 81053 - DNA, 780 bp, Homo Sapiens
gggtcatctcaatcgcatcgatgcccgcgtcgagcacgctatcgggacaacctcgcaaaatgagctcaccgaagccttaactgagctggtgacgacggtgcggactgttggtactccgattgctgacgacaacatcatcgactcggacctcatcgttcctgacgtttctgcgacgatcgaggaagtctcagtctggctgtcggagaacccggccggcgacggtcttatacccggttgatcccctgaatgcccttgttccgctgcgcgctgaaccggtaccgttcggtgtggacggcgtgctgcggatacagtggatattgcgacgggacgacacacccgcccgatccatcaagatcgaccacccgggtcatctcccgggatcgtccatcacacgttcttggagcccatatgaccgacgcccttacccctcccgccactgacggaatcatccttaccgacgcggctgccgcgaaggtgaagtcgctgctcgatcaagagggtcgtgacgacctcgcgttgcgtctggctgtgcagcctggcggttgctcggggctgcggtatcagctgttcttcgacgagcgtcacctcgagggcgacgttgtaaagacctacggcggggtcgatgtggtcactgaccgtatgagcgctccatacctagctggcgccacgattgacttcatggacaccatcgaaaagcaggggttcactatcgacacccctaacgcgactagcacctgcgcttgtggggactctttccactgagctggttctgaggatcgg

SEQ ID NO: 81054 - DNA, 1388 bp, Homo Sapiens
  misc_feature (1054)..(1062): n is a, c, g, or t
atgatgatcctataggacgctagctcggtgtgcgccgaacgacgagctgcagtgaagttagtgatcgaggaagccggcagagtatcttgcgtatagcatacattatacgaacgtatcagtcgacggtacccggacgagtatgcccggggatattcgagccatttacggcctgggcgttcataggaattattttacatagtttactcatttgaaatagtcctcttcagaattcatctctagagatatgacaccgtccagtaagtgtgagtaaagttagtatcattaaacaaattgtctattaaatgcaagacgtggtaatatacagaatttatcaggcattaccaagtctaggcacatataggaaatgcagcactcagaatggtttcaatgtagtagttgatgcttgtaaggtaggggagcttattcagacatagtagatagtttctctaatgctgtctcaattgctggcctttggctacctgtacttccccattatggcagcccattcagtcttgagttttcttctctggacaccttatgctctgaaatcatgagcgaggctgattcaattggtgatttgggtagaaagcagtatgttttgctgacattaagatgtaggttatagataggtttagcctttaagtgtatgtttttatactttaaaataagaaatataaccttttaagctattccacctcctcccccagcctatctcaaactggtggaatatatggagagatcttgaaagaggtaaaataaaccttcactgctccactccaggtgaatccgcccactcccactgacctagtagaattttgtaatttaatacttaccttctatttctgaaatcagttgtgaactggttgccttatgttcagaggtttaagaacctcagtgaattcattttttaaaatctgctaattctgagaaggcattgaatgaattcttaacaagaagactcatctgtagctgtttgctgactcctatgagcccataagggttctgtgcttagcattaacaaaataaggtttataggtaaagccaatgtattaannnnnnnnngcatggagggctttaaaatttgtgctctttttcatattttattcatattcaatttatggtttgtaactgctttttagggagataattatatgttataaattagttttggggggaataattgtgcaaagaggataatttaatttacgtgcttctgttattcagaataaagagagaagactacgctgcatattcaagagttgtaccttaacattggtgaaacattttttctaagattttcaaaaggaatatgtgtaaattgagaaatcataaccactgtcctaacttggtaaacaaacttgtccttaaataaagtatttaatgatttt

SEQ ID NO: 81055 - DNA, 1103 bp, Homo Sapiens
tggatgcgggttatgcaccgtattgcacccggaacccgctgcgccggggccaggtcgaaggccgtgattattttttgatttgaacagacagaagcagcccagcagatcgaatgtgggagctggcttgcctgctcccacagttgatcgccactgccgacataaatggagtgaagttttatgggccaatggctcgatagcattaccggctggctcacactgaaccccgaatggctggcggtggcggtatttatcgtcgcgtgcgttgaatgcctggccatcgccggtctgatcgtgccaggcaccgtcttgctgtttgccattgcggccctggccggcagcggtgcgctgtcgttgagtgaaaccttgctgctgggctttctcggcggcttactgggcgacggcgtttcctactacctgggccgacacttccatcagaacatccgccgcctgcccggtttacgccaccatccggaatggatgaacggcgccgaaacctacttccacaagtacggcatcgccagcctgctggtcgggcgtttcatcggcccgctgcgccccatgctgccgatggtggcgggcatgtgcgacatgccgttcccgcgttttgccgccgtaagcattgtggccgccgccggctggtcggtggcctacctgctgccgggctgggccactggcgccgccttccgcctgccgctgccggaaggtttctggctggaagccgggattgtcgccgggtgtatcgcggtattgctggggctgagcttgaacagcagcctgcgcggccatcgtcgcgccactgtgtgggtcggtggcgccagcctgacgctgttgatcgccctgtttattggctatccccaccttaaccacttcgaccagggcctcagtgctttggtccaggagcatcgcagcccgtggctggacgaggtgatggtgcggattacccaactgggtgaattcaggaagatgtttatcgccagcgcgattttcactggcctgctgctggtggcgcggcaatggcggcatgccgtgttcgtcggtgctacgttggcgggggcggcggtgatcaacacgggcacccaagctgtttttcgcccgcggcccgc

SEQ ID NO: 81056 - DNA, 593 bp, Homo Sapiens
cggcacgagggcggcggcgatgtgcacacccggctttcgggcgtggcggaccacctggccaacaacgacatgcacgcgctagccatcgcccggcagtcggtcgcccggctgaactggaccaaggccaacccgctggccgtgcaggcgcccaaggcgccggcccatgacccggccgagttgcacggcgtcatccccaccgacacgcgcaagcccttcgacgtgcgcgaggtcatcgcccgcatcgtcgacggctccgagttcgacgagttcaagcccgctatggcacgacgctggtctgcggcttcgcccacatcgagggcatgccggtgggcatcgtcgccaacaacggcatcctgttcgccgagagcgccaacaagggcgcgcacttcatcgagctctgctgccagcgcaagatcccgctggtcttcctgcagaacatcaccggcttcatggtcggccgcaaatacgagaacgaaggcatcgcccgcgccggcgccaagatggtgacggccgtggcctgcgcccaggtgcccaagttcaccgtcatcatcggcgggtccttcggcgccggcaactacggcatgtgcggccgc

SEQ ID NO: 81057 - DNA, 956 bp, Homo Sapiens
ccatgaaggatgagtactagagtcagtaatagaagtagttcagcattatttaactacaacacaatgctgcaaatatttcacagtaattatcaaaatttaatgggctctaatttaaaatgttatttaataagtatagattttaattgagaattatctttgagtagatgtaatcacaaagtgcattaactcttgttggaatattttatggctattccaaagtatagagtgcctaaattttgtgttgaaaatgtctttcatgacggtattaagttttctgaaattacacatggcttttaaaatttctaatgtatccaagatgtgcaatgttgttaggatctcattcttcagtgcatgaaaagctactaccctcagaacattttgtgttaattgtacctgcaagaacacctcaggcaagccaagaagaaatgaaacccaaataaaacttgaaaatgcaccttaaaaatatatatacatataatagttttgaaatgggattctgctttattttgatggaatggccattaaatacacattttgagataatacattgttgtggtgtttctttatacattatccttttaggtcgtgctagtaaaagtatattgatgaaggaattatgatgctttatacttcttactgcactaaattgatagaactagtacttgtcataatcggttctgtctccgctcacatgactaatacgtaattgcctttccaaaaagatatttttgcctcagaacttactgacaagctgagaggctatgaagatggaaatttgtgaaagaagtagtgctcttatatttggcctcatcatttgggccatttcagtatagtaatgatatcactaatcggaattagcatgagagggaagtaagccaggaagaataaaactgctgaatgtttgtatgtgtaagatatttccaaagattctaaataaatgtagttgcctacagagc

SEQ ID NO: 81058 - DNA, 563 bp, Homo Sapiens
tgcttgccattgttagcaccgttgcctctaccatctcagttttaccagctcaatagagaactcattggaggccttggagccaaagaagagcctgtttaattatgtcgtgaagtgtaacgaggaccctacactcccccgacatctcttttccacctgggaggcaaagaatacaccgctcaccagcgcggactatgtatttcaggaatcctacagtagtaaaaagctgtccacactggcaatccacgccatggatatcccgccacccactggacccacgctgggccctgggggccaccttcatccgaaagttctacacagagtttgatcggcgtaacaaccgtcagtggcttcgccttggcccgctgaggccctctgccaccacaggcaggccctgccttcagccctggcccagagctggaacactctctgagatgcccctctgcctgggcttatgccctcagatggagacattggatgtggagctcctgctggatgcgtgccctgacccctgcaccagcccttccctgctttgaggacaaagagaataaagacttcatgttcac

SEQ ID NO: 81059 - DNA, 819 bp, Homo Sapiens
gtcaaggtagcgaggcctgggtggcgaattccgcacgaggagaagatcttcctcaggaattgaaaataaaatttttacaagaagccaaaattctcaagcaatatgatcatcccaatattgtcaaacttataggagtttgcacacaaagacagcctgtctacatcattatggaactggtttcaggaggtgatttccgcaccttactgagaaggaagaaggatgaactaaaactcaaacagttagtgaaattttcattagacgctgctgctggtatgttgtatctcgagagtaaaaactgtatacacagggaccttgctgcaagaaactgcctggtaggtgaaaataatgttctgaaaatcagtgactttggaatgtctcgtcaagaggatggtggagtgtattcatcttctggcttaaagcagattcccattaaatggacagcaccggaagctcttaattatgggagatacagttcagagagtgacgtgtggagctttggcatccttctctgggagaccttcagcttaggggtttgtccgtaccctggaatgacaaatcagcaagcaagagagcaagtagaaagaggataccggatgtcagctccccagcactgtccagaggatatttccaaaatcatgatgaagtgttgggattataaacctgaaaatcgccctaagttcagtgaacttcagaaagagctcactatcatcaagagaaaactcacatagtgacaggatggcgccaaactcagccttcaggactctgtcctccagcagagtaacattattgttctcattaacaatgaatttataccacatt

SEQ ID NO: 81060 - DNA, 1370 bp, Homo Sapiens
gcggccgccgcgtcgcgctgctcggcgaacagcggctgtgcaacgcctcgctgctgaccggcagtcgcgacgccttcatcaccgaaatgctgtcccgacgcacgaccgcgcagcggcgtgcgcgcccttctcccgctatccggcggcactgatccgtcacccaccaggagtccatccatgaagaaatccttcgtcgccctcgcacttgcagccctctcgtccgctgccttcgccgacaagcagccggtcaccgtcattctcagttccgacagcggcatgacccagggcatggccatggtgctggccaaccagatgcaggaacagggcggtcaggtcgacatcctgctgtgcgacaaggcgggcgacctcgcgctgaagggcgctggcggcacgccgctcaagcccaaggacgtcacgccggcgcaactgctggacgccgccatgaagaagggcgcgaccgcatccgtgtgcgccatctacctgccgaacaccggccacaagccggacatgctgaaagacggcatcgcaccggccaagccggacgccatgggccgcgcactgatggagccgaaccgcaaggtcgtcgcgttctgatcgggatggcgggcgggctgcggacggccgcctgccagatcgcatcgaacccgggatgatttccgccggcatagcggagcgagggctacggtcgttaaactcagcgctgatgtcatcagccccggggagctggcagcagcttcggctgtactgcctcggatcgtcatgcgtgaaagccgttggaccaaggatcagctgaagctcgcatttcatctttactgccagcttccatttggaaagttgcacgccagaaacaacgaggtgatgcggctggcgagcctgatcggaagaacgccgtcggcggtcgccatgaagctcgtgaacttcgccagcctcgatccggcgatcacgagcacgggccgcaaggggctcgacggcgcgtcggcgctcgatcgcgaaatatgggcggatttctatgccgattgggaggggctggcgctcgagtgtcagcgattgcgcacgcagttcgtggcagatgttgcggccgacccgatggacgaggaaaggctcgatggattcgacatccctgacgatttcaccggtgagacgcgtcgggtcctgaccgaacagcgcatcaagcagaacttctttcgccgcgccgtcctcgccagttatcggggtcgctgttgcatgtctggtcttgccgaaccgcgcctgctcgtggcgagccacatcgtgccgtggaaggacgacagggcgaatcggctcaatccgagcaatggcctttgcctctccgcgattcatgatcgcgcgttcgatcagggattgatttcgct

SEQ ID NO: 81061 - DNA, 1292 bp, Homo Sapiens
  misc_feature (272)..(308): n is a, c, g, or t
aaggtagcgaggcctgggtggcttattcggcacgaggccgggccgccctcgcctcccacccagggcgctgagcacgcacgccgccggcctggcggcgttcgcggggcccgggaccagccgccgccttctccaggcgctcctactctctgggcatctgcagtccgagcggaaggggcgggaacgtcggcgacgccgaggagcaaagcccacgatcggcttcccggggcagcggacggctgccttcctcccggcgcaaacgcaccgcccaggannnnnnnnnnnnnnnnnnnnnnnnnnnnnnnnnnnnntccgagctcgggcccgcctccgcctccgccagctcctgtgagctgccgagtgctaggcacccgggctcttctgggggctccagtcagaggcgccgcccaagagaccctgggccggcgccgggcgcagctgcctctccgtctttgtgtctgtctctgtgtctgtctggctatctccgagtttgcctccgcttccagaactaagccacccagacaccatcatcccgaaaaccccagcccttctcccatggcaggctacttgccccccaaaggctacgccccttcgcccccacctccctaccctgtcacccctgggtacccggagccggcgctacatcctgggcccgggcaggcgccagtgcccgcccaggtacctgccccagctcccggcttcgccctcttcccctcgcctggccccgtggccttggggtctgctgcccccttcttgccactgccaggggtgccttctggcctcgaattcctggtgcagattgatcagattttgattcaccagaaggctgagcgagtggaaacgttcctaggctgggagacctgtaatcggtatgaactgcgctctggggccgggcagcccctgggtcaggcggccgaggagagcaactgctgcgcccgtctgtgctgtggcgcccgccggccgctgcgtgtccgcctggccgaccccggggaccgtgaggtgctgcgtttgctccgcccgctgcactgtggctgcagctgctgcccctgtggcctccaggagatggaagtacaggctccaccagggcaccaccattggccacgtgctacagacctggcatccccttcctccccaagttctccatccagggatgcccgatcgccagaacagtcttggccaagtggtggggcccctgctggaacctgtgggttgtgggcaacagacacccaacttttggaggtggagaactccgggatggaatccccccaagggggggccccaattagcaaagccat

SEQ ID NO: 81062 - DNA, 794 bp, Homo Sapiens
  misc_feature (444)..(444): n is a, c, g, or t
gggaatcatctcgagtcttcacctcatagttggtgttctggttccacaagccacaggtccactcagggccccaccactcgcaagactgtctggcgatcggcatcctggatgggagaactttggtgatggaagggatgccaggtctttagcacgtggtccaatgttgtttcctggtggagcctgtacttccatctcctggagcacacagtggccagcagctgcagccacagtgcagcgggcggagcattctgcagcacctcacggtccccgggtcgtccaggcggacacgcagcgctcgcgggcgccacagcacagacgggcgcagcagttgctctcctcggccgcctgacccaggggctgcccggccccagagcgcagttcataccgattacaggtctcccagcctaggaacgtttccactcgctcagccttctggtgaatcanaatctgatcaatctgcaccaggaattcgaggccagaaggcaccctggcagtggcaaggaagggggcagcagaccccaaggccacgggcccaggcgaggggaagagggcgaagccgggacgctggggcaggtacactggcagggcactggcgcctgcccagggcccaggagtgtagcagccggctccgggtaccccaggggatgacagggtagggaggtgggggcgaaggggcgtagcctttggggggcaagtagcctgccatgggagaagggctggggttttcgagatgatggtgtctgggtggcttagttctggagcccccagaagagcccgggtgcctagcactcggc

SEQ ID NO: 81063 - DNA, 1236 bp, Homo Sapiens
ggggcagctgcctctccgtctttgtgtctgtctctgtgtctgtctggctatctccgagtttgcctccgcttccagaactaagccacccagacaccatcatcccgaaaaccccagcccttctcccatggcagattgatcagattttgattcaccagaaggctgagcgagtggaaatgaccctgtctgcttcccactcccagatggaagtacaggctccaccaggcaccaccattggccacgtgctacagacctggcatcccttcctccccaagttctccatccaggatgccgatcgccagacagtcttgcgagtggtggggccctgctggacctgtggctgtggcacagacaccaactttgaggtgaagactcgggatgaatcccgcagtgtgggccgcatcagcaagcagtgggggggcctggtccgagaagccctcacagatgcagatgactttggcctacagttcccgctggacctggatgagagggtgaaggctgtgctgctgggagccacattcctcattgactacatgttctttgagaagcgaggaggcgctgggccctctgccatcaccagttagaggccaccatggtgtgaggagaccatcacctcgaccagaactccagatggtcacctgccctggcccctcctctgggcagcccctttcctccatgtacactgcaggggacagaaggggggccccatccctaccctactccctggccgcctgcccctgtggttcccaaggaggggtatgtatgagagccgctctcctgctacctcccaccactgtcccagcagtccctcggcacacaggcatatcagctttcacactttccccatgcactctctcccacccccttccagggcctctgctccaaaggaggcctctggaacccaggactctggggttttacaagagggctggggtgtggaagggcaagctgcaccaaagacggtggatatagccaccgcccccccgccgctgcctagcatctgcttggccaattagttcagcctcagaccatggcactttgagggggtctctacctccccatcaacagctgcagggggaccccagtgccaacttcctctcccactagggccctgccttcagctggtgcttgctgcgattcctgtgccttatgtaactgcccttccttcccttgccctaggaaaaaggctgcatctttatatgttacattcatataaactttgtaactttttggacattg

SEQ ID NO: 81064 - DNA, 582 bp, Homo Sapiens
aatgagcactgtccctgatgaaacacatgtgggcatctctttattatagaacaatcacgatatggtttgactctgtttccccacccaaatctcatcctgaattgtaatccccaacatgtcaggggaggggtctactgggaggtgactgaatcttgggggcagactccctccttgctgttctcatgatagtgagtgtatatttttttctatacaaggcacaccaatgagtactttttaattaaccacaagatatggttgtttggaagtgtgtggcacttcccccttcactctctctctttctgtcctgctgccatataagaaatgtcttgcttccccttctgccatgattgtaagttcctgaggactcccagccatgcagaactgtgagtcaattaaacctcttttcttcatagattacccagtctcaggtagttccttatagcagtgtgaaaatggattgatacaaatcataacaactatatctaacagtcatggaatgggttcagcatgccaggcactccactgatctttgtccacattattacttttaaaacccagaaaaaagcctacagccgcggccgc

SEQ ID NO: 81065 - DNA, 619 bp, Homo Sapiens
ggcacgaggatggatgcgccgccagcggctcaaagatggccgattacggcgttccgcctaatccgccctacgtgtctccacgattaatcatcggtttcgttaatttgacagggggcatcgcgttcgcgtgacgttaccccgcgaacgcttgccacaccagccacgcgttggcgctggaaatcacggcgaacaggaaccacgacaatcccgtggtccaccaggcgttgacgaagtcgcccatgatgcggcgttgcgacgtcaggctgatcagcggatacatggcgaacggcagctgcatgctcagcaccacctggctgagcaccagcagcttgccgaccgagtgttcgcccaacgttagcacgccgatcatggccgggatcagcgccagcccgcgcgtgagcgcgcgccgctgccagcacgggatcttcatcttcaggaaaccctccatgatgacctgcccggcgatggtgccggtgaaggtggagctttgcccggacgccagcaaggccagcgcgaacaaggtcgccgccagcgccgtgccggccaccggtgccagcagcaggtaggcgtcgtcgatgtcgagcacgcgggtgttgcccggctcgtggaaggcggccgc

SEQ ID NO: 81066 - DNA, 647 bp, Homo Sapiens
ataagcttgctcgaagttcacatttctgtgttggtgagacagtagcttcatcttaccatccagaaaacaaaagtttaagtactacagttccattccacttctctagctcactgatattgttatctataacagcaatcattcagagccaaatgcatatagctctgccttttgccataacactgataagtttgcttttgtttgaaaatattcaaaataaaagagaaagaccaagtttttccagctgtgagaaaataggcgtctgattgtaggttatccaaggattccatgcagtgtttgtatttttgtctctttgagactttctgagaaaatatttgatacagtgctcagatttcatacgttaaggcactacatattgatattttacacacaaagacaagcaatgcttttctggtccaactcaacatgattaatcgttctgcattcaagaataaaacatttcatttgtaatttttttgagctttcacttttaattaaacataggatcagggcattatgtatattttatttttattcatactggcctaggcattttcttccctaatgattcgtatttgtcttgttaaagagaagacagaaagattatatttagataatgtgataaatataataaaagtttgttctttcat

SEQ ID NO: 81067 - DNA, 867 bp, Homo Sapiens
  misc_feature (819)..(819): n is a, c, g, or t
gcggccgcgagcctggttatgaggcagatggggctgcaccttaagacggacctggagttggagggaatcgtcgactatttatgcgaccgtggccagaaggggcttactttgggtcagggcttgcgagagctacttgaggccgaggcaattgctctgccgcccagcccgggcggacgtgagggcgtccgcattatgaatgtacacaaggccaaggggttggaagctcgagtggtggtgctggcctcacccacctccgggctgccggccaagccggaacatagtgttacaaatgggcgcggttctttctgcctctttcgcaaccgcaggctactggcccacccggcgaactggagtgaaattgagcagcgcgagatcgagtttgtgcaagccgagcacctgcgcttgctttatgtggcggccactcgggcgcgagagtgtctggtggcgagtcagtgggctgggaatcacgcctcagccttgcgaccctgggtggcgctagacccattccttgcggacctggaacccctggagttgaaggaggcggcccctgcggacatcgggttgtccacccagagccttgaaagcattttgtcacaggaggagcatcgagccacacaattggcggaatgcgccaggcctggctggcgacgccagtctgtgacggcgaataacagacgcctggtctgcacgcctctcctggcctctctgacgagtctgtgggagggacgggctggggcgactcattcaccgcctgctggagcagttggtgctcagaccgtcgctcactcgggagcagttagccagcctggcccgctggtntcacctatgatacgccggagttggccgagcatcttgacacggcgccct

SEQ ID NO: 81068 - DNA, 610 bp, Homo Sapiens
gcggccgcggctgtaggcttttttccatatctcttcttgtaatataataaaaggtgatttctaatgttattaggcagaaaagcttgttagaatatattttgactatttttttgacccacacccgtttaaggatttcacatcatacaaagcgcttgcttagatggcttctatcctaggcatatgctggccgggtgctctacatataaattctcattgtatcctcccatctgtccactgaggaagattatcaaatggatcttcatccaatggatgcataaactttcctacttacttgtagtggcaaagctggctttcaagtacaagtttgttggctccattacctatgctcctattatccgcttctgtcccgcaacaaagtagctcacttaggcgtatgaccacatgcattatgatagtttcccaccaccatattgaataataaaagctttggccaaagcttttttaaagtaggagaaacattggatgtatatgttttgcattgccatttgatttcaaattaatcaggaagaattagtgattttaatgagcagtaaagtggtgcaataaagcagaaagaaaaatgttcagccagaagtgaaagactagtaaa

SEQ ID NO: 81069 - DNA, 1024 bp, Homo Sapiens
gcggccgcgcaggcccatgctctgcgaaattttactgagcagggcggggcacagactatgagtgtgtacgaatgggcgcggcaagagttgcgcagaagccaggatgcggcacaggaaattggttttgacccaggtcttaccctgcgcgccatgctcagtgcggtggtgcagcagagcaagggtgtgcgcagttttgaagacctggccgacgagctgcaataccttgcagaaaacctcgacgaccagcaggaatacgcctttatgcggccttagtggcgcggcggcaggtcttctgagaacagctcgtcctcggcatccgggctcaccggaatcttgtgttcttccgcggcccaggcgccaaggtcgataagcttgcagcggtccgagcagaacggccggttgaggttgtcgggtttccattccacgggtgcgccgcaggttgggcagtcgacggtcaagggttggctcatgatcggcctccacgcaaagtaaggtaaaagtggtgcagtcgctcgacctcgctgtgcagccaggcgaggtccttgtcgttgaccagcacgtcatcggcatggttcagacggtcttcacggctggactgagccttgaggatcgcctgcacctgctgttcgctgatgccgtcgcgctgcagggtacgctgaatctgcagcgattgcggcacgtcgatcaccaggatgcgctgggtcatgctgtactggccggactcgatcagcagcggtgagaccaggatcgcgtaaggcgattgcgcacgcgccagatggctgcgaatttcttcgccaatcaacgggtgcagcagggcttccagccagcgacgttcttcgggaacttcaaagatcagcttgcgcagggcggcgcggtccaactggccgtccgcctgcagcacacctgcaccaaaatgctcggcaatgcgtgcgagtgctggccggccgggttcgaccacccagcgtgcggcatggtcggcatcgaccaggtcaatgcccaggtcgataaagtgctgggcggccgc

SEQ ID NO: 81070 - DNA, 1218 bp, Homo Sapiens
gcggccgctccgcgaccagcgtggatatcgacagcggctgcgcggcgtttacgctgaatgtgcaaggcaagcccgcgggttcaccgatcaaggtggatgtgccgcagtacgccctgcatgtggatgaagccaccggcaaggaaacaccggtgatcatcatccaggccgaagaacacggcgacacccagatagttggctatcaggagttgggcagcgatcaactcggtgccgcgctgctgcgcgaggtcaagctgttaggcacccaaaagccgagctagccgttttgtcaggtgccaggttcagcgaacccagccaccgccctgcaagtgataaccgtcattacgctgcacccagtgcggatgcacataacgataaccttcgcgcacctgctcccaatggccgtgcaccgccacatagcgcccaccttcccaacgccagtagccgcgtgaccacacataaccgtagcgagccgctggctcgacttcgatcacctgcaccggcggcggctgcggcgccaccacctcgacatactctcgttgcaccggcccgcgctcgtgcaccacgcgctcttgtacacacccggacgccgcgacgacaaacgccgccaatgccgcataacgtagcaacatacacacccctcgggcgccagcgcccaacgaatacaccggtaaaaaatgcccccttgctgcagcctcgctcctgcttggctctgggttatttttaacaggtggtgtctgtcaggttgctgaacctgaggtattcgcaccacagggccggtatttgagcgctcaagcgggtccgaaacgccccagcaccgcctcgacaaagcgccgcaacttggccgtgcgctggcggttcgccgtgtagaccaggtgcatcgagcggctcggcgcctcgaagcctggcagcacccgcaccaactcgcccttggccagtgccgtgcgcaagaagtcttcagggccaagcacgatgccgaaaccatccagtgccgccgtcatcaacgcccggctttcgttgacctgcaaacggctggcaacctgcaccttgtgcacagtggtgccttggtaaaagacccattcacgctctgccgggcgtgaccagaacgcataacccaggcattcgtgatgctcaaggtctgccggcaccaaaggcacgccccgtgcggccaggtaggcaggcgcggcgcaggccaccaggcgataaggtgccagcggccgc

SEQ ID NO: 81071 - DNA, 703 bp, Homo Sapiens
gcggccgcgccaatcggcagggccgcaggtatacttcgagtccgttttccgctcccaggactcttcgacgatgaccttcgattcgttcgacatcaaatccctgatccgccccgtcatcgacttccccaagcctggggtgatctttcgtgacattaccccgctgttccaatcgccccgcgccttgcgcctagtggccgacagttttgcccagcgttacgtcgaggccgactttactcacatcggcgcgatggatgcccgtggcttcctgatcggttcgatcatcgcctaccaattgaacaaaccactgatcctgttccgcaaacagggcaagctgcccgctgacgtgctcgccgagggttaccagaccgaatacggcgaagcgtttctcgaagtgcacgccgacagcctgtgtgacggcgactcggtgctgatgttcgatgacctgatcgccactggcggcaccttgattgctgccgcgaacctggtgcgacgtatgggcgcgaagatcttcgaagcggcggcgatcattgatctgcctgagctgggtggttcgcaacgcctgcaggatatgggcattccgacgttttgcctgacgcagtttgggttgaccgacgtttaaaagttgcctgggccggcgttatcgcaggcaagccagctcccacattttgatttgcaaacacagtcaaaggtgggagctggctcg

SEQ ID NO: 81072 - DNA, 623 bp, Homo Sapiens
ggaacgaggcgggcctgggcggcactttccaccatcggcaccagcaaggtctgggcgccgatatccagcagttgcttgatcagcgcgctgtcgccgatgaccgggcgaatcagcgcctggctggggtagggtgcgatggcctgcaattggccgagcatgctgtgcagctgattgggcgcgtgttcgccgtcgatcagcagccagtcgaaaccggcgttggcagccagttcggcgcagtaggcatcggcgaggccgagccacaggccgatctgcacctcgccgttgcgcaagcgttgtttgaagcggttgatgggcatgttcatggctaacctccagggctcaaacgaaacggcaggcaattgacccgagcatgtcgtagtcgacatggaaggtatcgccagggcgggccgccaccgggcgggtgaatgagccaccgaggatcacttgcccgggcagtagcgtgacgtcgtacgcggccagcttgttggccagccaggccacgcccttggccgggtggttgagcaccgccgctgacacgccggactcttcgatcacgccattgcggtacagcaccgccggcaccttgcgcaggtcgatctcggtgggccgcacggcgcggccgc

SEQ ID NO: 81073 - DNA, 1020 bp, Homo Sapiens
gcagcgcgcgcgtccacaggctgtcgatctgcaggttggcgtacaggcgctcgaaaccgacttgctccttacccggctcgccgagcttcaggccccacaccgtcagttccaggctgaacgggttgagctcgatacgctcgatacgggccggcaccgtggcgtaattggccagttgttggttggcaatgcgaagggcaatgcccggcagaatcagaaagccccagcaagctgtacagagccagggcggtcaacaaggcgccagcggcgcggatcaatcctttgggcatgagtgacgccatctatgtagaacgagagtgccttggagtatggcacgggttttcggttccgaagtactggactccttgggaaaagtactacaactgcaggatcagtgtttttaacggtggctgctgatccagggacgggaagtcagccccaggcgtcatgatttgccactcgcgtaccgggcggccggctttttcggcgcaacgcagcacctgctcacgccagtcatccatgctgacttttgccaggttgttgcagcagatcaacacgccattgtcggcggtggtcagcagtgcgggcttgagcaggctctgataatcgcgcaacaggtcgacggtgccgaaagcactcttggcccaggccggtgggtcgagcagcaccaggtcgaactggcgctgctcaaggcgtggataactcggcagcttctggccacgacgctgggtgatcggcaaaccggccagttggcgaatcgccgggaagtagtcggactgcacgaattccatggtcggcaagtgcgggttgagcaggccgttttcgcgcccgaccgccaggttgccttcggcgaagtccaggttgcacacctcgcttgcgcccccggctgcggcgctcaagcctacgccacaggtgtaggcgaacaggttcagcacgcttttgccggcgctgtggtccttgacccagccacgggtgtgcgcaggtccaggaacagcagcgggtcttgcccggcatggcggccgc

SEQ ID NO: 81074 - DNA, 952 bp, Homo Sapiens
tggacttacataatgccgtttatttgagaaacacataacatctctcctttctatgaaaaattttttaaaaggtggttaaaattgcctttaattgcccagtagactaattccacagtcagaacatgcaaacttttttgaagaaattacttgaataagtagttttcatgttttcaatatgcagttttgaaaatgaggattcacctacacttttttagatttactactaggaaaccttcctcatatgaataaccatttatatgtgttttgcttaaagtattccaatgcctattttccaagcacagttctgccccccggttgacttttatgccacgtgtgcttcatgatggaacttttaggtcagttcctattaaatgagctcttctgcagatagcacattcagtagccttattttgttgatggaatactgtatcatatgctcaactctgaaaaccttgaacacggccaaaatccataaagattataaaagcaaactaagttgtgaagctatagtacatgtaggcatttagttaagtatagcaattcaaactgacctgcatccatccaaaacaaattcctccttcaaccttatttttacttgaaatttgctagaagaaatagcaaaccgaaatttgttttatgcatgagttaataccactggctcagcaaatacaagttagtttgctttaagcaggtaactttttttgtaatggaagaaatgcactacaaagttaagacagatttttgctaagtgcaggaggccctttattattgctgcagaaaacaaaagcctggctgagttgatgttttacattctcccttactgaaatctacatgacatgatgcttcttgctgggtttttgtacatgtaaacattgtcaagctgtgaaagaaaatggctggaggtgtgctttgtgtgaaaggtgagcaataaagtatctgttaagttaaaaaa

SEQ ID NO: 81075 - DNA, 1163 bp, Homo Sapiens
  misc_feature (797)..(808): n is a, c, g, or t
cagagagtaggagtatggatttcacagagagaacacgcgcagatgaaggccagcttactgagcttccagtgaggctcatggtggacatgaaaagaagcagcctaggccctggggagcccagtccactgagcaagcaagggactgagtgagccttttgcaggaaaaggctaagaaaaaggaaaaccattctaaaacacaacaagaaactgtccaaatgctttgggaactgtgtttattgcctataatgggtccccaaaatgggtaacctagacttcagagagaatgagcagagagcaaaggagaaatctggctgtccttcaattttcattctgttatctcaggtgagctggtagaggggagacattagaaaaaaatgaaacaacaaaacaattactaatgaggtacgctgaggcctgggagtctcttgactccactacttaattccgtttagtgagaaacctttcaattttcttttattagaagggccagcttactgttggtggcaaaattgccaacataagttaatagaaagttggccaatttcaccccattttctgtggtttgggctccacattgcaatgttcaatgccacgtgctgctgacaccgaccggagtactagccagcacaaaaggcagggtagcctgaattgctttctgctctttacatttcttttaaaataagcatttagtgctcagtccctactgagtactctttctctcccctcctctgaatttaattctttcaacttgcaatttgcaaggattacacatttcactgtgatgtatattgtgttgcnnnnnnnnnnnngtgtctttgtttaaaattacttggtttgtgaatccatcttgctttttccccattggaactagtcattaacccatctctgaactggtagaaaaacatctgaagagctagtctatcagcatctgacaggtgaattggatggttctcagaaccatttcacccagacagcctgtttctatcctgtttaataaattagtttgggttctctacatgcataacaaaccctgctccaatctgtcacataaaagtctgtgacttgaagtttagtcagcacccccacccaaactttatttttctatgtgttttttgcaacatatgagtgttttgaaaataaagtacccatgtctttattagaaaa

SEQ ID NO: 81076 - DNA, 818 bp, Homo Sapiens
  misc_feature (682)..(740): n is a, c, g, or t
aatgttggtggtaacatcagtgatacagtgataagtcagatgaatgagaacagccacatcatcctgtgtggtcaaatttctcagtacaacaaagatgtgccttatcctcccccgctatcccctgctatagaggcaatccagaaagaaagaaacatcacaagggaaagatttctggtattaaattataaagacaaatttgagcctggcattctacagctgagtcagtggtttaaagaaggaaagctaaagattaaagagacggtaataaatgggttggaaaacatgggagctgcattccagtccatgatgacaggaggtaacattggaaagcagatagtttgcatttcagaagaaatctctttgtaattgctgtaaatgtcatcaaggcaatcatagatttcttttccattttgcatattttcaaagatatgttaaaaaatccttagactatacatagctcttgatttaaatgtgatcataggtgttatttttagttgcatagggtatttgatacaatcattaatggatcatacacaataggtttttaaaaattaataacttttagtaattacttttattaatttaaaatagaacgcttgagaggcactttgtaaagatttgttaaactggaaacgttttacatgatctgatacaaccattaatgaatcatacacaataggtnnnnnnnnnnnnnnnnnnnnnnnnnnnnnnnnnnnnnnnnnnnnnnnnnnnnnnnnnnnagaatgcttgagaggcactgagtaaagatttgttgaactggaaatgttttacatgattcttaaactgaaacttggtgt

SEQ ID NO: 81077 - DNA, 750 bp, Homo Sapiens
cgcggtgtcggcgctccaggcctgggctggcagtgcatcggggccggtcagggtcacgtcgactgccgcgcctcgggagtgattggaaaccttggccacatagcccaggcgccagaaatcctgcttgttcactcggggataaaactcggccttggccgggtcgcccggcaggctggcgaagcggcccatgttcgccacggcacggctggggcgatagcagtcgaataccttcaagccgtaaccctgcctggccaactcggcctggacccgcaccagggcctttgccgcgtcggcagacagcacgcattcggcagcgttgtagccgtccagtggcgcaccggtgaagttatgggggctggcgtagcgaatgtcctgcgcgatgctcggatcgaggcttcgcaggtaaaccatgttggctggcattggcgtgtctgccgctgccggcgcggcgagcaccaggaggctaagggcggcaactgcggggaaagagtagggcatgggcggccgggctcgggcggtggcttaagcgcgccacactagcaatgcccggcccatgccgccagtgctagggcgtggcgttgggcacaaacgccacgctgccaccgtcacgcttgtggaacaaccgttcgccattgtccggttgggtcgtgatgacctgatgatcgttgcccagataggccagcggcgtcgggtcatccttggtgtactgcgcgacaataatcgtgcgcttgggatcaaaggtgcggccgc

SEQ ID NO: 81078 - DNA, 724 bp, Homo Sapiens
ttcggcacgaggctgaacggcaccacgccgtaggacagcgggctcatataaacctcaggtgaacccatgtcgcgcacaaactgcacgttgacgtaggcattgccctcaagcccggcaggcacgcggatatgttgcacgctgttggtgctgtcggccttgaaccactgctgggtgtaaaccttgtcacgctcgatggtgatcaagccggcaccggtgtaaggcgcgcggatgctgatcgctatctcatcaccggtggcatagctgcgtttatccaggcgcagttgcagctcggcgttgcgctccagcgagcgcgaggtgttgccgcgcccggccacgctgtagtcgatctggttgagcaggcggccattggcgtctttgacctgcagggtgaaatcacccggcgtgccggtgttcagggtctgcttggcgccgtccttggtcatcgtcagcggtgaggccggctggctgatgttcttgatgcgcgactcgtatttgtaggtgccgttggactgtttcaccagtaccgatacgtaacggtgttcgaccacttcactggtcaggccatccacggccatcggcgtgaggtccggcgcgacggccagccattgcacctgacgcggggcgtccttggcgacgtacgacagcgaatcctgacttttcacaccgaccagataaggcgcggacgacaccagcagcgcactttgcgccgccacgttgcggccgc

SEQ ID NO: 81079 - DNA, 1068 bp, Homo Sapiens
  misc_feature (65)..(65): n is a, c, g, or t
  misc_feature (138)..(138): n is a, c, g, or t
  misc_feature (155)..(155): n is a, c, g, or t
  misc_feature (259)..(259): n is a, c, g, or t
tagattatagatcattaggattgcctcgagccagatcgcacgagcgactgcttagcacctgtganggaagtgcacgtgagatcctggatcatgttccaccaagtgaagtgagctgtgtgtctcgggcggcgacgtgcngtgaactcccttcaccntatgcaccccagcccaaagagaacccccgcatcgggagttccagagaacgagcgccagtagatccaatctcatagacttgacacaaatgatgacgacatgtatngaggacttgctcgccagagactgaaaggcatgaaggatgacaaggaggaagaggaggatggtaccggctctccacagctcaacaacagatagacgggccggccctgcctccacgtggctccggctccactctcgtgcactcggatgcttactcgtcttcttcctgttctggtttcttttcccctttgttcttccagtttctaccagggggccccgtgggcttccagatcacggtgatgaacctctggcctcaggattggccccacatcaccacgccaacaggaccacagcgcactggctccaccccatctctgccatctccactcccctccttttcatgctgtctcccagaaaagctgccagggctctggccttggaattggacttgagatggggagcagacaggggaggatggggaatgtgggacacggtgtggtgggcatgagggcttggaggggtggggatgagggctcaagacacgagagaagatgtccacggtcccaggtggttaacaaagttctggcagctaaaagatgaccgcgttgaaggccacctccttctggctgggaggggcagaactgtggacagattctcaatgcctttttgaagttctgacccaccaaagaccttctgccttcaccctcctccccacctgatgtccctctgtgtctgatagtgatgttggtgaaagttcgtagaccccaggagtagagaaaagcaactggactgactttcttaccagcagttacctagactgaggcaagctgtgtggactcacccaagtatatttcagtactgtcaggcggccgc

SEQ ID NO: 81080 - DNA, 1097 bp, Homo Sapiens
  misc_feature (34)..(34): n is a, c, g, or t
  misc_feature (155)..(209): n is a, c, g, or t
  misc_feature (235)..(243): n is a, c, g, or t
  misc_feature (279)..(287): n is a, c, g, or t
  misc_feature (474)..(546): n is a, c, g, or t
  misc_feature (627)..(685): n is a, c, g, or t
agggggggtgtggggaagtgctgccggaggcatnatgggtggtagtattgggcgaggtacgcggggattaggtgatatgtgatgtaaaatacccccactcgtccaagaagggaggacggcccggagggggaaattgaattgaaaggtgtacggcnnnnnnnnnnnnnnnnnnnnnnnnnnnnnnnnnnnnnnnnnnnnnnnnnnnnnnngatttccgcagaggttggggggaagnnnnnnnnnggcggcccgcacgccggaacggtgttgtttgttggnnnnnnnnncaaagtgttcaggtagaaagggaaaatgtattgtgtggggggaagacaggggggaatccaggtatttcctatctgtgtggggtggctgcccgcccaaggaggaggtaaataaggaagtattgttggtggaacggggacgaggcaggaaaagggaaagggggctgttaaggaatagaagcgcccgcannnnnnnnnnnnnnnnnnnnnnnnnnnnnnnnnnnnnnnnnnnnnnnnnnnnnnnnnnnnnnnnnnnnnnnnntataaaaaggagagaggaaatatgaagagggggtaggtgatggggggaggggtaatggatggggttatggattttgtttgnnnnnnnnnnnnnnnnnnnnnnnnnnnnnnnnnnnnnnnnnnnnnnnnnnnnnnnnnnnaggctggaaccatcgaagtccttagatcagctttaagcactggatggagtaaaaaccacaagggactacaaggtgatctgtgaacagactggcagacagatgacgagagagggagtgacgacaacaaaaatagacaaacaaaaataatggtcttctggcgacctagttaaattactcgcttattaaaatttattagaaataaacaaacattaatgaaataaaaatctaaaactgagccccagactcaagactactagaaaggctcaccaagtaaaaccctcggttgggtcaagtgagctctctgaatgttttgtacaacctgctgcagtttgttccccttgagcaaggtgatgctttgtcctgggctgcaatctctaacaccatcaccatccccaagtgcagctcccattct

SEQ ID NO: 81081 - DNA, 719 bp, Homo Sapiens
  misc_feature (35)..(35): n is a, c, g, or t
  misc_feature (54)..(54): n is a, c, g, or t
caagccatggaagatggaaaagggagatatgaccntgaatgtgactggtgtctntgggggtctgtatgtatgaaatgctttacggagaaacaccattttatgcagaatcgctggtggagacatacggaaaaatcatgaaccacaaagagaggtttcagtttccagcccaagtgactgatgtgtctgaaaatgctaaggatcttattcgaaggctcatttgtagcagagaacatcgacttggtcaaaatggaatagaagactttaagaaacacccatttttcagtggaattgattgggataatattcggaactgtgaagcaccttatattccagaagttagtagcccaacagatacatcgaattttgatgtagatgatgattgtttaaaaaattctgaaacgatgcccccaccaacacatactgcattttctggccaccatctgccatttgttggttttacatatactagtagctgtgtactttctgatcggagctgtttaagagttacggctggtcccacctcactggatcttgatgttaatgttcagaggactctagacaacaacttagcaactgaagcttatgaaagaagaattaagcgccttgagcaagaaaaacttgaactcagtagaaaacttcaagagtcaacacagactgtccaagctctgcagtattcaactgttgatggtccactaacagcaagcaaagatttagaaata

SEQ ID NO: 81082 - DNA, 1103 bp, Homo Sapiens
gcggccgcatcagcgaactggccgggcgttttggcctggagttccgccaaggcaaaaccccttgggagttggcctgcgacatcgcgctgccctgcgcgacccagaacgaactcgacgccgacgccgcccgcacgctgctgcgcaacggctgtctctgcgtggccgaaggcgccaacatgccgaccaccttggaggctgtggatatctttatcgaggcgggcattctgttcgcaccgggcaaagcctccaacgccggtggcgtggccgtgagtggcctggaaatgtcgcagaacgccatgcgcctgctgtggaccgcgggcgaagtcgacagcaaattgcacaacatcatgcagtcgatccaccatgcctgcgtgcattacggcgaagaaaacggccgggtcaactacgtgaagggcgcgaacatcgcgggctttgtgaaagtcgctgatgcgatgctggcccaaggcatcgtctaggcctcgggttcgacccgcagcacttcgatcaactgatcgccgacggggcgcttccacagtacttcgtcgccgacctgggcgcccagcaatgcgcggcccagcggtgagccccagttgatcagatgggcgtgggcgtcggcctggtcttcgccgaccagttgaatgcgctgctgctcgtcctgctcgttggcaaaggtgacccaactgccgatttgcaccttgtcggtagacgtcgctggtggcatcacctgggcgctttgcacacgctggttgaagtagcgcaaatcgcgctcaaggtccgccaggcgttgcttattgtcctgggcggattcgaggctgtattcctgctgcaactgcgcaaccttggcctgcaactgcgctaacccttgcgcggtgagacgattgggctgctcactcaccaggcgctccaccggctggtcggcctgggcggcggcgttgtcttcatttacaaaagctcggctcatggagttctccctctatggagtttgggccatggtcgccgcgtgatcgttcccacgctctgcgtgggcatgcagccctggacgctttgcgtccgcttttcagaaaaaccacctactactggcgatagacgcgggcagcgtcgcg

SEQ ID NO: 81083 - DNA, 1073 bp, Homo Sapiens
  misc_feature (26)..(26): n is a, c, g, or t
  misc_feature (141)..(141): n is a, c, g, or t
  misc_feature (218)..(218): n is a, c, g, or t
gtgccaccacatgaggggccttagtnagggggggccctcggaggagacgacaggggggtgttccggacaaaaaccaatatgtggtgtacgggtccgcgatattatcccgggggaataagtgttcagacaccgcggggggcnggttctatattgcccgtcacacaattaaggggcgaaaatgtggtgaagccgggtgggtttattttacccccctgtcnatcggaagccggggggttctttatttgctttttccccctttaacccccttagcattggtttaatttagaaaggggcccaaaccaacccctgcaggtaaaaattccttgattgggcattcttctttcgggatgatggagaagccttttggggtagtgtttgcttaatgtgaacaacaaggcctttccagataagagaaggggcttttcccttggtgatgaaggggtagagattgagccatggggatgttttaggttaaagaatgcttttttttggccatcagtgaggatctaacaacagagtagaaggaaggatgccctaggtcagcatgcagggtggtgggagggctttcatcttccttacccaagcctctcttttcacttttctagaagtccagaagttgttatatgatgaaatagcctcctttaacgtttatttctgggtgccaagggaggcccattcctctaacattctcataatttttctcaaaggcctatgatctaaacatttcaccacggcatccactcagctgtgaggctgcgtacacagtctccacctctgaaatctgaacttcgtttaccagtggtgctgtttgaacttcataatgtcagcacttcctgaacacttactgtgtgcttggcttgtgctcctgagtgccttatatcataaggaaacggcaaaatcaggggactggtataaatggtgagctgagcttgaatctaagctttgtcttcagagccagtacccctaatctctctttctgtaaaatattacttttcaaagaatgaagttgtagccaaatcttgaaatttttcatttaccctaagtgaggacaaataaagctttcaacaacagtt

SEQ ID NO: 81084 - DNA, 619 bp, Homo Sapiens
gcggccgcgacctggatcgccttggccacggtcttgggcaggtggcccagctcggcgttgacgccggcggcagcgcccttgaccaggccaagcgcgcggatgaaaccgcgaggcatgcgctggcccgagaccgggaagttctgtacggcacgctgggtctgcgcaccccacagggcatcggcaggcacctgcagctcgcccatgctgtcatgttcgatccggaatcccggggtggcacccttgcttgcagctttgctcattgcatcaactccgcactacttcagttggggaaagggaagcggcggctggcagggtgtcgcttcccgggctggcggctgcgacaacgatactcccttgcctgcagcgtgggatgacgagggcgggccagatcgttccgcctgcacggccgttccgcgcgcgcaagggcagtgccggccgctggccggcagcgcatggaatcgcgggccgggcgtggtcgccggccagcgcccggcactacctgaccggcacgtcgtagaatatggcccccgccgctcgccccgccctgccgacatgtccgattccgccctgctcgccctgtccccgcttgatggccgttacgctggcaaggtcgacgccc

SEQ ID NO: 81085 - DNA, 283 bp, Homo Sapiens
gcggccgcgacggcctggtgatcggcgaaggcggcggcatgctggtgctcgaagaactggagcacgccttggcacgcggcgcgcacatccacgccgaactggtcggcttcggcagcaacgccgacggccagcacaccacgcgcccggagcagaaaaccatgcgccgagccatggagctggcgctggaagatgccgggctggagccatccgccatcggctacgtcaacggccatggcaccgccaccgaccaaggcgacatcgccgagacgctggccctcgtgcc

SEQ ID NO: 81086 - DNA, 746 bp, Homo Sapiens
  misc_feature (11)..(11): n is a, c, g, or t
gcggccgcgtnggtgggcgaacagcgcgtgaccctggacctgaacaacagcgacctggacaaccgcaacggcctgatcctcgccaaaggcccgctgaccctcaaccgtctgcgcgccttcaataaccagaacggcgagctttccagccagcaagacctggccctgaacaccggcaccctggacaacagcggcggcaagttgatcagcagccaggtgctgacggtcaacgcggccaacctgatcaaccagaacggcctggtctcaggttggcagggcctgagcgtcggcggtggcagcctcgacaaccgcaacaacggcaccttgtccagccgcaacggcgcggtggatgtgcgcctttccggcgaaatgctcaatggcggtgccggtgcactggtcagccaaggtgcattgagcgtcagtgccaccagcctcgacaacagcggcggtattctctccagcggcgcggggcaaagcctcgtcgtcagcggtttgctgaacaacgccaacggtggcctgatcgacagcggcaccgaccttgacgtgcaagccgccaccttgggcaaccaggccggcaccgtcaatgcacagcaaacgctggccgtcaccggcacagatctgcacaaccagagcggcacactggccagcaatggccgcctgaccctgagcctgctgggcaccctcgacaacacaaacggcaagctggccagcgctggcgcattgctgttgcaacgcgcggttcaggtcaa

SEQ ID NO: 81087 - DNA, 632 bp, Homo Sapiens
  misc_feature (175)..(175): n is a, c, g, or t
cccagctctcatcactgtcagacccaccagagctgagggcggagggattgggggctggggcagcctgggtccccatgcccctctctgtgcctcggtctccccccttccatggtgggcgggggggaagctccattcttaacctacctcgttttggggaggggtgggacgggggacncagagtgctgtacggtgctgtgggatctgcagatgaagcggtgggggctaaggaaaggtcccctggccgccacttcccagcagcgcctctcccaggtcccccagtcctgctccctgctgagacccacctctgatccatgattccccttcattgcccccaaatcaggggtacatggagggccgccctgggagccaggcagacctcagaccctggagcccccaggcccaatttcccagccgcttgcccctcagatcggatgcttggcccccagatttgggggaggcaccccaacatatatcttcctgatcttgtttctaagccagtctgtgacctcaatattgttagtgtcagtgcaggctgaagtggtgggggaggatgggggccaaagacccagccttgtcatcgggggagggggcacgagatctgctccaagaaatgtctgtgacaaagtctcaaa

SEQ ID NO: 81088 - DNA, 1323 bp, Homo Sapiens
tgctcatagtagagactctcggccagttcacgctcctgctcgggcgtcagcaatggaatgctgttgaccgtgtgcacataggcctccaggttcgcacccgggaccagagcataagcaggttgcaaagaagtggtcatacgaaaaaacctccgactcacataactcgtgcagttcagcactgcgaaaattgaccgggaaccgtaggacaagttccctaaaccaccaatacggtcaatacaaacgaaaccacattaatctgacattaactacttcggtgccagctcacgtaaatgacgagcgaccgcaatccaggcaccgatataccccaacaagacggcaccaagcaagagactcagaccgtcggcgaccggcacgccggccagggcaaaatcgctgccgtacaaaccggccagccctactaccgcgtcgttgagccagttcaagccaaaagccaaaacgccccaggacaaaatcccggcaccgaagccataaagcgcgcccatgtacagaaaaggcctacgcacatagctgtctgtgccgccgaccagtttaatcacttctatctcggtgcggcggttttcaatatgaagacgaatggtattacctatcaccaaaagtaatgcagacaccaacaacaccgtgagaccgaacacaaagcggtcgcccagcttgagaatggccgccagacgctctacccagactagatcaagttgtgcctgttgtaccttgggcatctctgcgagtttttgtcgcagggcctcaagcgctggcttgtcgacttcgttcggcgtcaccagcaccacgcccggcagcgggttctgcggcagctctttaagcgcctcacccaggcctgattgctgctggaactcttcaagggcctgatcgcggctgatgtattcggcatccgccacgcccggcaggttcttgatgtcgtcgcgcaggttctcgccatctttggcgctggtgtcgaggtccaggtacagcgaaatctgcgccgcgcgctgccaggaaccgcccaggcgctctacattattaagcagcagcgacaaacccatcggcaggctcagtgccacggccattaccaggcaggtgaaaaagctgccgatcggctgcttgcccaggcggcgcaggctgtcgaccaagctggcacgatggctttcgatccaggcgcgcagcagcgtggcgaaatccgggccatcatcttcgtcgcgttttttcttcggcggttgcgggtcggcggcttttggcgccacacgctcggaaaccttggggctgcgagtcgcactcatacgccagcctccccgtcgccgatcaggcggccgc

SEQ ID NO: 81089 - DNA, 562 bp, Homo Sapiens
agaattcggcacgaggttggtgaaaacaaaacaaaaactttgtggtggtgttggggggcatgagtagctgccttcagttaagtagcagaaaaggcctgagaaggtaacatctaactagagaccttgtgacataagaagcagcgaaccacatgaagttctgggggagccgcccagacagagggcggtggctagtgcactgttcctaaggaaggaacaagcttgtatgtttaaggagcaaatggaaggccagtgtggctagaacatggaatgacggggaagagtggttagacgtgagcttttagagcattttgaggaagctgggggcaaattggagggctttgtagaatggaggaggagttgggattatggggagccattcaagggttttaagaaaggatatcatctgagttatattttaaaaagatcactgattgctatgtgaagaatggattgtaagaggtgaagattaagttgctagttaggaaggtgctgagtaggttaatgagaggctctggcttgaattagggtgatagtagggaagtagataataggcaaataaatc

SEQ ID NO: 81090 - DNA, 747 bp, Homo Sapiens
  misc_feature (552)..(581): n is a, c, g, or t
gctacactctgctccactgtgtctgtgaggtgcattttactttgcaggtttttgcactgcctcactaggttgggtttctttgtcctttgaaatattttctctctcttcaccaatctgaggacagtttttcatcaatatcagcatacagttgcatggcatgcaatgtatctctaaggaatggaaaataagcgttggggtaagaaattcttaaatgtcctaaggggtttgcttttaacacaaagatatacctggagattccttccaggtatagtgcatccaaccactccaaaaagaggctgcattcccataccttgggctgttccctgagaggagatgacacaagggatgctatttactagacacttcaagagtcatgaccactgttggtatcttggggattctcaagcagttttgaaacccaaaaccaagaaaataacacaggatgcctgaggatgtattgccctgtgaggtttctgaaatgaaacctcaacccaaagacattctgatggggtgtctgtgccaagggaagattaaagaaagggacacaaatannnnnnnnnnnnnnnnnnnnnnnnnnnnnnactgtggattgtcaggggattattatgtgctttcatgtcctgtgaaatgtttacaaatgaaaaatattttttaaagtgtcatccactgctttttgaaaaaatgcagaattaaaatactgtgtctaaaatgtacaataaagaacagttgataatgttgtgagttaca

SEQ ID NO: 81091 - DNA, 467 bp, Homo Sapiens
gcggccgccggtaatcgtgtgaacgcagggttggttgacgagaccgacttcgacgataaacgcctgggccgaaccgccgtggatgtgttcgccgaactgctgtcgacccgccccaccgcacatgacctggtggtgacccacggcgatgcctgcctgccaaacttcatggctgagggcgatcacttcagtggtttcattgactgcggtcgcctgggcatcagtgaccgttatcaggaccttgcactcgcggcccgcagcatcgagcgcaatctcggagcggcctgggtggcgccgttcttcgagcagtacggcgtcgaacccgatgagcagcgaatcgcgttctactgtttgctggacgagttcttctaaacccaaaccccagacagcaaaaagcccgctcaatgagcgggctttccgtggtacctggcgttcagcgttccaggtgaccgaatatggcgcctcgtgcc

SEQ ID NO: 81092 - DNA, 1358 bp, Homo Sapiens
tggaccggtccggaattcccgggatgagatggagaccaacgagtctacggagggatcgcggtcgcggtcgcgatctttagacatacagcccagctccgaaggactggggcccacttcggaaccgtttccttcttcagatgacagtcccaggtcggccctggcagctgcaaccgcagcagctgcagcggctgcatcagctgctgcagctactgcagccttcaccactgccaaagcagctgcattatctacaaagaccccagcgccctgttctgagttcatggagccgtcctctgaccccagccttcttggggagccctagagccaccaaccacctggatcaagtcccaagcatgcaggatggctctgagagttttttcttccgacacggacaccggggactgctgactatgcaactaaagtcacccatgccctccagcaccacccagaaagactcgtaccagccaccaggaaacgtctattggccacttcgagggaagcgtgaagccatgctggagatgctcctgcagcatcagatctggtaagggattgggtaaaggggaagagggatggggaggagaaaaattgggtgagaatggccttgacacccctcgggctacatagtaaagaggtgcaggcagaacaggaacccacaaggaagctcttcgaggttgagtctgtgacacaccatgactaccgaatggagctggcacaagcagggactcatgccccacaaaggtgagaacccaccccccatcccccgccacttgcaccagctgggctctgacaggctgtggccaagtaccaagcccaaacgttgagacagaaggctgaaagcccaggaagtactcagtaaccctccctcacagcctcacgactaccgccaggagcaacctgagaccttctggatacagagggcaccacagctgccggtgtgtgagggtgactaggtgttgggggcagagcggggcaggaaaggtagggcagagttgttttgttctggcttggggagagtgggatccatcctcatcctggcactcctccagggtgtcagtaacatcaggacattggacacaccattccggaagaactgcagcttctcaacaccagtacccttgtctctggggaaacttttgccctatgaacctgagaattacccctaccaattgggagaaatatcttcccttccctgtcccggaggaaggctgggtggtggaggggggagaatgactcctttctgaggggtgaggagggaagtggggtatggaatatggaatctatttctgtctgcactagagaggtcgggaggaagttaattctcactgtacttgaagaggctttacataaaggttctctctcat

SEQ ID NO: 81093 - DNA, 880 bp, Homo Sapiens
gtgtctctatggcaacccagtagctggagtctgaagatggagaccaacgagtctacggagggatcgcggtcgcggtcgcgatctttagacatacagcccagctccgaaggactggggcccacttcggaaccgtttccttcttcagatgacagtcccagagagccaccaaccacctgaatcaagtcccaagcatgcaggatggctctgagagttttttcttccgacacggacaccggggactgctgactatgcaactaaagtcacccatgccctccagcaccacccagaaagactcgtaccagccaccaggaaacgtctattggccacttcgagggaagcgtgaagccatgctggagatgctcctgcagcatcagatctgtaaagaggtgcagccagaacaggaacccacaaggaagctcttcgaggttgagtctgtgacacaccatgactaccgaatggagctggcacaagcagggactcctgccccaacaaagcctcacgactaccgccaggagcaacctgagaccttctggatacagagggcaccacagctgccgggtgtcagtaacatcaggacattggacacaccattccggaagaactgcagcttctcaacaccagtacccttgtctctggggaaacttttgccctatgaacctgagaattacccctaccaattgggagaaatatcttcccttccctgtcccggaggaaggctgggtggtggaggggggagaatgactcctttctgaggggtgaggagggaagtggggtatggaatatggaatctatttctgtctgcactagagaggtcgggaggaagttaattctcactgtacttgaagaggctttacataaagggttctctctcatcccaaaa

SEQ ID NO: 81094 - DNA, 767 bp, Homo Sapiens
  misc_feature (16)..(16): n is a, c, g, or t
cgtgcagggtggctcnttggtgctgcccgggctgcctgtcgcccagtactgcgcagggaagacgggtccgcgcagcgtctggcaacagtggcctgctccacgcctggaggcgaccaagttctgagttaaaggcgccgggcttagccgggaagtgtatggcgacccagaacacggagcggagaaggcctcaggggacacgaggctaccgccttagtcctcgggcctgcgctccgagcggttagggtgcgtacggatgggctccgggatgttagtggagaggtgacaggagtctaccatcccacggccaagcgtgtgaggcctccggcgggcgggggtcccccccggggcagggcagggggagagtcaggcatgtctctaacgggctccctagtagaaccgctaggaaagtggccttcaaccctaggcacctttgtggctttcaggtagttgggcgactaaaaattcacttttgcctgctgtgaaatgggacaggtggttgtcaggttagagactgtgcccacgaagtctcgtttggcgggccgggactgacgtggacccgggccctcctcggaagcttgggaacctgtgagcccctcagctcctcgcctcactttgcctgtttgaaaaaaggagttgtttgagaggaagagttaaggctcaaaaggttctaaacgaagagcatgcggcctgacgcggagcgcaaagaagcgagcagtgaactgaatctggtgggactgagaccagaggcgtctgtatgcggcggccgc

SEQ ID NO: 81095 - DNA, 432 bp, Homo Sapiens
  misc_feature (256)..(271): n is a, c, g, or t
tttttagttgtaacaggttttcattttatggatgtgctccttgtcagtttgttaaaataggggaatcagctagtagctgttctaatgaacaccataattcaataacttacaaacttttttcacctcaggcacaaattcttgtttcgagaaggcacaggttttaaagctcaagtgatcctcctgaagttacagatgcacaacatttaaaacaatgttgaaattcttctaggtatttaactccagttagcataaagcnnnnnnnnnnnnnnnngaatcttcagctaaaccgggaaccattagtcaagacttcctgttacactggctataaagcatctcaacaggtggattccagaaaaggtcacagcacttacaggaaacaactgaggaaaacatccttgagttttcatgttaacaaatttctggatctgaagc

SEQ ID NO: 81096 - DNA, 900 bp, Homo Sapiens
  misc_feature (840)..(857): n is a, c, g, or t
gggacttccggaacaagcgtcgcgtttctgaggagaaactcttggggagaattccccagagggataatggcttacctacagcctggcgaacgaagagactacgcgctctggaaagacattgaaccgggaaatcggcgccatccttcagaatgcaggtactgtgatcctagaattgtccaaggaaaaaactaacgagcggctcctagaccggcaggcggcggccttcaccgcttcagtgcaacacgtggaggcggagctgtcagctcagatccgctacctcacccaggtggccacagggcagccccatgagggctccagctactcttcgaggaaggactgtcagatggctctgaagcgagtggactatgcccgcctcaagctcagtgatgtggctcgaacctgtgagcagatgctggagaactaggccagggagatggacccagagctgagagggagaccatcacctgtgccatgggacagaacctgggaacatgtagggtggggagtatgagcaccaacataccctgctggtcaaagtaccctaggacaaaggggcaaatggtgggcatggaaaaactgaagcccgagcctgcccacagctatgccttggcctctccagcagggtgctcctgctctgcactccagaaacaccctgacaggctcagagaggagatggaaactgacatacccaacccacttcctcaaacacttcatgctgctgccccagccttcccgcagacttggcctaatgaaaatacatacttcttcattcggagagacaaaacaagaactagagttttaatgataataaaagcaataataataaaagcaataacaatnnnnnnnnnnnnnnnnnnccctcgtgccgaattcgccacccaggcctcgctacctaggacc

SEQ ID NO: 81097 - DNA, 755 bp, Homo Sapiens
atttatacatttacaattgaataaggattataggttgataagctgtttattgtgaaaagatgtgttttgttacaaatacttgttttaaaaattaataagcccccaggaagtacagcattgactggcacaactgcccatagtgagcttcccaactaactgccttcagtggattcgggcaagtgcaaagtctttggcctattgtgtgacaaagaggtatatattaaaggaaaagaaaaatgacatgaataagaaaattccgtcaacaaggttggagtagggagttgttgaggggtttagtttgttttaaaaggtatgtgagggagtggtggggtggatttgtgtttctgactttttttctttaagcaaattccatatgttaccaaaagcacatgctgtatattttcttccccttttgtgtgtatatagtattttgaaagataaatgaattgggtatttgtatgtgggatgtacaaaattgtggccgctctctttgtggaaggaaaaaacataaatgaagttaatgcacttcttttcctagcccaaaagtcactgtgattatatttttttaatgaagtttagaaaaaaagctgttgtcttctcaattgtaaaattagtttcaaaatgctgcttctcttatcattagtctagtaattgttgaacttttctgcaaactgcattttacaaaattgaaacttggaagctgtattaacttttatagttaaacattgtattaaataaactatactataataaaa

SEQ ID NO: 81098 - DNA, 856 bp, Homo Sapiens
tcccagttcttcctgcaatctccagtctcaccctctcctcactgatctcctttgtcccaggagctggatcagagataagagaatctctaaggaactgaactcaactttggtctctgtcattttggaaaattactgggaccaagtcagactcttccccaagcagaaaatctgaagctcatagcagaaaaggatttgaaatttgaacccagggccttctcccaaattacttcaccctgtagccacaacagaaaacaggcactagaagcataaaggaccaggaaaggaagagaaacaaaaggaatattgaggatgcgctcaaccaactcttccgaaacagcagcatcaagagttatttttctgactgtcaagtttcaacattcaggtctgtccccaacaggcaccacaccggggtggactccctgtgtaacttctcgccactggctcggagagtagacagagttgccatctatgaggaatttctgcggatgacccggaatggtacccagctgcagaacttcaccctggacaggagcagtgtccttgtggatgggtattctcccaacagaaatgagcccttaactgggaattctgaccttcccttctgggctgtcatcctcatcggcttggcaggactcctgggactcatcacatgcctgatctgcggtgtcctggtgaccacccgccggcggaagaaggaaggagaatacaacgtccagcaacagtgcccaggctactaccagtcacacctagacctggaggatctgcaatgactggaacttgccggtgcctggggtcctttcccccagccagggtccaaagaagcttggctggggcagaaataaaccatattggtcgg

SEQ ID NO: 81099 - DNA, 723 bp, Homo Sapiens
gcacgtaccgttcaggtgtgagaccgagatacccagcttgtgcgccaggtcttcaatcttcgggtgttcgcggtaatgttgctcgaccaactgcgtgaagcgacggaaatactcccgcccacgtggggcgcgcgggtggcggcgctggatggcttgacggctgatccacaccagcagcacgctgaccagggcgtgcatcatcatgtcgcgggccggttgttcatcggcgtactcatcctgcagtcggtcgaacaggctgttgaggtaatcgctgtccttgccggcggggtaattgcccagggcctgcaaaccgtccaccgtcgcgcctaactgtgtctgcaaatggctgaccagcggcgcggccagcgtcaggataaaaccttccacatcttcagaaaaccgaaacccgtgtacacacaacggcggcagcacctgcaaggtggcttcgctgagggtagtacgctggccttcgatttccagctgcgcctggcctctgtgtacgtacagcaactggcacaggtccgcgtgccggtggggttggatttcccactggtattcccggctccgtcgggaaatggtttcacagtgcaacaaatccggagtcggccattgctgactttctccgtaaagcttgaagaccggaatcgcggtactggcagttttggtcatggtttcaatccgatactcaggatagtggtgcggtaatcgcccccaattggccgc

SEQ ID NO: 81100 - DNA, 995 bp, Homo Sapiens
  misc_feature (855)..(875): n is a, c, g, or t
tttagagagtatgaagtcgacggcgcgccgaattcggcacgaggtcgggcccgacagcgcctgcgcactgcgccgccggctggggtgctgggggcggggcaggggcaggtgtagcctctgtgcctcgttgtcccctggcgctacccggacatctctcagggtgccggcaccatgaagatctggacttcggagcacgtctttgaccacccgtgggaaactgttacaacagctgcaatgcagaaatacccaaaccctatgaacccaagtgtggttggagttgatgtgttggacagacatatagatccctctggaaagttgcacagccacagacttctcagcacagagtggggactgccttccattgtgaagtctcttattggtgcagcaagaacgaaaacatatgtgcaagaacattctgtagttgatcctgtagagaaaacaatggaacttaaatctactaatatttcatttacaaacatggtttcagtagatgagagacttatatacaaaccacatcctcaggatccagaaaaaactgttttgacacaagaagccataattaccgtgaaaggagttagcctcagcagttaccttgaaggactgatggcaagtacgatatcctcaaatgctagtaaaggccgagaagcaatggaatgggtaatacataaattaaatgctgagattgaagaactgacagcctcagcaagaggaaccataaggactccaatggcagcagcagcgtttgcagagaagtgatcgtgacagttggtagacaacatcggggtactccaggtctctccaaactgactatatatttatttgttattttaaaaatacaactatattttgcgtagnnnnnnnnnnnnnnnnnnnnngaaaagttggtgtaaaggctatggtgaccttgatccaaaacagaatgcaggggccctctaaaataaaaaaggggatcattctggaaaatttaaatgtatgggtttgaaaaataacctaat

SEQ ID NO: 81101 - DNA, 2200 bp, Homo Sapiens
  misc_feature (989)..(989): n is a, c, g, or t
  misc_feature (1371)..(1379): n is a, c, g, or t
  misc_feature (1530)..(1540): n is a, c, g, or t
  misc_feature (1544)..(1544): n is a, c, g, or t
  misc_feature (1546)..(1547): n is a, c, g, or t
  misc_feature (1549)..(1551): n is a, c, g, or t
  misc_feature (1557)..(1557): n is a, c, g, or t
  misc_feature (1570)..(1571): n is a, c, g, or t
  misc_feature (1584)..(1584): n is a, c, g, or t
  misc_feature (1793)..(1793): n is a, c, g, or t
ttgataagttggtgtaaggctatgtgacttgatcaaaacagatgcagggcctctaaataaaagggatcatctgaaattaatgttgtttgaaattactatctgattttgagggttccagtatttctgtgaaaattcaacaagaactccttggaaacgtattgatattcagtctccttaaggtagatttttcaagcttttcatacattggaactccacctgactttggaccaaccccagaacagagcagagccacctcctatagacgcccattgccctgctgctgtacacttcagcagcttgcacaagggagctcacttaaaaggagaaattgtgtagttttaaaatatattttgtgtaaaataccttactatgctataaaccaccattaaaaaccagtgttttgatttggtacttaaatatttttggagtgaaaattatcactaaagtaacatgactccaacaaaagtatggtttcattataaaagagtactgtattgatttgcccaagttttgtaacttagtaaaggtattaacttccttggatttgtactttgtgatttagtatgctgtatcgtgggctggttatgttaactgaaaaaaataaagtcattacctgagttttgcagtgctcataacttaaacagaagaacagctgttcacatcttttagcattttacatttgcctaacttaaaaattgccatgtgtcaaaatcatggttttgtaattgctaaggcatgatatgtcaggttatttgaatataattactttttgaagtaattgtgaccacaaaacatcttttttacatgaaggagctgtgtatcatttgaaattactcaaatgatgtcttgctctgaggcataaatcccaggtacttagtgtttttaataatatggtgccactgcaggatttgggggcggtggggaagaacaagcataatggtagggggaggcttggcctgaaactaaccactgagtgaattgcactgcangttttacttaacgggaattccttatttgggatgtcaagagggcagctgcaaactgaaaaacaatccagtaaatgtactttgttttatgtattgtagcaggcaattaactactaaataatagctttgacatttgcaaattgttgcatagagactattttttgctagaaagatgattagctcttgccctttattttacagggcttagtgtgataaacttctagtcatgtttcctatccaagagaccagttaatatatgtacataaaccacagaaatagtataacacactatttttaaattatcgttttcctacttaaattttgtttagcttaagacttcttaggacatttgtaaaagcaggttaaatttaataaggtttctgannnnnnnnngaaccggagatagttttacaagtgaataactttcagctaaaaaaaatcgctaataatgatattgatgaaactgcttgataatctgaaatatctgtctgaaaagttatgccatatttaaactatcttgttttaaatgcatgacattggagcnnnnnnnnnnngggngnnannngggccnccgaaatagggtnnggaaaacagcccnacgaaaccccgcgaggaactattctagagaacaaacgtgggaccccctattgggtggcaagcacaacttactgagagtttcttctggccatttttgtcaccacagggggcaaggagtattagcgtgatagcccgtgttgtttgtataacacctaactaacagagggcggcacaacacacaccataggcgaagagtaaactgggaacttnttctaggggaaaagcacaagccaaaggtgcgccggacgaaagagacatatctggccctctgacaaaacaacataaaaaccgccgccggtcggagaagcggggcgctgagcaaatagaaggggggacgaacgcgcgccgtggcgagtacgagaagttacacaccctgtaggtgctctggaaaagaggaagagatattctttgcagagaaaacagtctctctagggcttagaagggcaaaggacactctttgttattgatccgcggcggaggcaacccgcgtgctctcctgcgtcagggggcgaggtggtttgtcagcagcgcgcgcctaggcgcggacaccgctgccggaagaagaggtgttgtgcaaggcacgctagtctattggcgggggcgcgggcgccccgcac

SEQ ID NO: 81102 - DNA, 724 bp, Homo Sapiens
cgcatgtactataaacagtcgttcaaaaagcaggctggtaccggtccggaatcccgggatatcgtcgacccacgcgtccggtttaactcatgaccaagtgatgtacatccaagtgatgtattctggaaacgatggaattttacagttacagttccattgagtcaaatcccattttatatatacataaaaattaagttctgagtgagttctagctaaatataagtgcgactgtaaacgcagccaatttttttaagcagaatatgagaacacctaagtattctcttcatagcagttcctataaagggattaaacacttatttctgtgttatggttcttattcatatatttttatagcacctttttttggaacctatatttgtgcttgaaggtgtttttgatatttggaaacagtataagccatttggagtcatgattggtggtcaagtggattcaagctaaaatactaagaccagcattcttagtggcgcttataaattagctctcacctggtttccaaactgcttttaacaatggtagtgctcctggaacaatccttccaagctcctctaaggacaatatttaattcagatactaaaggtaagactggttgttacttttgttcttcgttgtacaattagtactttatactcacatgttgtatatatttaaatagcccagttttattcagacttgtaaatagaactattttcaatgtagttaatct

SEQ ID NO: 81103 - DNA, 1019 bp, Homo Sapiens
  misc_feature (29)..(29): n is a, c, g, or t
  misc_feature (33)..(34): n is a, c, g, or t
  misc_feature (70)..(72): n is a, c, g, or t
  misc_feature (82)..(83): n is a, c, g, or t
  misc_feature (135)..(135): n is a, c, g, or t
  misc_feature (138)..(138): n is a, c, g, or t
  misc_feature (144)..(144): n is a, c, g, or t
  misc_feature (161)..(161): n is a, c, g, or t
  misc_feature (195)..(195): n is a, c, g, or t
  misc_feature (225)..(225): n is a, c, g, or t
  misc_feature (260)..(260): n is a, c, g, or t
  misc_feature (263)..(263): n is a, c, g, or t
  misc_feature (270)..(272): n is a, c, g, or t
  misc_feature (275)..(275): n is a, c, g, or t
  misc_feature (282)..(282): n is a, c, g, or t
  misc_feature (314)..(314): n is a, c, g, or t
  misc_feature (348)..(348): n is a, c, g, or t
  misc_feature (361)..(361): n is a, c, g, or t
  misc_feature (419)..(419): n is a, c, g, or t
gggccatcaccccccccaacaggcacaanttcnntgcagacatggatgagccacagacactcacttatgnnnagcagtgctnngggtcttgagagtgcgtccacagaactgggcaggactgtgtgcgtgggctcntgnccactnggaactctgctttcatnatggcatcaaacagctgctgaggcacttcccacntaataaagtgtgtgctaggggttgggacgntgggggctcagggggaccagactgagcccagcagnttntactacnnnacntagtgcntgaggatgaactcccttctgggtcaggtcccnaacagtgtccccagcccttggagtttgacatcanccaaagtgagtgnattctgtagggagctccaagatagagatgtgccccctcagagcagaggtaggcatttntgcattctgcagagatgcacagatgcccagagagagccatgcttgtgcatatatgggtgtctacatgtgaggcaaaggcaggcactcaaacagatccacaaatggacagtgacccccaccccatgcacccatgcctctgttcctgctcttggtctggctgcaggacacacacctcctctacgtactggcagctgccaacctgtatgcccagatgcatgggctgcctggctcacaggactggactgcactcagggagctgctgaagctgctgccacagcctgacccccaacagatggcccccatctttgctagtaatctagagctggcttcggcttctgctgagtttggtgaggctcctggccctggcccctcatgctgtctttcaaaggcctgaacctgtcctgtcctcagcctgtgctgcagaaggaagatagggcctaggggatctacagccaatttgctacctctcaggcctcctaacctcactcctccatagtttcaggcttatcctctggtccctcagtaggtcttctccctgctgcctaccccacatcccagttcttgtggcagattcttggcaaaataaataagtaaataaat

SEQ ID NO: 81104 - DNA, 690 bp, Homo Sapiens
gcatcagcttgggaaaagagtgcctttaaggcactgtttctctctatgaaggcagtgtggaatgatagggatgatctaggacctagaggagagaccttaagtcttacttgcagccaaaagccttcaaacctgagctagccagaactgttacatcagaattctcacccatgacaagaagcctggagggagtccagggttgatggattgacttaaggtgtcatcaaaagcttagactttacccttctgctgcaccacccttattgccttgttgtcacaagaggactactgctgttcaagtcatcacttccacattccagaaggaagaaaggagaggtagagggccagaagtatcccctccttttatcaggagccattaactttcccagaaacttccatgtccacccagcagacctccacttacatctcactaggcagaactcctatcacttggccaccccagcagtcagggaagctggaagggtgagcattcagctatagagagtggaagcacaagcagcaagggaagaacaggtcagtaattgctgtagagtttcctgcccagcagcatctgccaaaactaggtaaattattttttaacataatagtatttttgtggattttcttacaaaagcaatgcatatatattgttactttgaaaaataaagattttaaatcttcaacaagcccatt

SEQ ID NO: 81105 - DNA, 730 bp, Homo Sapiens
  misc_feature (248)..(248): n is a, c, g, or t
ggcagggctcaaatttctgcctacagggtcatgctctatcagatttcagaagaagtgagcagatcagaattgaggtcttttaagtttcttttgcaagaggaaatctccaaatgcaaactggatgatgacatgaacctgctggatattttcatagagatggagaagagggtcatcctgggagaaggaaagttggacatcctgaaaagagtctgtgcccaaatcaacaagagcctgctgaagataatcancgactatgaagaattcagcaaagagagaagcagcagccttgaaggaagtcctgatgaattttcaaatggggaggagttgtgtggggtaatgacaatctcggactctccaagagaacaggatagtgaatcacagactttggacaaagtttaccaaatgaaaagcaaacctaggggatactgtctgatcatcaacaaaatttgtttgaaaacttttaaaaattcaaatgatttttacaagttttaaataagctctccccaaacttgctttatgccttcttattgcttttatgatatatatatgcttggctaactatatttgctttttgctaacaatgctctggggtctttttatgcatttgcatttgctctttcatctctgcttggattattttaaatcattaggaattaagttatctttaaaatttaagtatcttttttcaaaaacattttttaatagaataaaatataatttgatcttaaaa

SEQ ID NO: 81106 - DNA, 1677 bp, Homo Sapiens
  misc_feature (811)..(811): n is a, c, g, or t
  misc_feature (1121)..(1121): n is a, c, g, or t
gtaagtttacctgcagttccttcatgtggtgaagttttctctttctctcggagaaccagattctgcctttctgctggagggaagtgtattcacaggttctcctccttttatctttagtgtttttgttcaagccctgctgaatttgctagtcaactcaacaggaagtgaggccatggagggaggcagaagagccagggtggttattgaaagtaaaagaaacttcttcctgggagcctttcccacccccttccctgctgagcacgtggagtaaggcaggtaaggggactcgagagacgtgcgagtggtgccaggaaagggtggagcggattatattctcctgcctttctaaaaacgatggacttcagcagaaatctttatgatataggggaacaactggacagtgaagatctggcctccctcaagttcctgagcctggactacattccgcaaaggaagcaagaacccatcaaggatgccttgatgtaattccagagactccaggaaaagagaatgttggaggaaagcaatctgtccttcctgaaggagctgctcttccgaattaatagactggatttgctgattacctacctaaacactagaaaggaggagatggaaagggaacttcagacaccaggcagggctcaaatcactgcctacagggtcatgctctatcagatttcagaagaagtgagcagatcagaattgaggtcttttaagtttcttttgcaagaggaaatctccaaatgcaaactggatgatgacatgaacctgctggatattttcatagagatggagaagagggtcatcctgngagaaggaaagttggacatcctgaaaagagtctgtgcccaaatcaacaagagcctgctgaagataatcaacgactatgaagaattcagcaaaggggaggagttgtgtggggtaatgacaatctcggactctccaagagaacaggatagtgaatcacagactttggacaaagtttaccaaatgaaaagcaaacctcggggatactgtctgatcatcaacaatcacaattttgcaaaagcacgggagaaagtgcccaaacttcacagcattagggacaggaatggaacacacttggatgcaggggctttganccacgaccttttgaagagcttcattttgagatcaagccccacgatgactgcacagtagagcaaatctatgagatttggaaaatctaccaactcatggaccacagtaacatggactgcttcatctgctgtatcctctcccatggagacaagggcatcatctatggcactgatggacaggaggcccccatctatgagctgacatctcagttcactggtttgaagtgcccttcccttgctggaaacccaaagtgtgtttattcaggctgtcagggggataactaccagaaaggtatacctggttgagactgattcaagaggagcaaccctatttagaaatgggattgatcatcacctcaaacgagatatatcccggatgaggctgactttctgtggggatggccactgtgaataactgtgttcctacgaaacctgggagggaactggtactccagcactttgcagaagcgaaaaggagtctccagggagaatttcccactgacggtgaatttaattcccagtgcggaactgggacagccgttttcaagaaaagtctggg

SEQ ID NO: 81107 - DNA, 413 bp, Homo Sapiens
ggcaggaggtcagagagtactacacaaatacaggtggtagagccttaggctggtggtgcagcctattactcccgggctgcaaacctgtccagcgtgttactactgaatactgtaggcagttgtaacacagtgctaagtatttgtgtgcctgaacacatttagacatagaaaaaatatagtacagatatggtataaaggatgaaaattgcttcacctgtatagagcactcaccgtgaatggagcttgcaagactggagtggctctggatgggtcagtgatgagtgctgagtgaatgtgaaggcccaggacagtactgagcaaagccgagttttataaacagtcaacacttaggctgtactacgttgatttacaaatttttcctcaataagaaattaaccttaacttactgtaac

SEQ ID NO: 81108 - DNA, 701 bp, Homo Sapiens
  misc_feature (32)..(32): n is a, c, g, or t
gcgttgtacaggtcggtaagtctttcgggttntcgcagcggtagccgaagcgcacgccgtcgaaacgcgacaggttcgaggaggcttctgccggcgcgatcacgtagtacgcaggaatcgcgtgctggttgttcggcaggctgatttccttgatcacggcaccgagcttttccagctctttaatgctgttgtgcaccagttcggcgatacgcgggtcgagaccggcgctgaaatactctttcggcacgccgatacgcaggcctttaagcgaggtattaaggctggcgctgtagtccggcaccggctcatcgatgctggtggagtcctgtttatcgaacccggccataccttgtaacaatattgcgcagtcttcagccgtgcgtgccagcgggccgccctgatcgaggctggaggcataggcaatcatgccccaacgggaaacgcgaccgtaggtcggcttcaaaccagtgaggttggtgaaagcggcgggctggcggatcgagccgccggtgtcggtggccgtggccgccggcaggaaacgcgcggcaacagcagcagccgagccgccggaggaaccgccgggcacgtgctccaggttccacgggttttttaccgcaccgtagtagctcgactcgttggccgaacccatggcgaattcgtccatgttggtcttgcccaggggtcacggccccggcggccgc

SEQ ID NO: 81109 - DNA, 1060 bp, Homo Sapiens
  misc_feature (176)..(210): n is a, c, g, or t
  misc_feature (727)..(728): n is a, c, g, or t
  misc_feature (732)..(732): n is a, c, g, or t
  misc_feature (867)..(868): n is a, c, g, or t
  misc_feature (921)..(921): n is a, c, g, or t
  misc_feature (1030)..(1030): n is a, c, g, or t
aaaaacagaactgtgcaatgagaatgctttaatcatcacccacacagacgagcggaagctacagacagagaaccactacggatggtgcctggaacagaggtgagaatggcccaaaactatgcctccgggaaaggtgccaagtttacaggacttatcgtggtgccctcaccagaccnnnnnnnnnnnnnnnnnnnnnnnnnnnnnnnnnnngtggccgctggcggctcctgcatctcctctggggaagcctgaggccggctcgggtaacttctgctgcctgagacagtcacacgtgcttgggacctctcacctgaggtctctgggtgctgaactggagtggaggtagctaggcgtgggagagaaatgtggtcacctgtgtcatcttcttcaaagtcgttaaggcagtacacttcgtccaggtcaacatccagcgtccggaagcccttggtgaccacaccgggccgggggtccaggatgcccccaaggtgaggttgggccaactgctgccagtggtgaagtgtggcagaaccttccagcggcttcacgatctggagcttctcaggcaggtaggagcggctgctgaaggacatgccagagaagccggtgaactcggagaagcgggagtgcgtgcccagggacatgatgctctcagtgggtgtgagggagccgctgcgcagctcgcccttctccaccagctcctggagcttcctctcttgctcctcctcannaganctcctctccgagaggtagttctcccggcgcagggacagccgcctcagcgccgtctccaggtcgtgggagcctggggtgccgggcgtcccggcttctactccgctcatcgtttcccaggtcggtgctctggttcannatgatgctgttggtctgttgtcgaggacgacgttgctatgtcgctgcgtaaanctggacggggggtgctgcccactggtcagacgactcaggccgagactgttgtcccggatttatggacaagggcaagatctcgctgcacctggtgtgtttctacgtcaanaacctctgtgaggagtctgctctgcgactt

SEQ ID NO: 81110 - DNA, 477 bp, Homo Sapiens
gcggccgcggcttcgaacagtcctgggtcgtcggcacggcggtcgatgccaccctcgccttcttcccgagcagcggcgcgctgcgcggccttctggtggacgccgccaacgcggccggaccggcgctctggcccgtcacccagcccggcgacgaatggcaggccttggcgcagcgcgtggccagctgcccctgggtggggctgcatcccttcgtgtcgtgtgccgccgtgccgctgcgccatggcgagcgcctgtggctcatcgccgacggccgtgcgttgccgatggccctgggcgagagtgaggcctggcccctgctggccctgtccggcggcaggcccctggacttcgccggtgaatgggacggtcaggctttcgcaccgctgacggcctgggtgggcggacaactgctgtggctgaggcccgcgtcatgaacggtgcctggactgccctgctgccggccgctaccatcgtgcc

SEQ ID NO: 81111 - DNA, 1376 bp, Homo Sapiens
gcggccgcgtcacgctggtcatccagggcgctgcccaggcccgtaatctgcgacaggttgtcttccacttgctcgaaagcacccagcactacgccacggtatttggccgcggcttcgtcagtggcggccttggcaatatcgacctgggcctggcgcgcgccgccatcaaagattgtgccgaccagcgacgggccgatggcccagaacaggttgggtgcgctgagcaaacgggcaaactcgtcactctgatagccgccctgggcgctcaaggtgatctgcgggaaccatgcggccttggccacgccgatccgcgcattggccgacgcgatgcgacgctcggcagcggcaatatccgggcggcgttgcagcaggctcgacggcacgcccgtgggcacgttgggcaatgcaatcggcgccacattcacggcgacggtatacgttgaggcggactcccccagcatggccgcaatcgaatgctccagcaccgcccgttgcaccaggctctggttcaattgcgacttgaccgtcgacagctgcgtgcgcgcccgcgccaagtccagcccggacacgatcccgccgccgtgcaagccttcggtcaggctaagggctttggtgtaggcgtcgcgggtctgttccagcagttggttctgccagtcgataccgcgcaggcggatgtaactgtcagccaattgcgcttgcaggctcaggcgtaacgacgccaggtcggccctggccgcctcagagtcactggtgccggccgcaaccgtgtcgcgcacgcggccccacaggtcgacttcataatccacctccaggcccaatgtcgcggagttatagacgtccggcgaggtggccgagcgcagcggtttggtgtccgactggcgaatacgctggccgctgccgatggccgagagcttggggaacagccccgaacggtcctgggccaggaacccctgggattgctggtaatgcgcgaatgccgcgctcaggtccgggttgtttttcagcaactgctgctgcatcgcatccagctgcgggtcgttgtagatgcgccaccagccgtctcggttggcctggtcgtcgggcgcgccgacggtccatgggccttgggtgtgaaactgcgcggcgacaggcgtttgcggcacttcaagcggcggcgccaacgagcaggctcccaggctcaaggtggcgagcaggcccagcaagttgcgcttagccatggggtttggcctcgacggaagcagcagccaattgcaccgaatcatcatcggccaggccatccggcggcgtatcgatcacgcggtcagccgcttgcaggccgctggcgatctccacgctgtcgccaaagtcacgggcgatggtgacggtcttgaagtgca

SEQ ID NO: 81112 - DNA, 897 bp, Homo Sapiens
gcggccgcgccggtcgcaccgcagcatggtctgtcgctgggcgcctcgtcgcccaagctggtaccgcacgcgaccgcgcagaatcatgtgcccgacgtggcggccgacgcctacccggtcggctcgccgcgcgcgggcgttgcacagggcgtgcccgaggcctacgcggcagcgctgccgccgctcggtggcgcgtccgccttcccgcagccgggcggtgcttcggcaccctcgtcgccgtactatttcctcggcgaatcgagtgcgctgcggtcggcgcctgcacatgtcgatgaccgcgtcagtgcccgttccttcggcctgcccggcgacgacgcgctgcgcgggctgctggccgagccgtcacgcgaggtgcagccggccgcgccgtcggcgccggcctactacttcgtcgacagccaggcggcgcccacggtcggtcacgccgggcgggtgccgaatgccgacgccggccgtcatccgcctttcgatgtcaatgcggtacgacgggactttccgatactcgccgagcgggtgaatggcaggccgctggtgtggttcgacaacgccgcgacaacgcagaagccacaggcggtgatcgaccggctgtcgtacttctacgcgcacgagaactcgaacatccaccgcgcggcgcacgaactggccgcccgggcgaccgatgcctacgaggcggcgcggcagaaggtggcgcgcttcattggcgcaggttcggtcgaggaaatcatcttcgtgcgcggcgcgaccgaggcgatcaatctggtggccaagagctggggtgcgaagaatatcggcgccggcgacgaaatcatcgtgtcgcacctggaacaccacgccaacatcgtgccctggcagcagctggcggccgagaagggcgcg

SEQ ID NO: 81113 - DNA, 1037 bp, Homo Sapiens
  misc_feature (133)..(133): n is a, c, g, or t
  misc_feature (146)..(146): n is a, c, g, or t
  misc_feature (172)..(172): n is a, c, g, or t
  misc_feature (248)..(248): n is a, c, g, or t
  misc_feature (258)..(259): n is a, c, g, or t
  misc_feature (279)..(279): n is a, c, g, or t
tgcctcggccagatcgcagagctaccgacgaagacacgcctgatctgagttcatgacctatctcgcagtccagcgcgagtctcgctggagaggggtccgcgagtccagagcagcgggaagccatcctctatcntattccgagctcngctcatgagagtcgaatgctctgccntgaaaagcatcgactacagagacgtgcccatcaatctcataaaggatgggccaaacagtttctaaggacttccagncactgaatcnntatgaagcagtgccaacccntgaagattgatggaatcaccattcaccagtcactggccatcattgagtatctagaggagacgcgtcccactccgcgacatctgcctcaggacccaaagaagagggccagcgtgcgtatgatttctgacctcatcgctggtggcatccagcccctgcagaacctgtctgtcctgaagcaagtgggagaggagatgcagctgacctgggcccagaacgccatcacttgtggctttaacgccctggagcagatcctacagagcacagcgggcatatactgtgtaggagacgaggtgaccatggctgatctgtgcttggtgcctcaggtggcaaatgctgaaagattcaaggtggatctcaccccctaccctaccatcagctccatcaacaagaggctgctggtcttggaggccttccaggtgtctcacccctgccggcagccagatacacccactgagctgagggcctagctcccaaatcctgccccgttggcacagggccacaggagcagaagctgggtgggctgaagaggcctggaaacgagagtcttaattgaggagatgggagactcgaactctagccctggatctgccttcctgctgaaacttgttccacctcagtcccctcatctgtcacacgcatgtggggtggagtagggagatgcggggagcagggtgggcaggaatactgttatctatgtgacggggcagtcgtgaggctgagatgagaatgcggattaaaatgcctggcgtgctcaccgt

SEQ ID NO: 81114 - DNA, 1212 bp, Homo Sapiens
taggtagcgaggcctgggtggcgaattcggcacgaggcctcgctttacccggacgaaagacacgggcctgattcgtcgagtctcactgagccttagtcgtcggcaggtcccaggcgcgaagtttctcggcctggaggagggggtcgcgcgaagtgccagatgcaggcggggaagcccatcctctattcctatttccgaagctcctgctcatggagagttcgaattgctctggccttgaaaggcatcgactacgagacggtgcccatcaatctcataaaggatgggggccaacagttttctaaggacttccaggcactgaatcctatgaagcaggtgccaaccctgaagattgatggaatcaccattcaccagtcactggccatcattgagtatctagaggagacgcgtcccactccgcgacttctgcctcaggacccaaagaagagggccagcgtgcgtatgatttctgacctcatcgctggtggcatccagcccctgcagaacctgtctgtcctgaagcaagtgggagaggagatgcagctgacctgggcccagaacgccatcacttgtggctttaacgccctggagcagatcctacagagcacagcgggcatatactgtgtaggagacgaggtgaccatggctgatctgtgcttggtgcctcaggtggcaaatgctgaaagattcaaggtggatctcaccccctaccctaccatcagctccatcaacaagaggctgctggtcttggaggccttccaggtgtctcacccctgccggcagccagatacacccactgagctgagggcctagctcccaaatcctgccccgttggcacagggccacaggagcagaagctgggtgggctgaagaggcctggaaacgagagtcttaattgaggagatgggagactcgaactctagccctggatctgccttcctgctgaaacttgttccacctcagtcccctcatctgtcacacgcatgtggggtggagtagggagatgcggggagcagggtgggcaggaatactgttatctatgtgacggggcagtcgtgaggctgagatgagaatgcggattaaaatgcctggcgtgctcaccgtaacaccacggggaaggctgtgtgccttttctcatccgcttttgttgtgtgtgactccaaagaatgcccgcgctgaaatttggcgtgaattaaactgaagcccaggcctcta

SEQ ID NO: 81115 - DNA, 488 bp, Homo Sapiens
  misc_feature (85)..(95): n is a, c, g, or t
tgttgtagagacgaggggaccatggctgatcctgtgctggtgcctcaggtggcaaatgctgaaagattccaaggtggattccctnnnnnnnnnnnactacatcagtccatcaacaagaagctgctggtcttggaggccttccaggtgtctcaccccctccggcagccagatacacccactagctgagggcctagctcccaaatcctgccccgttggcacagggccacaggagcagaagctgggtgggctgaagaggcctggaaacgagagtcttaattgaggagatgggagactcgaactctagccctggatctgccttcctgctgaaacttgttccacctcagtcccctcatctgtcacacgcatgtggggtggagtagggagatgcggggagcagggtgggaaggaatactgttatctatgtgacggggcagtcgtgaggctgagatgagaatgcggattaaaatgcctggcgtgctcaccgtaaa

SEQ ID NO: 81116 - DNA, 1028 bp, Homo Sapiens
  misc_feature (656)..(656): n is a, c, g, or t
cgaataaggtcctaggtagcgaggcctgggtggcgaattcggcacgaggcctcgctttacccggacgaaagacacgggcctgattcgtcgagtctcactgagccttagtcgtcggcaggtcccaggcgcgaagtttctcggcctggaggagggggtcgcgcgaagtgccagatgcaggcggggaagcccatcctctattcctatttccgaagctcctgctcatggagagttcgaattgctctggccttgaaaggcatcgactacgagacggtgcccatcaatctcataaaggatgggggccaacagttttctaaggacttccaggcactgaatcctatgaagcaggtgccaaccctgaagattgatggaatcaccattcaccagtcactggccatcattgagtatctagaggagacgcgtcccactccgcgacttctgcctcaggacccaaagaagagggccagcgtgcgtatgatttctgacctcatcgctggtggcatccagcccctgcagaacctgtctgtcctgaagcaagtgggagaggagatgcagctgacctgggcccagaacgccatcacttgtggctttaacgccctggagcagatcctacagagcacagcgggcatatactgtgtaggagacgaggtgaccatggnctgatctgtgcttggtgcctcacgtggcaaatgctgaaagattccaggtggatctcaccccctaccctaaccatcagcttccatcaacaagaaggctggctggttcttggaaggccttccaaggtgtcctccacccctgcccggcagcccagatacacccaacctgtagcctgaggggcctaacctccccaaaattcctggccccgcttgggaaccgggggcccccagggaacccaaagcttggggtgggcctctgaaaaaagcccttgggaaaacgcaaaagttctttaactttgaaggaaaaatgggggaaaaactccccaaaactccttagaccccctgggaaaatctgggcccctttcccccgggcta

SEQ ID NO: 81117 - DNA, 822 bp, Homo Sapiens
gcggccgctggcgaccggcagaccgttgcgacccatgatatcgacttgtgcatcggcgaccggcgagccgttgccgatggactgcacaaacacatcgtggctgccgtcgctggagcgcttggcgatgatgccaaggtcggtaaccacgataaaacgcaggtcgctggtgctgttgcgttcgtactcgaacgtgcgctcggccgggtcatcctgcgggctcagcttgagcacgaaaataccgcgacggccgccattggcagtgaggtagtggctgaggtcgacgttgtcgtagacggttttcgccgggtcattggacgacaacgcaatatccagcgactgacgctcaaccatgcggtcgaagtattcattgccgaaattcggccgggcgaagctgccgctgctttggtcgaccaaatgctgcaactggttgggcagcaggcgggcgatttccacatgggcaccgggcacgccacgggccatgaaacccaggcgtttttcaccgttgaggctcagcagcgcgccgtccgacaggaactgcaaggtgcgtgggtacgccggcatgctgatcagcgaagcggtagggtttttcgccagataaccgccaatggcttccaggttggcgggcacgcgtacatacagcgcgcggccggccggagccttgaacttgaacgcatgcagggtgttcagcggctcgacgctgggcacgtgggtcaggctgaccttggtgctgcgcgccagcatcgcgtcgtcgatgtcgttgctggtgtaagggcgcgtgtcgtcttcagccttggccggcagcagccaggcctggaccttacc

SEQ ID NO: 81118 - DNA, 1034 bp, Homo Sapiens
cacaggatattggtcccattctattcagtttctttatgcacagtatatgcctgaatgactctgggtgtggagagcaaatattctcaaccgttcactacgtaaggaagccttatgctgcacagcctgagtctggatggccacttgagaagtttgccaactcctgggaacctcgatattctgacatttggaaaaacacatttaatttatctcctgtgtttcattgctgattattcagcatactgttgattcgtcatttgcaaaacacacataataccgtcagagtgctgtgaaaaaccttaagggtgtgtggatggcacaggatcaataatgcctgaggctgattgacgacatctacatttcagtgctttttccctaagctgtttgaaagttacgcttttctgttgttctagagccacagcagtctaatattgaaatataatatgatttgtcaggtcttataatttcagatgttgttttttaagggaaattgaccatttcactagaggagttgtgctggtttttaaatgtgcatcaagaaagactactgaaaagtattattttgtaactaagattgctggtactattaggaaaaatctgtgtgtattgtatagctctagctgtttgactatctgtaatgaaaatgctgcactttttctggtatttgattagagaaccgtgtgtgtgctgtgtgtggtgcctttgagcaactttatttatggttaccatatttttaaaaagattttttgtcagggtgacttaacatggactcttatagggtattaaaacaatctagattattccttttcatcctaaataagcctaccaaatttcatgctgttggtttgccatgaatgatattacttcctacattatatttgtgttttttcaaatctgctatggaatgaacttattcctagatttggatatgtaagagaaacctgcagtcatcttttgatttataaggcaattcttgtggataaatagtgatttctcagcctctgacccattttataactgaaattttagccctttag

SEQ ID NO: 81119 - DNA, 1012 bp, Homo Sapiens
  misc_feature (55)..(55): n is a, c, g, or t
  misc_feature (133)..(133): n is a, c, g, or t
  misc_feature (169)..(169): n is a, c, g, or t
  misc_feature (326)..(326): n is a, c, g, or t
actgatcgattatcgatcattaggattgcctgagccagatcgcagagctgatacnaataggagtgagagcaatgactcgagagatgaatcaggtgagaggacgattcagagatgaagctaactgagaattccntagcagaccactcaactgagctgaacatcacagaantgtgcagaaaactgagagccaccgatcaggagatgcgcagagagagacagaggagcgagacttgaagcgctgtcaaaaagttaaaaacagacctccacaactgcgtagcctatattcaggaaccgcgctgctgaagggagaaggttcgaggtctctntgagaagtacgtgcagcgagcagacatggtggagatcgcagggctgaacacagacctgcagcaggagtacacccggcagcgggagcacctggagaggaacctggccactctcaagaagaaggtggtcaaggagggcgagctgcaccgcacagactacgtccgcatcatgcaggaaaatgtctctctgatcaaggaaattaatgagctccgcagggagctgaagttcactcggtcccaagtctatgaccttgaagcagctctgaaactgaccaagaaagtccgaccacaagaagtttcagagacagaacccagcagggacatgctcagcacagctcccaccgcaaggttgaatgagcaagaagaaactgggaggatcattgaaatgcagcgcctagaaatccagcgcctcagagaccagatccaagagcaagagcaggtcacagggttccacaccctcgctggagttcggcttccttccctctccaactccgaggtagacttagaggtgaagaccaactgaccccctctggtgagccatctccagccacagccagaagaaacacagcatgtctgtccccaagccagacttgcggttggagtctgtatggtccctgcagcactgaccccagcaacctctttctcttgccctggggaatttgggacacagaataaaggtgtttgcccac

SEQ ID NO: 81120 - DNA, 672 bp, Homo Sapiens
acaaggttttgtactcatttggttttggtggataagcttcacaaattggtatttattgattcaacaatcataaaaagattacatatttccttttgacaactagactatgttagaattagagaataaatcatacagccataaactgtaatttatttaaggaagtgtaattcatgtgatacatgggaatcaaaattgctcacaacaaagctatcagtgattgtcttaatccttaccgtttaaaaaatatcttttgtatagaatgatatttaggaaatagagatttaatgaaatcttgctttagtaaagaaatctcataaggaagtatatgcctttgatcacaagctaccggtactcaacgttagtgttgaaaaaggccaaattttaaaataagattaatgtgattttctattgaggattcagaaaaatgttgttaaaagaatgttgagaaatgtctgaactcagaaatgtctgacttgaaactatttcagtagtggattgattttatgcatcttactaactataggatgaaaaattcagatgtatatagtctttaagagccacatctgagcactctacatctgacaatgctttgaagacaacaattctgagaatgacataatttttacaaagcttttaaaaatatattttaaaataaactacggccgcggccgc

SEQ ID NO: 81121 - DNA, 621 bp, Homo Sapiens
gcaagaggattgccgggaatcaagtccttctttttgttagtcggtagtcgattgatgggaagtgttcaaaatcattcgatgtggtgacaaggtttcaccaggtactgccttctaacttgagctggccatttccacatgttggagcggccgccaacttgccttttaactacccgtgtgatacttaaacactgttgccggtatcacagcttttcttcaaaacaggaagcaacgagaatgagggcattccagtagcaggagacagcatgcatagagatgctgatgaagaaagagcctagcgcacgtgggaaactgcaaaagttcagactggttggaatgctggaaatgttgtgaatgacaggagatgaggctggcgagaaaacagaggtcagattgtggaaggctgtcaagccaaagactttgattttattcttgagattgatgagatgtgtgtaatccaggagtgtgcaaaacaatctgtaagggttcagaaaacatactgcttctatatatagttacctttgtcttaacttgaaaatttcaaattgtgtaggagttacaatgtgtgtaattgttattatagtaatggatccaaataatttataaataaataaatttattctt

SEQ ID NO: 81122 - DNA, 903 bp, Homo Sapiens
gcggccgcgacgaggccgaatgcaagctggcggcctatgccatcgcccactcccccctggtcaagacggccttcttcgccagcgacccgaatcttggccgcatcctggccgcggtcggctatgccggcatcggcgacctggaccaggggctgatcgacctggacctggacgacgttgccgtcgtgcgccagggcgggcgcctcgcgagctatcgcgaggaagacggccagcgcgtcatgaagcaagcggaaatcaccatccgcgtcggcctgaaccgcggcccagccagcgctacggtctggacctgcgacttgagccacgactacgtgtccatcaacgcggactatcgaagctgagtcgggatcgggggccgcctgccggggagacggcgggcttgagcccttcgggtttgcgctgtcagggcttcatcgcatgacgatcggcgccccctgcgcgggcgctgacaatccgtggccctacggaacccccgactaccgctcgatgaagctcatcttgtccgccatcaccctcgccgccattgtcgccaccagtgcccaggcccagggcctcagctatcccgtcacccgcaaggtcgaccaggttgacacctatcacgacgccaccgtcgccgacccctaccgctggctggaagacgacaacagcgccgacaccaaggcctgggtcgtgcagcagaacgaggtcaccgacaagttcctggcggcgatgccgcaacgcctgccggcgcgccgcatctacaccgagctctacaacttcgagcgcttcggcatccccttccacgagggcgaccgctacttctggacccgcaacgacggcctgcagcagcagaatgtgctctacacggccaagtctctgaccgacacgccggccgtggcgctggacccc

SEQ ID NO: 81123 - DNA, 755 bp, Homo Sapiens
gcatcatcgtcggcaacccgaacctgcgcggcaccgctgccaatatcatcctcaacgaagtcaacggtgcagccccagccaactgcgcggctacaccggaagtggcggggcagtcggcccatgtgattgtcgccaacccgtatggcatcagttgcaacggttgcggctttatcaacacgccgcaagtcacgctgaccaccggtaaagcggtgatcgaaaacggccagatcagccgctatcaagtcgatcaaggcaacgtcgccatcgaaggcgcgggcctcaacgcgaccaatgtcgaccagttcgaaatcatcacccgcgctaccaccatcaatgcgcagatccaggcgaaaaaactcaccatcgtcgccgggcgcaacgatgtcgacgcacgcaccttaaaccccaccgcacgggcggcagatggcagccaggcgccagacctggcgattgactcgtcggcgttgggcggcatgtatgtgggcgcggtcaagctgatcggcaccgaggccggtgtgggcgtgaagctgtcgggcgatatggtcgccggcggtgatatccagattgatgctgcgggcaatgtggtcatgggcacaaccacggcaggcacctctgtcgccgtcaaagcggccagcttgcaagccaaggcggcggtctacgccggtactgatctgtcggtaaaaacccaaggtgcgctcaccacgcaacaaaccctggccgccaaggacagcatcgcgctggacgccggcggccgc

SEQ ID NO: 81124 - DNA, 892 bp, Homo Sapiens
ggcacgaggcttgctggagcattcactaggcgaggcgctccatcggactcactagccgcactcatgaatcggcaccatctgcaggatcactttctggaaatagacaagaagaactgctgtgtgttccgagatgacttcattgtcaaggtgttgccgccggtgttggggctggagtttatcttcgggcttctgggcaatggccttgccctgtggattttctgtttccacctcaagtcctggaaatccagccggattttcctgttcaacctggcagtggctgactttctactgatcatctgcctgcccttcctgatggacaactatgtgaggcgttgggactggaagtttggggacatcccttgccggctggtgctcttcatgtttgccatgaaccgccagggcagcatcatcttcctcacggtggtggcggtagacaggtatttccgggtggtccatccccaccacgccctgaacaagatctccaattggacagcagccatcatctcttgccttctgtggggcatcactgttggcctaacagtccacctcctgaagaagaagttgctgatccagaatggccctgcaaatgtgtgcatcagcttcagcatctgccataccttccggtggcacgaagctatgttcctccctggagttccttcctgcccctgggcatcattcctgttcttgctcagcgcagaattatctgggagcctgcggcagagacaaatggaccggcattgccaagatcaagagagccatcaccttcatcatggttggtggccatcgtcttttgtcatctgcttccttcccagcgtggttgtgcggatcgcatcttctggctctgcacacttcgggcacgccagaattgtgaagtgtccgctcggtggactgg

SEQ ID NO: 81125 - DNA, 662 bp, Homo Sapiens
agaattcggcacgagggtctcccgaggagttgcccatgtctctgctgaacttctggcgccgcttgtgggcttcgcccgcgccgcggcagccggtcctcacgacacagccgccgtccaccttcgggccatcgacgctgatgccgcctcaggatgaggtgccggactacgtggccgccctcacggcggcattgcagcgtcgcccgcgccagcgtcaccagttgcgcagcctgattaccgtcgagagcacgctgcggttcgcgccgaagcccggtctcagctccctgggcgacggcgtgctcacccgtgccctgcaggccctagagaccttcgacgagctgtcgacggatcgcgacctgctccgcctcgagcggcggatgcggcgctgcctggcggatcggcaggcggccaagctgcgtgccgaggacgtcgatgtcccgctcgacacggaacctgccccgaacaccacgatgaccccagccatggccgccgcgttgcgcgccctgcgcgagggcgatcgaaacgcgttgcgccgcgcgggcgcgccgccaccggccccggtggcaaggaaccccctacccacgagcaagtggtgatcgtgcgggggttcacagacccaaccagttaggagtcaccatgtaccgaagaagttggctggcggccgc

SEQ ID NO: 81126 - DNA, 768 bp, Homo Sapiens
atcgcacggaggggtgcgagagatcgacctcgccggatgatccgtccgtgaagcggaggaacaagcggaatccgggcagcggcttcgcgtcagtaatcctgaccatggaacaactctagcgcagcggttcgatcgcttcaaggcggccggtcccggccttggcccggtcccagttcgacagcaattccgaccggtgctgcgcggcccattcgaccaccaagcccagcgcgcgtggcggcaaagaaccggcgagaacctcgagcgttcggatgttgaactcggcttccgactctgcgtacttcgcgtggaaatgcggcggcgcgtggtcgtcgaaatacatgtagatcgcgatgccgtagaagtagctgatgcgcggcatgggtgtgtttcgctcggcgtgccctcactcgctcacgctcggggctcgttgatgctcggagcttgtaccgatgctcccgacacggagtgccgggccaccgcgttacgccttcaccggcttccaccccgccttgaacgccttgatcgcggcgaccagcttctcttccatcgccttatcaaggtccttcagcttctccagttcatcccgcacgctcttgcccgcgccggtgttgaagtacgcgagcatcgccttttcgaactggttgatgtccgtgacggcgacgtcgtcgaggtggcccttggtgccggcgtagatcgagatgacctggtcgatcacgttgtacggcacgtactgcggctgcttgagcagttcgaccattcggcggccgc

SEQ ID NO: 81127 - DNA, 771 bp, Homo Sapiens
  misc_feature (87)..(87): n is a, c, g, or t
  misc_feature (197)..(197): n is a, c, g, or t
  misc_feature (218)..(218): n is a, c, g, or t
ctttccatgtggtcaaactaaaatagaaaatgtcccctcactgcagatcaaatgtaaagcttccagttaaggagctaaatgagtccntcagctgaatgaggaaccctgtacatccccttgcacagccctattctaaatcgcttaaactatgctgatagctgcttaggttcttgagtagttctgctcttaaacgtagngaggccctgagaactaaattntgccccaaaataaaaacagaaattatgagattgcctcctgtcattttggttaacccagtccttcacctgccctgtgtcagtgtcttctgagggcaattgcgttgctcaaatcactagcacagaggttccttaatttggggccttagaaaccattgtgggccttggggtccatgaacccaatgaaattatttgtagacttgtatgtacatttttctggggagaaggttcaagagattcataagattgtcaaactccttgaaggttcagaacctctgcagggaagggggaagaaaaccctcccattaggaagcatgcttttgcagttaaatggcgatggtggaggtgatagggacttcaagagtaaaatgcaccttgtattgcataagaagcatacacaaatcaataaatcaagggagattataccagtaggactgaatcagggccttcaaagctggactgagttggtcctgttctggcacatatggtccactggagacaatgtatgattgagtttttctttggtctaaaaattatattaaacatttattttgaa

SEQ ID NO: 81128 - DNA, 680 bp, Homo Sapiens
gcggccgcaacatggacacccgcaccccggcctcggcctgcggctttgtcgtctgagaggggcgtgcgatgcaggacacacaggttcctccgccggaccagccggcgatccgcacgattgcgatgccggccgacaccaatcccgctggggacatatttggcgggtggctgatgagccagatggaccttgcggccgggaacctcgcggcgctgaccgcgcggggccgggcggcaacggtcgcagtcgacggcatgcgcttccacctgccggtgaaggtgggcgacgaggtgtcgctgttcgccaatgtcaccaggcgggggcggacgtcgatgcatattcacgtcaccgcctggcggcgtgggcgcgaccagatcacaagcgagaaggtgacctgcgccaccttcgcctttgtcgccctggatcacgaagggagaccgcgagaaatacctaagtaatggcaaccgctacctgcgttctcatcgatctggtcgacatctgcgtgtcgttccatggacaggacgaaatcctcgcaccgggcagcaggcaagggaacgccatcggctcgcgccctgatacgcgacggctgaccgttgccatggttggccgcccgccggggatcagctgtgtggaaacgggggcctgcacgacatcatggatgcgtccggaaagggttttttgac

SEQ ID NO: 81129 - DNA, 844 bp, Homo Sapiens
ggtttggccatgttgactgatcgggaacgggacgtcctagaactcatggcccaaggactctccaattctcagattggtgagcgattgtttttgagccgtagcggcgtcagcaagcacgtgcccaacgtcttcatcaagctcggctttgatcccaccgacgacaaccgccgtgttcgagccgtacttgtgtggttgagacgagagggtattcaccgggctccttcgaagctgctggaacctcgataactcatatagtcaggtccggggaggctgagcgggtcgcaactgctgggcgggtgcgatcagtgaaaatgctgggtcctggattgggctcgcgaatctcggcttggaccctggtgggagccaccattgagatcgcactcatctggcacgactcgccgatgttcccgtggagcagtgccctacgggtgcccatggagaagaccttatgcgagctcgcagaaaactaccggattggcaatacttgagcggcccactgttcagcgcagggcgccgttgacgaaggcggacgaggttagttagccttcggtacgcacctcccaagtatccccgactagctcaccagtcgaaatgacgtggtcgcgtagagagtgcttacaaataggcatatccgtctcaataatttcggcaagcttgagcacccaatgtcggtcacagtaccgctcaatttccggatctattccttcctggacgggtacccggacaatgaagcgcgtgacggagtcaacgcaaagcgattcggtccaagcgcacgccgcgccgccttcacccgggatgtcgaagtcatcggggcctccatcatcgaattccgtcgagcggccgc

SEQ ID NO: 81130 - DNA, 837 bp, Homo Sapiens
  misc_feature (112)..(112): n is a, c, g, or t
cgtctttgatcggcaatacaccacgctgtcacggtgcacatcgcgcatcgacgccggcaccacggagatccttcgccgccgctacccaggctgacgttggtcagcatgcgtnccacctcacaaaggcaatcctgggttcgaaaccggcgttctggcaggcggtgatcaagttggcgtacatgcccggcgcgccagggcggcgtaccaggataaagcgttcgtccttgagtgcggcaagggggatggcgctgcctgcggcgtccagcaacgggtggccggtgggcaggaccagcagcatttcttcgttgagcaggcggtggaaggtcaggctttgatgggtactgaccggggcgcgcaggatgccgacgtcgatgcgtttttcgatggcgtcttcggtcaattcccgggcgctgccttcattgatcgaaagctctaccgccgggtagcgctcgcggtaggcgcggatgatgcgcgggatcagcgcgtgggcggcggccgaactggtgaagccgatggccagggtgccctcgatgccctgggccacgcgggaggccttgagtgcgccatgctcaacacgcgccaaaatggcttgggcttcttcaagaaacaccaggccaccggccgtcaggtctacgcccttggggtggcgcttgaacagatcgaaccccagctcctgctccagggcacgaatctgctggctcaggggcggttgttgcatgttcaggcgtgcggcggcacgggtgaaatgtcgttcttcggccaccatgatgaaatagcgtaaatggcgaagttccatggtggcctatcccgtgacaagacgcagtggtgggcggccgc

SEQ ID NO: 81131 - DNA, 1077 bp, Homo Sapiens
gcggccgcttcagtgaacccgtcgacgccttcgtcgcgcgcttcaccgcctccgtcaccttcgaccagcgcctgtaccgccacgacatcatgggctcgatcgcccacgccacgatgctggccaaggtcggcgtgctgaccgacgccgagcgcgacagcatcatcgacggcctgaccaccatccgcggtgagatcgaagccggcacgttcgactggcgcgtcgacctggaagacgtgcacatgaatatcgaggcgcgcctcaccgaccgcatcggtgtgaccggcaagaaactgcacaccggtcgcagccgtaacgaccaggtggccaccgatatccgcctgtggctgcgcgacgagatcgacctgatcctggccgaaatcacccgcctgcaaaaaggtctgctggagcaggccgagcgtgagtccggcaccatcatgcccggtttcacccacttgcaaaccgcgcagcctgtgaccttcggccaccacttgctggcctggttcgaaatgctcagccgcgactacgagcgcctggtggactgccgcaagcgcgccaaccgcatgccgttgggcagcgcggcattggccggcaccacttacccgatcgaccgcgaatacaccgcgcagctgttgggtttcgacgccgtgggcggcactccctggacggcgtgtcggaccgcgacttcgccatcgaattctgcgccgccgccagcattgcgatgatgcacctgtcgcgcttctccgaagagctggtgctgtggaccagtgcgcattccagttcatcgacctgccggaccgcttctgcaccggcagctcgatcatgccgcaaaagaaaaaccccgatgtaccggagttggtgcgcggcaagagcggccgtgtgttcggcgcgctgatgggcctgctgaccttgatgaaaggccaacctctggcctacaacaaggacaatcaggaagacaaagagccgctgttcgacgctgccgacaccctgcgcgattcgttgcgtgcgtttgcagacatgatcccggcgatcaagcccaagcacgcgatcatgcgtgaagcggcattgcgcggtttctcc

SEQ ID NO: 81132 - DNA, 878 bp, Homo Sapiens
tcggagaggtgtaggcgggcttgctgcagtgctgtagggacccaggctgcccaggcctctggggaagaacaggctccccccaccgaccaactcctgccaaaggtggggcctctcctgagagcccacctgtgaggccctcggagcccacttcccatcctccctccagccaggggtcagggcacctgatggccctggcaggcacccaggtgggcccgccaccgcaggagagggcacctgagccaatcggaagagcctggggaccccctgggatcacccagccatcagccccaggagccactgtggggcggagagtgagtgtggctgcggggccttggctgcacggaccccatgggagctgcgagtgggtcagactccctggttcaggagacagacagcggacggatcccaggctgggcagctggagggaggggcgccggggcgctgggcagccgggctctgacacagtcagcagctccgggcgccgcaggccggcggggtccacacaggctggccggggctgggcctccttggagcctgctacggccctcgtgggcacgtggagaagggcccacgtgtctccacacgccagccacaggggagccctggccaggcgcccagccaggggagcgtgtgcctgggatgggtcacagaaccagcgggcacctgtgaggctggccagcaccgtggggctgtgggaatcgctcttatttatatttaaacaccttgggattttcacacacacaacaaaacccctcgagcgctctattacggcgcgccgagcacaccggtccaacgggccatgccctagcggtctctgcccccttcttgccacgggaaaccgccggcccttagggacgataatcgaaccggactaacca

SEQ ID NO: 81133 - DNA, 697 bp, Homo Sapiens
  misc_feature (678)..(678): n is a, c, g, or t
tcggccgcgcgggccaactggttggatttaccttcgacgaagttctcaaaggtaaaggtgcggttcaggtaactggtgtgcttgagcgcaccttccacctgcacggtgcgctgctcagcgcgaaccggtgcttgctgggagctggcgccggccatcgggtcaaagctgtcacgcgacggttcttcatttataggcgcgtttttctgcgacgaggatttcgacggcgcctgggccacgggcgccggcgagttattaacaggtgccggtgctgcttgggcttgcgacgcagcagcagccagcggcgcattcggcgcagcgcgaggtgcagagctgcgtttgctgcctattaataaggaaagcacgggcgcgatgccgttgccgtgttcatcgagcaattcgagaacgcggctcaggtatttttcgttgacccagtcgagaacaaaacgattcggcgcgtagacacgcaactcgtcgccttcggcttcgacctgtagcggacggatccaggtgttgaattgctgggcaggcagctcttcgcgcaaaagctccacgcactgctgccaaagttccactgacacggatatcccctaagttgaaagccggtgaggcaaaaacagccgccattgtagcggccagacgcccacttatccacatgtaggttgctcacagagcagccanaatcaacgtgttaagtgca

SEQ ID NO: 81134 - DNA, 835 bp, Homo Sapiens
gcggccgctgtgaccaccatctccttgaacctgcgcaataccgctgagctgtcgccaatacgcgtggccaaatgcaacggcgccaccaggctctggcactcggtcagctcgcgataaacaatgccatcgccgcgcagccgctgcatggaggcgggcacgatggagacgccaagccccgcagccacaaggctcaaggtcgctgtcatgcgtggcgcctcctgcaccacttgcgggctgaaccccgcttcacggcaggccaccagaatggcgtcatacaaacccagccccacgcgacggcgatagagcacgaaggcttcatccgccagcgccgccaagggtagggggcctccagcgtcgagtgccagcgggtgatcggtcggcagcgccagcagcatcggctccaccaggatcggttcgtcctgcaactgttgcgtgccactgagcggtgagcggataaacgcggcatccagtttttcctgcaccagcgcgtccagcagttcgccggttcccgcttcctccagtaccaccgagacacccacaaaggcctcgcgaaaccgccgcagcacgctgggcacaaacgggtgcaatgccgccgagctggtaaagccgatagcgagtcggccccgttcaccccgggcggcacggcgcaccacgtcggccacaccctcggcccgcgccaggatgtcacgcgcctcgtccagcaacgcgaggccggcagtggttgggcgcacgccgcggggcaggcgctccatcaacaccacacccaattgcgtttcaagactctgcagcaagcgcgtcaagggtggttgttgcatgcccaggcgttccgcagcgc

SEQ ID NO: 81135 - DNA, 919 bp, Homo Sapiens
  misc_feature (320)..(345): n is a, c, g, or t
  misc_feature (364)..(740): n is a, c, g, or t
  misc_feature (768)..(768): n is a, c, g, or t
  misc_feature (771)..(771): n is a, c, g, or t
tttaaatgaggaaacgtgttgcagcacaggcagttttcttctccttctgctcccctgtttctcatacccccaaactcagatgctggagctcaggcccgccgtgtgtgcacccaggcaggagcgggcgctgtccaggctgggccgcccccttggctctccctcctgttccaggggagccataggagggaaagcaggtggcccgggggggatatgggggccccagccctgtcccaaagctccctgctcggctgcccctcgcccgcctttatataaattctctgaatcacctttgcatagaaaataaaagtgtttgctttgtnnnnnnnnnnnnnnnnnnnnnnnnnnccctcgtgccgaattcttnnnnnnnnnnnnnnnnnnnnnnnnnnnnnnnnnnnnnnnnnnnnnnnnnnnnnnnnnnnnnnnnnnnnnnnnnnnnnnnnnnnnnnnnnnnnnnnnnnnnnnnnnnnnnnnnnnnnnnnnnnnnnnnnnnnnnnnnnnnnnnnnnnnnnnnnnnnnnnnnnnnnnnnnnnnnnnnnnnnnnnnnnnnnnnnnnnnnnnnnnnnnnnnnnnnnnnnnnnnnnnnnnnnnnnnnnnnnnnnnnnnnnnnnnnnnnnnnnnnnnnnnnnnnnnnnnnnnnnnnnnnnnnnnnnnnnnnnnnnnnnnnnnnnnnnnnnnnnnnnnnnnnnnnnnnnnnnnnnnnnnnnnnnnnnnnnnnnnnnnnnnnnnnnnnnnnnnnncgcaggaaagacatgtgagcaaaggcancanaaggccagaaacgtaaaggcgggttgctggggtttttcataggctcgccccctgacgagcatcaaaaatcgacgctaagtcagaggtgggaaaccgaaggactaaagatacagggttcccctggaactcctcgtggtctcctgtccac

SEQ ID NO: 81136 - DNA, 498 bp, Homo Sapiens
  misc_feature (243)..(341): n is a, c, g, or t
tctgaatagtacagattgatgtgaacacaaagcattttgtgtaaggagaacccctttcttttaaaagaagtctgtctatttcgaggggagttacaggcaagtttggtaaaagttaagctagtatcatagtcatttaaaattgtaatagatcttaaccattttccccctcaccctaactctcttattctgccgccacaatgcaagcatagtttgatgttttcgttattgccttttttgagatgnnnnnnnnnnnnnnnnnnnnnnnnnnnnnnnnnnnnnnnnnnnnnnnnnnnnnnnnnnnnnnnnnnnnnnnnnnnnnnnnnnnnnnnnnnnnnnnnnnnccactggcagtctttgtggattaggatgggggtgacataattttcttgagtttaacaggagtgctttacccaagtcagtcatggatatgatatcactgctctttatttaaaagtaaactttgggcacaggaaccatatgggaacattcagcttgttt

SEQ ID NO: 81137 - DNA, 371 bp, Homo Sapiens
  misc_feature (131)..(166): n is a, c, g, or t
  misc_feature (183)..(215): n is a, c, g, or t
tggcggcagaataagagagttagggtgagggggaaaatggttaagatctattattctgccgccacaatgcaagcatagtttgatgttttcgttattgcctttttttgagatgtatgtatctgtatctaccnnnnnnnnnnnnnnnnnnnnnnnnnnnnnnnnnnnnacacagatacaagtgtnnnnnnnnnnnnnnnnnnnnnnnnnnnnnnnnntggcagtctttgtggattaggatgggggtgacataattttcttgagtttaacaggagtgctttacccaagtcagtcatggatatgatatcactgctctttatttaaaagtaaactttgggcacaggaaccatatgggaacattcagcttgtttaaa

SEQ ID NO: 81138 - DNA, 688 bp, Homo Sapiens
  misc_feature (520)..(520): n is a, c, g, or t
  misc_feature (582)..(582): n is a, c, g, or t
aggacaacatgaccagaccgctcggaggacggtacgaggctgctcatgcacctctggggcatcctctcccccgggggccccaggcccactggtggctgccaccatgctgctgctgctgccgccaatgtaaccaggcgccctgtggacaagcggcccaggccctgacgatatgacacacagcgcgagcccatgagaggaccagaggcggtgggacagcctggccacagagggcaaggactgtgccggagtccctgggggaggcgctggcgcgggatgaggacgggcaaccctggcaccggaaggccagccagagggcacggcccgccagggctgagcaggctcaggtggcaaggacggagctgtcccctagtgagggactgtgttgactgacgagccgagggctggccgctccagaaggctgcccagtcaagccgcaccgccgacagccccctccggccctggagggagcatcctcgggctgggggcccaccactctctgtgccggcgccaccaaccccancccacactgctgcctggtgctcccactctggcccaccagggcctccgtccccaggctccccnagtggggcagccctccccacagacggagccccccacagtggtgccgcggcacgtcccccctgtgacgcgttccagaccaacatgacctctccctgctttgtaaaaa

SEQ ID NO: 81139 - DNA, 991 bp, Homo Sapiens
  misc_feature (55)..(55): n is a, c, g, or t
  misc_feature (72)..(73): n is a, c, g, or t
  misc_feature (75)..(75): n is a, c, g, or t
  misc_feature (83)..(83): n is a, c, g, or t
  misc_feature (127)..(127): n is a, c, g, or t
  misc_feature (137)..(137): n is a, c, g, or t
  misc_feature (139)..(139): n is a, c, g, or t
  misc_feature (143)..(143): n is a, c, g, or t
  misc_feature (177)..(177): n is a, c, g, or t
  misc_feature (206)..(206): n is a, c, g, or t
  misc_feature (212)..(212): n is a, c, g, or t
  misc_feature (232)..(233): n is a, c, g, or t
  misc_feature (259)..(259): n is a, c, g, or t
tggatcagtcagagacactatccggggtcagcctcccacaggagcctgcagttgnagcgcatgctgtccaanncnagcaaagnaagaccctgagccttcagctacccctcctcgagcactgctgtgnaagcctcccntnggcntgacccccaccctttgccacccagtcttcccagntgccatgttcaaagacgaccttaccctcntgcctntggatgactctgcattgacnncacggactccagtctgtgtgtaggangagagctgagtaggaggcctccactccggatcgaggcctgtatagggctcgtttccccacacatgcctatttctgaagaggcttctgtcttatttgaaggccagcccacacccagctactttaacaccaggtttatggaaaatgtcaggccttccccacaactcccgtctaactgctgtcgcccccctacttgctggctctcagaagcctaggggagtccctgtggtcctgaattctttccccaaagacgaccagcatttaaccaacctaagggcccaaaggccttggacaactgcatggagctgcactctaggagaaggaggggaaccagatgttagatcaggggagggagcaggagtgtccctcccgtcagtgcctacccacctgtgaggcagccttctgatggcctggcccaccttccccagaaccaggggaggcctgaggcttcagttttactctgctgcaaaatgaaggcgggcctgcaagccgactacacctacggaggctgttgaggacaatttcattccattaaattaaaaaatactgactggctggcaggcaggtgccatgtctgggaacagggacgggggagcttcacctttttgtcttggcttttctttgggctgtgggggggcatccatttccagggtcggggaggaaataccaaatgcattgttgttctgctcaatacatctcacttgtttctaataaagaaagcagctgaacaaaaaa

SEQ ID NO: 81140 - DNA, 483 bp, Homo Sapiens
gggctaattctgcagagttcccaaaaccagaagacatcgtacttacccaaagcccgttggcacctgccaggtattggcatcggtccctaaacccacggaagttgattgaagtgaagttctcccacctgagcagaaatatgaccatgcagcgcaccatgaagctctaccgactgccagaaccaggggaggcctgaggcttcagttttactctgctgcaaaatgaaggcgggcctgcaagccgactacgacgtacggaggctgttgaggacaatttcattccattaaattaaaaaatactgactggctggcaggcaggtgccatgtctgggaacagggacgggggagcttcacctttttgtcttggcttttctttgggctgtgggggggcatccatttccagggtcggggaggaaataccaaatgcattgttgttctgctcaatacatctcacttgtttctaataaagaaagcagctgaacaaaa

SEQ ID NO: 81141 - DNA, 784 bp, Homo Sapiens
  misc_feature (23)..(24): n is a, c, g, or t
  misc_feature (40)..(40): n is a, c, g, or t
  misc_feature (85)..(85): n is a, c, g, or t
caaacatatactgtcaactattnntgacaagggcaaacangacaacacaatggtaaaaaagatagtctcttcaataataggattntcacatgcaaaagaataaaattggaccctgatcatacaccatacacaaaaatcaactcaaaacagatacaagaccaaagacccaaatagacctgaaaccataaaactcctagaagaaaacatagggggaaagcctcttgacattggccttagcaataattttttggatatcgcaccacaagccaggctacaaatgtaaacataaacaaggaggactgcatcaaactaaaaagcttctgcacagcaaaggaacaaccaacaaaatgaaaggggaacctacagactggaagaaatatttgcaaaccacatatctgataaagtgttaatatccaaaaatcagtaaataactcttacaacttaagagcagaaaaacaacccagttgaaaaatgggccaaataggaaatgaccaataggaaatggggagatgtacattaaaataatacaaagtagcagacatgtaggatgaacaagttagagatctagtgtacatcatgagggctatagttaataaaaatatattgtctttgggatttttgttaaataagtagattttagctgttcctgtcacacaaacaaaaatctaactatgtgagatggtagctatgttaatttgcttcactatagtaaccagtttactatctatatgtatcctttaagatcatgttgtcaatctcaaatatataaaataaaatttatttt

SEQ ID NO: 81142 - DNA, 1142 bp, Homo Sapiens
  misc_feature (1037)..(1037): n is a, c, g, or t
accctctggccctgtcctacatttgccatactttttctgccccttatgcaagtcttgcctctgagctttttcagagagaggtgtcagtggtggatcttgtcagctatgcatccgtgtggctgttccgaggggactttgtgatggactaccccaggccgatcatgcccaacatggtcttcattgggggcatcaactgtgccaacgggaagccactatctcaggtctgtattggtgccttcatccaatcaatgttccaggcaaaacactttttaaaaaatgtatttacttacaagtgcttccatatctacttatctttccaaagattttattttggcttctttataacagataaactgttgaggggcctagtgtatttcaagttttcagtggtcactgagaggaagaagaggcacggacgagggtctgtcagaggatggacaaggactgctgtgactcacggacagtgtttgtaaaggcaccatcttcatggttgtgcatgtccttcagctcggcaggatcagggacactacattcagaactgatccatcctggggtttttgcttgccggattttcagctgaacggtgatgcaacagtaaattagaattgtggacatgataatttttagtggtcccatcttgcgaaagatacagaggtgaccacaggagacctaggcactcacaggaagtagaagtgtcaaagaggttgactcagttgagtggaagtgggcctgtgaaggtgggatggatgcatgtgatcagagaatgaaacatggagttcagtttccagagagggatctgtcctgagaaaagtttttctgaccaggagttgggggtctggtgtatgatgtggggacatcgtagagtttggaaggtatggtgatggttgcatgtcaaaagggtcttctacttggaatgctgaaattatcaagagtgggtggaagggactagggaggagataagaccgtgaatctataagcccagtgaagctgggaccagtgatgaatggacatgtgtccaagaagggaagtgtttctcnaggtgaagctgatcatatcaccaaactcaccctatcccactccaagtttctatagtgggatctattctttttccaaaaatttcagaatggtaacagcaagcttat

SEQ ID NO: 81143 - DNA, 506 bp, Homo Sapiens
cagtcaacggagactctctgtgcgcacacacacagagagtctaattggcctttgtcctctgagcagggggcaggtttgggctggggcctgctgtgtgaccacagtctcccatcttggattgaagctacatcgcttgtgtagcatactaactcttgattcacggtctgaccgacgccttggtttctggagaactgccctcgtttatggaagagtcactgtcatcaggagccatcccagggagaggctcagtgggaagtgtaaaggtggagcaagtaaaccggctccagaagagaaggcgaagaaggactatttctgtttagatttgcttaaccgcattttcactttcttgggaacccctgatggagttcaaggtcatagaagagaagaaatcagacactgctacaggactcttgctcttggttcagattattcaatgggaggggagaagagagtagtcgcaagtgattgttgtagattttgtctcagctttttgtttttctttgtat

SEQ ID NO: 81144 - DNA, 991 bp, Homo Sapiens
  misc_feature (520)..(520): n is a, c, g, or t
  misc_feature (638)..(638): n is a, c, g, or t
  misc_feature (678)..(678): n is a, c, g, or t
  misc_feature (681)..(681): n is a, c, g, or t
gcggccgcgctctgaggcgttggcctctaccgggtactggtcaccgtagccctcgacctggatacgtttttcatcaatccccaggtccatcagcacatcagccaccgattgcgcacggtcgcgcgacagcttgaggttttcctgctcgccaccggtgttgtcggtataaccctcgatgcgcaccacgcgcttggggttcaactgcaagaactgcacaattttcagcacggtgcggttggccgagttttgcagctcggcgtcaccggtgtcgaacaacacatcgcccaacgtcatgaccaggccgcgattggtctgggtggtggtcaggctggcgatttgctcttcgagccacttgccttgctgctgcacgctcgccaacttgctctcacgcagggccaattgcaggcgctggcgttccagctccagcttggtgccgcgctcggcgttgagcccctgctcggtgtgttcgcgggcgatctcactgtagcgctggctcaggtaggcgtaatgcaccacgtcnggggccgctgccccagtagctggacaagcgatcggcgcgggccagggattcgccggcacgaatcacatccttgggcgcaaaacgcagcacattcgcgtcttccttgaccttctggaangtcgctgccggcctgctgcaacgcctgctcgctgttgggnttnggctggcgcaaccgcccattgccgcgctgcccagcagcaacacacaactcaaaccacggatcagcgggctcattgggcttctcccagctgcaattgtttgcgcagtcgggcgatgcgggtgttaagcacgttcaactgttcctggcttttgcgcgtcaatacccgcgcttcagccagacgcgcgtccagctcggcctgttcggcctgcatgcgcgcatctttgtaggattggtcggccatgtcggcccgggccttggcgaacttgtcttcagccagtttcagttcaggcgattcatcggtgctggcgccc

SEQ ID NO: 81145 - DNA, 780 bp, Homo Sapiens
  misc_feature (708)..(708): n is a, c, g, or t
  misc_feature (756)..(756): n is a, c, g, or t
ggggtttctaaaaatttatttgaaacaatctagaattttcttggtgcaaagtgtatcatgtggaatatcctcatatttttaccatattttaagaactttaagacgattaattgtaaataatttatttgattggtgcagttctaatccctaaatcataatcttaaaatcaggaatgtgtggagaacagagccatgtcatatcactttgctcttaccattccttttgatcagcctcaattcagcctcattgtgtagtatgttttttctttctatgaaaaacaacagaaagcatttcattttatttgcctatgttcaaatatgtttaataatgaccaaagtgcattctgagttttttcaaggaatgtaatactggagctttaagaacatacttcagtttctcatgtgaaaacttaggctttgtctgatgtttttccttcctctattgtctaatgttgaggttgtttttaggaattatgttttataaactttttcaatataaggtacatgcctatacagaacttaacattttgcacagaatatatcaaatatattttgagaaaaaaagtacggcatgagttctgttaggaataaaagatgaaactattgtatctcacaaaaaatcttatttcagaatggaaatatttttgagaaaagtagctgagtatactggtttaagaaaatgcttgtttttagattgaggttaacttanaagttgggagttggatttatttaagtacagtataccctctcaaccagntttataaataaatatggtttgaat

SEQ ID NO: 81146 - DNA, 951 bp, Homo Sapiens
gcacgagggaattcttcagtgcctgctattacagctatttcccaattactaacttgattatactcactcaaggcagtgcaagatcttgaagtactttttagcagttaagtaatattgaattgtattgaatagtttacatagtttattctagtctttgaaaattactgaacatggacaatgtgcatgtcattgacatctgccttagaacttctgggacaatcctgattcgagagattctatcccattatttacatataccaaaaatactttgttaatttaatgtgttggcttcccaactcctgaacacgacacaattttattattagattttgtatggtgattttaggctatgaaaacatgatcattatatgtatatagatacatttttatttgttacaaatgtttgagcagctcactagcccacccctcctctattttgggtaagagaatttactaccttttttaactatgtagttgagagcaacatgtattttgttatttttagaatggtcagtatattgctataaaattttaaatgagactatgaaagttaaagtattctgattctggttaaattaacgaatatggttccaggccctgttctctgggtttttgagagagaataaaggttatgtttgtcttacctttgttatcgagtttgctgaattcttttgaacgatgatcttaaaggcacaaacaccaccagccactttgctaatttcttaatagcagatttacattgcagcaagaaaaccatcttttatagtaacattcagttaaaatgaactcaattcattgttaacttcctaaaacagaatttgaactttatcaacctcaacgtgtatataaactagatagtcctcaatactttatcaacctcaacatgtatataaactagatagtcctcaaatactgtttgaatttaataaatgtcaatttaaaaattttaaa

SEQ ID NO: 81147 - DNA, 725 bp, Homo Sapiens
  misc_feature (51)..(308): n is a, c, g, or t
cagtcgacggtaccggacatatgcccgggaattcggccattacggccgggnnnnnnnnnnnnnnnnnnnnnnnnnnnnnnnnnnnnnnnnnnnnnnnnnnnnnnnnnnnnnnnnnnnnnnnnnnnnnnnnnnnnnnnnnnnnnnnnnnnnnnnnnnnnnnnnnnnnnnnnnnnnnnnnnnnnnnnnnnnnnnnnnnnnnnnnnnnnnnnnnnnnnnnnnnnnnnnnnnnnnnnnnnnnnnnnnnnnnnnnnnnnnnnnnnnnnnnnnnnnnnnnnnnnnnnnnnnnnnnnnnnnnnnnnnnnnnnnnngaggaaagaaaatagctaggagacaatcagagcagatcttgggcttctgtggctcatctcagccctttataactggcctgagaagagggtttatctacttgtgcaagtggcccagaaatctcactcgtacatgaggctttggaacatccttgcaaaggtacgctgaaagcaaattgctgttttcctggtggttctgcacgtttcctaacttttatcatagtttgattttcattatttaagaaaaaatgaataatccaaagaccataagatggcattagattttttaccattaaattattaatgcctatttggtgctcataaagattaatcatgtcacgcatgtttccaatctttcttttgcagtatattattttctaaaaattgttacatgcaaatttaaaccaagaataatcagta

SEQ ID NO: 81148 - DNA, 708 bp, Homo Sapiens
gcggccgcgatatgggcgcctggatgaacagggtctgggaatggttcaacaacctgttcaatcccgaccggccgcgcaagggacagccgcccgtgaaagagcagctgttctacaaggcctcggtaacccccttccgcaaacaatccaacttcacccagcagcgcgtcgatgagatcctcgacaagatcaacctcaaaggcttcaagtcgctgaccgaagaagagaaagacatccttcggcgcgccagcggcggagagaaagagtaagtaaacagaaggcctgaagggcttgccccgccccaggcgcggggccttttttattggggaaatgtgcaacagacaatgcaatgtcgtttagttaagccgctctgttgacccccttcccggcccctctccgacccggctatcgtgtggacacatctttcaccggcagggcgcaccctggaagggtgccctttcggtagccccgggtttgtaacccggggcaaagagcgatggaagatttcgtgctaccccgaaggggtagtctttcggttgacggttgcaaccaaaggtgcccccttgcgttggggtcaaccaaaagagcaccccatccggggtgccgcgtccatcacccaccttttttatcccgggtgctctgcacccggggctaccgaaagagcactcctccggagtgcccttacggaaacagcagaaatgtgtttcttgg

SEQ ID NO: 81149 - DNA, 537 bp, Homo Sapiens
gcggccgccgccttcctgggccgccgcttcttccagggtgctgcgcagcacgccgggttcgaggacgccgctgcgggcgcgggccagcagcaactcggtccggtattcgagcagctcgccggcggccagcccgtcggcgcgggcgccgtccaccaaggcctggcgggtgttcacctcgtcggcatgccggccttgcaactgctgggcgtcggcccagcccatggcgacctgccggaccagatcgttgccggggccgagcttgctgcggatgtcggccagcagcggggcagcgcgtgcgtcgatgccgtcgaacagcgcgttctgagccatgcccgagatctcgccatagcgcagcaccagcacgggcagggtcagccgcgggtcggcgctggcccacagtggctgggtctggcgcacgatgtccagggattcggccagccgtccctggcgttggcgcagcacgctgaggttctgcaggtagtcggcgcgttcgtagtcgtcgccgggatgcagcttgtcggtcagcaccctcgtgcc

SEQ ID NO: 81150 - DNA, 902 bp, Homo Sapiens
ggcatttgcaagctccacataggcaagggtcagggcgccgcgcgggtcagccaggccacggcgggcgccggccacgctgaacgactggcacggcgtgccgccgaccaggaggtctggcgcgggcacggtgccggcgcggacctggcgggcgatcgtggtcatgtcgcccaggttgggcacgcgggggtaacggtgggcgagcacggcgctcgggaacggctcgatctcggcgaaccacgcggcttcgaggccgagcggttgccaagcgaggctcacggcctcgatgccgctgcagacgctgccgtagagcagcggcgtgttgcgcggcggtgcgcaaagtttcgggtgcttgtcggtctcctgttcgtatggcgcagggccatcgccctggccggggcgttgaaaggcaggagaaaggcgccgaaggccccaggggccttcggctcgggaggaaagaagaaccacccgtgggctgattggcaggcccggtcgtcgctagaaccgtctgctcatccagcaatcacacccggcccatgtcgtggctggggccggcatcgtctggcgcacatccgcgcacaaagggagcccgtttttgcgccggcgggcaccggcaccgaataccgctgaccacgaagggtctccgggtggctcgcacaggcaagccatcgggggacccttcgcagcgtgcggaagagatgcggacggggagaacgcgcggggtgcggttcgcggagaagctaccttcaggtcccgcggccgggggcggctgaacgggacgcgcacacggacaagaaggcgttgcgcgctgggcgtcccgcagggcatgcggaacacgggccacgccgccgatggcgggcaccgctcacggggaacgggggtcggtcaggagcctttgcggccgc

SEQ ID NO: 81151 - DNA, 1189 bp, Homo Sapiens
ggatgacaacaggctatattctgcatcgtgggactctacagtgaaggtgtggtctggtgttcctgcagagatgccaggcaccaaaagacaccactttgacttgctggccgagctggaacatgatgtcagtgtagatacaatcagtttaaatgctgcaagcacactgttagtttccggcaccaaagaaggcacagtgaatatttgggacctcacaacggccaccttaatgcaccagattccatgccattcagggattgtatgtgacactgcttttagcccagatagtcgccatgtcctcagcacaggaacagatggctgtcttaatgtcattgatgtgcagacaggaatgctcatctcctccatgacatcagatgagccccagaggtgctttgtctgggatggaaattccgttttatctggcagtcagtctggtgaactgctcgtttgggacctccttggagcaaaaatcagtgagagaatacagggccacacaggtgctgtgacatgtatatggatgaatgaacagtgtagcagtatcatcacaggaggggaagacagacaaattatattctggaaattgcagtattaagtgccttttcctctcctgaatattaaattgaactctatttaatgcatttttaaacccaacttttaaacggactggtgaatgtgcaatgttagtaattagaagttttaccacatggaaaatttgtggttttaaactttctaaatcatggtgacttcattgaaagccattagttgctattctcttagggcagataaaatgcggctgtgttaggaaaaacatgttacactgtaaggcagatgatcgtccccgtatgatgattgtcagaagacaggactaagtagcagagaatagctaagagataaattgggctggggaaacttgtcagaaagcactgaacaattaagaaattttccaagaaaatgtgcagtattctctgctacttctgaatctgttttgtcttcctaatctatcacaattgccacccatcgggttttgggtgtgtgttttcatagcgtggttactttctataatgctgtacccagattctaagaacctggagaaggattagcagttcttagtaagtttactgtgtataggaacggtttgtatttcattacagctattcatcttttctacattaaaaatatttttctctaaaga

SEQ ID NO: 81152 - DNA, 993 bp, Homo Sapiens
gcagttggggcccataatgtatttcatcccctgacctatgaaggaggtgtagacttgaacagcatccaggatcctgatgagaaggtagccatgcttacgcaaatcttggaatttgggcagacaccaaaacaactatttgtgacaccacatcctcgaaggatcaccccaaagtttaaaagtttgtcccagacctccagttataatgcttctatggcagattccccaggtgaagagtcttttgaagacctgaccgaagaaagcaaaacactggcctggaataacatcaccaaactgcagttacacgagcactataaaatccaaaaagaagcagttactggaatcacggtctctcgcaatggatcttcagtattcacaacatcccaagattccaccttgaagatgttttctaaagaatcaaaaatgctacaaagaagtatatcattttcaaatatggctttatcgtcttgtttacttttaccaggagatgccactgtcataacttcttcatgggataataatgtctatttttattccatagcatttggaagacgccaggacacgttaatgggacatgatgatgctgttagtaagatctgttggcatgacaacaggctatattctgcatcgtgggactctacagtgaaggtgtggtctggtgttcctgcagagatgccaggcaccaaaagacaccactttgacttgctggccgagctggaacatgatgtcagtgtagatacaatcagtttaaatgctgcaagcacactgttagtttccggcaccaaagaaggcacagtgaatatttgggacctcacaacggccaccttaatgcaccagattccatgccattcagggattgtatgtgacactgcttttagcccaggtagatattatcctttttaaaacagataatactaggtaaattggaattttgaaataaacaatattgttaattttgaaataaacaataaaacttacaaagaaaaacactaaaaa

SEQ ID NO: 81153 - DNA, 911 bp, Homo Sapiens
gcggccgccgtggcttatgaagtggaaggcgccaccgtgctgccgatcaccgacgtgcccttgattccggtcaagggcctggccgcgcaactgtcggacatcgccgggcgtttttatggtgacccgagccgtcagttgaacctgatcggtgtgactggcaccaatggcaagaccagcgtgacccaattggttgcgcaggcactcgacctgctaggccagcattgcggcattgtcggcaccctgggcacgggtttttacggtgcgctgcaaagcggcctgcacaccacgccgaacccgatcgccgtgcaagcgaccctggccgacctgaaaaaggccggtgccaaggcggttgccatggaagtgtcatcccacggtctggaccagggccgtgtgactgccttggcgtttgacgtggcggtaatgaccaacctgtctcgcgaccacctcgactaccacggcaccatggaggcgtacgccgccgctaaggccaagctgttcgcctggaatgacctgaagtgccgggtggtaaacctggatgacgcattcggccgtcaactggctgccgaagacagcgaagcacgcctgatcacctacagcctggaagattccagcgcgtatctgtattgccgtgaagcccaatttaatgacgaaggcgtgctcgccacgctggtcacgccccagggcgaacaccacttgcgcagcaccttgcttgggcgtttcaacctgagcaacgtgctcgcggctgttggcgcattgcttggcctggattacgccctggacgaaatcctgcgcgtgctgcccaaactcgaaggcccggccggccgtatgcagcgtttgggtggcggctctcagccactggtggtggtcgattacgcccacactccggacgcgctggaaaaagtcctcgaagc

SEQ ID NO: 81154 - DNA, 729 bp, Homo Sapiens
gcggccgccaccggcggcaaccttgccgtcgagcatccggccagcggtggtactgcctttgtcctgagtttgccgctggcgagccctcaacaagtcgagtcgaaatgaacacagaaaaaaataccgacctgaccgtcctgatcgtcgaagacgaccctcatgtactgctcggctgccagcaagccctggccctggaagacattcccagcgtgggcgtggccagtgccgaagaagccctgacccgtgttggcgaaaacttcgccggcatcgtcatcagcgatattcgcctgccgggcattgacggcctggagctgctgactcgcctcaaagccttggataaaagcctgccggtggtgctgatcactggccacggcgacatctccatggccgtgggcgcgatgcgcaacggcgcctatgacttcatggaaaaacccttctcgcccgagcgtctggtggacgttgcccgtcgcgccctggagcaacgcgggctggcccgggaagtctggtcgctgcgccggcaactggccgagcgcgactccctggaaggccgaatcatcggccgctccccggccatgcaaaacttgcgggagttgatcgccaacgtcgccgacacctcggccaacgtgctgatcgaaggcgagaccggcaccggcaaggaactggtcgcccgttgcctgcatgatttcagccggcgtcattcccatcagttcgttgccttgaactgcggtg

SEQ ID NO: 81155 - DNA, 1053 bp, Homo Sapiens
  misc_feature (225)..(225): n is a, c, g, or t
  misc_feature (234)..(291): n is a, c, g, or t
  misc_feature (324)..(367): n is a, c, g, or t
  misc_feature (374)..(374): n is a, c, g, or t
  misc_feature (977)..(995): n is a, c, g, or t
gtgatacgttacgcttgatatgtacgtccgcacgagaccagccaggatatggcgagagcgaggacgccatagcaacgctttcccgcggtgccgatcatatgcagtgcagacagttcccgatgaaagcggcatggcgcacgcaatatgtgagtgtcactcattagcaccccagcttacacttttgctcccgctcgtatgtgtgtgaatttgagcggatacaattcnacacaggannnnnnnnnnnnnnnnnnnnnnnnnnnnnnnnnnnnnnnnnnnnnnnnnnnnnnnnnnaagaattcggcacgagggccgcggctgtaggcnnnnnnnnnnnnnnnnnnnnnnnnnnnnnnnnnnnnnnnnnnnntaggttntgagtcctcacaggtgaccttactgagggaaagcatggcagagaagaaatgcagtctgcactttttatgtactttttaagtgtccgtaagtgaaaggttttgcttataaagcatgaattttaatatctagtcattaaactgcacaagtgcaaatacaagggcaggaaaggataatcacttagctttggactaagagggtaagagaggcccagaagcctttaagtgttttgccattactgagttacctgggtatgtagcgactggttcgtggttaggtgtaaatgttacttgcttgttcgactgtttcaaaacatgctaattccaaagccacttttgaagtctatagtggaaaatatagatggggtgaaagatataatgtattgatttttaaagctgtttataagccgtcccacgtataaaatgaaacattttaccttctctctttctaatgagatggccgcttgttaaatcatgaaaacatccagaattcaagtgccgcttaaactttgaagccatagataaatttgttagaaaagtaaaccaggattaaaagtttttaaaaatatggtagaatccttctttactttttaagtcttttatttnnnnnnnnnnnnnnnnnnngcctacagccgcggccgcaagcttattccctttagtgagggtaattttagcttggcac

SEQ ID NO: 81156 - DNA, 1139 bp, Homo Sapiens
gcggccgcccgtagggaggcacgctgaacgccatggcgatgcggtgatcaccatgggattgcacttcgccaccgcccattgggccaccgtcaatgataatcccatcaggtgtcggttcacacttcacgccaagggccaacagaccatcggccatgacctggatgcggtcggactccttgacccgcagttcttcggcgccacgcagcacggtgcgccctttggcgcaggccgccgccacgaacaacaccgggaactcgtcgatcgccagcggcaccagggcctcgggaatctcgatgccttttaactcagcggcgcgcacgcgcaggtcggcaactggctcaccgcccacttcacgcgggttttccagggtgatatccgcgcccatcagccgcaggatatcgatcacgccagtgcgcgtcgggttgacgccaacgtgctccagcagcaactcggagccttcagcaatcgaagccgccaccaggaagaacgccgaagaggaaatatcccccggcacttctatatgtgtagccgtcaatgcatggcccggctcgacagacgccgtagcccccgccacggcaaccggataaccaaacccacgcaacatccgctcggtatgatcacgggtcggcgcaggctcggtcaccgaggtcttgccctcggcatacaacccggccagcaacaggcaggacttcacctgcgcactggccatcggcatcgaatagtccaggccctttgagcgcctggccaccgcgaattgtcagcggcggacgcccatccggcccggtctcgatcactgcgcccatttcccgcagtggcttggccacgcggttcatcgggcgtttggacagcgatgcatcaccggtcaacacactgtcaaagcgctgcgccgcgagcaacccggacagcaaacgcatcgacgtaccggagttacccaggtagatcggccccggcgccggctgcaaaccgtgcaaccccacaccatgaatcgtcacgcgcccgtggtgcggcccttcaatcacaacgcccatgtcacgaaacgcctgcagggttgccagggcatcttcgccttcaaggaaaccttcgacttcggtcacgccgtcggccaatgagcccagcatgatcgagcgatgggagatcga

SEQ ID NO: 81157 - DNA, 1436 bp, Homo Sapiens
  misc_feature (19)..(19): n is a, c, g, or t
  misc_feature (82)..(82): n is a, c, g, or t
  misc_feature (104)..(105): n is a, c, g, or t
  misc_feature (116)..(116): n is a, c, g, or t
  misc_feature (121)..(122): n is a, c, g, or t
  misc_feature (139)..(139): n is a, c, g, or t
  misc_feature (148)..(148): n is a, c, g, or t
  misc_feature (153)..(153): n is a, c, g, or t
  misc_feature (179)..(179): n is a, c, g, or t
  misc_feature (199)..(199): n is a, c, g, or t
  misc_feature (213)..(213): n is a, c, g, or t
  misc_feature (236)..(236): n is a, c, g, or t
  misc_feature (242)..(242): n is a, c, g, or t
  misc_feature (249)..(249): n is a, c, g, or t
  misc_feature (377)..(377): n is a, c, g, or t
  misc_feature (638)..(669): n is a, c, g, or t
  misc_feature (1015)..(1032): n is a, c, g, or t
  misc_feature (1050)..(1345): n is a, c, g, or t
  misc_feature (1361)..(1361): n is a, c, g, or t
ggtctgcctcgtgccgagntacgcagaccccatgaagaagagggagcagcccgtgccagagaggcctcaggagtgaaatccngacagcccgccagccccaccgnntctccaacgcntgtcnntagaaagggtgggaacnataggactngggcntgaaacctaagatggtcccctagtcntacatgaagtagagggtctntagtcacacgcctntcccacctccctccgcacacacnccaccncagctgntatagctgagcttccccttgggcggaactcactgcgatggggtcaccaggtaccagtggagcccccaccccgagtcacaccagaaagctaggtcgtgggtcagctctgaggatgtatacccctggtgngagagggagacctagagatctggctgtggggcgggcatggggggtgaagggccactgggaccctcagccttgtttgtactgtatgccttcagcattgcctaggaacacgaagcacgatcagtccatcccagagggaccggagttatgacaagctttccaaatattttgctttatcagccgatatcaacacttgtatctggcctctgtgccccagcagtgccttgtgcaatgtgaatgtgcgcgtctctgctaaaccaccannnnnnnnnnnnnnnnnnnnnnnnnnnnnnnnctcggatacttgccaaaatgagactctccgtcggcagctgggggaagggtctgagactccctttccttttggttttgggattacttttgatcctgggggaccaatgaggtgaggggggttctcctttgccctcagctttccccagcccctccggcctgggctgcccacaaggcttgtcccccagaggccctggctcctggtcgggaagggaggtggcctcccgccaacgcatcactggggctgggagcagggaaggacggcttggttctcttcttttggggagaacgtagagtctcactctagatgttttatgtattatatctataatataaacatatcaaagtcnnnnnnnnnnnnnnnnnncctcgtgccgaattcttnnnnnnnnnnnnnnnnnnnnnnnnnnnnnnnnnnnnnnnnnnnnnnnnnnnnnnnnnnnnnnnnnnnnnnnnnnnnnnnnnnnnnnnnnnnnnnnnnnnnnnnnnnnnnnnnnnnnnnnnnnnnnnnnnnnnnnnnnnnnnnnnnnnnnnnnnnnnnnnnnnnnnnnnnnnnnnnnnnnnnnnnnnnnnnnnnnnnnnnnnnnnnnnnnnnnnnnnnnnnnnnnnnnnnnnnnnnnnnnnnnnnnnnnnnnnnnnnnnnnnnnnnnnnnnnnnnnnnnnnnnnnnnnnnnnnnnnncggtcgtcggctgcgngagggtacagtcatcaaaggcgtatacgtttcacagatcagggataccagaaaacatgtacaaagcaccaagcag

SEQ ID NO: 81158 - DNA, 697 bp, Homo Sapiens
cttccagcacctcctccgagtagcctatcaggatcccagcagtggctgcacctccaagaccctggccgtgcccccagaggcctcgattgccaccctgaaccagctctgtgccaccaagttccgagtgacccagcccaacactgttggcctcttcctgtacaaggagcagggctaccaccgcctgccccctggggccctggcccacaggctgccccaccactggctacctcgtctacccccgggcagagtggcctgagacccagggggctgtgacagaggaggagggcagtgggcagtcagaggcaagaagcagaggggaggagcaagggtgccagggagatggggatgctggggtcaaagccagccccagggacattcgggaacagtctgagacaactgctgaagggggccagggtcaagcccaggaaggccctgctcagccaggggaaccagaggcagagggaagccgggcagcagaggagtagcttgaagtggccagaagggtcattcggggcgggagaccctgagcctgctgagaaatccttttagcgccagcaagccccacccagggccctgtcctgtgtctgccaccacctttgtctgatacttgtttccagggaagctgggggaactgccacatctgaggaactggaataaagatgagggggcttcgggggcccccagactgtgtgcccag

SEQ ID NO: 81159 - DNA, 1095 bp, Homo Sapiens
ggactgatttagaaactgaaacgtactgctgactgagaaaacccccttctccttagcatggctaggatgtgaattcatcttttgtagttgcagtggtttcaagaataggaaaaggcagcctctgtttccctaggggcattagacagagaagcaggagccagaataacgagaattttaacttaacacctgcggccaaaacggagcgcaagttgtgctcctggaagagaggcgggccagtgctgtttggattgtctttctgctttcattatcaagatcccacgcttgggaacagcaatttaaacttgccacttgccaaggggaggctcctcctgtctgcctgagctcatgagaatacccgccctccccctggaggccaaggagtggcctggggaaggctctggacctggccttggtcctgaggggcccacccccacctcatgcctgaccaggggcaagttagctttcaggagggagctgcccagagctgttgtttaatgggcacgttgccttggctctgtctgacgctgcgttgttactgtgcatgtttactttattctgggacagacacagcctcacaggaagaagagaaaacccaggcacccgtgccactcttaaaatatttttgtaagtggaagataatctggtagcctttctctgagttccacagcttatgagatgaaaacagcctcattatttttctggtattgaacattgggtgtttaggtttggattgaatcatgcaaatgtatatttttttaattgagaaattttagaaggccttttcaagcattgaaaatgtgattaccccatctctactgggaaatcctgactatacgtacagatagcaggtgagctgttatacctaaacatgaagcatctctgattttatcaccaacattgcttaaggcagtggcctgagattttcctccagaaaatttcctgctgttcttgcttcccagaatatccagtgtattcttttccagagcacctcactaggagtttggctgcttataacattttaagcttgccttgtttatcttggtgaatttcctggctagcaaggaaattcatcattacacttgggtccaagtaagg

SEQ ID NO: 81160 - DNA, 540 bp, Homo Sapiens
  misc_feature (211)..(224): n is a, c, g, or t
atgagccattccatcaggctgaaaattcttctatagacttctctttttattgcttctgaattttcagtcctaggaaagtttttctcactgtcagattatacaataattcatctatgttttcttctagttagaaagagggtttcattttaaaaattgggtctttgttctattcagattttatcctgtgtatcctgtgagaaatcgattcaannnnnnnnnnnnnnccaaatggttaaccacacttctctcaacaccatttttaaagcctttttctctgaatgagatgctttatcatgtactaaattcctagactttctcatattgtaaacattatgttataatatttaatagggttatccctccttccacattgttcttttctaggcatcttctggctatttttgtttattctttccagtacttcttgttttattgaaatcgcgtatggccctttaagtataaatatatattacatatatgaatgaagacatttcaaaagtgtactgcaaatcatattctaaaaccaaccttaggcaaggc

SEQ ID NO: 81161 - DNA, 339 bp, Homo Sapiens
  misc_feature (132)..(141): n is a, c, g, or t
cattgaatattctctgaagacaatcagaggcctgccagggagggactcctggctggttccagcactgtccttaggcctctttttaatactaacttgttggaactgatgcactttgtttaatgtattttaccnnnnnnnnnnaaagctgctcatttagaacaaaatcaaatgcttattgcattgtatccttcctgcttgctgtttttcctcttaatttcaaaagttatgcattaaagataaaagtacacttaagaagtatgcacaagaatacctattaaaataactaccatcaagtttgatggtataacttcaaaggattaaaaaaaactattttggatt

SEQ ID NO: 81162 - DNA, 657 bp, Homo Sapiens
gatttttttgttgttgaaatatccaaatttctactttcctccagtggcatgaattaagaacagtgtgtggtatatagtcaatacttaagtaattttcatccaaaaatgttactgttttgcttgaaattcctattttatatgtattctccccttatttcttgcccttcctgccttgtgacctgagaagtttagaagtgtactgctaaagctattggaatttaatagatgaattataagaactttcaaaaacatttccatgttacttattgttttctaagaaagtttgatgagtataggtatacacaatgggaactctaaggaagtgttgaggcctacatatatttagctgtctttgctattaatgatatgtttgtattgtttgctcctgagaacagaaaatatgtctgttccattaatgttcagtttttttatgcatttaataaatgcatagcattgtgctaagtattctactcaaaaatttaagataggatccctggccaacaaaaatcacttggggattaccaaataaaacaatgtctgatgtgtaattgtgattgcaagtagtgttagtagtgttgagcatcatcagacatgatgccttggctcaggatttcatagcctaaaacttctaaaaggaatctgttgagttctgtgagg

SEQ ID NO: 81163 - DNA, 633 bp, Homo Sapiens
gcggccgccttcacccatatgtttggccgcttcctgagtggcgataaatacactgcgcacattgatcgtcagggtctggtcgaagtcttccagcttgaaatcttccagtggcgcgatggccagcacaccggcgttgttcaccaggatatccaggcgcccaaaggcttcgacggtggcgttgacggcgttgcgaatcgccgtggcatcggcactgtcggcctgaatggccaaggctttgccgcctgcgctgatcacgctgttttgcagtgcctcggccttggcggcagagctgacgtaggtaaaagcaacggctgcaccttgcgctgccaggcgtttgacgatggcggcgccgataccgcgggaaccgccctggatcaatgcaactttgccgctgagattgtgtgtggtcatgtcgttctccaagtagttgatggaccgagtatcggcctcacccacccaagccggtagaccgtgattgctatagtctgtgtaaaccaaaagtttagagtggtcgatatggagagctttggcagtatcgaatgttttgtgcgcagcgccgaaggtggcagctttgccgaagccgcccggcatctgagtttgaccccggcggcggtcggtaaaagcgtcgccaag

SEQ ID NO: 81164 - DNA, 1030 bp, Homo Sapiens
  misc_feature (56)..(57): n is a, c, g, or t
  misc_feature (66)..(66): n is a, c, g, or t
  misc_feature (76)..(77): n is a, c, g, or t
  misc_feature (197)..(198): n is a, c, g, or t
  misc_feature (281)..(281): n is a, c, g, or t
  misc_feature (389)..(452): n is a, c, g, or t
tgctaatgcatctttctacagtagagatgcttgcacttgctctgcatagctgagtnntagcttctntctcatctcnntagccaaaggataccagacatctgatgcagagtgcatagattgagcccactgctcggtacatgtcagcccctgttgttcatgctactgatatctcattgtcaaaggaagtcagaggccanngatgaagaggcaggaaatatgcactgcccacagtgaagccatgacaagagtgaggatgcaggaaggcatgaagaattgggccnaacagttcaatctaccataccttctctcacctggaattccagatgcttgagctacgaaacttagatgcaaagaaagttaaagctagaaggaacctcaggcccagttgnnnnnnnnnnnnnnnnnnnnnnnnnnnnnnnnnnnnnnnnnnnnnnnnnnnnnnnnnnnnnnnnaggctgtgactaaatctggacttaaatccagactatcaatcttaggccagtgttcttttttcaatatagtccttggcataatgctatgcttattaggtagataaaagggcttatgtcaagaaatttggagcagagtctgattacttgagcatgaacatacccgaccaaggtatgttctggagtcatattctagcctctgagctcattttttcatgcgagttcatataaaatcctcgaaagtttagaaactaggttttagtagtaacggagctagaatcatcttcgggcttattcctgctagttgttccatatttctagatttcatcttgaattttgaaaactgatttaagaatatatttagtattattattagtaagggaatacgcaatccagtttcaattttattcagaagtaggtcacctaattctagaaaatggttattagtctagtgtcgcttagcaaggtacttaaaagaaaatctgcacatatccttgtgctgcccttcttaaaaacagaaaacaaaaagtgtaagatcatcattgcttcccacataggaaaaataaaatgtcttcagactt

SEQ ID NO: 81165 - DNA, 1076 bp, Homo Sapiens
  misc_feature (844)..(873): n is a, c, g, or t
cggaacgaggccggggcaaaggtccagcgccagttcctcgcccgcgcgccaatagcttgaaatctgcaggatcgccggacccgacagtccgcgatgggtgaacagcaactggtcgtcaaaggcgatcgcggggcgccgcagcgccctggcggccggcagcgcggcccgggccgccaccgcgacccccgacagcggcgcgcaaagccgcaggtcctgctgggcgaaggtcagcggcaccaggccgggccgggtctcgacgatgcgatgccccgtggcctgggcgatgtcatagccgatgcccgtcgcgcccatcttcgggatcgacttgccgcccgtggcgacgacgacatggggggccccgatcggcccggccgaggtctcgacccgcagcgtggcgcccggcgtgacgcccgtcaccgcaacgcccgtccgcagctcggccccgtccatgcggtccagcagcatccgcacgatctgcgtggcgcgcccgtcgcagaacagctgcccctgcgccttttcgtgccaggcgatcccggcgcggtccaccagcgccacgaaatcctcgggccggcagcccgccagggccgaggcgcagaaccgcggcatctcggacaggaaggtctggtggctggtgccaaggttggtgaagttgcagcgccccccgcccgagatgcggatcttctcgccggggtcgcgggcatgatccagcaccacgacccgcagcccctgccccgccaggctgcccgcgcagaacagcccggccgcgccggcccccagaatgacgacatccgcccgatccatcccgcgccgatagcccgccccggcgagggccacaagtttttgnnnnnnnnnnnnnnnnnnnnnnnnnnnnnntggctaaacacccccgcactgctggggcgtggccaagtggtaaggcatcggtttttggtaccgtgtaccgtaggttcgaatcctaccgccccagccatgaaatacaaaaaagacagcccttccattgggttagccactggaaatccaggcaacctcccgtctgcgcgtcggcgcgcttcacaaactgcttcacatgcggccgc

SEQ ID NO: 81166 - DNA, 890 bp, Homo Sapiens
ggggcagtccctctgcaccccagagtgaggaggacgcaggggtcagaggtggctacagggcaggcagaggaggcacctgtagggggtggtgggctggtggcccaggagaagtcaggaagggagcccagctggtgacaagagagcccagaggtgcctggggctgagtgtgagagcccggaagatttcagccatgcctcacagctccgacagcagtgactccagcttcagccgctctcctccccctggcaaacaggactcatctgatgatgtgagaagagttcagaggagggagaaaaatcgtattgccgcccagaagagccgacagaggcagacacagaaggccgacaccctgcacctggagagcgaagacctggagaaacagaacgcggctctacgcaaggagatcaagcagctcacagaggaactgaagtacttcacgtcggtgctgaacagccacgagcccctgtgctcggtgctggccgccagcacgccctcgccccccgaggtggtgtacagcgcccacgcattccaccaacctcatgtcagctccccgcgcttccagccctgagcttccgatgcggggagagcagagcctcgggaggggcacacagactgtggcagagctgcgcccatcccgcagaggcccctgtccacctggagacccggagacagaggcctggacaaggagtgaacacgggaactgtcacgactggaagggcgtgaggcctcccagcagtgccgcagcgtttcgaggggcgtgtgctggaccccaccactgtgggttgcaggcccaatgcagaagagtattaagaaagatgctcaagtcccatggcacagagcaaggcgggcagggaacggttatttttctaaataaatgctttaaaagaaaa

SEQ ID NO: 81167 - DNA, 1282 bp, Homo Sapiens
catcgactaggaagaggcctggggtgttaaatcggcacgaggcctcacaagtgcccagactgcgacatggcctttgtgaccagtggagaattggttcggcatcgtcgttacaaacacacccacgagaagccattcaagtgttccatgtgcgattacgccagtgtagaagtcagcaaattaaaacgtcacattcgctctcatactggagagcgtccgtttcagtgcagtttgtgcagttatgccagcagggacacatacaagctgaaaaggcacatgagaacccattcaggggaaaagccttatgaatgttatatttgtcatgctcggtttacccaaagtggtaccatgaagatgcacattttacagaagcacacagaaaatgtggccaaattatcactgtccccactgtgacacagtcatagcccgaaaaagtgatttgggtgtccacttgcgaaagcagcattcctatattgagcaaggcaagaaatgccgttactgtgatgctgtgtttcatgagcgctatgccctcatccagcatcagaagtcacacaagaatgagaagcgctttaagtgtgaccagtgtgattacgcttgtagacaggagaggcacatgatcatgcacaagcgcacccacaccggggagaagccttacgcctgcagccactgcgataagaccttccgccagaagcagcttctcgacatgcacttcaagcgctatcacgaccccaacttcgtccctgcggcttttgtctgttctaagtgtgggaaaacatttacacgtcggaataccatggcaagacatgctgataattgtgctggcccagatggcgtagagggggaaaatggaggagaaacgaagaagagtaaacgtggaagaaaaagaaagatgcgctctaagaaagaagattcctctgacagtgaaaatgctgaaccagatctggacgacaatgaggatgaggaggagcctgccgtagaaattgaacctgagccagagcctcagcctgtgaccccagccccaccacccgccaagaagcggagaggacgaccccctggcagaaccaaccagcccaaacagaaccagccaacagctatcattcaggttgaagaccagaatacaggtgcaattgagaacattatagttgaagtaaaaaaagagccagatgctgagcccgcagagggagaggaagaggaggcccagccagctgccacagatgcccccaacggagacctcacgcccgagatgatcctcagcatgatggaccggtgatgttggagcggccgc

SEQ ID NO: 81168 - DNA, 819 bp, Homo Sapiens
  misc_feature (66)..(66): n is a, c, g, or t
agaagtggggtggggtgtaggaaacaaggcaggaagggtatgcaggcgccatcctctaggatgctntgtggatgacagattaaaattgtgcttgcagttggtgtgaccagccctccctggaagatggcctccacttggtcttgcattcaaagaaacatatgtaactgcaaatattttcaggcctaatgtgatctccatggtagggtttcctgagaggccatgcaggggtttcctgcagtgcatttcccagtgaacctttcctcaaaccttctgggacatttgctcctcaggtttcacgctcttaaaagactcctcagtcttgttcttcctcccttcctctttctagccacctcctcttctcaggccgctctctccccatcccccaggggtcccctcacttgtcctctgggtagcctgggctgaactccacctgatggctttaggagccatctgggagcgatctgcagggaggaagggcatgctgaggacgcttcagacaaggagagcagctggaggctgttggttccaggtaggggcctgagcaaggccctgggaaggaagagtcccaaagtaggataggaaagtccaacaggcatcagggtgcccaaggatggctctggtctgggtgggttttcacgtttgaggtctgtccccgttgcctgactgtggggccatgtgttgttccctgctgtttccccatgcctagaagatgtccagaatatagtaggcactcaaaaaagtaaccattgagtgaatagcagccgaggtattagaagaaataaaaagtattcttaagaagaacacctgagaggcggccgc

SEQ ID NO: 81169 - DNA, 1199 bp, Homo Sapiens
  misc_feature (519)..(528): n is a, c, g, or t
cggtccggaattcccgggatatcgtcgacccacgcgtccgggagttctcagaacacttccgctgcccacctggctcacccatgaacccgcctcacaagtgcgaagtctggtaaggacgaagcggagagagccaagacggaggaggggaaggggctgaggacgagacccccatccagcctccagggcattgctcagcccgcttggccacccggggccctgcttcctcacactggcgggttttcagccggaaccgagcccatggtgttggctctcaacgtgacccgcagtctgatcccctgtgaagagccggacatcccaggcacacgtgtgcgccaccttcagcaggcattcgggtgctgggctggtggctcatcaggcctgggccccacactgacaagcgccagatacgccacaaataccactgtgtcaaatgctttcaagatatatttttggggaaactattttttaaacactgtggaatacactggaaatcttcagggaaaaacacatttaaacacnnnnnnnnnnaaggaaagaattggtatatttattatgttctgtttttctaaataacctgtggacaagggaagccccactgatttactccctctcttccccactccctgtgaggctgggctgaggcacggatccctgggccacagagcaagtctccaaatcagacagctgcctcagcccctgggatgtgtgatttcagctcctgtcacctcatgcaagggcgtggagaccagtagaggtgtggaggccaggcagagagaggagcccgctctgcggggggcccagctcatgggcactgccccttcagctagcctgcctccgtcccctgagtccaacagtgggagccctagctgggaagttctgatccccaaagccacagcaggggactgatggctatagcagaatgaggtcgggtcaggaccctcaaacaccatctgggaacaccaagcaccctgaatcgagactgcaggagccctgcggggtgagactgtgtcagagatacactgctggccacaagtgtcccctctcagtcccaccttttcgggctgtcccatgtctatctcaggggcccgttacctctctgcagcagtcccccatcccagccacaccagggtctgtccggccaaccctcttccccagggaaaggagaaaagagaaaacaggctgggcccggtggctcactc

SEQ ID NO: 81170 - DNA, 2834 bp, Homo Sapiens
  misc_feature (192)..(237): n is a, c, g, or t
gtttagctagactgttaggctggagggatttttcctccctttcaggacctgaatggagctatttctccttgcatctctgccaacatctcccaggatccacctctgatccactggtgggctcgggcatcaacagctttgggttccaatcccagctgtccccattcagctgggtggtgagaagccagggtctcnnnnnnnnnnnnnnnnnnnnnnnnnnnnnnnnnnnnnnnnnnnnnnaggtgaacttccacagcccccggagtggccagaggtgctgggctgcacggacccaggtggagaagcggctggtggtgttggtggtacttctggcggcaggactggtggcctgcttggcagcactgggcatccagtaccagacaagatccccctctgtgtgcctgagcgaagcttgtgtctcagtgaccagctccatcttgagctccatggaccccacagtggacccctgccatgacttcttcagctacgcctgtgggggctggatcaaggccaacccagtccctgatggccactcacgctgggggaccttcagcaacctctgggaacacaaccaagcaatcatcaagcacctcctcgaaaactccacggccagcgtgagcgaggcagagagaaaggcgcaagtatactaccgtgcgtgcatgaacgagaccaggatcgaggagctcagggccaaacctctaatggagttgattgagaggctcgggggctggaacatcacaggtccctgggccaaggacaacttccaggacaccctgcaggtggtcaccgcccactaccgcacctcacccttcttctctgtctatgtcagtgccgattccaagaactccaacagcaacgtgatccaggtggaccagtctggcctgggcttgccctcgagagactattacctgaacaaaactgaaaacgagaaggtgctgaccggatatctgaactacatggtccagctggggaagctgctgggcggcggggacgaggaggccatccggccccagatgcagcagatcttggactttgagacggcactggccaacatcaccatcccacaggagaagcgccgtgatgaggagctcatctaccacaaagtgacggcagccgagctgcagaccttggcacccgccatcaactggttgccttttctcaacaccatcttctaccccgtggagatcaatgaatcccgagcctattgtggtctatgacaaggaataccttggagcagatctccactctcatcaacaccaccgacagatgcctgctcaacaactacatgatctggaacctggtgcggaaaacaagctccttccctgaccagcgctttcaggacgccggatgagaaagttcatggaaagtcatgtacgggaccaagaagacctgtcttcctcgctggaagttttgcgtgagtgacacagaaaacaacctgggctttgcgttgggccccatgtttgtcaaagcaaccttcgccgaggacagcaagagcatagccaccgagatcatcctggagattaagaaggcatttgaggaaagcctgagcaccctgaagtggatggatgaggaaacccgaaaatcagccaaggaaaaggccgatgccatctacaacatgataggataccccaacttcatcatggatcccaaggagctggacaaagtgtttaatgactacactgcagttccagacctctactttgaaaatgccatgcggtttttcaacttctcatggagggtcactgccgatcagctcaggaaagcccccaacagagatcagtggagcatgaccccgcccatggtgaacgcctactactcgcccaccaagaatgagattgtgtttccggccgggatcctgcaggcaccattctacacacgctcctcacccaaggccttaaactttggtggcataggtgtcgtcgtgggccatgagctgactcatgcttttgatgatcaaggacgggagtatgacaaggacgggaacctccggccatggtggaagaactcatccgtggaggccttcaagcgtcagaccgagtgcatggtagagcagtacagcaactacagcgtgaacggggagccggtgaacgggcggcacaccctgggggagaacatcgccgacaacgggggtctcaaggcggcctatcgggcttaccagaactgggtgaagaagaacggggctgagcactcgctccccaccctgggcctcaccaataaccagctcttcttcctgggctttgcacaggtctggtgctccgtccgcacacctgagagctcccacgaaggcctcatcaccgatccccacagcccctctcgcttccgggtcatcggctccctctccaattccaaggagttctcagaacacttccgctgcccacctggctcacccatgaacccgcctcacaagtgcgaagtctggtaaggacgaagcggagagagccaagacggaggaggggaaggggctgaggacgagacccccatccagcctccagggcattgctcagcccgcttggccacccggggccctgcttcctcacactggcgggttttcagccggaaccgagcccatggtgttggctctcaacgtgacccgcagtctgatcccctgtgaagagccggacatcccaggcacacgtgtgcgccaccttcagcaggcattcgggtgctgggctggtggctcatcaggcctgggccccacactgacaagcgccagatacgccacaaataccactgtgtcaaatgctttcaagatatatttttggggaaactattttttaaacactgtggaatacactggaaatcttcagggaaaaacacatttaaacacttattttttt

SEQ ID NO: 81171 - DNA, 1125 bp, Homo Sapiens
  misc_feature (983)..(1008): n is a, c, g, or t
tgtgttcgccctttattcactctggtggtcctagaggagccgtgtctcttgcggggatccggtctgccgtgttgagtaatcggctctcatccatctccatcagtgcatcgcatgtcccagcccctgcgttctgctagctttctgcaccagttggaccaggtcacgagtcaagtactgtccggattgatggaagcgcagaagagcgctgtccccggggacttgctcacgcttcctggtactcacagagcacttgcggtttacccggcccttgaccatggcagaactgagtcgccttcgtcgccagtttatttcgtacactaaaatgcatccgcaacaatgagaacttgccgcaactggccaacatgtttcttcagtatttgagccagagcctgcactgaccagaggaggtaggggggaagccatggcttctgatctccactccactttatttctctgggaaaaataggctgcaggtctccagagcatatcgatgcagtactgtactagagctgttgtgactgattcactcaaactttcctgcatacccctgtgccaggccttgggtttacagcataagttcagactaaagagaatggagaactattgtggtgcaacctggcaaatccctcagaggacagagctaaggtggacagggattacctagattggatcctacttgggctatcacagagcattgaccattggcttccctcatctgaggcgtgggagagcagactggatagatgagaattgttttaaaacaattgtgaacagaaactgaagatggtacagttctacatctgcacctgcccttttttcataccacaaaagtattttttgagtactgtactgactttttgctagtttctattctgggaccgagttcacagataaatccattggtttgtatccttgagaaactttgtttttgtggaagtaagaaagttatctactagattatttcctctaataaaatcttttannnnnnnnnnnnnnnnnnnnnnnnnnaacatggtcggcccgcctcggcccctcgaggaagctttctaagaccaattcgttttgggcgcgcggggccccagaagggtaattggaacatgggtccataagctgtttttcctaagg

SEQ ID NO: 81172 - DNA, 649 bp, Homo Sapiens
gcggccgctccaacatcagaatggtcgaccgcggtcagggcacgaggatttcagcgaggacacctatcgcaccctgaccgcggtcgacagcgcggtgatggtgatcgacgccgccaagggcatcgagccgcagacgctgaagctgttcgaagtgtgccggctgcggtcggtgccgatcatcaccttcatcaacaaggtcgaccgcgaagggctgccgccgttcgagctgctcgacgaggtcgccgaccggctcgcgctcgacgtttgcccgatgaactggccggcgggcatgggcggacagttcgagggcatttacgatctcgtcgatccggcgatcatgaagtccggcggcgatgcgtcgcgcatgtatgagggcgaccgcatccgccgtgtcggggctggacgacgacgggctcgcggcgcagctcagcggcgatgcgctttcgctcctcaaggaagagaccgaactcgcgtcggcttgttacgcgcccttcgatgctgccgcctatcgcaatggcgacctgaccccggtctatttcggctcggcgctgaaggagttcggcgtcgtcgacctgctcaacgccctggcgcagcacgcccccgggccgcagccgcaaccggccgaaccggcacccgtgcacctcgtgcc

SEQ ID NO: 81173 - DNA, 1290 bp, Homo Sapiens
  misc_feature (240)..(270): n is a, c, g, or t
gcggccgcctgctaggtttgtcactttccctataaagcttcccctgtcctgcagacagggaacctggaccacacttggagaaatgttgtcctggggcccaagacatgaaggttggaggcaggaaggaaatgaggagccaggtaggactcaaagttgtgaaaaagctctttgcttaatctgcaatactaagggggctggggagggactgaatggcttcttggagccaggaaaagaagggcnnnnnnnnnnnnnnnnnnnnnnnnnnnnnnnaagggccctgtggctcatgccagggagaggagcttgggggtattctggccccttggctgctctgtcccctccctccacaggggtgtggcatcaacatctgtagtccagtcctgagctctccagcttgcaccctggctctgtctgccagccccccatggaagctcctgcccctgtggactgtcctgcttggagggaggggagacgctgcagagatctgagcccctcgcttggttcagcatgtggatttctttttgccaaagacaaatgtggcatccggatgacatgtgtctcctgtgccctggagcagtgtgagctcttctgagacccttgcaataatgattcagcctctgcttccctgaccaagctgtgagctctgggagggagggctgggtctgcctgctccctgctgtgtccctggcatccagtatagtggttggcatagaccaggtgcttaataaatggctgctgaatattgcatagctctggaagccccgaaagaattggaaatctgagcctgctaagctgaaaaggttagtgttaggaggcctgaaggtggagggtaaatattattggcttggcagccagatgaaccctagttggaggcctgcctctaccacttgctctgtgatctttgacaagtgacttaccctttctgagcctccatttactcatctataaaatggggaataattatagtacttatgtcataggctttttgggaagattaaatgagacaatctatttgtggcctggcatggccaagcgttcagtagatggtagcttccacgataattatgacaggtattattactaatattggagtcagaaggagacaccttgcagccaaagccagaagacagagctgaaccccggcatccaggcacccctgtggccccactccatattttccttgcaaataccttgactctgtctgtcctgcattatctgtacacactgctcagtcctctttggatcagagaaacccagggacccacgaggatggtagcatccctcgtgccg

SEQ ID NO: 81174 - DNA, 345 bp, Homo Sapiens
gcggccgcggctgtggaggctctaggagaaaagtgactctctacactcgtcctactgagagatggcaagagatgggagccaatatcatgactttaccttacatcaacctgctgctgatggtgtttactgttaagtgaatttcaaactctttgacttgctatgacaaggctggtgagaacagtatagaccactcacagtgagccacttctgaaatgcctcttacacagcaatttatacataaccatttagacactttggcagcaaaaacatccaggttgcagtagcccagttgttaggcacatgtgtctcctggttgcttctaactaaccgcattctcatcgtgcc

SEQ ID NO: 81175 - DNA, 1441 bp, Homo Sapiens
  misc_feature (78)..(78): n is a, c, g, or t
  misc_feature (172)..(550): n is a, c, g, or t
  misc_feature (597)..(597): n is a, c, g, or t
  misc_feature (1033)..(1048): n is a, c, g, or t
  misc_feature (1347)..(1355): n is a, c, g, or t
cggtcgaacaggacgccgaaggattcatgggacccgtgatcttatatctgcggattcccccttgacttaactcgattnttatgctctcagagggcggacctatgaaaacgccggcacgcagcctgtgacgatcctggcctattctggcctgtgatcacatatattcatgcgnnnnnnnnnnnnnnnnnnnnnnnnnnnnnnnnnnnnnnnnnnnnnnnnnnnnnnnnnnnnnnnnnnnnnnnnnnnnnnnnnnnnnnnnnnnnnnnnnnnnnnnnnnnnnnnnnnnnnnnnnnnnnnnnnnnnnnnnnnnnnnnnnnnnnnnnnnnnnnnnnnnnnnnnnnnnnnnnnnnnnnnnnnnnnnnnnnnnnnnnnnnnnnnnnnnnnnnnnnnnnnnnnnnnnnnnnnnnnnnnnnnnnnnnnnnnnnnnnnnnnnnnnnnnnnnnnnnnnnnnnnnnnnnnnnnnnnnnnnnnnnnnnnnnnnnnnnnnnnnnnnnnnnnnnnnnnnnnnnnnnnnnnnnnnnnnnnnnnnnnnnnnnnnnnnnnnnnnnnnaagaattcagaacgagaaacaacaatagcctccacacatcatttttnacaaagttcaaagtagattacatttatgtgcttttcattcattacacaatgtacagacatgatccgtttaatgacttaggctcctcacatggttaaacagtgaggatttcctatggaagactagacatagaagtttttagaagcagagactgttttctgcaaaaaccaacctcaggcatacatttgtgtttacatatattccttgagaatactacagtagcagtgcataagttcattctgtaaaaagatctgaaagatgattttcaagagactcaatacattgtgctttcaggtaaaaatccttagacaaaagatcagttactatgaaaataacagttaaaactgcatatgtgttagagatcagaagaggctataaagaaatgtaaatagttgtgcttaggggacttttttggcaaagttgtcttaataataaatnnnnnnnnnnnnnnnngtctcagtgactgatataaaatagacatagctatcaagagtttcttacacttggcttagagtttaaaggtgaaaaatcatctccacataaatcacctgggtatctggtaatccccagtctgggtaagtcaggcagggaggggcttgaaagaaaagataaagtgatttttccttcctattaacacaaagcattaaccagaggtaaagccagggtgaaccaactaattaaacagatgcctaccttcctttagaactcttagaccaaagagagaggtcaccctacttctattaggttttttnnnnnnnnncccctatgattcttggtgtctggaccacaacctgttctgtaattcacaagattaattaaatatgtcctctcttctgtgagacccta

SEQ ID NO: 81176 - DNA, 456 bp, Homo Sapiens
  misc_feature (30)..(30): n is a, c, g, or t
  misc_feature (51)..(51): n is a, c, g, or t
  misc_feature (61)..(61): n is a, c, g, or t
  misc_feature (366)..(366): n is a, c, g, or t
  misc_feature (371)..(371): n is a, c, g, or t
  misc_feature (374)..(374): n is a, c, g, or t
aaggaatttacccggaaagccacaaggtantggagccccctgaaaatccanccttccaganccttttaccagaatgaacctatgcaccggcctactgtagtaatcctcaaggaatatatgtaaacacaaatgtatggcctgaggttggtttttgcagaaaacagtctctgcttctaaaaacttctatgtctagtcttccataggaaatcctcactgtttaaccatgtgaggagcctaagtcattaaacggatcatgtctgtacattgtgtaatgaatgaaaagcacataaatgtaatctactttgaactttgtaaaaatgatgtgtggaggctattcttgtttctccatctcaagtcctgtgtgtnacgtngtngcaagtgcacatgtgtgtgtgtaataacacattgtaaagaacagaaattactttaaaaaataaacagaaattttgacctgaa

SEQ ID NO: 81177 - DNA, 492 bp, Homo Sapiens
ggcacgaggtttttttatactaaaataaggttatttacttcaaaatgatacattggacataatctgtatatagaacaaagcaagtaatggtaaactcttaaggcaccttttaaaccagatgctgtacaaaatacatttagtgtgttacacgtcaaagacgaatctatatttttggtgttttacaactgcctgataaaactgcttgcttttacccttctttcaatgcctatgtacagtttcccctaatgaagcaataatgatatttccattttatacaatatatactacattttagtttttaaatgggccaggacaaaggtcactaaaagggcttaaataattccatagaaaacagaatacagagcataagctaaaattacaatagttaatcctttacaagagccatattcacatactttccttatgggaccatcattacacgtggcttcacaggatgctgtgctggattttggttcttaggaacacacctcc

SEQ ID NO: 81178 - DNA, 465 bp, Homo Sapiens
gtttgttcatagcagttttattcataatacaaaaaactgaaaacattcaagtatctgtcaatacaagaatggatcaataaactgtgatacactcattccatggaatggctaaaggaacaaactggtgacacacagaacaacaaggatgaatctcaaaaacatttggagtgcgatagaagccatacccaaaaaagtgcgagaaaaaaagataaataataatggttccaagaaatgcacagcagagagcccagaggcaaagacccacaggacagagggtcagtcccaggctgtggatcctaactaagaaactcctgctggattttgcccagctccatttccaaactattttgggtcagtgacttctttatcccctccatgttccctcattttgaactagaatcactgtaagtgttattctatgtctgtcacatcattccacagtaggggcagataagctgtttagaa

SEQ ID NO: 81179 - DNA, 727 bp, Homo Sapiens
cgagcccaagaatcggcacgagggtcatcgtcgttgctcggcaccaggctgatatggctggggcgcacgccaaaacggaactcgccttcgccgatgggacgcagatccacgttcaacgggaagtgcacgacattggcaaaactcacttcattgccgctgatacgccccggcatcaggttgatcggcggctcggaaaacagctcggcggccagcaccgtctggggctggtgatacacctcggcggccctgccgctctggatcacccggccttcgtgcaggatggtggtggtgccacccagggccagggcttcattgggttcggtggtggcgtagatggcaatggtatggcgcgccttgaacaactcgcgcatttcctgacgcagctcttcgcgcagtttgtagtccaggtttaccaacggctcatcgaaaaggatcagctcggcgtctttgaccaaggcgcgggccatggccgtgcgttgctgctggccaccggaaagctccagcgggtggcgctgcaggaacttctcgatgcgcagcatctgcgcggtttccagcactttgctgtggatcagttcgttggacacaccggcctggcgcaatggcgaggcgatgttttcgaacacggtcatggtcgggtaattgatgaactgctggtagaccatcgacacgttgcgcaggcgcaccggcttgtgggtgacgtctacgccgttcatcaggatgcggccgc

SEQ ID NO: 81180 - DNA, 1289 bp, Homo Sapiens
  misc_feature (15)..(15): n is a, c, g, or t
  misc_feature (71)..(111): n is a, c, g, or t
  misc_feature (115)..(149): n is a, c, g, or t
  misc_feature (885)..(885): n is a, c, g, or t
  misc_feature (1091)..(1091): n is a, c, g, or t
  misc_feature (1118)..(1118): n is a, c, g, or t
  misc_feature (1121)..(1121): n is a, c, g, or t
  misc_feature (1179)..(1179): n is a, c, g, or t
  misc_feature (1237)..(1237): n is a, c, g, or t
  misc_feature (1246)..(1246): n is a, c, g, or t
ccgccgcgcgccccnccgtaacccaccgcccgtcaaccactaatcactatagggcgctagctcgcctctcnnnnnnnnnnnnnnnnnnnnnnnnnnnnnnnnnnnnnnnnnccgnnnnnnnnnnnnnnnnnnnnnnnnnnnnnnnnnnncagtcgacggtaccggacatatgcccgggaattcggccattacggccgggggcggacaacatggcggccttcatgctgggctcgctgctgcggacgttcaagcagatggttccttcatcagcttcaggccaagttcgaagtcactatgtagactggagaatgtggcgcgatgtgaagagacgaaaaatggcctatgaatacgcagatgagaggctacgtattaattcactcaggaagaataccattttgccaaaaattcttcaggatgtggctgatgaagaaattgctgccctcccccgggatagctgtcctgttagaatcagaaatcggtgtgttatgacgtcccgtccgcgtggtgtgaagcggcgctggaggcttagtcgtatagtcttccgtcacttagctgaccatgggcaactttctgggatccagcgagcgacatggtaaatgagctccagaacctattgagcttgcagggaagccaagcttgcagttccagcaagcaaagattttttttaatagaccaaaccctaatctctacaggggcccagtacagttgtttggcctacctgatgctatctctaaactacttttaaaatgaagacatttgggtgtttcatgtcagtgaattatcttttctcttggacttaacaaacatactgttcccatacatagtacaaagagtagcataataaatattttctgggaatggttttttataccctcccttttaagnttaaaccttttactaaacatataaggggtttttttgaattaaaagccttttttttcctaaaaagggtaaccttatgccatgaacccacccaattgggaattgtaacctcattgtattgggcacgtttgttaatcccctggaactacctttggccgaacccgtgcaagacgccccccttaacagattattcgctcacataaacacanatgggcatagccagggggtgcccgggntcnggggaaattattaaaggcctcgcgcttttgtctgtgtgcggtggcgggtacacacacngactcccccccttcgcgggttttgcccgcggaccgccccttgaggggggagtcgtctngacgccatntcgacgccggccggtgttaggagacgttggcaggaaagaacga

SEQ ID NO: 81181 - DNA, 656 bp, Homo Sapiens
agtgtcaacttccccagaaagccagccgcaagccccccagggaggagagctctgccacctgtgttctggaacagcctggggcccttggggcccaaattctgctggtgcagaggcccaactcaggtctgctggcaggactgtgggagttcccgtccgtgacctgggagccctcagagcagcttcagcgcaaggccctgctgcaggaactacagcgttgggctgggcccctcccagccacgcacctccggcaccttggggaggttgtccacaccttctctcacatcaagctgacatatcaagtatatgggctggccttggaagggcagaccccagtgaccaccgtaccaccaggtgctcgctggctgacgcaggaggaatttcacaccgcagctgtttccaccgccatgaaaaaggttttccgtgtgtatcagggccaacagccagggacctgtatgggttccaaaaggtcccaggtgtcctctccgtgcagtcggaaaaagccccgcatgggccagcaagtcctggataatttctttcggtctcacatctccactgatgcacacagcctcaacagtgcagcccagtgacacctctgaaagcccccattccctgagaatcctgttgttagtaaagtgcttatttttgtagttaaaaaa

SEQ ID NO: 81182 - DNA, 1013 bp, Homo Sapiens
gcatgtacactatgaacagtgtgtacaaaaaagcaggcggtaccggtccggaattcccgggatatcgtcgacccacgcgtccgataggaaaatgcacatctttcatttgtctcccaaaagatgatttccataaaaatatacttcaaagtatttactgtacatagacttcaatgattttatttccagcatcaaactaaacatttctaaccttttaaataaatggggaatttagtttcatgagaatttttactgacaactaataaacactgtatgtgtacatattcatatacactgtggactggagaaagtcagtatggaaataaatttcactgagatccagaaagtagcaatataggacttttaggggtatgtattagtgtaaataatatatgtgcagtctaggctaatcattttaattaaaaacaaataagcatacttttttgctttaaaaatatgccctcaaaatggtgggggataaaatgtaagatattctttagctttaattatttttccatcttattcaagtcagagcacttttttttaaatagcaatacaacaggcaagagaatactcaaaaatatttaaaactgtattgataccaagagtatgtcttaacatattttctaataaatacttgagcggtttttgtctggcaggcttccaaatttgccaaaattaagcgttcagtattttcaacacatacgctttttactggtttatactgaactatctgatgagaattcctgtgttcccaaagcaactgatgtttacaggtcttgtgtttctcctcctcctttctaaggatgagggaatccacaacagactttctctagaaaacactaatgatggacaactttttggtgtcatcaatgagttggctactaccttgatgtaaaaatttgtaaggaaaattttcaccatttcgagtgtcaagtgtatttttaactgtctggtttgtacttttatgacttttgtactaccaaagcggagttaaaaataaaaatgttaaacgc

SEQ ID NO: 81183 - DNA, 896 bp, Homo Sapiens
  misc_feature (71)..(79): n is a, c, g, or t
  misc_feature (374)..(428): n is a, c, g, or t
cagtcgacggtaccggacatatgcccgggaattcggccattacggccgggctcatattttaaataatcacnnnnnnnnnccctcaagggagaatgttttaatttctgtttgtatcagtagaattaaggtagtgggacttcatctatagatgcacagttccctttgttttaatattaaatatgttctcacttaattgctttgctgctagacttgcaactaatttttttaaagtatattccattattttgcatttttgatgtgtcaaaactttgacagcttttatgtagaataaaaaaatttttaaattggtgtatggttacatatgttggcatcaagctagcagccaagaggttaattgtgcaactataaacaannnnnnnnnnnnnnnnnnnnnnnnnnnnnnnnnnnnnnnnnnnnnnnnnnnnnnncaattggcaagatagcctttaacgattagatccaagtaatcttacccacagtgcggggattccgggtaccaaaaagtggcgcagattagagtgttcacaaatgtgttttgctaaaattaggggctataaattccagtctgaaacttttgtgaacacattaagggggggcaacgcaactctttcataaagataagtttaaataaggcttatctaaatatacacgaggggcacgaacaggaagagtgctgtgccaccttccaaaaaaagctgtcacaatgaagcttcagcaacccaagtgtctacacaaagcggagaaggatagacgagacacgaacgagccgaacaccactagtagaggaaaaacggtaagggtgtgaaagggggggatattccttgtggcgcaagcgagattttactgtaggagtattgtcacgcagactggtattatgttgaaaacatgtgggtatc

SEQ ID NO: 81184 - DNA, 1186 bp, Homo Sapiens
  misc_feature (33)..(33): n is a, c, g, or t
  misc_feature (708)..(716): n is a, c, g, or t
  misc_feature (731)..(731): n is a, c, g, or t
tgatttgatgcctgtgtcaagctgactgcatgnccagaccttacactttccttcatgaaccctaggttgttggatgatgtcagcttccatccttgtgttcgtttcaaacgctgggaatctgagcgcatcctctccttcatccctcctgatggaaacttccgcctgctgtcttaccatgtcagtgcacagaatctggttgcaatcccagtgtatgtcaaacataacatcagtttccgggacagtagttcccttggacgctttgaaataacggtgggacccaagcagacgatggggaagaccattgagggagtgactgtcaccagccagatgcccaagggggtcctgaacatgagccttactccatcacaggggacacacacattcgacccagtcacaaagatgctgtcttgggatgtaggaaaaataaatccacaaaagctaccaagtttgaaggggaccatgagtcttcaggctggagcttccaaaccagatgaaaaccccacaattaacctgcagtttaagatccagcagcttggccatttctggactcaaggtgaatcgtctggatatgtatggagaaaagtacaaaccctttaagggcataaaatacatgaccaaagctgggaagttccaagttcgaacctgaagggagcatttgctgagggaatagtcttgcacattttttcatttcttacttgtctaaaagtnnnnnnnnntatcagcctgtctcntaggtcagtcccctcctggacccacccgctcccttttttccttagccttcagtgccatggaactaatcaagggaggaaaaggtcaccagggagaactggacagaactgaaacacagcaacaccagttctcaaggacaagttctactcacttccttttacagaattcaccggccattttcctgttacctgatccttctacaggatttttaaaaagtaagagagtttcagagaagccgatcccataatccccagtgcagccagggtttgtgtgtcatcgtactggagtagagggccgactcttccatgaaggcatgaaacggtgtcgcagtactctggcgtctttattccaggagaggcttcttacaagataaggcactgcgagtcgattgttacgccacacctgtaacaattttctataaacatctcatggccatcaaaaaaccttaaaactcaaa

SEQ ID NO: 81185 - DNA, 1698 bp, Homo Sapiens
cggtccggaattcccgggatcgccgctgcctgagtcgactctgcgccgcccgccgcgaatggaggccgccgcccagttcttcgtcgagagcccggacgtggtctacggccccgaggccatcgaggcgcaatacgagtaccggacgacgcgcgtcagccgcgagggtggcgttctcaaggaggccaactactacggctcgctgactcaggcgggcaccgtgagcctgggcctggacgccgagggccaggaggtgttcgtacccttcagcgcggtgctgcccatggtggcgcccaacgacctcgtgttcgatggctgggacatctcgtcgctgaacctggccgaggcgatgcggcgcgcgaaggtgctggactgggggctgcaggagcaactgtggccgcacatggaggccctgcggccccggccttctgtttacatccccgaattcatcgcggccaaccagagcgcgcgcgcggacaacctcatcccaggctcgcgtgcgcagcagctggagcagatccgcagggacatccgagacttccggtctagcgcggggctggacaaagtcatagtgctgtggacggcgaacacggagcgcttctgtgaggtgattccaggcctcaacgacacagccgagaacctgctgcgcaccattgagctcggtctggaggtgtcgccctccacgctcttcgccgtggccagcatcctggagggctgtgccttcctcaatgggtctccgcagaacaccctggtgcccggagctcttgagctcgcgtggcagcaccggggttttgggggcggagatgacttcaagtcaggccagaccaaagtcaagtccgtgcttggggacttcctcattggctccggcctcaagaccatgtccatcgtgagttacaaccacctgggcaacaacgatggggagaacctatcggcgccattgcagttccgctctaaggaggtgtccaagagcaacgtggtggacgacatggtgcagagcaacccagtgctctatacgcccggcgaagagcctgaccactgcgtgtcatcaagtatgtgccgtacgtgggtgacagcaagcgcgcgctggatgagtatacctcggagctgatgctgggcggaaccaacacactggtgctgcacaacacgtgtgaggactcgctgctggccgcacccatcatgctggacctagcgctgctgaccgagctgtgccagcgcgtgagcttctgcactgacatggaccccgagccgcagaccttccaccccgtgctgtccctgctcagcttcctcttcaaggcgccactagtgccgcccggcagcccggtggtcaatgcgcttttccgccagcgcagctgcatcgagaacatcctcagggcctgcgtggggctcccgccacagaaccacatgctcctggaacacaaaatggagcgcccagggcccagcctcaagcgagttggacccgtggctgccacctaccctatgttgaacaagaaaggaccggtacccgctgccaccaatggctgcaccggtgatgccaatgggcatctgcaagaggagcccccaatgcccaccacctgaggccccggtcacacagtttctcggctcttcctccccgctgccccccacgaccctaccttgaaggcccccacaaataaaggcgctgccactcagccctccttccacctggggttcttggggcctgtg

SEQ ID NO: 81186 - DNA, 642 bp, Homo Sapiens
gtccgccgccgctgcctgagtcgactctgcgccgcccgccgcgatggaggccgccgcccagttcttcgtcgagagcccggacgtggtctacggccccgaggccatcgaggcgcaatacgagtaccggacgacgcgcgtcagccgcgagggtggcgttctcaaggtgcaccccacgtccacgcgcttcaccttccggaccgcccggcaggtgccccggctcggggtcatgcttgtcggctggggcgggaacaacggctccacactcaccgccgcggtgctggccaatcgactgcgtttgtcctggcccacgcgcagcggccgcaaggaggccaactactacggctcgctgactcaggcgggcaccgtgagcctgggcctggacgccgagggccaggaggtgttcgtacccttcagcgcggtgctgcccatggtggcgcccaacgacctcgtgttcgatggtgggcggagccctgggaccggaggtgggcgcggcgatgggcagatggggtctgggaggggcccaggatccgggcagggccgacgtgtgacgggtcccacccagggctgggacatctcgtcgctgaacctggccgaggcgatgcggcgcgcgaaggtgctggactgggggctgcaggagcaact

SEQ ID NO: 81187 - DNA, 598 bp, Homo Sapiens
gcggccgcgttggccttggtcggtgagggtgaacgggatgaagcgtgggtcgtttcgctcaagctggccgaagacggcgcggatgtgcggcgcgtagctgtcgacgtcggggaccatgacgatgatgtcacgcgggcgcagtgtggggtcggcgctgaagcgttggagcaattggtcatggaggatttccacttcgcgttgggcgctgtgggcgacgtggaagcggatggagctgtcgtgatttagatcgacacccggccacagttcgcgggtttcattgagtgggcgcagttcgaggatgtcgtcctgcaattggttgagcaacgtggtgggttcgttgtcgctgaacaggtcgatgcggccatcacggaaggcggcgcggtagctgttggggtcgtcgtagctgtccagcaggctaatgtagtcgcggccctgtttgccccaagcggccagcaacgggtgcgcatgttggtgcaggatttgcgggtcgatggtgactggcatgccggctttgcgcgcctggcgtttgtactcgttacgcagcaggtctttgtcggcgacgatgtcggaccagtggtggcggcaagggcctcgtgcc

SEQ ID NO: 81188 - DNA, 932 bp, Homo Sapiens
  misc_feature (829)..(838): n is a, c, g, or t
gttcctggctgagcagctgccatatcagagtcacctccaccagaggagttcaacttacgaaaaatctcctgcttctttgatttaaccatgggtgatgtattttcaagcttggtgaagaatgaaggcaagtagcttatactccctggtgagcgggcatcattcctctgctctgcaggctctgcgcccctctgagacaagagcagcaagctgtcctgtttctcatgcacaaccggaacctggggtggggagatgggctcgtagggctccgaagagacgtgactcctctctggggattttccaggcctacttcccctggatttgtccacaagattttctggagagacccttgaacctggtctttgatgatggacagactgagcctgggattctgggctgtaacggtttgatgttttagtcctcacaggtgtagataccaaagcagaaggtgagttctggaatgtagaagtaggaggctgctggggagtctgcgaggaaacttgattactagcaaaatcttgtgtgataatttgacagatgtgatcagcaagtgtgatcagccgatgggtcctgggcacttgccccattccctctgcctgtgaagaagggggcagctgttgttggggagatggtgattcctgctgtggtcgatagtgatgtaatggtccttcatattgtctggtaggatcatctaggagagaacacatagatgtcttactccaggaatgtctgtgcttttcactcattatcaaagattaaatataattcagaagaacacctgaaaggatgtggtacatagctccaaacaaagaacttatcttaattttggagnnnnnnnnnnttattcactgaagaagtctgaggactagtggaacaaaatataaatgcagaagtaagcaaacaaaattaatataaacaattttctgtatcattaa

SEQ ID NO: 81189 - DNA, 634 bp, Homo Sapiens
gcggccgcggctgtaggcttttcctttttagaaatattactaagcactttccgtataaataaatgaaatacaggctaatctttaggtgtcttaggaatttttgctttttgaaaaagaaaagctaatagcctaactgcagaggaactgagtggatggggtagctgctgtatagatttttagatgagatgatacagtgtggattacactgtaccttgggcgggagagtttgttcttgatatggaattcatatgcttttgaattgcactaataactcagcattaacaagtatattactccttaaattatacatgcattttcaatattcctaaccaaatagtttatagcttattgagaagaagtctgttcttggagagatgttgaaattagatgtttattaaactttaaaatataatgccttaagctgtggcactttaaaaacatctttatatataaattgctaaaaggactgttaatgcttttctcagacacattggcattttacaattttgcacatggtttatttgaaatcaaaaaataactatactttgttttataagtctacctaatatctcatttttgattctcatcgttagcacagttttgttgcttttattaaactattttaactgaaaaa

SEQ ID NO: 81190 - DNA, 778 bp, Homo Sapiens
gcggccgcttgtggcgctctggtccccatgttgactctcggcgtgccaggttctggcaccaccgcagtgatgatcggcgccctgtcgctgtacaacatcacccccggcccgctgctgttccaacaacaaccggacatcgtctggggcctgatcgcttcgttgtttgtcgccaacatcatgctggtgatcctcaacatcccgatgatccgcatcttcacgcgcatcctcgccgtaccgaactgggcgctggtgccggtgatcgccatcatcaccgccatcggtgtgtacgcggttcacgccaccaccttcgacctgttcctgatggtcggcatcggcatcttcggttacatcctgcgcaagctggacttcccgctgtcgccggtactgctgggctttatcctcggtggcctgatggagcagaacctgcgccgcgcgctgtcgatctccaacggcgcgctggaaatcctctggtccagcccgatcacctttggcgtgtgggtactgacggcgatcatgttgttcgtgccgctgctgcgtatctggcgtaaacgtgcccaacagcgtcgcgccctggccgatgtctgaggtcacctttaaacaatggtgggcaacaccgctggtcggcctggccggcggttacctggccagcctcgtcggctggcctttgccgtatatggtcggctcgttgctggcgatcatcctggtgcgttgctcacgccgtggcagttggcggagatcccggcgggcgcaatgtggcaatgggtcgtaggatcggcat

SEQ ID NO: 81191 - DNA, 594 bp, Homo Sapiens
agaattcggcacgaggcgcctgggtggtgggcatctcaaacgagcgtgcggcgccgagcaggaacgcgaggataaagatcatctcgcgggtcacgttgccggtcaggccgccgatggccagggacaaggcaatcaatgcctgcacggtctggcagatggcggcgactttgcgccgctcatagcgatcggccacatgcccggtgtgcaacatgaacagcacccgtggtacgaactccacgaggccaaccaaacccaggtccagaacgttgccagtcagttgatagaggttccagccgatggccacggtaagcatctggaaaccgctggcggtaaagatccgggccagccagaacgcgatgaaagggcggtggtggcgcaacagcaatgcgggttcactgggcatcgggaagtcaggtctggagcagagggtgcaggcagattagcatcaagctgtaacaaatagttgcaagaactgagctgagacaacctgtcacgcgtcaatgaaccacacggctttcgtccgaaaatgggactactctttgagcaatgcttgatccagatcaaaaccggccccgggattgatctggcggccgc

SEQ ID NO: 81192 - DNA, 913 bp, Homo Sapiens
cgaagaagttcattgtatggtgggtaacagatatttataattaagacttagaaataagatacacttataaatatgacacaaagggtgatagaattatgcttacaatatcttgtgaacaccctggagtggcaatttcccagtctaggtctagcaagagtgatctggcaaggcttctgagatgaatttgtaacttaactgagttgtaaaatataaaaataagttaaaaagtagaagtatatgggagaaggatttcagatagaggaagctgcaggagaaaaggggaaggaaaaaagaacatgatattgtgatacacgacatttactgttttttctgtgaccttgattctctggcatctcgggccttgatcctggagagattgcccctcccagagctagctaattcctagagatagcaaatgaccctcctgcaagtacacttttcatatacacacaagccaaacaatgcagagcccatgctcctaaccatttcctttatcaaactctcttacacatcaacctaatattctcctgccctaaatcaccccaggaccaggtatcagacaactagggacagttcctatagcccagagtcctgcaaaattattcaagctatccaatcctaagcttacttagtgtacctaccctgcctttctcattccttttcaataaatagccaacaaggatttgggccatgctctttcgtctcacctcctgacctaccctggtcattccccacatggccctgcatggtgtgcagtgtctactgtttctagggatctgtgagtacggacttcttccttcatgacagtcatttttgtgtcagcatgtcttatatctgattaaaacaaaccctaagtacactttgagaacagacatcataagtaattcagggttaaaacaaaatgtgagcaaag

SEQ ID NO: 81193 - DNA, 411 bp, Homo Sapiens
gcggccgctccaacatcaggagatcgagaccatgttagccaggatggtctcgatctcctgatcttgtgatgtacaaatttagggagtacatatgcagttttgttatgtgtgtaggttttgtaatggtcaagttagggccgttagggtatttatcacctgaacagtgtacattgtacccattaagtaatttctcatcattcacctcccccttctgctccctcgctcttcttagtcttcactgtctgttgttcctctctctgtgtccatgtgtacacattttgtagcactcacttatgagtgagaacatggaatatttgactttctgtgccatgacttaaaaattgatccgttcatccacttatcttttcatctattctttgtttaatttattaattaaagaatgtgtactca

SEQ ID NO: 81194 - DNA, 1376 bp, Homo Sapiens
  misc_feature (52)..(52): n is a, c, g, or t
gcggccgcctggctccctgctgctgggccttgtgggtggggtctgcaccctngggagccggcctctatgcccgggcctcattcctcacattcctgctggtctctggctccctggcctctgtgctcatcagttttgtggctgtggggccgagggacatccgcttgactcctaggcctggccccaatggctcctccctgccgccccggtttggccacttcaccggcttcaacagcagtaccctgaaggacaacttgggcgctggctatgctgaggactacaccacgggagccgtgatgaattttgccagcgtctttgctgtcctctttaacggctgtacaggcatcatggctggggccaacatgtcaggggagctgaaggaccccagccgggcgatccctctgggcacgatcgtcgccgtcgcctacaccttcttcgtctatgtcctgcttttctttctctccagcttcacttgtgacaggaccctgctgcaggaagactatgggttcttccgcgccatcagcctgtggcccccactggtgttgatcggaatctatgccacagcgctctcagcgtccatgagctcgctcattggtgcctcccgcatcctccatgccctggcccgggatgacctctttggcgtgatcttggcaccggccaaggttgtgtcccgagggggaaacccctgggcagctgtactttattcttggggcctggtgcagctggtgctcctggctgggaagctgaacacactggccgctgtggtcactgtcttctaccctggtggcctatgctgccgtggacctgtcctgcctgagcctggagtgggcctcggcccccaacttccgccccaccttcagcctgttctcctggcacacctgcctgctgggggtggcctcctgcctgctcatgatgttcctcatcagtcctggcgcggctggtggctccctgctcctcatgggtctgctggctgccctgctcaccgcgcgaggaggccccagtagctggggctatgtcagccaggccttgcttttccaccaggtgcgtaagtatctgcttcggctggacgtccggaaggatcacgtgaagttctggcggccccagctgctgctcctggcggggaaacaccggggcgccctgcctctgctggggttgggcaaccagattattaaggggggcacgacagagcctgggcgaaacctcccagaggagacctagaaatccgcgactcctggaccctacacagccgaagatgggggtgggtggtccttgaagtggcgcgcattgatgcccaagaaaaaatggtcttcggtggaaaatagacccttaccacacctaccaaaggcccggggggcgcgattgttcccccgtaaatccct

SEQ ID NO: 81195 - DNA, 570 bp, Homo Sapiens
ccaaaattcatctctgactttaatggcttaagcaagaacatggtttccgtggctccccctggactgaatgctggaggatatatacttcacagtctgaggcctggtcccaggaactggcaatctaacaggatggcaagtggttttgaaacatatagattttcaggatggaagtttgattcttcagattgtgactcatccgtggaaaataaatggtttagcacctaaatctgtatattcccatcagtggcttggctgactcagttgtaaatagggtaccctccatctgtctcccacccatatgctccactgtccccaggccctcagtgcctgagccctagggggattcgagttggctgctggattcatttcctgcaagcaggcctgcaaggtgacctgtctctctaagatggagagctggagaactggcctgtaactgcaaacttaaactcccttggctctggggaatgtaaagggtgtgggaagggtgcacctgtggccaggtgaacctgggagtgagtccatacacaacacacacactcatagctcccttccctccagcacaaacacaca

SEQ ID NO: 81196 - DNA, 1091 bp, Homo Sapiens
  misc_feature (955)..(989): n is a, c, g, or t
  misc_feature (992)..(1031): n is a, c, g, or t
  misc_feature (1033)..(1033): n is a, c, g, or t
ccccatggtgccccacatgtgcccactgtccccagccctaagggcctgagcctaggggatttcaattgcgtctggattcattgccggcaagcagcctgccaggtgacccgtttctgtaagatggagagcttggagaacggcctgtactgccagaccttgaacttcccttggcttcttggggaacgtaaagggtttgggaaagtgtgcacctgtggcccaggtgaacctgggagtgagtccattacacgacacacacacttcatagctccctggccctccacgacacacaccacactactgatgactgacaacctaagaagggaaaaatgaatggggaatgggccacagggggctctggcctcagtccatgaggtgtgttccgtccgctatgccgaggatccagtgcacagagggtcagaacatgagttaggagggccggtccactccgaatcggagggtgaactcttcggcattctttctgaacagctccggattctgtgtcagcaggtcagcgaggtccatccgcaggggctccctgatattcggtctattcaccagcacattgagggcctccaggacttggcaagtcttggtgcaaggcttccagttctcactgctgatgatgggcaggcaaatctgtccgttctcgtccacgttggggtggtagatcttggttgtgaatttgatcatgggaggcttgaacggatactccggcgggaagctgatgcgcaggttgaaggctttcaggtggtagggaggttggtcgggtaggaggagagcgtgccacaccaggacattggcatcatcgctggacaggttccgcaggtatgggggaggcttcttctgaagatcctccagctccttcaccactcgcatgctcgccatcatgtcgggaccgagtgtccccggccgtaatggccgaattcccgggcatatgtccggtaccgtcgactgnnnnnnnnnnnnnnnnnnnnnnnnnnnnnnnnnnncgnnnnnnnnnnnnnnnnnnnnnnnnnnnnnnnnnnnnnnnnantacccgctagcgcccatagttgaggcgctcaaatttatacaagattttttcttccttt

SEQ ID NO: 81197 - DNA, 930 bp, Homo Sapiens
  misc_feature (25)..(25): n is a, c, g, or t
  misc_feature (84)..(118): n is a, c, g, or t
  misc_feature (820)..(820): n is a, c, g, or t
agactttgataactcactatagggnctagctcgcttgagccgaacgaccgagcgcagcgaagtagtgagcgaggaagcggccgnnnnnnnnnnnnnnnnnnnnnnnnnnnnnnnnnnncagtcgacggtaccggacatatgcccgggaattcggccattacggccgggggcgggtcggagctcggtcctgctggaggccacgggtgccacacactcggtcccgacatgatggcgagcatgcgagtggtgaaggagctggaggatcttcagaagaagcctcccccatacctgcggaacctgtccagcgatgatgccaatgtcctggtgtggcacgctctcctcctacccgaccaacctccctaccacctgaaagccttcaacctgcgcatcagcttcccgccggagtatccgttcaagcctcccatgatcaaattcacaaccaagatctaccaccccaacgtggacgagaacggacagatttgcctgcccatcatcagcagtgagaactggaagccttgcaccaagacttgccaagtcctggaggccctcaatgtgctggtgaatagaccgaatatcagggagcccctgcggatggacctcgctgacctgctgacacagaatccggagctgttcagaaagaatgccgaagagttcaccctccgattcggagtggaccggccctcctaactcatgttctgaccctctgtgcactggatcctcggcatagcggacggacacacctcatggactgaggccagagccccctgggggcccattcccccattcatttttccccttcttaggttgttaacccattaantttgtgtgtgtgcggtggtggaagggaaaggaacctattgaacgggggggtggttgggtaatgggaattcactccccagggttcccctgggcccccgggggtggcaccct

SEQ ID NO: 81198 - DNA, 966 bp, Homo Sapiens
  misc_feature (240)..(248): n is a, c, g, or t
  misc_feature (253)..(253): n is a, c, g, or t
gcctttgaccccttaggggggaatttcggagttgggctgcctcgaaatcaatttttccctgcaaaccatggcctgcccaagggtgaccctgtctctcttaaatgatggagagctgggagaacatggccctgtaacctgcaaaacttaaacctcccccctggctctggggaatgtaaagaggtgtgcgacagggtgccacctgtggccagtgtgatcctggggagtgagtccatacgcaannnnnnnnnatttnatagtgccttccttcccaccacacacgcacacaatttaatgactaccacacctaagaagggaaaaatgaatggggaatgggccacagggggctctggcctcagtccatgaggtgtgtccgtccgctatgccgaggatccagtgcacagagggtcagaacatgagttaggagggccggtccactccgaatcggagggtgaactcttcggcattctttctgaacagctccggattctgtgtcagcaggtcagcgaggtccatccgcaggggctccctgatattcggtctattcaccagcacattgagggcctccaggacttggcaagtcttggtgcaaggcttccagttctcactgctgatgatgggcaggcaaatctgtccgttctcgtccacgttggggtggtagatcttggttgtgaatttgatcatgggaggcttgaacggatactccggcgggaagctgatgcgcaggttgaaggctttcaggtggtagggaggttggtcgggtaggaggagagcgtgccacaccaggacattggcatcatcgctggacaggttccgcaggtatgggggaggcttcttctgaagatcctccagctccttcaccactcgcatgctcgccatcatgtcgggaccggacgcgtgggtcgacgatatcccgggaattccggaccgtaccagcctgcttttttgacacacttgtctatatcacca

SEQ ID NO: 81199 - DNA, 725 bp, Homo Sapiens
aaacacttctgcaaatggctgaagagaaaactattcgtgataaaaattataaggtctttcaaataaaattggagcggttagagaagctgtacaaggctcttcaaatagaaaggaatgaactcagtgagaaactgggaattctgaaagggcaggtctctgtgaaagtagcagatgtagatttagcagtgcctgtgacgcattcctgtgctgacctggattcttccaatatgctgaacacttcctctaaaagagccccaggagtccatctggaggctgaccccaaaggaatgaatgaagtaaaatgctactcaaaagccctctccacaggatctcctctaggcattgattaagattaagtgtgatcattgtactgatggatatattttgtgtacatgtttctcttttagttgtaactattgattttgtaatgaaaatttcctctcctttttctaccatatctctgtttttttagaactactcaactgtgtggtaacagaaagcttcttaccaatttccccaactatgttgcacatcagcctcattttccccctttattggaatgcatgttttcattgccttctcctttcaaagtgtacgtttgtgtgttcatcaccttaaattatcttaatttgagacttttttataatggtttcgtaatgtgaaatcaaatactaatttaaactctggagcccataatatctacataaaagaaaatataaactgac

SEQ ID NO: 81200 - DNA, 912 bp, Homo Sapiens
  misc_feature (197)..(197): n is a, c, g, or t
accagtccgccctccagcccaccgcccaaccttttacaaatggcattttcttaattgaaaatccgggaagcaggtgtgattacttttttgctcgtagatattgtcctaagttggaattctcccactgccctaaaactttccctagtagtcctttaaactcccccctccctttttggtagctgttttctccgtccgtnctctctccacctgccctcttatctaggagctgtttgtaagcacgatttttttaacaggttatattgtacaggatcaatattttgctttttaacaaggatatttatgtaataagaaactttgccttaggcaggtgttggccagaaaagtccagattcctctgggatcccaccctggcctctcctggaactctgaacctgctgtggaaggaattggccatgaccttcacctctggagagtagggtctatggcgagggaaaagggtgttcaccatgataacctagtgcctccatagaggggtttggaaaaattccagtccgatttctttgtgtgtcagctgacttccttagctgattgttcccacttgcacctctccacctttggcactagaactcctgagacaccacttctcatgcttctccctccctaccagcggtcaaggctttggagccactcttttgtaactccagattatttaaagagaaaagtacaagacagaaatcttctagcactttgtaaacacagtgaataacctcttggagtatttttggctttatataaaacaaggtttttaattgtaaagtataagtgccattagaaaatgcacagggcatatctttgttaaagtagatttttcaatgttttacagaattacattttcaaaaaaaggtttttataatgaagttgtttattaaaaacttctgaatgatgaaaaaa

SEQ ID NO: 81201 - DNA, 949 bp, Homo Sapiens
gcgccgctgaccatcagcacctgctccgcctcaaccgccaggcctcggctcaatagataccgtgccacggcagcgcgctcatgcaggcgaccggcatgcggctggtaacgcaacagcgcttccaggtcgcccgacagcgccaattggcgcagagcggtgcgcagcaggtctgcctgaccgggcagcgaggggtaattgaaattcaggtcaagcatgccggtggccacattcatctgcccactgccctgccccggcggcaacgcgatttcccgcacaaaggtgccgcgcccggtttcgccgctgaccaggcccatggcttcaagctcggtgtacacccggctcgcggtgaccaacgccaggccatgttcagccgccaattgccggtgcgtgggcaggcgtgtgccgggcgccagtgcgccgctgcggatgtcttgggcaaaggtgtcgaccagcgacttgtagcgggcgcgcggcataggcgatgtatccatgacaattttttgattgtcttaatcctggcccctaggatggtgtttacgcaaccacctagttcgagccctcaccatggaacgcaccgcaagcctcactgcaccggataccagcgcccaaggctggatcaacggctttatcggcgtcgtcatcttcagcggctccttgccagccacgcgcctggcggtgatggagttcaacccggtgtttctgaccatgatccgcgccgccattgccgccgtgctcggcgtgctgttgttgtggttgttcagggaaaaacgccctgcacgccaccaatgggggccgctggtgatcgtcgccctgggtgtggtgatcggttttccactgctcacggcactggcgctgcaatacgtgacctcggcgcactccatcgtgttcattggcctgctgccgctggccactgcagtgtttggtgtactgcgtggcggcgagcggccgc

SEQ ID NO: 81202 - DNA, 1204 bp, Homo Sapiens
gcggccggcggagcggagtcgagccgagctgatttgatcgaggagcgcggttaccggacgggctgggtctatggtcgctccgcgggccgctccgccggctggtgcttttttatcagggcaagctgtgttccatggcagggaacttttggcagagctcccactatttgcaatggattttggataaacaagatctgttgaaggagcgccaaaaggatttaaagtttctctcagaggaagaatattggaagttacaaatattttttacaaatgttatccaagcattaggtgaacatcttaaattaagacaacaagttattgccactgctacggtatatttcaagagattctatgccaggtattctctgaaaagtatagatcctgtattaatggctcctacatgtgtgtttttggcatccaaagtagaggaatttggagtagtttcaaatacaagattgattgctgctgctacttctgtattaaaaactagattttcatatgcctttccaaaggaatttccttataggatgaatcatatattagaatgtgaattctatctgttagaactaatggattgttgcttgatagtgtatcatccttatagacctttgctccagtatgtgcaggacatgggccaagaagacatgttgcttccccttgcatggaggatagtgaatgatacctacagaacggatctttgcctactgtatcctcctttcatgatagctttagcttgcctacatgtagcctgtgttgtacaggcagaaagatgccaggcaagggtttgcctgagctttcctgtggatatggaaaagatttttggaaataatcagggttattttaaaaactatatggagcagtggaaagaatttccatggagagaaaaggagatgggcaacccattccttataaagatggccaaaaatcaaaaccacccttccaaacaggtgaagggaaagccaggggtcctaattggaaaatccaaaactcctaggctacagcccaatctttaaaaacatttccgaaaaaattcccttaagtgggaaccccctttggaaaattaaaacccttgggcaaccgaattttcagcgaaatgttcctttccgtgggaaaccccaaatattaaaaatggaattaccctgtggttttctggtccaacattattttggaaaaaggggatttttatctttttccccaaaataagatt

SEQ ID NO: 81203 - DNA, 1877 bp, Homo Sapiens
ggctagtacgagggcctgggtggtgaatttggcacgagggggcagagctggtgactacggggtcgcctttgctcacgtctctctggcccactcatgatggagaagtgtggtcagaggggagcaatgggctttgctgcttatgagcacagaggaattcagtccccaggcagccctgcctctgactccaagagggtgaagtccacagaagtgagctcctgccttagggcctcatttgctcttcatccaggaactgagcacagggggcctccaggagaccctagatgtgctcgtactccctcggcctgggatttcagagctggaaatatagaaaatatctagcccaaagccttcattttaacagatggggaaagtgagcccccaagatgggaaagaaccacacagctaagggagggcctggggagccccaccctagcccttgctgccacaccacattgcctcaacaaccggccccagagtgcccaggcactcctgaggtagcttctggaaatggggacaagtcccctcgaaggaaaggaaatgactagagtagaatgacagctagcagatctcttccctcctgctcccagcgcacacaaacccgcctccccttggtgttggcggtccctgtggccttcactttgttcactacctgtcagcccagcctgggtgcacagtagctgcaactccccattggtgctacctggctctcctgtctctgcagctctacaggtgaggcccagcagagggagtagggctcgccatgtttctggtgagccaatttggctgatcttgggtgtctgaacagctattgggtccaccccagtccctttcagctgctgcttaatgccctgctctctccctggcccaccttatagagagcccaaagagctcctgtaagagggagaactctatctgtggtttataatcttgcacgaggcaccagagtctccctgggtcttgtgatgaactacatttatcccctttcctgccccaaacacaaactctttccttcaaagagggcctgcctggctccctccaaccaactgcacccatgagactcggtccaagagtccattccccaggtgggagccaactgtcagggaggtctttcccaccaaacatctttcagctgctgggaggtgaccatagggctctgcttttaaagatatggctgcttcaaaggccagagtcacaggaaggacttcttccagggagattagtggtgatggagaggagagttaaaatgacctcatgtccttcttgtccacgggttttgttgagttttcactcttctaatgcaagggtctcacactgtgaaccacttaggatgtgatcactttcaggtggccaggaatgttgaatgtctttggctcagttcatttaaaaaagatatctatttgaaagttctcagagttgtacatatgtttcacagtacaggatctgtacataaaagtttctttcctaaaccattcaccaagagccaatatctaggcattttcttggtagcacaaattttcttattgcttagaaaattgtcctccttgttatttctgtttgtaagacttaagtgagttaggtctttaaggaaagcaacgctcctctgaaatgcttgtcttttttctgttgccgaaatagctggtcctttttcgggagttagatgtatagagtgtttgtatgtaaacatttcttgtaggcatcaccatgaacaaagatatattttctatttatttattatatgtgcacttcaagaagtcactgtcagagaaataaagaattgtcttaaatgtcatgattggagatgtcctttgcattgcttggaaggggtgtacctagagccaaggaaattggctctggtttggaaaaattttcctcgtgcc

SEQ ID NO: 81204 - DNA, 462 bp, Homo Sapiens
ggacaagaactgtcactaacctcatggaggggtttgcgtaaaaccatttagcccaccttgagcaaagggtagattccgtgttgtttttttaagctcactgtaataaaataaatctaattcagcattattgtgctacctcaaaggtaaaaaatgttttaaggtcttcttttggtcctgagttctatatacagtgtttgaaatgtctttcatttggaattattttttaaattcttggagtgaattttattttaatctgttttaatcttgtattttaatctcagaagaataagtgattgaaacgtgatcaattcttgctctgtggtgttaaacatataatgaacagtcattaagaattaagtcactgtttgccataaacaaggttgatgttctttttgttgttgttaaggaaaccctagggctcggctttactcttgattaataaaggctgacaaatcatgtctg

SEQ ID NO: 81205 - DNA, 1112 bp, Homo Sapiens
  misc_feature (416)..(447): n is a, c, g, or t
  misc_feature (1019)..(1070): n is a, c, g, or t
gcggccactcccacttcacgtgcgccacagacaccgagaatatccgctttgtctttgctgccgtcaaggacaccatcctccagttgaacctgaaggagtacaatctggtataattgtgcctcctagacacccgccctgcccttccctggtgggctattgaagatacacaagagggactgtatttctgtggaaaacaatttgcataatactaatttattgccgtcctggactctgtgtgagcgtgtccacagagtttgtagtaaatattatgattttatttaaactattcagaggaaaaacagaggatgctgaagtacagtcccagcacatttcctctctatcttttttttaggcaaaaccttgtgactcagtgtattttaaattctcagtcatgcactcacaaagataagacttgnnnnnnnnnnnnnnnnnnnnnnnnnnnnnnnnatggagcaaaacaaacctgatttccctgtggtcttcccccgctaattcatacctccctcctgatgtttttcccaggttacaatgccctttatcctagttccattcttggtcaagtttttctctcaaatgatacagtcaggacacatcgttcgatttaagccatcatcagcttaatttaagtttgtagtttttgctgaaggattatatgtattaatacttacggttttaaatgtgttgctttggatacacacatagtttcttttttaatagaatatactgtcttgtctcactttggactgggacagtggatgcccatctaaaagttaagtgtcatttcttttagatgtttaccttcagccatagcttgattgctcagagaaatatgcagaaggcaggatcaaagacacacaggagtcctttcttttgaaatgccacgtgccattgtctttcctcccttctttgcttctttttcttaccctctctttcaattgcagatgccaaaaaagatgccaacagacactacattaccctaatggctgctacccagaacctttttataggttgttcttaannnnnnnnnnnnnnnnnnnnnnnnnnnnnnnnnnnnnnnnnnnnnnnnnnnngccagatttactacaaccggggatactctagaacgccatcac

SEQ ID NO: 81206 - DNA, 582 bp, Homo Sapiens
  misc_feature (159)..(178): n is a, c, g, or t
ggaaggggtgccggggggtaggggaggctccagagggaggagagctgtgaaatcaactcgctcagtcatccagtcagagaagccatcacctgccaggggctctccccccactggaagcccgccctccagggctcccccaaggacctcatagggagccannnnnnnnnnnnnnnnnnnnagtttcccatagtctacgagccatcccagcccactagctgggagcagggccctgtccagctccagccccagggtcgccaggagtgacatggctgtagcacaggtgctgggcactgatggcaacaggagaggctgcaccagcagctggcacgaggctctggaggatgctcaggtgggcgaagacaggcaccaaggcgaaagtggaagactccatggctgcagcaaggagaggcggcggcggcctcggctgaagaaagaaggtgggagcggagagcgcaggcgtggtgagcgcggagacgggccgggggcacaaaggggtcgaggctacagagccatggccggggctacgcaggcagaggcggcgacactgtagtgagaagagactgtgatccgaggacagggaat

SEQ ID NO: 81207 - DNA, 452 bp, Homo Sapiens
  misc_feature (140)..(206): n is a, c, g, or t
caggcgtgaaacccaccttgtcccatccacatcaggacatcccagctggagttcaaccttcatcccttctgtggcagttaggagactgaatcaaggtccagagaaggtggaggaatcctgatactgagcgggcctccctnnnnnnnnnnnnnnnnnnnnnnnnnnnnnnnnnnnnnnnnnnnnnnnnnnnnnnnnnnnnnnnnnnnttccaaagcgcatcactccagtctgctcgtgtcaccacaagctttcttcccttctccagtcagtcaaatccgtcttctaaggatactgctgatcatctttagcgctcacgcctgtagtcctggcactttgagaggacaaagagggaggatcgcttgagcccaggagttgaagaccagggcaacagagtgagatcccatttccaccaaaaataaaaaagattatccacgcctggtggcatgaaaaaa

SEQ ID NO: 81208 - DNA, 1788 bp, Homo Sapiens
tgaaacgggcagtactctaacggtttaaggtagcgaggcctgggtggcgaattcggcacgaggggagaagaggtaagcggttactcactccatggctgcagcaaggagaggcggcggcggcctcggctgaagaaagaaggtgggagcggagagcgcaggcgtgaaatcttcccaaggctgcagacaccgacggatttgctttgggagccagagtagctgccgccaccagagtccggagccatgagcgggtttaattttggaggcactggggcccctacaggcgggttcacgtttggcactgcaaagacggcaacaaccacacctgctacagggttttctttctccacctctggcactggagggtttaattttggggctcccttccaaccagccacaagtaccccttccaccggcctgttctcacttgccacccagactccggccacacagacgacaggcttcacttttggaacagcgactcttgcttcggggggaactggattttctttggggatcggtgcttcaaagctcaacttgagcaacacagctgccaccccagccatggcaaaccccagcggctttgggctgggcagcagcaacctcactaatgccatatcgagcaccgtcacctccagccagggcacagcacccaccggctttgtgtttggcccctccaccacctctgtggctccagctaccacatctggaggcttctcattcactggtggaagcacggcccaaccctccggtttcaacattggctcagcagggaattcagcccagcccacggcacctgccacgttgcccttcactccggccacgccagcagccaccacagcaggtgccacacagccagctgctcccacacccacagccaccatcaccagtactgggcccagcctctttgcgtcaatagcaactgctccaacctcatctgccaccactggactctccctctgtacccctgtgaccacagcgggcgcccccactgctgggacacagggcttcagcttaaaggcacctggagcagcttccggcacctccacaacaacatccaccgctgccacctgccaccgccaccaccaccatgcatgcagcatgcaccacctggctttgccttgaatttaaaaccactgtgctgccatgccgggatccccatgcaatacatgcatgctgcctgatgcacctgctccatccttgtgcccttggacgcatgctgcatgggtgctggctgccagctccgccatgacctacgctgcagctggagagcctgatcaacaaatggagcctggagctagaggaccaggagcggcacttcctccagcaggccacccaggtcaacgcctgtggaccgcacgctgatcgagaatggacgacaaagatcaccagcctgcaccgcgaggtggacaaggtgaagctggaccagaagaggctggaccaggagctcgacttcatcctgtcccagcagaaggagctggaagacctgctgagcccactggaggagttggtcaaggagcagagcgggaccatctacctgcagcacgcggatgaggagcgtgagaaaacctacaagctggctgagaacatcgacgcacaggtcaaggcgcatggccccaggatcctcaaggacatcatcggaagcaccttgaaccacgtccggggccccccgccgacaccagtgaccactgcagcagatctggaagatcctcaatgcgcacattggactccctgcagtggattcgaccagaactcgggcctggtgccacagcgacgtggaggacgtgacca

SEQ ID NO: 81209 - DNA, 1885 bp, Homo Sapiens
  misc_feature (261)..(311): n is a, c, g, or t
  misc_feature (1427)..(1689): n is a, c, g, or t
ggcctgggtggcgaattcggcacgaggcgccagcagccaccacagcaggtgccacacagccagctgctcccacacccacagccaccatcaccagcactgggcccagcctctttgcgtcaatagcaactgctccaacctcatctgccaccactggactctccctctgtacccctgtgaccacagcgggcgcccccactgctgggacacagggcttcagcttaaaggcacctggagcagcttccggcacctccacaacaacannnnnnnnnnnnnnnnnnnnnnnnnnnnnnnnnnnnnnnnnnnnnnnnnnnggctttgccttgaatttaaaaccactggcgccagccgggatccccagcaatacagcagctgccgtgaccgctccacctggccctggcgcagctgcaggggcggctgccagctccgccatgacctacgcgcagctggagagcctgatcaacaaatggagcctggagctagaggaccaggagcggcacttcctccagcaggccacccaggtcaacgcctgggaccgcacgctgatcgagaatggagaaaagatcaccagcctgcaccgcgaggtggagaaggtgaagctggaccagaagaggctggaccaggagctcgacttcatcctgtcccagcagaaggagctggaagacctgctgagcccactggaggagttggtcaaggagcagagcgggaccatctacctgcagcacgcggatgaggagcgtgagaaaacctacaagctggctgagaacatcgacgcacagctcaagcgcatggcccaggatctcaaggacatcatcgagcacctgaacacgtccggggcccccgccgacaccagtgacccactgcagcagatctgcaagatcctcaatgcgcacatggactcactgcagtggatcgaccagaaactcggccctgctgcagaggaaggtggaggaggtgaccaaggtgtgcgagggccggcgcaaggagcaggagcgcacgttccggatcacctttgactgagcgacacaagccctggggcccgcaagtccctaagggaagttcatgaggggaatgcgccctgttgtctgtagtttggggttgtggcaagatacttgtttgtttgtttctttctttcacatgactgcccttgacatgatcgctgtgtgctttgcgtttttccatttaggagggtattctgggccttctgcccaggcagcagcctcatgggtgtggcttctgtggctttcatttgagtatctttggccccttttcacctactgcgaccacccacctcatcctggctcagcctggtgatggagaagtgctgatggtcttggtcccagccagggtcgtgggggcagccactctctccaaagcatagtcataggtgtcatgaaaaaataccaaatgtaagagaacctccaagtcannnnnnnnnnnnnnnnnnnnnnnnnnnnnnnnnnnnnnnnnnnnnnnnnnnnnnnnnnnnnnnnnnnnnnnnnnnnnnnnnnnnnnnnnnnnnnnnnnnnnnnnnnnnnnnnnnnnnnnnnnnnnnnnnnnnnnnnnnnnnnnnnnnnnnnnnnnnnnnnnnnnnnnnnnnnnnnnnnnnnnnnnnnnnnnnnnnnnnnnnnnnnnnnnnnnnnnnnnnnnnnnnnnnnnnnnnnnnnnnnnnnnnnnnnnnnnnnnnnnnnntactctgtccccggaatcacttataaaagaaaaatgaaaaaacctggcgggaccccctcggcccctcaaaaagctttctaaaccatttcatttgagggacccggaccccttaaggtaaggggaacttgggtcataacattatttcccaaagaaaatcccggaacctgaacttaacgccttgggattcctccacaat

SEQ ID NO: 81210 - DNA, 1025 bp, Homo Sapiens
  misc_feature (427)..(446): n is a, c, g, or t
  misc_feature (578)..(623): n is a, c, g, or t
  misc_feature (748)..(800): n is a, c, g, or t
aaggtagcgaggcctgggtggcgaatccggcacgaggatcacagtctcttctcactacagtgtcgccgcctctgcctgcgtagccccggccatggctctgtagcctcgacccctttgtgcccccggcccgtctccgcgctcaccacgcctgcgctctccgctcccaccttctttcttcagccgaggccgccgccgcctctccttgctgcagccatggagtcttccactttcgccttggtgcctgtcttcgcccacctgagcatcctccagagcctcgtgccagctgctggtgcagcctctcctgttgccatcagtgcccagcacctgtgctacagccatgtcactcctggcgaccctggggctggagctggacagggccctgctcccagctagtgggctgggatggctcgtagactatgggaaactnnnnnnnnnnnnnnnnnnnntggctccctatgaggtccttgggggagccctggagggcgggcttccagtggggggagagcccctggcaggtgatggcttctctgactggatgactgagcgagttgatttcacagctctcctccctctggagnnnnnnnnnnnnnnnnnnnnnnnnnnnnnnnnnnnnnnnnnnnnnntgacctggaagctatggcctccctcctcaagaaggagctggaacagatggaagacttcttcctagatgccccgctcctccaccaccctccccgccgccactaccaccaccaccactatcaccagnnnnnnnnnnnnnnnnnnnnnnnnnnnnnnnnnnnnnnnnnnnnnnnnnnnnnctggtcttgggaaacttctgggacttgcctgggccatctaactgcccgccacagaagccccgggccaagaaagaaagtgggggaatggcccgccctctgccccccgaccacaaggaaaccccccctccctctctttctttccacccttcaaaacacttttttccgccctcgggccccccctaaccccgcacatctccgggtgcaaccccaccccccgaggggggc

SEQ ID NO: 81211 - DNA, 446 bp, Homo Sapiens
ggacgaggtggatgtccgtcttttctctgttgcagaaacccaccttgtcccatccacatcaggacatcccagctggagttcaaccttcatcccttctgtggcagttaggagactgaatcaaggtccagagaaggtggaggaatcctgatactgagcggtacacacaagcttctttctccttccttacctgttgcgggcaggaagtccttcttgggatctgaccaccttcccttagagcacttactgtccactctgccagtttttgagcacttgccctatattttcttgggcctataggggctgtgttatcactgaggcagtatacagagtagcagctaagagcatagactgagcttgtcccacccgtgggcctgcatgcggcctagaacagctttgaatgcagcctaacacaaattggtaaaccttaccaaaacatccgaagcagt

SEQ ID NO: 81212 - DNA, 1041 bp, Homo Sapiens
  misc_feature (144)..(196): n is a, c, g, or t
catggaatgcagatctttagtactggcatgattttaaaattcaaacataagctgtttttccacgttctttaaccacaaataaggctgctggtctggggtcaggataccatggagtcaggaggactcctgggtgactagtgccannnnnnnnnnnnnnnnnnnnnnnnnnnnnnnnnnnnnnnnnnnnnnnnnnnnncgttttctttccagtcctaattaaggaccaggttgcttcccatgggtcacttccgacttgaacatttttgcaacttcagaaagttatagttcattcattcttcaagatttctgagaatttaagttcatctgaaactgctcattggtaagtttcctttttttgtccttccatcaattggcaatgcaatacagaaaaacaattctacccaggagtaaaaccacaatgattcatgtcatgtcaaacccaaatgcaatggggaggggagggaatagggatatttactcattcttggaataagaaggagtttgaactcaaaactgcattattcacggtaacatcattcatcgtgacaagctgctgtgtttttcatgaggttgtaagatgtaattgctcaggcattcagatggtattagaacgagggagtgtcatcctatcaataaaaacagaacaaactctgtctttggggaggccaagagtggggcttaagggaagggcacagcgagggagacagaggctggggcaacaagcactggggcggggggtggggtgggtgctgcagttccccacgcctagcccgcccttcctacaagcctgccctggactcaccatcagctgaaatgaagcaggaagtggagcaggggatctgtgggccccacaagctcagaggaaggagggcagcagggactttcagtgcgtggctataggaaatttaccaagtggaacaggagactccaaagagttcatgtgcttttccgaagaagtgtccaaaggcacttaggccaaaaatagatgaatagatgagtgagtgagtgtacgtgtgtgtacgtgtgtcagttctggtaatc

SEQ ID NO: 81213 - DNA, 1205 bp, Homo Sapiens
  misc_feature (654)..(654): n is a, c, g, or t
tcaagtttttattttttgttagcatttaaaaaatgcatttaaaaatctttatatccaaaaaagaagtacaaccatggataaaatggcacaatatctgggactggttgcagaagaatccagagggaagtcagcaggttgaagaataggaaacaagattggccatgagttgatcactgaggaggttgagggatgggcacactgggatccattagaggatcttctctacttttttagaatatcatccaaattcatgacttcttggttcagatcctgaaactctttatactgctctttatgtggttctaatgcaagtaaaagcccattaaaagcatcctctaagcttccatctagaaaggatctgcagccttcagattctccaccaacagaaccctcagagagcagcctgtctgtggccattggcacctctgcagatgtgagcctcttgaccagctgctttgtgatgtttccttccgaagtgtccagttccacaggcttgagctcagaggcctcctcagactcttgcagaagtgcttctgcaacatcattctcaaggaacaggtgctcagccccagcacctgaggactgtcggcggcaaagcctcagatgggggccgagccaggttttctgggctcctctgggtcttcctccttcagngtgtgactttggctcttggcctcctcccagggagttcctggaagatgctgagctggtgtcatccataccctcattctgggaggccaagctgctgaggttaaactccgcaggggtgatggtaatttctggatttgttgagttggaaggggagcctgttgagtgggaggtgagggcgcagtccccgttgggcaggtcactgaagctgagcgacagtggcattttctcctcggctgcctttccattttcaaagatgtcatcaggtagatttgaaaagaaggagtggtctttgaaggtgggcgtttccggggtaccctggctgtacatggacattctcctctgaagggctgctgccttgttcccagcgcctgaggatgcggtcatgtcctccacgtcaaatggataccaggtgatttccaggttcagtttgatggtaccaaggtcattgatgtcgacagccactacctgaggtcgggctgcaaacagctctttggtctcacaggtcacgctacctaccaggatgtgagttgctagccctttgagctccgtgaccc

SEQ ID NO: 81214 - DNA, 1143 bp, Homo Sapiens
cctggcgctggcgcagcaaatccgccgcccggcgggtggtttcatgcagtggcggcaacaactcggtgttggggttgacgaagttgaacgccgaggtgaggtcgccgcatacggcgcggcgccaggcgctgatattgggctcgcgcacctggaagcgcttctccagaaattgcagcaccgaggtgtgatcgaacgcctgggagttgacccaaccgccgcggctccagggcgacagcaccagcatcggcacccgtgggccaggtccgtaaacaccaccgtcaggcgcaggctgttgcgtggtgccgggcggcgccgggtgcgtgaagatttcgctgtcgaacttgaccgtggatttaccggcaaagttgccatcggcacgcttggacggggctgacggtgaagggacgtggtcgaagaaaccgtcgttttcatcgtagttgaccagcaatacagtcttgctccacacctgcgggttttcagtcagcgacttgagaatctcctgggtgaaccagccaccctgcaccgggctggaaggcccaggatgttcggagtaattggccggggcgaccagccagctcacctgaggcaagcggccgttttttatgtcatcgcgaaagccctggatgatcgcttccaggtcactgccgtttgccgatggcagtgtgttgccgttgcctttgtacaacggcacacgggcgttgagttgatcgctgtagggcacaaaggccttgaagtctttcggtggttccgccgggttgccggccgcaacgctggcggcgcggtactggcgaaaaccagccagcgggttgtcgccaaagttatccggcaagaactggtagaccttccaactcacgcccgcctcttccaggcgctcagggtaggttttccaggtgtaacccacgctcactgcgccagggccgtcccattcattgaccaccgcagccacattggcgccggtcgggccgttggtgccggtccaatggaacagccggttcgggttggtgccggcgtgcaccgaacagtggtaggcatcgcacagggtaaaggtgttggccaacgcaaactggaacggcaattcctgctcgcggtaatagcccattgacgtgttggtcttgtaggttggccaggcattcatgcggccgc

SEQ ID NO: 81215 - DNA, 525 bp, Homo Sapiens
gcggccgccaaaggtggtctcgccgctgatgctggcgttgaccacacgcactgcctgcttttctccggccaggcgctgctccagcagggccacccagccgctgccgcgcgccagaccgtactcggcgctcagcgagtcaccgagcaccagcaccgtgcgaggcggggccgcctgagataaccccagaaaaccggccagcaggaaggccacgatacagtagcgacgcaagaaagaaaaacccatgtccgaacccatcatttccgtggagcatgtgctcaagtccgtcaccgactcgaccggcacgctcgacattttgcgcgatatccacttcagcgtcccgccgcaccagaccctggccatcgtgggcgcctcgggttcaggcaagagcaccctgctgtccatcatggctggcttggacacgcccagcagcggcaccgtgcgcctggacgggcaggacatgttcgcgctggacgaagacgcccgcgccgccctgcgcgcgcagaagctgggttttgtcctcgtgcc

SEQ ID NO: 81216 - DNA, 854 bp, Homo Sapiens
ccaaggcatcgtccgacggcggtgctccgggagcggcagcgaacgccgcagcgccggcctgacacctgctgcacttcaacccacgaccggaggcgctgcctccggttttcatttgtgacgaccatgaacacgaccttgcactgcggcccttaccgcctctcgctcgatcgcccgctcgtgatgggcatcatcaacgccacgcccgactccttttccggtgacggcatcgccttcgacgtcggccgggcggtcgcccaggccgagaaattcatcgctgacggcgccgacatgctcgacatcggcggcgaatcgacgcgtcccggctccgatccggtgccggcagacgaggaaatccgccgagtcgtgccggtgatcgaggcgctgtcgggcctcggcgtgccgctgtccatcgacacctggaagccggaggtgatgcgcgcggcgctggcggccggcgccacgctggtgaacgacatcaacggcctgcgcgctcccggtgcggtggaggcggtggcggccaccgatgcgggcgtctgcatcatgcacatgcagggcacgccgcagaccatgcaaaacgatccccgatatgccgatgtgtgcgcggaagtgactgatttccttctgcaacaggcccgcgccgcggaagatgccggcatcgcgcgcgaacgcatcatgctcgaccctgggttcggcttcggaaaaacctccgaacacaacctgaccttgctcaagggactgcgtgcgttggccgattatggttatccattgctcgtcggactgtcgcgcaagtcggtgctgggacggctgaccgggcgaccggtgaccgatcgggtggcggccagcgtggcggccgc

SEQ ID NO: 81217 - DNA, 554 bp, Homo Sapiens
gcggccgcggatcctgcgaattccgcagtaggtcagacgcgccgagaaacgctgtcttttgccggcaacataactattttccgatacagaagccgctgaacagccggtcgagcacatcctcgaccccaacatggccggcgacctcgcccagcgcccggacggcgagccgcagatcctccgctgccagctccggcagaccgcctgcgcccgtgaggaggcggtcgagatgggtgacgcaggcttcgagcgcggccctgtgccgggcgcgggtgatcagcgcgtcgccggtgccgaggccggattcggccgcggcttggatggcatcgagcaacgtcgcaagcccttcgccccgtgcgggccgagacggctaaaaagtcgatgccctgcgcaacttctgagccggcaaaaagatcggccttcgtgtggaccctcaggattggattgcgggtcggccccagctcggggaccgtcccgtcggggggcaccagcgcgattaccagatcggccgtgtcgatccgcgcccgggtccgcgcgatgccctccgccctcgtgcc

SEQ ID NO: 81218 - DNA, 1687 bp, Homo Sapiens
gcggccgccattcaccagatgatccagcagcaggactgagggtaccggggcaagcaccagcccatgccattaccctcacagagccccgggtatgcttgaccattgagggccaggaggttaactgtttcctggacactcgtgcggccttctgtcttactctcctgtcccagacaactgtcctccagatctgtcgctatccgaggggtcctaggacgggcagtcacttgatacttctcccagccactaagttgtgactggggaactttacgcttttcacatgcctttctaattatgcccaaaagccccactcctttgttagggagagacatcctagcaaaagcaggggccattatacactagaattagaaggaaaaaggttaaatatacagactctaagcatgcttacctagtcctccaagcccacgcagcaatatggggagaaagggaattcctaacttccgagggaacacctatcaaacatcaggaagccattaggccccccaaattctcttcacctctgaatctacatcctccgatccctgcctaaagataattttatggggaagaggatttgcttgtgtctccccaggtgacaatcaggtgtctgtgtgggtgcccaccaaccatctgaagatctatcacgagccatggcatctagtggacccacctgcagagtacagtgcgaattgaaggtttgaaaagcctcgatttgctttctctatgccttctgttaatcagaaaaggcctgtttctcactatcagtggcccggctacagccacaaaagtttttgcttctgtttcagtagatttattaacatgggggtgagggtatgcttgtgtttttgcaggagatgaacgaaaccgtgtggatgccctcaagatgtgcacgaccatggaatgggagactggagggacccatggatcccaaccttggaccgggttcccccagtatgagccataagccagttgaatctgaatgcgaagaaggaatgaggaccgaccggagtcacgatgcctaacagaccaatgctttctgactcagctcctctctaccctgaatatgagagaccctaatagttaggcaggaatatcatcgcccctattcagcatgaagaagttacagaagacagaccttcatccttctgcagcccctaggattaagggtcctcttgtagaagggaaaggggagatatgtgggaagcattcaaaccagagtgactccagtttgaataagggctaagaaaagagaagctgggtcacctaccggcaattaagggctgcacagcctgcaatcgcctagctaatgatagctaagtaataatgatagtaataatgataccttctcttttataaaaaagagggggcatgttgggaaaaaagctgagtgttgggggggaaaccgaggcagggcttgcataatgtcctctggaatgtgtctagacttgctggctccttgcttctagccttcctaggctcctaggtccctattcccagtatctcaagtagcagaacatgttccatgtaaatgctaaaccatcacagttgtagatcatgcgcctgcccttttgacctccacgttatcaccacctgtttctttgttggattaccaataaacactgtgggctcccagagctcggggccttcacagcctccacgatggccccctggtgtcccacctttctctctc

SEQ ID NO: 81219 - DNA, 987 bp, Homo Sapiens
gctcttcagagattcaggactcaggagaagacttcgtagtgagagttgacgtagaagttgacagcccaaaccccacaccagttcttagaagtattgatctccaagaaagagcagaaagagctacaactcctgctcccagggacttacaggtcccagaatgagaaagtccctctttagtggatctagagaatctattcgttaaacctggagaagaacatgaggttatagtttctttttctccaagggatcccaaagtttgggaggaaaggatctaaaaaatgtttgtgcagccatttggacctcagtatgaagtggtgttaaaaggtgaagtccattcttcaggaagtaaacctctgccacgtggatcatgctcagacatcctattgaagtttgtccaacaatttcttgctttggaaggtgtctctcttggtggaacacagtttcaccttttgctggaactcagagctacaaatgatgcttaatgtaccaatgccttctgactgaactcctctctgccctgaatacaagagaccctaatagttatgtggaaatatcatcgccccgttcagcatgaagaagttacaaaagatggaccttcatccttctgcaacccttaggattaagggtcctcttgtaaaagggaggggaaatatgtaagaagcattcaaaccagagcgactccattttgaacaagggctaagaaaaatgaagctgggtcctgttgggctgcatgcccaggaggttaagcattcttagcctcaagatgtttacaattgagggaacagattaataatgtttcctaaacagactcaggacttaacagactcaggaacgtcttgatactttgagaacaaaagcacttctagttttaaatacgcattgtacctaggctggatgcttttcttacttttggaaatgccctaccctgtctatggagtcactattcattccctcctttattaaagttgcttctattttgcaaaaaaa

SEQ ID NO: 81220 - DNA, 706 bp, Homo Sapiens
gcggccgcggctgtatgttttatatttggaagagacaatgttgcttgaaagacttactcataagtgttatagacattatatgcataaaaactatagctctcctccaataaatcttatgttatccccattattttattctaaagaagaatgtagatcaccggcacaacataataagaagtatggaatttttttacccagggaactatgtgaataaaacgttagatgttttcaagttaatttgacagggttgtcattccaggatattgctgaatgcagctgggaaaggttctttggcaaagactaatcagtacaagctccagcaagttgtggaaatatattaatcacagaatccttttatgaacagttataatgtttgttaaccttgttctagctaatacaaagaattttttctgagacacacttggtatattcagcagattctctttgatagcttgataagctgcacctagcattgagtaaagcagtggtgtgtgttgctaatacatttcagtgatgtccccccggattcgaagctgtgccagcaggatcctttgtcttttcctgatacctcttgttcaaggtgtattgatgtaaagggagaaccattattttagtttaaaatattaaacaaaataatttttatttctatttcaatactgatggatcacccactgccacaaaaataaataaatgagcttaagtcatc

SEQ ID NO: 81221 - DNA, 566 bp, Homo Sapiens
ggcacgaggggacccctgtggcacccgttgaaagaaccgtccggcggttttcagcacaacgttcggctaccgaaccccgcactcatgcccatggctcgtcatgaggccgcccagtctttctctagcgtggcacgactggaatagtgacgacagtaaacctactctcgtcgtcattttagaggtgcccatccctctacagtagggtggctgagcatggatcggtcaccgatccagttgagcagacaacgcagcaccacggggccatcgacggggcacatgcgaccttctgcaatggcagcaccgaacgaatcattgatccattcgtgaatctgatctcccgcagtccgtgactgttcgagcttgcgcagtcgtgccaacatgcctcgaacgttcgccatgtggttacctgtcaagttgccgtagtgctttcaccagcgtggctatgaggagtcgattctgagcgacggccgtcttgaagaccacatgccacgcaattgggtacaggtaaatcaaattctctctatcgggcatagtcggtgtgctcacgggcgcgttcttgcggccgc

SEQ ID NO: 81222 - DNA, 421 bp, Homo Sapiens
gcggccgcgtcggcggccccggccgcgtccgtccaggccgtccagatgccgcaaagatggcggcgcactcccgatccttgagccacgttccaccccctgcgaccccctcggcaggcttggtgcccgctcttcagcgtcttgcgcggagtatgtcgtgcgcaaccgagcggtgcaacggggcctgttacccccggtctggttcgctctcgacgccggaccggagggtgagcgctcacttcatgcaggcatcctcggccttctcgaaggccgcgggcttgggctcgtgctcgggcggccggttgcggccgagcgccccgtccgagcgggcccggagatacgtgtatatgtccggcaggtagcacatgacgttcttgttatcgccgaaggcaggcatgaccagctcctgcgaggccctcgtgcc

SEQ ID NO: 81223 - DNA, 780 bp, Homo Sapiens
  misc_feature (68)..(68): n is a, c, g, or t
  misc_feature (156)..(156): n is a, c, g, or t
  misc_feature (449)..(588): n is a, c, g, or t
ctcaggtgcagttctgtcctcactgacagataggagggtctgtttcatcttgcctggtgctcagcatntcacagttctgaagatgactacttagccttggcttaggatgtttcctagaactgatgatatgcgtttcctaagaaacatctctttctntggaagctatgactaatttaccctctctcctcctcttcccaataatgagtggagccctagcattctcggctactgcttctgttgggggtggaaatgacgttcttgttcctggtgataaagcagctactttgaactagatgagagatccagaagagtggccaggcaggctccctaagacccagagccctttttgatttgtcctggggtgtaggcatcactaggattccaagccacccttcctgccagcaggaaagtcaggggttcgaaaggtgtggccgggcacagtggctcannnnnnnnnnnnnnnnnnnnnnnnnnnnnnnnnnnnnnnnnnnnnnnnnnnnnnnnnnnnnnnnnnnnnnnnnnnnnnnnnnnnnnnnnnnnnnnnnnnnnnnnnnnnnnnnnnnnnnnnnnnnnnnnnnnnnnnnnnnngaataggttttttctttcaacttgatcagtagaaaatggacatcaagtttgaacagataaatcatggacagccttattgtgattgaaatgcttgtaggttctgtgccaattttccaccactgtgtactttgttgctatttaaaactgtatcaactctaacggaagaataaattatttgtgattttaaaaaaa

SEQ ID NO: 81224 - DNA, 581 bp, Homo Sapiens
gcggccgcgcactccctggcattgggcttcttcccgcgctggatcgcgcaactgcgtaacgagggccttaacatcgcgacccgactggtcgccaccaacgttggcgatgcagtgcacgccctgcgcgaaggcggctgcgacttgatgctggcgttctacgacccggatgcggccatgcagatggacgcggaaatcttcccgtcgctgcacctgggcaacaccgagatgctcccggtgtgcgccgccgacgccgacggcaaaccgctgttcgacctggagggtgagggcagcgtgccgttgctggcctacagtgccggcgcctttctcgggcgctcggtaaatttgctgctgcgccagcgcgccctgcgtttcaccaccatttacgaaactgccatggcagacagtctcaagagcatggcccttgaaggcttgggtatcgcctgggtgccgcagttgagcgtgcgtgccgaactggcacgtggcgaactggaggtgtgcggcggcccgcaatggcatgtgccgctggagattcgtctgtatcgctgcgcgttggtgcgcaaggcgaacgtgcgcctcgtgcc

SEQ ID NO: 81225 - DNA, 1314 bp, Homo Sapiens
  misc_feature (943)..(962): n is a, c, g, or t
accacctacccctttccagcaagatgattattttagtgatatctctagcatagaatctccccttagaacccctagtagactgagtgatgggctagtgccttcccaggggaacatagagcattccgcagatggacctccagtcgtaactgcagaagacgcttccttagaagacagcaaactggaagactcagtgcctttaacagaaatgcctgaagcagtggatgtagatgagagccagttggagaatgtatgtctgagttggcagaatgagacatcaagtggaaacctagagtcctgcgctcaagctcgaagagtaactggtgggttactagatcgactggatgacagccctgaccagtgtagagattccattacctcatatctcaaaggagaagctggcaaatttgaagcaaatggaagccatacagaaatcactccagaagcaaagacaaaatcttactttccagaatcccaaaatgatgtaggaaaacagagtaccaaggaaactctgaaaccaaaaatacatggatctggtcatgttgaagaaccagcatcaccactagcagcatatcagaaatctctagaagaaaccagcaagcttataatagaagagactaaaccctgtgtgcctgtcagtatgaaaaagatgagtaggacttctccagcagatggcaagccaaggcttagcctccatgaagaagaggggtccagtgggtctgagcaaaagcagggagaaggttttaaggtgaaaacgaagaaagaaatccggcatgtggaaaagaagagccactcgtaacagcgaacggtcagtcaaggatcataagtttttactgccagtattgagaaattcgtggaagaaatgtcagcaggaagtaaaaattcaccgagaagtgtgtgtgtgttcgctgcttccacacattaatggcatgattttttttatgcnnnnnnnnnnnnnnnnnnnnccacccacattttaatttagcatgagccaatttacagagcatggaaatcactttcatttccggattggcgcgtgtgcaattagcaatgcagtgtatatacaagaagccatgctgttaacagtttatctcaagtaatttggtgtcatttacaaaaggaagaaattcttgccatcagaagggacagaaggagatggaatgatcaaatcacagagaaacactaaaattactaaatctacaacagctcgccttatttttcttggacccaaactgtcagggtataaacactatttgtttcttttttaaaacatcgatagttttgctgtaaataataacactgtataaattctaacag

SEQ ID NO: 81226 - DNA, 298 bp, Homo Sapiens
ggtccttcattgcatcctgccatacccatgaacaaacagtttggcattaattatatatcactgccaccctctgaactttgaaaactgccatcttcagacttggtataatggaagaggctttctctctccaataaaccttttgcttcagggtatactcttcggtttttttccagatgtattatgtatgaactttgtactatgtatagccagagttttatttattttttaaaaaagaaactttttcttgataaaggaataatggtggtctagctagttcttgtaaaagtgatgcctcttg

SEQ ID NO: 81227 - DNA, 815 bp, Homo Sapiens
  misc_feature (32)..(32): n is a, c, g, or t
  misc_feature (761)..(761): n is a, c, g, or t
gcggccgctgaaggcctggggctctcgccttnggggtgccagtggtttgatcagcttcggcatcatgctgggggcgtgcgggctgtatctggtagaccgcaaggtttccggcgcgagcccggagatgctggtggttacggcgggtaaacccgtgattgcgccgcgtatctggttgtttgtgttcgccatcattgctcacaacattccggaaggtatggcagtgggcgtttctgccggtggcggcatgccggacgccgacagcctggccatgggcattgccttgcaggatgtgccggaaggtttggtgattgcactggtgctggctggggcgggcatgtcgcgggtcaaggcgttcttgatcggcgccgcgtcaggcttggtcgagccggtgtttgccgtgctgtgtgcgtggttggtgagcctggctgaggttctgttgccattggggcttgcgctggcggcgggggctatgttgctggtggtaactcacgaagtgatcccggaatcgcgccgcaacggtcacgaaaagcttgccagcctggggttgtgcgtcgggttttgtttgatgatggtgatggataccgcattagggtgaggccattgcagcctcacacctgtctcaaagggtgggtttactcaccctcgtcaaagtagttattgatcaactttgaccagggcgtccatcgcttcctgctcttgttcgccttccgtcttcaagtgaatcttggtgccccttgccccgcagccagcatcatcatggncatgatgcttttgccgtcggacatcgattccggcgtgcgccggcgcggatctgg

SEQ ID NO: 81228 - DNA, 648 bp, Homo Sapiens
ggcacgaggggtcagttcatcggcgcggtaaccgagcagggcttcgcaggcatcgctgacaaacacgatcaggttgtcactgtcgaccacgaagaccgtgtccagcatcaagtggatcaatttcgggtagagggcgtgcaggtcaacggccataggtcaggggtgtccggttcagatgcgccgatcatagctcgatcacgcaggctgacgccttggaatactgcgggctttgaagcgctggcgccgatctggcgatcaatggcgtgtagcctaatgaggcggttcatgatgtgatggttgaaaatgaattgtatttaaaagtgactggggctccatcatccatgggcaatcacaagatcggcatccggcgcagcaacgtcgagaaaatcctgctggcggcagagaaagtctttgccgagaagggctatggcagcaccgccatggccgatattgccgaagaagtgcaactgccgcgctccaacctgcattactacttcagcaccaaaagcgagctgtacagcgccgtgctgtttgacctgctggacctgtggaagcaggacgccctgagctttgaaaccttcgatgacccgcgcgtggtgctcagcagttacatccgcgccaagatgcagcgctcacgcacgcggccgc

SEQ ID NO: 81229 - DNA, 612 bp, Homo Sapiens
  misc_feature (152)..(152): n is a, c, g, or t
  misc_feature (168)..(168): n is a, c, g, or t
  misc_feature (179)..(179): n is a, c, g, or t
gcggccgcatccaggccgacaaggtctcgctgacggcacgggaaaacctcgacaacctcggcggcctgatcggcgcgacagacagcctcgccatcaaccgccgggcgaaacgtcaacgtcgtgtccagcagtcgtgacagcagcagcatccnaaggtacgcgcaccanatctctcgcgnggtggccgggctgtttgtcagcggtgctggcggcaccctcgacgtcagcgcaggcaaggacctcaacctgaccggcgcccaagtggtcaacgccggcacaggtggtagcacatcgctcaaggcaggcaacaccatcaacctggcgacggtcggcgaggcccatcagcaatcggtgagctggaacagcagcaactggcgcaaggacgcaagccagacagaagtcggctccaccgttcagggccagggcgatgttcgcttgagcgccgggcaggacctcaatgcccgaggcgcgagcgtcaccagtcagcaaggtgccatcattgccgacgccgggcgcgacgtgaacatgacggctgcgaaaaacaaccaattcgctgatgaagcacacaagttcaaaggcagcaacggcttgttctcaagcaagaccaccacc

SEQ ID NO: 81230 - DNA, 904 bp, Homo Sapiens
tttgccaaccgcgaggtcacgacgacgcagatcatcatcttcggcctcacgggcggcctcattccctgcccggcctcgatcacggtcctgttgctctgtctgcaactgaagcagttcacgctcggagccgcgctggtgctgtgcttcagcgtcgggctggcgctgacgatggtggcatcgggcgcgatggccgccctcagcgtgaagcacgtgtccaagcgctggagcgggttcggggagttcgcgcgcaaggcaccctacttctccggtgcgttgatcctcctggtgggcttgtacgtcggcttcgaaggcgcccgccatctggcctgacgcggtcaggcaacaagaagcccccgctgcggcagtgacccgtgagctcggcgatgccggccgcgcggcttcacgcatcccacggcgcgcgccgagcgcgctcgctcgcgacgcctgagggcaggaccgcaagcgacgcacacgaccacaccgacccgcgtcgaccgaccagggcctgccctcagcgcatggtccagcggttgcgccgctcttccgcggcctcgcgccactgctcgcgcgccgcttgcgcgtcctgcggcacacccaggcggccgtcttcgagggcgagggcccagtcctgcatggcggccggcagatgctgttcggctgcttgctccagccagtggcgggccagggccgcatcgggcgaagtgccctcaccctgggcgtaggcctgggacagcaaatacatcgcgcgggcgctgccgcgccgggccgccagctgcaacagagccaccgcgcgccgggcatcgcggggctgcgcctcgccgttgcgggcggccagggccagggccagcgtggcgcccgcatggccagcctgcatcgcacgctcgaaccagggccgggcggccgc

SEQ ID NO: 81231 - DNA, 560 bp, Homo Sapiens
gcggccgccatggcggcgacctggccggcctgcgccagcaccttgactacatcgccgggcttggcttcacccaggtctggcccacgcccctggtcgagaacaacagcgcgaagtacagctaccacggctatgccgcgaccgacttctaccggatcgatccgcgcttcggcacgaacgacgacttcggcgccttcgtgtcggaggccagagccaggggcctcggcgtcatccaggacatcgtgctcaaccacatcggcggcggccattggtggatggccgacctgccggccccggattgggtcaaccagtggccccagtacacggagactcatcatgcccgcatgacgctgcaggacccgtatgcatcggccgaggaccgcaagcgcttcaccgacggctggttcgtgcccggcatgccggacctcaaccagcgccggcccgagctcgctgcctatctgacgcagatgacgctgtggtggatcgagcgctacgggctgccgggcctgcgcaccgacacctactcctactccgaccgcgacttcctgacccgccctcgtgcc

SEQ ID NO: 81232 - DNA, 659 bp, Homo Sapiens
  misc_feature (556)..(572): n is a, c, g, or t
gaattcggcacgagggcaggcgtcttcgttgtaggggcgcccgccgcgttcggacaggatggcgacctccatggccagcatggcggcctcttcagcggcccgacgcgtggccggggcccggctcggcttccagcgcgtcgagctgggcctcgtaggcctgcaggaaggccttgccgaacaaggtgtggaaatcgtccgccgcctcgcgcgacagctgggtgtacagctgctggaactgctcccacagctgcgccttgcgcgagcccggcagcagcgcggcgagcgcaccgcgcttggtgatggcgctgtcgagggcggccgggtcgaagcgggccagcacgccgtcgagcgccgcgcgcatgccggccatgacgccgatctcgtgggcgcgcaggtcgtcgaaggcgtcgcgcatcgcgcgcgccggcggcatgaagccggcggctgccgggcccagcagatgggtcagcgccgcgtcgacattgggcgagaacttcagcgggttgttgtcccgcgtgacgatcatcgtcacctgggcacgcacctcctgcttcannnnnnnnnnnnnnnnnagcagctccacggcgccgcgggtcgattcgcgcagcagctcgccgatgagccgcatcgtggccggcgtcagcgtctgcagcggccgc

SEQ ID NO: 81233 - DNA, 827 bp, Homo Sapiens
gcggccgcgggcgatctgctgcagcgcctcctgctcgctggacacatattggaagaccgactgcaccgcgccgccgctggccgcgccgatccggacggcgatgcgctcgtgatgctcgcgcaggatgccggtcgagggggcggcggaagcgacccgccagagatcctgcccatgggcacgggacagacctgaagccagggttcccacggcgccgagcgccggcaaagcacggatcaccgcgcgcctcgatatcagcatgggacttctcctctgaaggggacggctgctcgctgtcgcttgatcttttgagcgcttagcgctcatttgtgcgttatatagcaaaataaatccgcccgtcaaacggcgggcacgcgctgacgcttgcggtgaactcgactagggtccgcggatagggcgacagaagtggcggattcgcgctgtgttgcgcgccaagaggacaggaatggccgaagccgacccgaagaagagctatcgtttcgtttcaggcttcgcccgcgggctttccgtcatcgaggccttcggaccgaccgcacggcaattgacggttgccgacgtggcgacgaagacggggctcgaccgcgcggtggcgcggcgcctcctcctgacgctgcaggagctcggcttcgtttcggtcgaccggcgcaaatacgagctgacgccgcgcatcctgcatctcggctattcctatctcgccaccgtcgggctcgacggcgcgacgcagccttcctcgacgcctgtcgcgtgagatcggcgatacgtctcgctgtcggtcctttcgggcgacgggtggtgttcatcgcacgctc

SEQ ID NO: 81234 - DNA, 992 bp, Homo Sapiens
  misc_feature (12)..(12): n is a, c, g, or t
gcggccgctccnggctccgggtaaaagcaccgccctcaacgtcctttgaggacaacggtttctactgcatcgacaacctgccggcgggcctgctgccggaattggccgaacgcgccctgatccacactgaactgccgcagccactggtggccgtctcgattgacgcccgcaacctgcccagccacctcgagcgcttcccgcaactgctcgaggaagtacgcgccaagcatattcattgcgatgtgctgtacctggatgccgacgaggaaacgctgctcaagcgtttctccgaaacccgtcgacgtcaccccctcagcagtccgcatcgctccctggccgaagccatagaggatgagaccacgctgctggggccgatcattgacctcgcggatctcaagatcaacaccacggacctcaacctgtatcagttgcgcgatgcaatcaagctgcgcctgctgaaccagccggaaccaggcacggcctttctggttgagtcgttcgggttcaagcgcgggatgccggtggatgccgacctggtgttcgacgtgcgctgcctgcccaacccctactggaagccggagctgcgtgaccagtctggtttggaccagccagtagccgagtacctggctgcgcaaccggatgtcgaggagatgttccaggatatctccagctacctgctcaaatggttaccgcgctttgccgcaaggtatcgggcttatgtcaccatagccatcggctgcaccggcggccaccatcgctccgtctacctgaccgaacgcctgggccaggtgctgcaacaaaccctcaagaacgtccaggttcgccaccgcgaccttagctgaaaggaacacccccgcgatgcccgctctggaaattgaaatcatcaacaagctgggcctgcacgcccgcgcctcggccaaatttgtcggcgttgccgggcagttcccttgccagatccgcgccgggcgcacgccggaatcgatggtcgacgg

SEQ ID NO: 81235 - DNA, 589 bp, Homo Sapiens
ttcggcacgaggcagaacgagacgatctatgtaatgacacagttcgggtacgcgaacaaatattcgttccgctacaaagtgccatacatcgacaagaaacaacgatggggaatgagcatcggggggtcgttgctggaacaggaggaggtcactgtggccaccatcgggaatgaacggctgttggtgagggatccccatgattttaaccgcgaataaaaactggcagatgtggaattcacccttcggccatcacacgattacaggcactattggcgcagcagtttcacccgggcgagcattactgataccattgcgcattccgcggaggaatatttcaccggcgatgccactgttacgcgattcctgacgctgggctattccttcgttcacgacacacgcgatctgcgcatcttccccagcaaaggtgaattcattgaactggctgtggatcgatatgggcttggattgctggacattgcttcgccggacataacaaccttgaaggcgacgggtgtgaaatggttcagaccggcctcctggatgaatgccgctgtttcattgcgtggaaaggcgactttcgggcggccgc

SEQ ID NO: 81236 - DNA, 728 bp, Homo Sapiens
gcggccgcgcagggtggccccgacgccatgcccccagacgcctaggcttcgagtggctgtgtgaggggctagcggcgggccgaccacggtcccgttgcacggcattgttcagcccaatccatgaccattgggaataagcgcattccctgatcgcgtcgcaatcatcaatatttctaatgcgcgcggcacccgcctgatgcgccctccaatcaagggaaaaccccgtccaaacgtggtagggacggcgtgtttcctctgactacaatttcttcacaaacccgcgcagacccttgcctggcgggttttttgctagatggcgaacgggcccacaaggctgcatcgattcgcggtgcttggctggtgtgcacgtcaatagtcgatacaaaggactcaacatatggacatcttgctgcagcagatcatcaatggtctggttctgggcagcatgtacgccttgatagccttgggctacaccatggtgtacggcatcatccagctcatcaacttcgcgcacggggaagtgctcatggtcggcgcgctgaccagctggagctgcatcggcctcatgcaggaggccatgccgggcgcgcccggctggctcattctgctgctggccacgctgatcgcctgcgtagtggcggcggtactcaatttcaccatcgaaaaagtcgcctaccggccgctgcgcaacagcccgcgcctggcccctttgatcacgcctcgtgccg

SEQ ID NO: 81237 - DNA, 695 bp, Homo Sapiens
  misc_feature (645)..(645): n is a, c, g, or t
gcaaacagtattactaggatagaagccagttccacaaaaccatgtatattctgagcattagaagagatgaaattaattatacaatctcctccccttcccttcctgaaaatatcatctcaactctcagcacttacagataaatgtacataagcccatggttttgagaggtatgcagctccaaaatgacaatacagctaaggcttgatgatatacaagcatcacactctccacttcttgacacatgcccatttcccccgatgtgatgtgaccacacaaagacaggaagctgctctgggggacatgtgctacttagtcctctaccctgtcctgttggtggcttgaacacctcagatgcagctcagcccttccagtgctccaaagaacaaaggggctgctccctgcactgtcagaacttctctggactccagctgctagcaccacatcactcaacctactttactgcactttacccccctcccctgtctgtttctattgtccaggctgaagaaatatggggacaaatcatactgatgttttcaagaccacagatgtcccatattcacaaatctgtttagttaccattaattatgacccaattctgaatttttcccagctcaattaccaccacaaaacaaccaatatganaaaaaaactttaccttgattaaatttattccctcagccagccgcggccgc

SEQ ID NO: 81238 - DNA, 600 bp, Homo Sapiens
gtggttcgaccctcgactgatttgaaatacggtaaacatgtgggagctggcttgtgtgggagcaggcaagccagctcccacatttgatttgtgtctatttagagaagtaggtgtccgatgatcgagccggtgtcgatgacagttgaagcagggcttgccgccgagcaagacttgctcgcggccgtttgcgccggtgaacaggcattcgggctactgttctggcagccaaatgaccaggctttggtgatgccgcgccgtttgagccgcttgccggcttttgacgcggccagccaggtttcggctgctgccggttggccggtgctactgcgcgagaccggcggagagccggtgccgcagtcggccgccacggtcaatatcgcgctggtttacgcgccgccacgcagcgaaggtgatcaaggccgcatcgaaaccggttatcagcgtttgtgccagccgatctgtgatttgctgattgagttgggcggtgacgcttctgttggcgaaatcgacggcgccttttgcgacggtcgctataacgtcaacctcaacggccgcaagatggtcggcactgcccagcgctggcgacaaagtggcggccgc

SEQ ID NO: 81239 - DNA, 1136 bp, Homo Sapiens
aatgtgtatcattcttgagccaaaatggtgaaacatgcttttcccaagtctcctctcttcccaaataaatggcaataacattcttctagttgctcaggccaaaagctctgaagtcatcctttacttcacacatccaatgcaccagctgattctctcccttcaaatacagaacccaaattcaacacttttccccctgcctccctggacagacactaccatctcttgccttcctttgtaataaccctactttagcgcctgccagagggatcttttaaaacttccgtacaaagtgatgcctctcagatcacattacatgggtggcagatgatgatatctattcataagcctggccttgcacgctgcaaaacaaggggccatgaggttttacagtggtctgtctctgatggtggcaccaggggagcactgtggtagaccacgggcaccagtgagatttgctttaaaggttagggtcacagtcttgcacactctggatttatcattcatgagccaatctactctattccagatctctcctggggcaatgagtttcatcacttgcctattgtgtaatgaaatttacacacataaacatatgtgcatgtatccgtggaaatggaatttatttagttattttgagggactttatttttcccaaggctaacttctttcagtattcagtattattggatgaataagtatgtttatcatcgttaacatcttaaaatattgtttggcaaaacccatcccatcccatcaaaaacattactttgctttctcctatcaggaaaataaagtctaaatagctaatagttgaaggagtttatgtagcctttcctgctaacaccctacactatcccctcattacaatcacatgtgtcccttggatgccatgtgaacttcctcaggcaggtctctctgtctggaattaggccctgccagtctcaggccagttcttctagcagtttccacatggttcatggggttgcctctgaggggacagcccacctggtttctccctcctgtgactttattgccgccaccattcatttggccccaggtatgtgctgacctgttcccaaggagttgctgcttttctgtctataaatctgcatgcttgcattgttggcaagactgtc

SEQ ID NO: 81240 - DNA, 697 bp, Homo Sapiens
agaattcggcacgaggacgtattgcgcagcgtgcgctacatgctcgacatcagcgacaacaaaatggtcgagatcatcaagctcggcggcatggacgtcaccaaggaagacctgctgacctacctcaagaaagatgaggaagaaggttttgtgttctgcccggacgatgtcatggcgcacttcctcgatggcctggtgatcttcaagcgtggcaaggacgaaagccgtccgccgcagccgatcgaaaccccggtgaccaacaacatcatcctcaagaagctgcgcgtggccttcgaactgaaggaagacgacatgcacgccatcctcaaggctgctgagttcccggtgtccaagcctgagttgagcgcactgttccgcaagttcggccacaccaactaccgcacctgtggcgaccagttgctgcgcaatttccttaagggcctgaccctgcgggttcgtgcgtaagccatgagctactcggtctcgcccgtcggcttcgtgcgctcctgcttcaaggagaagttcgccatcccgcgccagccgcagctggccccggccgcacgcggcgtgctggagctggtggcgccgttcgatcagggcgaggcggtgcagggcctggagcaggtcagccatgtgtggctgctgtttctgttccaccaggccctggaagacaagccgcgcctcaaggtgcggccgc

SEQ ID NO: 81241 - DNA, 641 bp, Homo Sapiens
ggcacgaggcgcacccgcatcggatgccggcgcctgttccagtagttgaaatcgccgaccacgctgacgcccttggcgttcggcgccagcaccacgaaggcgacgccatcgacgccttccagtgtcatcgggtgggcgccgagcttgtcgtagatccgcatatgcgtgccttcgccgagcaggtgcaggtcgaagtcgctcagcaccggcgggaagcggtaggggtcgtccatctcgacgacattctctccgaaccgggcgcgcagctgatagcgcgtcgaaccgttcggcagcgagcctgcgaacaggccggcggcatggatccgcttcaacggcgcggtctcgccgtgttcgccgatcgcctcgacattgctggcttccggcaggaatgcgcgcaccaccttccggtcgccctcatgatggaggccgagatagtggaatgggtcggagtgctttccttccaggatcgcataggcctcggcgggtagcttggtcatgcggcctcgggagagggttgcgacagcagtcggatcataccggtcaagggcacgcgtagccagtcgggccggtacgacagctcatattcaattttcgtagaaagccttctcaagcaggaagaaggttaaaaggccggcggccgc

SEQ ID NO: 81242 - DNA, 768 bp, Homo Sapiens
  misc_feature (59)..(59): n is a, c, g, or t
cgtgtgccggtcgaccgtgatcgctgcgggtctggcgctggcattgccggcgctggcgnccggcacctacagccgtgtgctgcccgagaaaagttcactggccttcgtgtcgcagcagatgggggtgtcggtcgacggcaccttccgcaagtttgctgccacgctggacttcgacccgaccaaacccgaggccggcaaggcgacgctggacatcgaactggcatcgatcgacgccggcggcccggaagccaacgacgaggtgaagggcaagaactggttcgacgtgaagcagtttccgaccgcgcgcttcgtgtccacctcggtcaagccgctgggtaacaacaagtacgaagtgcgtggccagatgagcatcaagggcaagacgcgtgaggtggcggcccccttcacgctgaaaccggaaggcgccggtgcggtgctcgaaggcagtttcccgctcaagcgcctcgattacggggtcggcaccggcgcctggggtgacacctcggtggtcgccgacgaggtgcagatccgcttccggctggccgtcgccggcaagtaatccccgggcccgcccgcccgcggcgcgccggtacatcaataagaaggagttcctgcatgaagaagatcgctgttgccctgttcggcgcattcgccggcctgtccatgaccgccggcgcgatggccgccgacagcttcaccatcgacagccgccacacctttccggtgttcgaggtgaaccacctcggtttctcgacccagcgcggccgc

SEQ ID NO: 81243 - DNA, 1097 bp, Homo Sapiens
gcggccgcgcacggtgccgctgtcattcaaggggccgccggtgtcgacgtcggcccggtaattgtcccaggtgccagcggccagcgacaggctggaggtcggcttggcctgggggcgtttacgcacaaaattgacggcaccactggcggtaccggcacccttgagcatgccggctgcgcccttgagcacttccacgcggtcgtagatcgccatgttggcgctgaaactgtcggcctgtacgtagtctttgcccatgtccagcggtacgccgtcgtactggtattggccgagcatcttgaagccacgggaatagaaatatttaccgcccatgggggatgcgtaggcggtgattcccggggtgtgttccatcacgtcttcgatggtggtgaggttctggtcgtccatcagttggcgggtcatcacactgaccgattgcggggtttcccgcaggctgtgttgacctttaccgatggtgaccgcgcccgtggtgtaggaaccgctgccatcggtggtggcacccagacgctcgccggtgacggtggtggcgcccaggttcagcgcgccggtctcggcgatgtgtggcaatagcagccaagtgcttgcgccttgacgttgtgcctgcaagccgtggccacgcaagagttcgcccaaggcttgctcgcgctcatagcgcccgttcaagcctgggctcgacctgttggcgacgctggtagcgtcgtaggacaggctgatgccggcctggcgggcgaactggtccagcacgttggccagcgcacctggggcaatctgccaatcgcgtgcctgggtgtcgttggcgagtgtttcggacatcacggccagcggcagggcgccgccgctcaggcaggcgcccagcagggcggcctgcaccgtgcgcttgaggggggaacgttgggaagggaacgcttgcatgaccgcgggatgctcctttaaggaagtgaacagaaccggcctgttgatcggcctttccttacaggtcgagcggcaatgagaaataacctcatttattttttatgcactaagcgcgggacgtaaccgtcacccaataacggctgcgataggtgacgttcaccgccagc

SEQ ID NO: 81244 - DNA, 960 bp, Homo Sapiens
  misc_feature (50)..(50): n is a, c, g, or t
  misc_feature (499)..(532): n is a, c, g, or t
gcttcttaaaacttattttaatatccttcttccctcccccaccccattgnggaaaaggctaaaacaatctggatgggtttaattacaaattaatacatactgtcattgtgtaaagtaaatcaacattgtggcaacaagggactattcttggaaaaagtgaaacccatattaacaaaatatgtcatggaagaaccccacttagtgatttcactggctgcttgaaagacagtcaatggaaaggtcaatgttctgcatgttctctggggcttgtccatgcctcggaagaaggtcttgcccggactcagccaagcctagttagctccaaacaggccctagaccaaaaaagcaagggaagagggcatcctttcaataggacaagggtagaaagggcagattgaaagataaaatcctgcagcttcacttaaaagcccacggggaaaaaaaaggcaggaagttactgggaaggcttaaagaaagacgcagcattttttcaacgttnnnnnnnnnnnnnnnnnnnnnnnnnnnnnnnnnncaactgcaagatcattggagaggaagaaaaaaggaatagaacttcattgttttcagtgagtttgaacacggtctcagcttcatccatgtcttcattatgcagacaccatcctctcagcactgtgctcgacctgtgagaccctttgcttagcagcttggaggaaatgtttttttaaaaaaggtactatacacacatacataaatgcacacgtttatatgtgcatgtgtatatacatataaattgtaataaagtagttttagaaagctgggggtaccaaggcctctggggttgacttccttgcattcagaattccacaggacgatacctacccatgaacttctctccaatttgaaacactccatcttcccttaagatcgcctgatactgaggagactgaggcaggtccacaaaacaaacgaaggtcctag

SEQ ID NO: 81245 - DNA, 1048 bp, Homo Sapiens
cctttccaaacacttgggctgtgggaatggggcagtggcatgctactaaatcagttctccaggtggggaaaaggtcctggtttacagtgtttgccaatttccttgatgtaaatgcccccacagtggcagattttaaacaactaatagtttaataactgactcaaaaaattcctgaatattttccaattgtctcttattgactccaacaaactgctgtcttcaggaccccgtcccaggtccgattgctgtaggagggacctggttgaggtggtctgagcagatgggaaagcaaggcggggtgttggcctggagcaggccaaacctggttgtcagggaggagggtcgttgagtgccgggttgcataaggattccacaagccctgggaggcttcaaggggcctgcttagactctgaagggaggagctacagtcaggtggatggtgttgctgggctgatgaatgacattatcacagccaccccaggaggatgtaggctccctatcactggaggttggaagcggggccagaggaccactcagctgggatcccagggaagagttcacaactgccttctcttcccctctcccaggagcctgcatgcaggtcttttgcccctgaatcataccacagagtaaggaagggcgtgggttgttcttggccaaccttctggaattaggaaacccagttcccactggtaaagccgggctgcctggcctgccctcatgtgacaccagggaccacttgctgcttgcaatgggcttagctgagagccaggcccccccctctgttttctggcttctgtgcatgccctttgttggcctggtgggaggggcgtgggcatcctctggctgcagcagcctggctctggctattctatgtccttaccaggcccatgttcccaagaagtgacctttctaacatgatcccgggcccctgaacttccattgcctcggaaggcaagttctcagctgagaggctcacaaatagatatatgtatgtgatgatgagtaccaggagtgtgggcatgtgtgtgaaagaaaaataattttt

SEQ ID NO: 81246 - DNA, 710 bp, Homo Sapiens
cagtcgacggtaccggacatatgcccgggaattcggccattacggccggggcgtgtgacgttgaagcccggactgagttaagaaattctggtggattggagcccctggtagagctgctacgctccaagaatgatgaagtgaggaagcacgccagttgggcagtgatggtctgtgctggtgacgagctgacggccaatgaattatgcaggctcggggctttagatatccttgaagaagttaacgtatcaggaactcggaaaaataaattcagtgaggcagcttataataagttgctcaataacaatctttccctgaaatacagccagactggctatttgtcatcaagtaacataattaacgatggattctatgattatggtcggataaatcccggcaccaaactgttgcctttgaaggagctctgcttacaagaaccaagtgacctacgggctgtactcttaatcaacagtaaatcttacgtttctccaccttcatctatggaagataaatcagatgttggttatggacgaagtatttcttcttcatcttccttaagaagatcaagtaaagaaaagaataaaaaaaatagttatcattttagtgctggatttggatctcccatagaagacaaatcagagccagcttctggacgaaatactgttctcagcaaaagcgccaccaaagaaaaaggatggaggaaaagcaaagga

SEQ ID NO: 81247 - DNA, 2516 bp, Homo Sapiens
  misc_feature (2322)..(2322): n is a, c, g, or t
  misc_feature (2350)..(2350): n is a, c, g, or t
  misc_feature (2395)..(2395): n is a, c, g, or t
  misc_feature (2409)..(2409): n is a, c, g, or t
  misc_feature (2421)..(2421): n is a, c, g, or t
tggctaggtacgaggcctgcgttgtatatcggcacgaggcatgctgcatcactgaattgcccggtggattgcacagaggggtggctgggtggcagccctgaacttgggcaatggtccgagcctgaacgtgctggtggttctgggtgtggttctgttgggccagttgtggtacgaagattcttcaaatcatgactcccaagggtgccctttggggtcccggttcagacccctgcctggacttaagcgaagtctttgccttctctgctcccttgcaggggtcccccctcaagagtacagaagctttagcaagtgtgcactccagcttcggagggcccctgcgtgggggccagtcaggctgcagaggcaccttcaacattgcatggtgctagtgggccctctctctgggccaagggctgtggccgtctcctccctcagctctctgggacctccttagccctgtctgctaggcgctggggagactgataacttggggaggcaagagactgggagccacttctccccagaaagtgtttaacggttttagctttttataatacccttgtgagagcccattcccaccattctacctgaggccaggacgtctggggtgtggggattggtgggtctatgttccccaggattcagctattctggaagatcagcaccctaagagatgggactaggacctgagcctggtcctggccgtccctaagcatgtgtcccaggagcaggacctactaggagaggggggccaaggtcctgctcaactctacccctgctcccattcctccctccggccatactgcctttgcagttggactctcagggattctgggcttggggtgtggggtggggtggagtcgcagaccagagctgtctgaactcacgtgtcagaagcctccaagcctgcctcccaaggtcctctcagttctctcccttcctctctccttatagacacttgctcccaacccattcactacaggtgaaggctctcacccccatccctgggggccttgggtgagtggcctgctaaggctcctccttgcccagactacagggcttaggacttggtttgttatttcagggaaaaggagtagggagttcatctggagggttctaagtgggagaaggactatcaacaccactaggaatcccagaggtgggatcctccctcatggctctggcacagtgtaatccaggggtgtagatgggggaactgtgaatacttgaactctgttcccccaccctccatgctcctcacctgtctaggtctcctcagggtggggggtgacagtgccttctctattgggcacagcctagggtcttgggggtcaggggggagaagttcttgattcagccaaatgcagggaggggaggcagatggagcccataggccaccccctatcctctgagtgtttggaaataaactgtgcaatcccctccgccaaacaaaaaacataaccccaatcactaatcccccccagttcccctcattccccttacaaaattccgagccccttgtggcccccttgggtcctaaaaaccttttccacctattccctttggtcggcccggcccccataagtacaatgaacccttgcttccccttttgccccctctaagcgaccccctgcgttaattaccctcgctggccctggcaccttcccctacaaaatcccaacactatcccgctcgcggctctcaccccataagcgctctccccaataatataacccccatatagcgcgatctccttggcccgcccttttcacccgtgtaatctccctcgttaacactgcgctccctcaaagatgccgcgctcccacatattcacaccctttaaccgctcccacgtgtcccgttggtccctctctccacgctcgatagaacgtggtggttctgtactctacacctcataattctctctctttttcccccacttggcgggacgttccttactccgagcaccaccggcgctcgtagggacactctcgtccaacttcgcgtagcggcatagctacacttatgattcacctcttggtccgcgctcctcttgatgtatattatctacattcttacgacccctagcgaacgccaccacgcgcccggccctcctacaatactaattgtgtctctcctctcttttcgctcgcccccatttcactaacaccgccacgcaccggcggcgcgaaacaatagcttcatacatcacgccggtctcactgttgtctctatgaccaacactcaacacaacatattctatgtctcgttgtcctagtatagtacccgcccgcatctctcttcgtgctatcataataacgngctcatactatgtactactcctcctcgncgcagatcatcctgcacgcgacgcgcacgttcctcctagcaccgnactaatcatcactngttggtgtaganacacacaacacctatgtctctcagatatatcggcggcgccagcggctgttaatcacgcgcctcctcagtcgatctatgcacgcacacgattcctt

SEQ ID NO: 81248 - DNA, 534 bp, Homo Sapiens
gcggccgcaggagttgctgcatcactcggaccagggcagtcagggcggattcaaccggtcgtcgcaacaccgagttttcaggccgatagtagatgctggttcaagacctcggccggagtcatccagccgagcgctttccgcggcctgctgttgagcgcgttggcaacagcttggatatatcgatcgctccaccgcgatagatcagtgcctttcgggaagtactggcgcaagagtccgttcgtgttctcgttggtgccgcgctgccagggactgtgcgggtcagcgaagaagacgtccacaccagactcgacggtgaagcgagcatggtctgacagctccttgccgcggtcccatgtcaacgatcgccacagctgcgagggcagcgtctctacagtcttcttgagtgcgttggccatcgtgacggcgccatagccggccagcgcaggtccgttctttgttcgcgcagtcaggccatatcccttctcgcgaggcaggtgaacgagcatggtgaatcgactggatctccctcgtgcc

SEQ ID NO: 81249 - DNA, 1160 bp, Homo Sapiens
  misc_feature (69)..(69): n is a, c, g, or t
  misc_feature (102)..(102): n is a, c, g, or t
  misc_feature (192)..(192): n is a, c, g, or t
aaatacaaaaaaataccacatttgctttttccctgtgaactgtattgacagcgtgttcttaggacagtnttttggtggaaatgttactgtaaaatagttttnatctcacccctcctaatcatactcccactttcctgtttgtgtggtggtgttgctgttttttcctttacatgaattaaccaaatgaatttngtgtcattgtttttggggcttatatttttaaaacatagaaatgcctttgttcatttgaaaagtaagtatgttgtatctgaaaaagggctctgcctctgctctccctcgcttccttgtaaccaatctccaaacgaatctctcctggcaccgcccccttccttatatagggtcactgtccccggggccacctctgcctccaccctgctgtcaccactgccctgggccaaggcacccaggactcccagaaagcgcgagagccagcaagaaggccccactcagccttgagactggtggtcacacctccctgtcagagtcgcctgctggactgaaggggcaatggattgtcattgttgaaattgtttggctcaggttataaggaggaacttgggaagtagaaagtgacttgaccatgtgcatccttggtagcttcctgtaactaacaaatggaacagagagccaacacccccaccccgccccaccccaagcagatgttcccgtcagcgctgccctgagtcagtcggtcccccgtctctgctctcctccctttgtgtcctgctcacttcaagcttcttccatggactttccaagggcacaagtcaatctctaggcgccccaaatcatctcttcatccctctgtgtgtgcaattgttacccaaatgaagcagaccacaaaaggtcgtaccttgggcggcagactcctacttaggtagagcacggcttcgagaatacgtggacacaggcgcgacacaaccaaccacggggacggagagtttggttccgactaggcaaggcctagggccgatcacacggttcctgcgtgccggaggcccagcccccaagggcaacgggcgcgcccatgaaaccacacggcagcgagcgcagcgcagcccagccacaacgatgcggcgcacacgagcaccggagcagggacaccgcacaaccaagaaagcggaccacggtcaacacag

SEQ ID NO: 81250 - DNA, 622 bp, Homo Sapiens
attcggcacgaggggcattggcgctgaggatggcgtagtgggcgatgacgagctgggggcagttctgcaagccaaccagcacgcggtcgcccttgccgatgccccgccgggccagccaggccgacagccgggcaacctgggccgccagctcggcatagctcgtcgcctgcccgaggaagaccagggccgggcggtgcggaaaacgccgcgcattgaccagcaggttgtccggcagggccgtggccggcggctcgatggcatgcggcacgcggacgggccagaatttgtggtgcgctcgggtcatgaaacagtctccgttttcctcgcgacgacgagatagacgccgatcagcgtcacgcccatgccggcgatggcttgtgcgcccagtgtctcgccgaacagcagccacgccatcaccgaggtgacagagggcaccaggtacatggtgctggacacggccgtcacgcggccatggcgcagcatgtagaacatcaagctgatgccaccggccgtcagcacgaggatgctccaggccatggccacccccaccgaggcattccactcgacgcgcatgggctcgaaccaccacgccgcgggcagggtgatggccaagggcggccgc

SEQ ID NO: 81251 - DNA, 1227 bp, Homo Sapiens
ggaatccccagcaactggagtaattcacaagtatgccatcagggaaatagttttgatgattgccaagagatgacacatggaaatgtgtcagtgaaaatactcttgtttgaataaaacttcttctagtctattctactggaccctgctggcacctcaaagagttttttgtttgtttgtttgttctccaaaaataaatggcatgggtaactgggtctctcagtttgtcatgagttcagtgtctaggtatattactacaaacataaaatatgcatctcttattacatatgtctgattactacggtaatacataagtattgtagaaaatttggaaaattaaaattaaagaatttaaaatcatcttaaatcctacccaggaatgatcaccaataacacttttagaatacagtctttagattttattttatatgaacacacataaaaagatgggaccttgtcactttgagctaaaaccaggcaaagctcaccaccttagattttcatgatatcagaatggcgtctagacctgaagttgtcataacctggctgactctaagaaattccctttgcaaccttagctctcagttttcttatctgtgaaatggccttgatcaacattttgaaaatcatatttcctggaatgttatggatgtttcttgaaagaatctgtatcaaatagatttggcaaaggcagagttaaagaaaaaacaacattgaatattatcaatattctcagagctcttaacaagtaaatgagcacatgaatcccaagaaagggacttaataggccatagaatccttttttcctggcacacctgttagtatgttgtagcagtaatattcttcagaatatcttgggaagcacactgtaccgcaatcactaaggtgtttctaattcaatatgtgctggattcccactttttggtaacacatgaacattgaaactgatcccctggaatgtgaacctgataggattaaaaagctaatccatgtggcattgactcccatttatttggcgaaatcgaggagttaaaaattgttgaacagctgtaaccttagacctcggaaagtaaacatttcacaactgatatcaaggtcactgacaacctgagtgcaggtggactggagatgttggctgagattttgtggatgccaaccctggatcgtgtgtagacagggaaaacatgctcccaggctatgtcctgaagcttcacatgtgcccatttcatt

SEQ ID NO: 81252 - DNA, 710 bp, Homo Sapiens
taacatgaagagtggtgtaagtgtgaaagtttacaggccaagattagtgagtctgataaaaataaaatattggataaatgcaacgagctcctttcgtggctggaggtcaatcaactggcagagaaagatgagtttgatcataagagaaaggaattgaagcagatgtgtaaccctatcatcacaaaactctaccaaggaggatgcactgggcctgcctgcggaacagggtatgtgcctggaaggcctgccacaggccccacaattgaagaagtagattaattctttttagaactgaagcatcctaggatgcctctacatgtatttcattcccctcatcttcaaacatcattattattcttgaccagacctgaatctaagttaccatcccttggaaattctggagaaggagtctcatgcaccacctatcacactccctcacatcctgtttctgactttggaatggactcaggaaaactaggcccctctttaaaccgtgtgatgtatttgaatgtctgttatttccagccaccctaacattcttcttcctgtgtggatgcttatttgtcaatcagtaaatttgttcgtaaagaaaattacttctggtatttaggctgtgaatgtaccttgaaggggagagttcatggagagagcatgtgttctctaatagtgaggccactgtgaatgattaaattggtaagggtaaagtaaaa

SEQ ID NO: 81253 - DNA, 1048 bp, Homo Sapiens
  misc_feature (137)..(137): n is a, c, g, or t
  misc_feature (155)..(155): n is a, c, g, or t
  misc_feature (187)..(187): n is a, c, g, or t
  misc_feature (214)..(214): n is a, c, g, or t
  misc_feature (257)..(257): n is a, c, g, or t
  misc_feature (274)..(274): n is a, c, g, or t
  misc_feature (301)..(301): n is a, c, g, or t
  misc_feature (989)..(1006): n is a, c, g, or t
gcagtcgactgagcgcatgccaccatatgtgataccatctagccccagttaccttatctccgctgttgtgttgattgagcgatacattcacaaggaacactagacagatacgattatacgactccttagggaattgncctcgagccagaatcgcnacgagagaaaaagacatctcacccacagctcntccatatcactgagattgttttgtatntcctatgtattcttcatcagagatgtcccagtcaggaacagcntatgaaatcattcatantctctctttagtgtcctctgctcttcntggccgcagctggggatcctacaggaagcagagccaaaggtaatgaaagcctccaaggaagtggctacaattgtggcttcaagggcacctcctgcatggggcttccacagattgggcaacccacgtggtgacgtgagtaaagtgatcccaaagcatcacttgaagtgtagtgtctttatggcctgaaaacaccgtaaataagaaagatttcctgaacgttctgctgaaatgtggtgatatttcaattctagtcaataagcactattcttagtattgggatacatcaatgaacaagagacactgtctataacctcaggatgtaagaaggaaaacaaatcagcgagaagatactgccccttacccccgcttaaagaggagacacagatgccctgtgaacacctaccagttggctgacacctggggctcagataagtcctctctggccctagtttcatttctttgaatgaaacagctctatgagagctctcttcagagtttatatgttctcgacactgttcctagccagtggcaatgaataaatcaacctatactaattgaaaattagctgtgggcaaaccacagtatgaaacactcctgggcaccatggaggattccagaaaggcttggtccttgcctgtaagaaactaacaatcgaataatgaaaataaacagaaactcttaactcttnnnnnnnnnnnnnnnnnngcctacagccgcggccgcaagcttattccctttagttgaggg

SEQ ID NO: 81254 - DNA, 649 bp, Homo Sapiens
  misc_feature (106)..(160): n is a, c, g, or t
  misc_feature (195)..(215): n is a, c, g, or t
  misc_feature (220)..(271): n is a, c, g, or t
  misc_feature (281)..(318): n is a, c, g, or t
gcggccgcggctgtaggctttaaataataagttacctttaatacagattcaatatcagacaaaaatatgttttaaaattcttgctcatatttttgctagttccagnnnnnnnnnnnnnnnnnnnnnnnnnnnnnnnnnnnnnnnnnnnnnnnnnnnnnnnacctaaataaattctttctttacctaaataataannnnnnnnnnnnnnnnnnnnngagannnnnnnnnnnnnnnnnnnnnnnnnnnnnnnnnnnnnnnnnnnnnnnnnnnncctgtccagnnnnnnnnnnnnnnnnnnnnnnnnnnnnnnnnnnnnnncaaacctaactttacccatgtagccatgaagttaaaacaaaatcctagagtttatgctgtcattgtaagcaattacagatgatggccattacaaaacttcattttactctttgtggaagactagtctccatttcatatgcaatagaagattcaactctcttttgcacttgagaatactaaaagtaaatgtattttagtaaagaaaaaaaacccacatgtaaatgaatgtgtgtcttggagcaactgaattctattcaaaactttggaaggaaacagcaaagtgttagaatacgtgatttttaaagtgtatgtataaataaataccgtgagt

SEQ ID NO: 81255 - DNA, 1097 bp, Homo Sapiens
gcggccgcgtgcctcttcgagcacggcggcgagggcgtagctgccgacgccgcggccctgctcgtcggcgtcgacgttgatgcgccacaggacggagcggaagtgctcctcgtgcgcctcggggtcgaagttcgcgctgacgaagcccacgacctcgtcggcgtcgagcacgacccgctgccacgacgtctgcggattgctcacggtcgcggcgatgccgtagctgaccggagcgaggaactgctcctgtccgggcttgagcgacagagtgttcaccgccacgatggtggcggcggacagttcgacgagacgcaggtcagccatgcgcccaggttagcggcacggcccccgagccccaagatcgcccgtcatcgtcggagacgaccgtcacccgcgcgtgcgggatccgccttcccccgttcaccccagacggtggcgcacccccggctcgggacgcggagcgggaatggatccggcgcgaaaactatctcgacatcaagagactttgccgacgtgcgataggctgaaacgcaaccctggccgcctctacggagagatctgacgtgcccgattccaccatcatctacacgtacaccgacgaggcgccggctcttgccaccgcgtcgttcctgccgatcgtgcaggccgtcacgaagcaggcgggagtcgacgtcgaaacccgcgacatctcgctcgccggtcgcatcctggcggccttccccgagcgcctcagcgccgaccagcaggtcggcgacgcgctcgcggagctcgggggcctcgcgacgctccccgaggcgaacatcatcaagctgccgaacatctcggcatccatcccgcagctgaaggccgcgatcgcggaactgcagtcgcagggctacgacatccccgactaccccgacgaggcgtcgagcgacgacgacgaagacgcacgcgctcgctacgaccgcatcaagggttcggccgtcaacccggtgctgcgcgagggcaacagcgaccgccgcgcgcccctcgcggtgaagaactacgccaagaagcacccgcaccgcaacaaggcattcggcgagggctcgaagacgcgggtgggcacgctcggccac

SEQ ID NO: 81256 - DNA, 2129 bp, Homo Sapiens
  misc_feature (150)..(180): n is a, c, g, or t
  misc_feature (645)..(645): n is a, c, g, or t
  misc_feature (1566)..(1570): n is a, c, g, or t
  misc_feature (2109)..(2109): n is a, c, g, or t
ggttcttacatttacaaatattaaatttattataactaaaatgaatttaattgttctcagatttggccaccttatagctccgtttaaggaggggatttgttaaaaacaaaaatgcattataacttggtcaaattactttcacattaaggnnnnnnnnnnnnnnnnnnnnnnnnnnnnnnngcaactcttcagatccacataattaaaagaacaggagaaagcacgcaagctacatatagctaaatttacgaaaccaaccaaagccagggggatttctcttctgattatgtgtcataaaaaggtccactgtcttatatacacatgtatataatgttacattccatcactgtaaaaagtcccctttgccccctcccccaaaaaagtttcagtctagtctccaaacttggaaagcggcgctcgctcctgctgccggtgcagttcgttctcggtcagcagctggaggttctcggcgcgcagccggtccagctccagctccagctcccgcacacgcgcgtcgtcgccacccagccgcttgctctccagccgcagccggttgttctcgtccttccatgcggcgagagggcacttctccagtcccaggtactccttgatgagctcctgcttgctcatgttctgcaggctctnccgtgtggtaccgctcgtacgtctccgagaagtcccgctgcagaaactcgctgccgtcccctcccatcccatcgctgcccccatcctcctcacccccttcttccatgaagtcgtcatcgctggtgtcgtcggatttggcggcggcccgcttggagtacaggccggttttgagatccggctcctcctggtcgtgatcatccatgaggaactgcgtggtgttatagggcgcgaccggctggcccttggcgaacatctcggctcggatccttgaagctcgaaggctctgtttctcgtcgaactttttcttctcttcccaggtcagcttgtagtacggtttccaatgccgcttcttcttggacgggcgtctcctatgttttttcttccccagctgtctctgctgctgtccccactcctcttcgccccctgcggcaggagcccccaacttactggcctcggagtcatgacaaggctgggcgagcagctcggcctcgggcgtcggttccacttctgccggcggcgggaagtcgccgccagcggacgagtcgtccccattctggcccttctcgccctctctcaggcagctagattctggacaggcctgggtctgcaagggaggtggttgggattccaggctcccttccccctccggccccggacggccacccaactgggggaacgctctcgattgccacctactgtcctcctcgggcacccgctcctccgcgcctggggggcgctcagggttcagctcttcctggacagcagcagcacctgtacagttgctagtttgaggctggtgttgatattctgacaagaatggctcggccatggctagtagagtcctcgaagtttaagaaattttggctagtaagtccttaaggaaaaaaatgggtttttccttaacaaaagaaaagaatcaannnnnaacagtccaacagagtcctactcagtttgtaattcctgcagtgacgcctttagctagtccttctatcagcaaactccaactgcaatctggggagctcaagtcagtaaagggttaagcgcccacagtgcggccagctagcgggtccaagggggtgcagcggcaggaacagtacgtaatgggcggaggtgggcctcaaacctccaagcggagcaccccaataaaggagttggtgagcaaggtgatgagggtaagtccagtgcgtgaaacccagccccgaaggggttaaaactaccgatgacgctgcctccgaggggccagatccacaaagggttaaatcccctgccgcagagcccacaaggggttaaagtcccggcgccacctcctcccacttccacgggtgtcgcttccacccaagctcccagttccctaggcccggccgtagcctcagcagaggacagacaaactcatctcccctttggctcgatgctctgctctgcatacagttctcggctccgcccctcgtgccgaattacacacgngggcctcgtacctagccgat

SEQ ID NO: 81257 - DNA, 984 bp, Homo Sapiens
  misc_feature (37)..(37): n is a, c, g, or t
gcggccgcggatctcggcggcttcggcggcgtccttnggcttcaaacaggatgccgttgtcctggtcggtaaacagtgtttgctcgcggcgcccttcgctgccgaaacacagccagctgaagggcacgtcagggtcacctttctcggccagagtcagctcgatcactcggcacacagtgtggtcgttgagcagggtaataatgtgggtgatctgagtcgaggaggcaccatgggccagcatgcgttcgaccagttggccgatttcaccgcgaatcgccaccaggttttccacccggggcgcgttgcgaatggtgcgggccaagtgcaccaggtcgacacgttgcagggaaaacaggtcgcgctcggacaccacgccacacaggcgctggtctttgaccaggcagacatgggcgatgtgtcgctcggtcatggcgatggcggcatcgaaagcgctgtggtccgggcttaaaaagaacggcgcctgggtcatatggccggcgatggcttgattgaaatcgccggtgccatcggcgaccacctggcgcaggtcgcgcaaggtgaaaatccccagcggcgccttgtgctcgtcgacgatcacgatgctgcccacttgttgctcatgcatcagtgtcactgcctcgcgcagcggcgtggtcgggctgcaggtgaccgggtggcgcatggccaattcacccaggcgggtgttcagtgaatactgggtgcccagggtttccacggccttttgctgcacctgctggttgacctgatccaacaggctgctgactccgcgcagggcaaaatcgcgaaacgggctggaaagggcgaacagcttgataaacgccggcttgttcagttgcaggcagaaggtgtcttcggcggctttgtgctcggtgcgtgtcgcacgctcacccagcaacgcggcaagagggaagcactcgccggttgtgatctcgaaggtggcttgcgtcgagtccggccgctcgc

SEQ ID NO: 81258 - DNA, 508 bp, Homo Sapiens
  misc_feature (477)..(477): n is a, c, g, or t
ggcacggagggaaatagcggcgagcagggtgttgcgcatcttctcgccttccatctgcaccagcgtgctttgcgccacttcgacgaaatgcacgcgctccagcgcaatcgccaattggctcatgcaggcttccagcagacggcgctcctgcgggtcgttcaggcgctcgctctgggccagttccagtaccagcacgccgcgcacgcgcatcggcgctttgagcggtaagtaacaacctttggctgctgacaaggtgtcggtgccatggcctgcggcttggccatggtcgtaagtccattgggcgatgctttcgtcaatcggcaagccgctggcactcacgctgtgcacgccatcggcggcgtccggcagcgccaggccgacgcgtgcttcgaacacgccactgaaggtgcgcagcgcgacttcgctgatgtgctctacggtcagtgccgccgacaagtcgcgagccagccgcgccanaagaggtagcgcgccgttcgcgcgcggccgc

SEQ ID NO: 81259 - DNA, 976 bp, Homo Sapiens
  misc_feature (910)..(910): n is a, c, g, or t
gccttggtgtggtcctaccctggctgcaccggctcatccgcaggaatcccctgctctggcttcttcagtttctcttccagacagacacccgcatctacctcctagcctattggtctctgctggccaccttggcctgcctggtggtgctgtaccagaatgccaagcggtcatcttccgagtccaagaagcaccaggcccccaccatcgcccgaaagtatttccacctcattgtggtagccacctacatcccaggtatcatctttgaccggccactgctctatgtagccgccactgtatgcctggcggtcttcatcttcctggagtatgtgcgctacttccgcatcaagcctttgggtcacactctaacggagcttcctgtccctttttctggatgaacgagacagtggaccaatcattctgacacacatatacacgctcctgggcatgtctcttcccatctggctgatccccagaccctgcacacagaagggtagcctgggaggagccagggccctcgtcccctatgccggtgtcctggctgtgggtgtgggtgatactgtggcctccatcttcggtagcaccatgggggagatccgctggcctggaaccaaaaagacttttgaggggaccatgacatctatatttgcgcagatcatttctgtagctctgatcttaatctttgacagtggagtggacctaaactacagttatgcttggattttggggtccatcagcactgtgtccctcctggaagcatacactacacagatagacaatctccttctgcctctctacctcctgatattgctgatggcctagctgttacagtgcagcagcagtgacggaggaaacagacatggggagggtgaacagtccccacagcagacagctacttgggcatgaagagccnaaggtgtgaaaagcagatttgatttttcagttgattcagatttaaaataaaaagcaaagctctcct

SEQ ID NO: 81260 - DNA, 673 bp, Homo Sapiens
ggggcaggcgcggtggtcggacgacagaccgtgtgtttccaaaatggcggcagcgatggatgtggataccccgagcggcaccaacagcggcgcgggcaagaagcgctttgaagtgaaaaagtggaatgcagtagccctctgggcctgggatattgtggttgataactgtgccatctgcaggaaccacattatggatctttgcatagaatgtcaagctaaccaggcgtccgctacttcagaagagtgtactgtcgcatggggagtctgtaaccatgcttttcacttccactgcatctctcgctggctcaaaacacgacaggtgtgtccattggacaacagagagtgggaattccaaaagtatgggcactaggaaaagacttcttccatcaagcttaattgttttgttattcatttaatgactttccctgctgttacctaattacaaattggatggaactgtgtttttttctgctttgttttttcagtttgctgtttctgtagccatattgtattctgtgtcaaataaagtccaggtggattctgaaagacaccaaacaaaaagccataaaagacaaaacacttttgggggcaccaggggccccaggaaagagttttttaaaaccaatagtctaggggggcccgcgggcccaaagtcgttacggaacagtggccc

SEQ ID NO: 81261 - DNA, 589 bp, Homo Sapiens
  misc_feature (74)..(237): n is a, c, g, or t
  misc_feature (507)..(544): n is a, c, g, or t
aaaaagtggaatgcagtagccttctgggcctgggatattgtggttgataactgtgccatctgcaggaaccacannnnnnnnnnnnnnnnnnnnnnnnnnnnnnnnnnnnnnnnnnnnnnnnnnnnnnnnnnnnnnnnnnnnnnnnnnnnnnnnnnnnnnnnnnnnnnnnnnnnnnnnnnnnnnnnnnnnnnnnnnnnnnnnnnnnnnnnnnnnnnnnnnnnnnnnnnnnnnnnnnnnataaaaaggcatagaatgtcaagctaaccaggcgtccgctacttcagaagagtgtactgtcgcatggggagtctgtaaccatgcttttcacttccactgcatctctcgctggctcaaaacacgacaggtgtgtccattggacaacagagagtgggaattccaaaagtatgggcactaggaaaagacttcttccatcaagcttaattgttttgttattcatttaatgactttccctgctgttacctaattacaaattggatggaactgtgnnnnnnnnnnnnnnnnnnnnnnnnnnnnnnnnnnnnnnagccatattgtattctgtgtcaaataaagtccagttggattttgg

SEQ ID NO: 81262 - DNA, 736 bp, Homo Sapiens
  misc_feature (546)..(546): n is a, c, g, or t
gcacggccgggttggcgatcaatcgctcgacaatcgcggcggcatcggccgggacattgctgatgacgttgaccacgccatcgcccagaccggcgtcctgcaatacatgaccgatcaggcggtgcactgccgggctcagctccgaggccttgagcaccacggtgtttccgcaggccagcggcatggcgatggcgcgcgtggcgaggatcaccggagcgttccacggcgcgatgcccagcaccacaccgcaagggtggcgcaaggccatggcgaaactgccgggaacatcggaggggatcacttcccccgtaatctgggtggtcatcgacgccgcttcgcgcagcatattggccgccagacgcacgttgaagccataccagttggccatggcgccggtctcgccggcggcggcgatgaattcgctgctgcgcgcctgcaattgctcggcagcgttgagcaagcgggtgcggcgttcgttgggcgccagcgccgcccacgcggggaacgcggcgtgggcggcggcgaccgcggcgtcggcatcttccnagggtcgccgcagccacccgcgagaccacttcaccggtcactgggttgcgacgttcgaaggttcgaccgtcacgggcggggcacgactggccgccgatcaacaggggcacgtccagcatggtgattcctctttattgtctttatcgggaatacgatcaagcagggtacaacgacgcggccaggcggccgc

SEQ ID NO: 81263 - DNA, 812 bp, Homo Sapiens
  misc_feature (632)..(654): n is a, c, g, or t
cctttggatgtactcttccaaccagacaagagtgccagaaacttgcaaagcaattcatcctgtggaagttgcaaatactggctgacctgcttaaaaagattctagagttggccggaggcagaacatgtcaactctttgctggattctatttcatctgctgttgatactgatctcaatgcaccaaggaaaggaaagatgagcctcctgtcttccagcaacaaccctcacatatgcactgagtaaaggatgaatgtatggacacatctgggagtattttaaagaatgtatcttgccttgtgttgacccaaaccaaaaacatttttgaggggcacatgtggggtcaaaaagatagccaatttccattacatgggtttacaatttccattcttttgtgccacgagtgttagaatttaaatgaatacttttacaaagtctactttttgttcaaggatatgctgacccatatagtttactcttaaaattgtgtcaaggtatttctcactatactctaaaacaactagacttgaaaagaaaccatttgagatttgaatctaatggttaacgctattcagattttcccaaagatcttacctcatgaaagtagttctgggtcagaatgatctactcagttnnnnnnnnnnnnnnnnnnnnnnntaagcgattgggaaaaaacaggaattttatctggttattgcatctggtgatagaggccttcaaagcctattatttctaacctaagtaaaggccccagtgaaaaacatactggggaaataaaacctctgagaaaaggttcaagcaccttttccaaattt

SEQ ID NO: 81264 - DNA, 476 bp, Homo Sapiens
aaattttcaatgttttaatagtaagctcagagtgacccaatttattttgttcgtatacaatttataatgtagttgcattattccgtatttgtatacaaatctgctgttcaataagaacacattctctttactgtaccacagtacagtaaatggatccaatcccaattatgcattaaattgtgccaactgaataatcttaaaaactttatgtttaatgaagtaaatttatcctagattttctagaaccttaactacaaatttatcagagaaatacggtattgcttttcaagaactagttgttcttaaatttaaaagaaaccattcagtagtgtttaaaaaaccaaacaactctgaaaataacccatcaaaacataatattaaaatcatttgatttctgttggaaaaccaggttaaacatagtttaaatgcgtttttgtctatgaaagcattcagaaaattctacttttcacaaaaga

SEQ ID NO: 81265 - DNA, 725 bp, Homo Sapiens
gcggccgcgccgtgcgcatgctcattccctacacgctgctggaagccgaggaacgcgcggtgctgagggcgctcgcggcagacagcgcgcaacgctcgcccctggggcagcgggcccgatcgcaggcgctggccggccggaccgactggtcgcagtggctgctgcacgtgcggcgccgtggccaccgcctcatcgatcactgggacgtgcgctgcgtggcgcacctcatcgcgcactttcccgagtgtgtgacggagcgccagcggcgcttcgccatcgcctgccacgtgaacgacggcgccgaggaatgggtcgtcgccttcacggaagcgcccgcggcgcgggaccggcgatgagccgcggtccgaagcccgcggcgggcccacccgacctcggctggcgcgacgacgggctgttcacgttgttcctgccgaacacgaaggccggcgaggacgcctggcgagtgctgactgcgcacaccgagggcaccggcaaggtgttctcgcaccacgcgccggaggtcatccgccagcttcgcgcccagggatacaccgtcgcgcggctgcccgccggcagcggcgggccttccagggacgacgcgctgctcgccggattgctgggcacaccgcagccgccgagccggccctagccgcgccacggtgcgataagcggacagccgggacacccggccgcgtccgcgctcgcgccactggcgcgccccatca

SEQ ID NO: 81266 - DNA, 888 bp, Homo Sapiens
ggtacccagcaactagaaaaacaaccggaaccggcggcaccagctcggagagaaaggaggttccataggcagttcttaccaagaagatgtcgattccattctccaacacccactaccgaattccacaaggatttgggaatcttcttgaagggctgacacgcgagattctgagagagcaaccggacaatataccagcttttgcagcagcctattttgagagccttctagagaaaagagagaaaaccaactttgatccagcagaatgggggagtaaggtagaagaccgcttctataacaatcatgcattcgaggagcaagaaccacctgagaaaagtgatcctaaacaagaagagtctcagatatctgggaaggaggaagagacatcagtcaccatcttagactcttctgaggaagataaggaaaaagaagaggttgctgctgtcaaaatccaagctgccttccggggacacatagccagagaggaggcaaagaaaatgaaaacaaatagtcttcaaaatgaggaaaaagaggaaaacaagtgaggacactggttttacctccaggaaacatgaaaaataatccaaatccatcaaccttcttattaatgtcatttcttcctgaggaaggaagatttgatgttgtgaaataacattcgttactgttgtgaaaatctgtcatgagcatttgtttaataagcataccattgaaacatgccacttgaagatttctctgagatcatgagtttgtttacacttgtctcaagcctatctatagagacccttggatttagaattatagaactaaagtatctgagattacagagatctcagaggttatgtgttctaactattatcaaatgaataaatcctctctatcacatcccccaaa

SEQ ID NO: 81267 - DNA, 894 bp, Homo Sapiens
  misc_feature (83)..(83): n is a, c, g, or t
  misc_feature (145)..(145): n is a, c, g, or t
  misc_feature (163)..(730): n is a, c, g, or t
ccgttgatcagcgtatacgatagcccacgtcgctgacggggtctcacacacccagctgagcgacgactacccgaactagatcntacagcgtagtatgagaagcccaccttcccgaggagaaaagcgacagtatccgtaaagcgcnaggtcggaacagagagcnnnnnnnnnnnnnnnnnnnnnnnnnnnnnnnnnnnnnnnnnnnnnnnnnnnnnnnnnnnnnnnnnnnnnnnnnnnnnnnnnnnnnnnnnnnnnnnnnnnnnnnnnnnnnnnnnnnnnnnnnnnnnnnnnnnnnnnnnnnnnnnnnnnnnnnnnnnnnnnnnnnnnnnnnnnnnnnnnnnnnnnnnnnnnnnnnnnnnnnnnnnnnnnnnnnnnnnnnnnnnnnnnnnnnnnnnnnnnnnnnnnnnnnnnnnnnnnnnnnnnnnnnnnnnnnnnnnnnnnnnnnnnnnnnnnnnnnnnnnnnnnnnnnnnnnnnnnnnnnnnnnnnnnnnnnnnnnnnnnnnnnnnnnnnnnnnnnnnnnnnnnnnnnnnnnnnnnnnnnnnnnnnnnnnnnnnnnnnnnnnnnnnnnnnnnnnnnnnnnnnnnnnnnnnnnnnnnnnnnnnnnnnnnnnnnnnnnnnnnnnnnnnnnnnnnnnnnnnnnnnnnnnnnnnnnnnnnnnnnnnnnnnnnnnnnnnnnnnnnnnnnnnnnnnnnnnnnnnnnnnnnnnnnnnnnnnnnnnnnnnnnnnnnnaagaattcggcacgaggaagtcactgaaaaacagcttagagattatgtaaaatggcatctatgggcttgtcaatctatccccgtgaccatacagtttgggggtgaaacagacccattataatgggtcaaaacagagtaagcagtccagaagaaagttaatattc

SEQ ID NO: 81268 - DNA, 1134 bp, Homo Sapiens
atattctacacaaacccttgcattttctgctcgcggtgataatgtaaaattttaaatttgcttaaataacacttcttatatttctaaaagcctcaaacttccaaacttgaattttcctaatatggattccataactttagtggtcagaggacgtaaaagtctgtgtttaatgtacattaccctaattgaagaaatactggaaaaatgacattcccaactgttggctattatttttaccattaacttcaacactcaaaaaatgtttaatcaattaaggatgtatgaagcagcaccaccacaagctcagcctatcaattatttacagtcttgaataagtttcatgagctgccttatgcattagctcttgtttatgtttaatgacagctgaaaggttctgcatacatccttttatccagaaaatgcagaagatcaaatcaatatacttcctatagtaccatttttgttattaaatctatgggaatcccttagtgataagacgtcctttcaatgctttaaaagctaaacttcctttgctaggcttcaaaaaaaatctgcattatattaatttatgatccatggcaaattagtgaatgagaggctaacagagctctaaggtagcatttcctttaagcaaagattcttaacctttttcataatctgtggtagtctggtgaagcctacgtatttaaacgcataaaataaggtatgctgtgttacataggaagaaattgattatactgaaatatttaaaaattgtaatatagtaatatatgtgttccttgatgcatgaaatattaagatctagcagtgatctaaggactcccagaatttcaaagtagtgatgaatagaaacaatgtcttgagatagctacaacatatcatgtggtatgaaaatatctgtgatttctgttggtgacaaagtcacaagttctgctgattctactgtggtttcttgcctatatccatattttaagaaaatgctaaatttgagttaaaggttaataaaaataaagatttaattttttctccaagttcatgggcctacaggccaagattgctcagttcaggaattcaatatttgtcagtttccctattgtaaaataaaattaaaatatattattcatcccaaaaaaa

SEQ ID NO: 81269 - DNA, 1105 bp, Homo Sapiens
  misc_feature (75)..(89): n is a, c, g, or t
  misc_feature (706)..(706): n is a, c, g, or t
  misc_feature (886)..(886): n is a, c, g, or t
  misc_feature (930)..(930): n is a, c, g, or t
  misc_feature (948)..(948): n is a, c, g, or t
ggtggtaacgacggccagtgtcaatctacaattatcctcactaaagggcatagcttgtcggcgcggctgtaggcnnnnnnnnnnnnnnncccctctcactcccatactactaatctcatcaacacaacccccgcccatcctacccagcacacacacaccgctgactaaccccataccccgaaccaaccaaaccccaaagacaccccccacaagccaagtaatttactgtgcctacattctcggacgtgaggatacatcttttcaatggcgggatcattacctcttggcactggttgacgatgtttaccttcactgtggtcttaaccacgcttggttccactcggacatgaatgggggtactcacacttcatcgactaaggagactctcctgtataatctcaccaatagattcagtttcactaatctgcatctttcggatattcatccctttgagaggattgccacatattacacgccctccactttctgttgaagctgtatatggatgcgatcacctcatcactcatcttacagttaaacacttgactgttctcatcatcgcctgctggtgtcacaaacttactgatgagaatcacattcctctggatatggacacggttaaaaccctatgcagaaaggggacatcagggttacactcaggtccaaagccccttctgggctgcggtttttttgtgttttgcaggantctccttcctcttgggatcctccaacacggaaggcacttctggtgtggttcaacgtctatccggtaagcccatgcagctgtttgccccttgagagatcctcttggggtgccatgttgcatccatttctcttatgtgaggatttgtgctttcaccttgcacataatgaatctcatcacagntcacgcccttctgtattgcttggtcctaggagtcctccaattanattcttcatgaccgccantacccccactggaccttccattaccttgaataatctaccttccaaatttttctcacgcccgccctgttcagttacatggtgtctcccggtttacatttacaggctacttccacaaatacctttactgcttttatatgtttgaccctggtctgctggg

SEQ ID NO: 81270 - DNA, 915 bp, Homo Sapiens
  misc_feature (228)..(254): n is a, c, g, or t
  misc_feature (276)..(356): n is a, c, g, or t
acagatggcacaacctgcccgtttctccacagcatgactgtgacaaagagaaggaagacctgagtccactcagtggtgagggcagctcccaggtaccccatgtaaggaaaatggtgaagacggcctgatggacttggaagcagtgggttaagctatgttgatgtatcatttggtggccacttaggtaacacacatggaggtagaaagggcagaaaggtggtgctgggnnnnnnnnnnnnnnnnnnnnnnnnnnncagatggagttttgctctcgtnnnnnnnnnnnnnnnnnnnnnnnnnnnnnnnnnnnnnnnnnnnnnnnnnnnnnnnnnnnnnnnnnnnnnnnnnnnnnnnnngactctgcacaaaggtcacctttcagaaagccttgtctaacacaggaaaccctcaccggcacccattcttcctccccggggcctgctgtgtgtttctttctgccttctatactgtacatttgctgtgtgtttctttatggcctatcctccccaccgcctccactagtggtgaactcctcatgggaggaatctatcctctgcctgaggtaggccccacttcgcctctcttccttcttggacttggcccctccagtcggacatgctaggtaagccactttctggcctccgttctggtcctggttcttctctccctcagagatgtgtaatcccacagataagcctgggtctcactcctgcaaataagcagcacatgcctcaatccagggctgggcatggtcctctcaggcaccctctccccacccacacccgggctttcccagccaaagctcaggccacctccgttctccaaactcaaggcccatgtcttagtgaagccacgtgtcatgtccccatcctgcattcagaccagcctgtgacaaccacatctccaccacccagg

SEQ ID NO: 81271 - DNA, 1343 bp, Homo Sapiens
  misc_feature (542)..(542): n is a, c, g, or t
  misc_feature (976)..(985): n is a, c, g, or t
gcttgtcctatctggaatggagctttggccatcacaactggtgtgcttctactgttggcttacagagagtggacccagaggtacctgggggaagctactttcacctttgtgattctgagcattatgggatgtccacttcattttgcaatagccttggaatctgctctcctgggcccatattgcttctattcattttcagggattgcagggactaattaccttggctatgcagttacctttccttatccatatgcaaaattcccattagcctgtgtggacccaccacactacgaagagtaccacctgacacttcaagccctagacctgtgcctaagctttaccctactctgtacatccttgacagtgttcatcaaactttctgcaagacttatccagaatggacacataaacatgcaactccctgctgggaacccaaaccctttttcaccataaaaggtaaaatggtctggggatagaaaaggcctgggaccagaatataaaagcacacagattaatagaattataaaatgtaagatgttaanacaagcttaatataaggtagttgaactcctttacctaaatgtcttattaaaatgggtactgcatctgactgggatgtttcccctttctagtactatgaagctgaaggcatgtaaatctgctcttttaggaaatgttaattaaacatgctaaatgggaactagtaaaatcacctaagcccacaaagtatagggtagtacctggagtgctagtctagattaattagtcactgcatagccctttgtgtggagcattcatcggggctgaatggcaaaagactgtgagtgtttttctataacaacaactgaactagagaatttccacttgatggggcatttactgccttgttatagaatattaactgaagctacctctatgctaatggaaataatggtgcccaaaagagttccatgataaaataaaaatggtttacatnnnnnnnnnnctcacacacatggaatcaagtaatatttgacaagggtgtcaggaatgcataatgaggaataatagcctttttaataaatggtgttaggaaaactggatatctacatgcaaaagaatgaactacgaccccgatctgaggccagtcacagaaattaacttaaaatggattaaagatttaaatgtaagacctaaagctgtaaaactactgaaagaaaacatagggataaagctccattgacatttgtcttagcactgctttttttggatatgacatgaaaagcacatgctaccaaagcagaaataaacagtgggactacatcaaactaaaaagcttctgcacagcaaagaaaacaatcaac

SEQ ID NO: 81272 - DNA, 291 bp, Homo Sapiens
gtgttaatatctaccccctttacttgtaagatacatataaactaaaagtaaagggggtagatattaacacaaacagaaaccaaaaacagacagcagtatctgtcttatatcaaataaaacagactttaaaaagaaatattattaaacctatagaaagagatggacacatctctttaggtaacacaatatctctataggtaacacaataatagtggagaaattcagcattctactcacagcattagagagaccattgagataggaaagctggcaaatcaacaaagtactccc

SEQ ID NO: 81273 - DNA, 420 bp, Homo Sapiens
  misc_feature (213)..(222): n is a, c, g, or t
tttctgtgacaggtgcctcaccactcctccctcaaaactcaccttccctcatgggctttgtgctcccaaagctccccttggggtgcacgtagcggctgaggcacaccctgagctcgaaccagggacaccagggtccccgggtcccagtgcagggactgatgggaagacactttcgtccgtggggaatcaggccgcgcttctctgcagcgaagnnnnnnnnnnctctgccccaggtgcctcgccttccccttatgggctttctgcccaccttggggtaacactagtggcccgaggcgtaccctgggatcaaaccagggacgccagggacctcagtgccaagcgaacgggctaaggagaagacaatttcctccgtgagggacccaggcactgcttctcggcggcgcgtatcttcctcgtgcc

SEQ ID NO: 81274 - DNA, 695 bp, Homo Sapiens
tttcatgtaggcacttatagctatcaatttgcctcttagtactgcttttgccgtatcccataggttttggtatgttgtgtttcctttatcatttgtttcaagaaattgttcaatttccttcttaatttcttcattgactcaatggtcattcaggagcatattgtttaattttcatgtatttgtagtttcaaaaattcctcttgttattagtttctagttgtattccactgtggtcagagaagatgcttgatggtattcaacttttttaatgttttaagacttgtgacctaacatatggtctatccttgagaatgatacatgtgctaaaaaagaatgtgtattctgcagccattggataaaatgttaggtcacaagtcttaaaacattaaaaaagttgaataccatcaagcatcttctctgaccacagtggaatacaactagaaactaataacaagaggaatttttgaaactacaaatacatgaaaattaaacaatatgctcctgaatgaccattgagtcaatgaagaaattaagaaggaaattgaacaatttcttgaaacaaatgataaaggaaacacaacataccaaaacctatgggatacggcaaaagcagtactaagaggcaaattgatagctataagtgcctacatgaaaaaagaggaaaaacttcaaataagcaatttaacaatgaacct

SEQ ID NO: 81275 - DNA, 1024 bp, Homo Sapiens
  misc_feature (232)..(232): n is a, c, g, or t
catgcggccccacccaaggtcaggccctgatggattttatgacccctgggagtttatgggtcattgaggacacagggtgtccttacctaccagcagactggcctggacgttgtacctgagtttggccttacgtacctggcactgttctccctgctttgcccagatgccagaataactgggaggtgttatgctctcactttttgtgagtgcgatgagccccctggtggttctntcaccttggaagtgactatccctggagtgggtatcataactgtaaaagcagaagttactgcttttgcagagcacaccgctcgggctctgaatcacacccgaggggccctcctcctgtcaattgatgcagttgatcagatcaggaaggtggtgttgcaaaaccgaatggccttagacatagtaactgctgcccaaggaggcatctgtacccttttaggaacacaatgttgtacctttatccctgacagtcagcagaacataacagcagcccttcaaggggtctcatgggagaataagtttctagggagccttactgatgaacccctgcagagaaggaggggcatccctaggctctggcctatgctgggccccaatagttataaatagcataactgggatcctagtagctgttgctctctgtattgttattgtgggttatagattcagggctctgctgtatgggcacatgtctctgcccggaggacactcttggcctagggagtggagggtaaggaaaatggctgcactttagtcaggaataagctgaggcagccttccaaagcagcataactcagtgggtttggagcacaggtgcacagccctgcacattatgtaaccacaccatgtgaggtgcattaggtgatcacacacgtgcgctcatgttttgctcagaaccactattgtctgtaaaaggtatggttaccctactaaagctgtacatatggctcacccccaggctcactcatgcccagactcactcgcacttagagagagtaaagccatgtcaaaactg

SEQ ID NO: 81276 - DNA, 670 bp, Homo Sapiens
  misc_feature (462)..(581): n is a, c, g, or t
  misc_feature (587)..(587): n is a, c, g, or t
tgtaagaattaaagaggaaagaaacacaaaaaggggctcaacagccaaagacaggtttatttagagaataaacctgagaagggcttctggttgattttggtcaggagtgttctaacagactaaggatatttaagagtttaggaagtgggaagatcattgtaggttcggaatgtttctatgtgagggaaagtttattgtagggttagaatgtctctcgtcagaggggaggctatcttggggttggcatgtttctggttggaaagggttttatcttagggttggaatgtttctggttatgctgggagttggtttcccagcatagggaaatgccctgatgttctgggactgacgttctggggctggatttaggcagtttttaatcaagaggaacacagaatgttggtatttgtccaagatggcgatgctcctgctctgtcatgcaccaccacacctggctaatcnnnnnnnnnnnnnnnnnnnnnnnnnnnnnnnnnnnnnnnnnnnnnnnnnnnnnnnnnnnnnnnnnnnnnnnnnnnnnnnnnnnnnnnnnnnnnnnnnnnnnnnnnnnnnnnnnnnnnnnngtgtgntgccctgtgccctggcctgtttttctacatatcagttaatagatttattaattaagtaaccactatcttttttcctttttgag

SEQ ID NO: 81277 - DNA, 1034 bp, Homo Sapiens
  misc_feature (69)..(69): n is a, c, g, or t
cattgagtaggcactcgtaggcacacagcttacacttatgatccggatgtatgtgtgtgaatgtgagcnataacaattcacacagaaacagtatgacatgatacgaattatacgactcctataggaattggcctcgaagccaagaatcggcacgagattaaatccataaatggggtgctcctcctcctttaaaccatttatgttaaaagaagcttctgggccagcagggctgtttgaattttgtagaatggtgagaagccaaaaagaaaaagactgaaattgacacactgtccctcttagtgcctctgcagagactgaactcagtggctattatgtagctacaacataggcacactgtcataagtattgtctgtgtttctctagtctgggtgttttccttgcgtattagttctgagtgctaaacaacaacaaaaggtgtctttgaaaagataaggtggcaaacattgtttaacatacctccttgagaaaagtttcaatattttccccaagaatgatgtcagagttaggctttgctagtgctgcactacgtgtggctggtaaaaaaattgttagtggaactctacttctgtaagtgttgttcttgtttgtcccttgcagtgattttattagatggtgggaaagtgtttgtattaacccttcagcatcactgaacttggggtatcccatttctgtatttatgttacacttcctttgattgaaccattattttctaattatttttaatcaagaagcattaaaataaggatgaaagtaaatagattaaggattaccagtttcctaaatggaacctgactaaatgtaaaattaagtcaacacacccacacagagaattccacgaagctaagtagcttttgaatacacaactctgtatatgctagtgcagtggtcaaagtgtgagatggaggacctgagaccctttcacgggtccatgagggcgaatgtaatgtcataataatactaagattatttgccctttttgctgtgttgatatttgcactgattgtgcaaaagcc

SEQ ID NO: 81278 - DNA, 670 bp, Homo Sapiens
ggcacgagggaaatatgtggtcctcattctgagaaaatgtccatattactcttctctttgcattccttggccaaagctaaatcacatggcttgggtagcctcatgagagactgggaaattagagggttttggttttgttgttgttgtttaaagcagagtctatgtcaccctaattaaaatcagtgtttcatcttttattcttcctcaaatattcagtgttaaagtcactaaagggcaccaaccaaagtaagcatcaatgagaggggataggacagagatctggcatggggtgttgaagcctagaattggtgcacgacctagttctagtcacgaaaaagcatcagacaatccccaattgagagctcttatacaacataaatggcctgtatctttaaaagtatcaaggtcgagaaagtaacaaagagactgatgaatctgccggaataagacgtgacaattaaatgctatgataatcttgccctgcaagattataaaggacattattgggatggtcagtgaaacctgaatggggcctttggattagatggtggtaatgtatcaatgttataataatttcctgactttaatggttgtattatgggcatataggagaaggtccttattgcaagaaacacacagtaaagtattgggaaatgattcgaggagaggg

SEQ ID NO: 81279 - DNA, 1208 bp, Homo Sapiens
  misc_feature (95)..(120): n is a, c, g, or t
  misc_feature (271)..(381): n is a, c, g, or t
  misc_feature (423)..(516): n is a, c, g, or t
cagtcgacggtaccggacatatgcccgggaattcggccattacggtcggggataaggttcaaaactattaaaatggacaaggcatgtaaagtcannnnnnnnnnnnnnnnnnnnnnnnnnccccccgttagaacctctggcagggactgactagcccatgaaacttatttcttcttcccgggcacacagctaaactaaatttcacagctttccttgtagttggttatagtcatgtgatgaacttcttttttggggacagagtttggctctnnnnnnnnnnnnnnnnnnnnnnnnnnnnnnnnnnnnnnnnnnnnnnnnnnnnnnnnnnnnnnnnnnnnnnnnnnnnnnnnnnnnnnnnnnnnnnnnnnnnnnnnnnnnnnngcatgtgccatcacacccggctaatttgtatttttagtagannnnnnnnnnnnnnnnnnnnnnnnnnnnnnnnnnnnnnnnnnnnnnnnnnnnnnnnnnnnnnnnnnnnnnnnnnnnnnnnnnnnnnnnnnnnnntgagccaccgagcctggccgtgattaacttctagccaattaaatatgaatggaaatgatgtgctcatttttagggttaatgaagtcctcctattctcccttactctttcttcgtcaacttgatgcctttgagcatggtgaccttcaaaactatgtattggagatgccaaagccagaaaagagaagaatgagtggctgaaacagtacttggaagacagccaccccaattagaaacacccctttttgcacttactgtaagagaaaaaattgagatttgagaatttatatgtataggagctagaatgaccatagctagtccagaaattggtacaagaagtggagtactgctaaaacaataacctaaaatatgttacatcagcttatttatgatgcagcaggtggtagagaatgtgatttggaggctagaaaaaggaggcccatgtttgcagtggcaaagtaattagtaaaactgtcacctgaaataattcaaaatcagatcacctatctgtttagattagctccagaggaaatgattgaaaagagcaaaagtaatactgtgttgaattttacattttacttttagtaaggttttactaaagagagaaactcaggaaatacttcacagaagtgagagtgtacaggaatatttctccaggaagggttggaaaagttgacttttataagacttctaat

SEQ ID NO: 81280 - DNA, 414 bp, Homo Sapiens
gtatctgtgaagggcaggccgggcctggacagctgggggaaggctgtggcattttaggtcacagtgattcactgggggcaagagagggtagatcgggggccaggttagtggttctaggttttggtcctaagaagaatcccttaaaaatagactgatgatctgtgtttccaggcaaaagcatgggactactgtgaagtcctactaacatatgaagatgaagagaaaagaaaggttttattaatagtttaaaaggtgttttaaaagattccacccattcattttatttattgtttattgtttctgccttttctactagtcttaccaaatccataatgtgtttttatttatttatttttagagatggggtctctctttgttgcactccagcctgggtgagagtgagaccctgtctcc

SEQ ID NO: 81281 - DNA, 630 bp, Homo Sapiens
ggcacgaggaggtcctcgacaggaacaaaagagtcacccccaccaacgctcttgccagaaatgagctgaaattcttggagaagtctcggagccaaaattctcagggagaagtcccagaagactgcccatcaggcgaggaaatgtagggaaaatgtaatgtgtaaaatgatgagctggagaaccatcaacgagactgcactgagctatgtcttaatgaggcgaactccaaagacgcttttcctttaatctggcatttgaaacgaaacactgctaagacgcccccacctcacccaccccaccctcatgcgttgccatgactactcaagttcttagaccatgaaagaacaacctcagcattttcctctgcaacaaaagaaaattattccaggtttctaggtaaagaactccaaggaatgggacctgttactggatagcaggttcttcagaattgctagggatgaaatctgagcctacagggaccacagctgtctgaaaagccagtggaaggaaactgagggtgacagggcccccactctcgcccaagctcacacagcccatgctctgtcaccatggctggttccctcccctcagctggacctcatttgctcctgcaatgaagcaagttaaaag

SEQ ID NO: 81282 - DNA, 841 bp, Homo Sapiens
  misc_feature (58)..(156): n is a, c, g, or t
  misc_feature (366)..(374): n is a, c, g, or t
  misc_feature (705)..(717): n is a, c, g, or t
aggctggagtgcaatgctattcacagacatgatcctaactcactaccacctcaaatcnnnnnnnnnnnnnnnnnnnnnnnnnnnnnnnnnnnnnnnnnnnnnnnnnnnnnnnnnnnnnnnnnnnnnnnnnnnnnnnnnnnnnnnnnnnnnnnnnnnagttctaccagaagcttagattactttggttatctttttaaaagaaaagcctaaatgattttcagttgaatgagagaaggatacaaaccctgccctcctcactagaaactgatcttaaaaccactgatgtctacctaccaaattaagaggacaaaagtcaaggagatgaatgtgatgattactatatcattatgtgtaaactacccattnnnnnnnnngtttaaaattctccttacattctcatttactgtattatctataagatgatcagatcatttggtttagggttctgttctaatgaagtacggtcttttcttggccacaggtaactgttaactccaggcatctcacagaggcaaaaagacaatccaaatccacaccagtactagcaaaccacttcgaataccctggtaatgactggtagctcagaagatgtatatgagtgacacattatattacactttaaccctacctttccacagatgatggaaagataaaagtagaagcaccacggtatctaaaaagacacaaatggaaccgaggccaagnnnnnnnnnnnnnggagactgactgccccacaccacaggtgtgtccaagaagattgtctatataactcaacagatgtgtgtgtccagtagggttctggctgtaccacacaacggatgtatgaccttggactcgttct

SEQ ID NO: 81283 - DNA, 355 bp, Homo Sapiens
  misc_feature (75)..(190): n is a, c, g, or t
  misc_feature (192)..(200): n is a, c, g, or t
agggcccaagcaattccccatgtcagtctcccaagtagcagggattacaggcacccgccaccatactccactaannnnnnnnnnnnnnnnnnnnnnnnnnnnnnnnnnnnnnnnnnnnnnnnnnnnnnnnnnnnnnnnnnnnnnnnnnnnnnnnnnnnnnnnnnnnnnnnnnnnnnnnnnnnnnnnnnnnannnnnnnnnaacgctgtgctagtcaatagggatttagttttgaatgcacttatgctcctaaagttaagttttttagagactctacaattttctcaccagtcacaactaatcaataaaacagtgcgtatgttacagcaccaatgttaaaattttgatacagcccc

SEQ ID NO: 81284 - DNA, 967 bp, Homo Sapiens
ccaagaattcggcgaggctgaaaagaacacagttatgttggggttttccccaagcacagctcctcaatctcagctttccaccctttgctgggtccttccctcattcagctttatgggagtctttatagaattcctactctgaaggtggcgcctgggtcaccaagtaagacacagaatttgcccttggggtgcagaaatagtgggtacccaaggcaggatgccccaggcaccatgaggacatccagacaggggggtcagcagcctgggactcaatgagaggaaggcgctgaaacccagaggccaccccaaagttcagaccctgagagggttaacttatgcccacccccaccaagccggactcttttctcaccagagtggacacaacctgaaaaccaactggactgagcatccttctcctaaaatctcagccagaagccacgatggagggtcctgggaagggaagagatgtgaagatttctgtgattctaaaaccttgggtctgcctgcaaacttctctctgatcccagccgagagctgtgcacacgctagctagccctgtcacacaatagcccagtgttcccgtcacagtgcctgggaatgagaggcttttgaggccacagagctatgacaagtccccaggttgaattgactctgggaggacaaatttctgagagactcacgggacccttatccaggacaacctcacaaagatccctgaaactgagcttcctctgcttcgtgcatagtttgaggtataaactttccttgtgtctcggtcagatgaagtgaaggatgaatattatcccaggctaaagtaacgaaaagtccagaagccagcgatgacagagatgtgtgtggaagaaggctgtgagcatttccatcaaaccctgtgagtttccgaagatcttatcccgaagatatgtgtttggccaataaaacactgaataaaaatccatcatgtttccag

SEQ ID NO: 81285 - DNA, 698 bp, Homo Sapiens
tacaggcgtgagccaccacaccggccacgagggctatgtcttaggagaggtgttcagtggagtatcttagcattagacagaaaaaacctcccatcctggcctaccgcatttgagatttataaatatccaaattaaccaaggaaacaacagaaaaacagtagttggacaaagagtttgtgtgtgctacatgtttattttatctaataggagacaccgaactagaaacatctacattcaagaagaatccctggatccacagttccttttatcaattcacaaaagccaggccgagccaaccttacccaatatattccacaggtgggcccgcctgaagcctcgctgtgatgccaggcagccagcctgaagaactggaaagccagggcccgtgcacgctgggctcctgaagacaaaggaaacagaatggctcgggaaggcgcgtggcaccctgcccgcctccgtggtagcctggggccactggatcttgctgtctccgcagcacctgagaggtgtgagccaggcagccaaccacatcagaagctggctgccggctgccccaattgcacaacacctccaggggagccagctttccaggactgggttttacacaccatacgggcactggccatgttgacccagtcaaggcatggcaccttgaagaatggcccacgcaaagaccggccatatggacagaaggcatc

SEQ ID NO: 81286 - DNA, 519 bp, Homo Sapiens
gggtggagagggtaaaagaagggagggagagagaaaaagacaagacgacaagtatatttatatacatagtaaatgttcaacaaatgtttgaccactaaatacaaaatagccacatgcactaaggttattactatatcatgatttaacatttattaaggtagtccatactagtcatgacacacttctcaatctacattactaaacaatgaaaaactaatgaaattctacccctgtacttaagacttaacagccattttcagaataagttttcaccacaatttagtaatcctactttcatctaaacagaaaatcgtaaaaaacctaaaagcagtctctgctaataataattttagccttcatttcttcttccaatacctacaactataaaagatgctttcccaattataacctaccttccttttttccaagagctatttataaaataaacttccttatttgacagaatctatgaaatatgactttaaggaaacttagagtaacgttttgattcctcttgcc

SEQ ID NO: 81287 - DNA, 792 bp, Homo Sapiens
gggttggagccaccacgcccagccatccctttattatcacggatattgctgatgacatttcacagctgactgggctctgcagttgagaattactgagaatcgctgctccaggctcgaatccatcaccttcggtgatgtttgtttgggcttctccatccaggcagacactagtcaccacttagggtgggtttgaggagtttcatccttccttttggtgttggtgggagattatcagggaagtggagctcagggacccccagcgaggacccttgcatctttgtgaggtcgagcatggtgtggtgggaggagggagtccaggaaaaccatcaggatgtgctgatgataagcactggggaattctcagtgtgaaaggagaaacactgaacatggcttggcttgtggagaggagatgctgtttggcgtccttctgagatctgctcaccctttatgcctaacggccttgctggaccacagcatggatgcttacgagttactgtgtgtcaaatttaggctcacttttgcctaaacttgtgtatttcctggggtggtaatttgaccttttcatctgttgacaagcttaaaaagttgcaggaactttgccctcatggtgggcatctcatgatcataatgaagttataaattaaagtcaaaattaagaagttaaactccacacatacacacaacctaataggaaatacatgtaaatatttacctcatctctgaattaggagggcctttcaaagcatttagatgatggctgatatcccaaagggaaaagtatctgacaatatg

SEQ ID NO: 81288 - DNA, 300 bp, Homo Sapiens
  misc_feature (74)..(74): n is a, c, g, or t
ggcacgaggcactggtaattgtcccatgctggagttttcagcagttatcataggattgagtgcaggaggaggcntgtggagaacacctaaccctctgattttatagatgaaatgacagcccagggttgctgaattactgagagctcaaagctccttggtgcaaatctaggactagagctctctcctcccgtagcttcgaattgagcacagtgtcctttactgtcacccaccttgcctcaccctacctaccccacatgctggcacttgccaccacaaaagaataaaaacaagcctacagcc

SEQ ID NO: 81289 - DNA, 773 bp, Homo Sapiens
aattacccaagtttgggtgaccccagcgcttagcatcacttaaaaaattgttttggcattagtcttctttcttactataatgctaatagaataaacgatgtctacactgattttgtaaagaaaaactagccatagtagtaaatcatttactgtctaacatgatgcaaatttcaactttgaataagtaagtcttacaccatcggttggtaatatttcacttatacaggtttacttctagtcttttagcacatttattcttttatcaatacataccatgaagtaattttacttgcatagacattaatttttcagcttgtgaatttcctgaactaaaacacacacacaaaaacagcccatgtattaatattatacttcgaccacaagacaaattccacctaacccaggaagacaggtcaaagctgtaatttcactttcagatgaacagaaaggaatcaattttgtggtttatgaagtcagcaaaacctaactacgaaattaaagccattataacattacagtggttacaacagagtatatattttaagagcccttttatcttttatcctggaaacatggatataaactgttttgttttcagatcaaaggcaattgtctttttcaaatgtaggaccctctgaattgtcaaccagcatttaaaatctccaccgacttttagctaatgtccaaaaataaaaatacaatttaacttcctttccttacatgtcaattgtggcaggggtctcacacttataagcaaacaaacaaaaacaaag

SEQ ID NO: 81290 - DNA, 974 bp, Homo Sapiens
acatctcttttcttgtttttctaagatgggaggtttgtgggaaattatacataaaagaaggaagcgaaaatcttttgcttttgttttacttgagagcctttaagaaaaagatggaatttataaagtcatatttcctattgatggcatccttcacaggttacaatcccttgacagaacatgtctgcaaataacaagatcttatttcttaacaggtctgtgctagattcaaaattttcgtgccgaattaactgtgtaaacaaatttggaatttctatgtcacaagggagtgaaagtttcctacctcttttttttgtagatgggttccccacctccaaatctgaagagttcacattttctgaatctatgctattccctcagtgttgttccctttgactctttctgtgtgcattccatgttaattctgctgctgcttttggattctgaagtattcagagccataagcaagggtatacagtctcagagagagtgacaatgcccacaaattgcagagcacacttcagctgagggctcccagcccttctggtcctgccctgccaaagcccaactgttatgtaagattctcgtgcccagatctctgccaagcttggggattctgtgaatttctcattagtccattgcagaataaaagaagaggcaggaagagtctgtgccaaataaagagttaggagagaaatggactgattgggtatggtcatccattggcagagagtgctcacctcagcatcagttaagaatccacagaaaagccaggggaccacattgcaggtcacccgcaggctttatcttctatgactgacatttaaacgggagagctcatttgatgctgttccaggttcgctgctgggtgtttctaattgtgtgttttaattaatgtttttattgtacttggtcccagagactgtttcaacagaccagcatatatttagaactctctaaataaataaatgtaaaac

SEQ ID NO: 81291 - DNA, 1002 bp, Homo Sapiens
  misc_feature (195)..(263): n is a, c, g, or t
tcattcagaaatgcttcatctctccttccaccttctggtcatgcagaactggcaaacccacagatcactatggccaagagcagagttggggcagtattccctggtctaaatgaaatcctttcaactgcagggtgcctatctcattccatgattatttgtccatatgtctaacctctagaatactagttcttatgnnnnnnnnnnnnnnnnnnnnnnnnnnnnnnnnnnnnnnnnnnnnnnnnnnnnnnnnnnnnnnnnnnnnngaatgaatgaggactgcaaaatagctaacctccacacaagcaagaacagttgactggctaactacagaaatctcattaaaaatgcacacttgtcttaaacgttgcaaattgagaaattgaaaatcttcctctcctatagtcagtcagttagtattttgatgtcaatgtgaatttttctctatatatgataaacaatacaataagctataatatcagagtggatgagtcttctctctagcccaatgcctgaatcactttcacatttcccccttcctcttagcaaaatcaggtaaataattttgcttgtcttataatatcaactgtgttgtacaatgattagcaaacaaagttcaggagattggccttcttgatcatgtgcaatgcaagcctacagtttagtagtgttgactatgttgatgctaaatggaattattagaagtatcccaaaagccaacataaataaatgcataaataagtgtagctggattctctctatatgagcaattgttctgctatcatatttggaaaagctcttctaggaaacagagaacaagctggttgctgcttctagtaggtatggaaatgtgatccagcagccaagagcccagctctggagctggactgccagggctcaaatcttggccccaccagtcactagattcattaccttggaaatttatgtaaccactctgtctcagtttccccatctgtaaaatgcaaataaacatacttctccctc

SEQ ID NO: 81292 - DNA, 936 bp, Homo Sapiens
  misc_feature (854)..(890): n is a, c, g, or t
agagcgctgagtgggcatctggctgggtaaccgttcatgcagatgctgggaggagacgccgtctgccacgtgtctcaccacagtttgcttcatctctttgcattctcagaatgaccccatgtgccttgtcccattttatagaggaggagactaaggccctgagcggggaagtaacttgtgtgagaaccatcatttgcatgtgttcctgggacaagaactgtttcactgtgggaaaggtgcctgttgggttttaattttttccaaaagggactttctcgccaagacatttgcatctgggcctgcagggaagcaagtatttccctggagggtggaaggaaaacagccttggcccagatgggcttgtttttccctcttcagagccctcccacttcctgcctgggagaggaggaaccccctactcctggggccactggaagtccctctcaggatgttgcctgtgaccttgtatgagtgacacaggctgtttcccatctcctaccagagggttggccatgctgacctctccggctgtgctgggtgcagtgtggggagactgtgggggtgcttggggtcagagtgttcatttctgggcactcactgtgtgccaggtgctgggtgcaggcatgggcacagtgtggctggtggtgggctgaggccagcctctggcccaccctgtggcagattgggaccatcccctgggtgcagtagggtggggtgctggctgccgaggctgcacaggattctgagactaggtcacttcccagagtcaaaagacaggaacttcttggccagtggaccttgacttcatggctcaaggcctcctaccctgggaggatttcacaagaacacatgtnnnnnnnnnnnnnnnnnnnnnnnnnnnnnnnnnnnnnagcttctgattcattgggtctggtctaggcccaggcacccgtaatt

SEQ ID NO: 81293 - DNA, 1142 bp, Homo Sapiens
ggacaacttggataggacaaaaggactgtccgcctccttatcacctccttcgcatttgccgttcttaatagaaccccttctgagatagggaggcagttgtttctcccggcaacaggatgctaagggaggggtagcagaattaattgtatcttcccaccaggaggaaggaaccacagtgctgtcattctaaatgttggtattgcgtctctgggtctagcctgcgtgttgagagccatcacctggaagaggaggatcctaagctgagagagggaaattcttaaatcagctcatgctggactcgtcttacgttgttttaccctgaatctggaaagcatagcagagtcatggggtgggattgcctgaaacggcggtctaaccactgctggtatagaaacttagatcttgcccatcaccttacccttgaccttccctcttcttccataaaccgtctgtgggatgagtgtgtgttgtgcgtgattcagcttacaccagacttgtcacctgtcattcaacagggtctgtaactgttgctttagtttcagaggcacccgtttttcttgggtgtttggaggcgagtctggaagtatgtttcagggaagggaccagatatgtatttcaaggttcagcatgttaagttgtgcttgctctccaggcgctcagctcagcccccattaaaaaggctgaactggagaattgtaacaacatacagaggggtcctgagagcctgccccacactgcgaccatgatggtctgttactggagaaggtttaaaatgtagcatgcagtctaagcatgattttaactcgaggcagtggtgtggttttagcaccaagctagaaggagatgggttattaatccttttgacattccctttgaatagcatcatatttcaatcctgttaagctgtggggccgttgtttatcggactccctccaaaagcaggacctctgctgtgctgaagctgcaaaacactgcccagctctgtgcctttcggtcgacagtcggcttcagccttctcagctgacccctccacctcatcagctctgagatcaactcaggcagctcccagctgcctcagctcacccatctgtcactggccaaggaagggtcaatgggcctggtgccctttagttggaatgtcg

SEQ ID NO: 81294 - DNA, 533 bp, Homo Sapiens
aactaaaaagatgggagtggttacaaatgtctgataaactgagggggaaaaaaatcatctcagctggatttcattttcatgctggtttttcctgtaggtgaaggactcatccagggtatcaaattgaatatttgtttcctatgagtaccccataatgaatacaggaatctttacaaagcaagttacgttccttcactagaaagaattgttgtttcccttgattttcttaggaatccaaagactaaatttttactagcccagcttggtttctcattacctgacattttaaggttgtgtatgggatattacgtgcttcactgttgggagcagtcatagctgttagctcttattgtagttgatctataagtttatagttaaagtttatatatatccctgctttctcttcagcgaatcataggaatccagagtttgaaagtatttgaagcattatctgagctattaatattatccatctttagttatagagctaaggtacagacaattatctgttaagaatagtaacaataggccag

SEQ ID NO: 81295 - DNA, 382 bp, Homo Sapiens
  misc_feature (79)..(79): n is a, c, g, or t
ggctgaaccaacaaaaatttatttctcacagtctgggggctggaagtcgaagacataggtgccagcagggtgggggggngggttcattgtgaggcttctcctcttggcttgtaggtggctgccatctctctgtgtgctcccatgccctcttgtttgtgtgcacagggaggaagggaacaagctctctggggtctctccctataaggacaccagtcttagcagatcagattctccactgtgacttcgtgtaaccttaattacttccttagcagccccagctccacagtgaaggttggggcttcaacatgggaatttaggggtgaggatgggacacaaacattcagtccataacaatggcccaccaaactatgaaagcaaatag

SEQ ID NO: 81296 - DNA, 594 bp, Homo Sapiens
ataaataacccagtctcagaaattcagttactgcaacagtaaacagactaagacacccttataatccactgtaaagcaggctgtgcagtttgatgatcctattttcctagagaaaataagagattcaggaaggatgaatcattccctccctatggagcaagcagcagagctgggtctagaatccccgtcttttaactcttcaccactgtttctcctcctcaatatgcttagctagtgtggtggtttcaaaaatatgttcacaaattacttaatttgcatctcttcaaagggcagaacctgaactctcccttgagtgtgggctgtacccagtaactcccttctaacaaacgtggcagaagtggcagtgtgaggtcttctaagggtgtgttataaaaatgtaaccgcagcttcctccttgctccctcttgatgaagccagctgacatgttgtgagaacattcaagaagaggtccacagagcaacaggcaaggcctcctgccaacagcctggaagcagatcctccagcctcagccaagccttcaaaatgactgcaaccctgagccagaaccaccccactcaactgcttccaaattct

SEQ ID NO: 81297 - DNA, 830 bp, Homo Sapiens
  misc_feature (65)..(187): n is a, c, g, or t
agttcaagtgatcctcccacctcagcctcttgagtagtggagaccacaggtgtgcaccaccagannnnnnnnnnnnnnnnnnnnnnnnnnnnnnnnnnnnnnnnnnnnnnnnnnnnnnnnnnnnnnnnnnnnnnnnnnnnnnnnnnnnnnnnnnnnnnnnnnnnnnnnnnnnnnnnnnnnnnnnnnntgagccaccacacccggccccactttctgttcttgaaagcaggtcacaaggtcccagattcaagaggtggggaaatagatctcacctcttgatgggaagagctacaaaatattgtggccattcttgaaatccgctaccttcccccctccccgcctctgagcccacctactctgtgccaggcaccagggggaccaggactagaggttaagtgaaacacagtccttgatctcagagtatgcactgtctagttggaagagagatacagtacaatagttacaatacagtgtgagaagtgctatcacagaaggacagagaaagtgagattttaatacagaaaccagtcacctgactcttccagcaatatcaagaaagcctttgcagaaaaggtgatgtgcaggctacttcttgaaggatgactaggagttttccaggccaaggaatcagtacagtcaaagtcagagagacatgaataaggaaggttgcaagatcatggtgcctaaagcaagtgggaagtggtagcaaggagccataggttactccagggccctttgatcatgtcccaggcttatgagaatataaaattgagtcttatttagtggaggtgggacaggagtgcaggggagataaattgtgtggctcatca

SEQ ID NO: 81298 - DNA, 642 bp, Homo Sapiens
gttacagagagcaacgatagggctttcagaacccaaaacatgtctagtataataacagatccttccggtaaccaaccaatcaatttgtcccaattaaataatttccccgaagggataagaaggttcgccccctcacttcttcattttagagagaaaatggcaattagggaaaacatggttcggaaatttaagacctggtcgtaataaaaaagatcaaataaggatcctgaggcttgtgcctgggacatgtgcctttagtgtgaagaaagaccccaactctccaacggacgcctgattacttttatagaaagagatagtctgcaaagccgacatcaaaaatggctcagacaaaagctgaaaacactggaaactgcagagatttgtgcacaaaagctggtttcattaatttgcatcttcagcacgtttatctacatctcttttcttatttttaaaagtgttttgcaacatgaatgtaaaacactttgaaaaagaatctctaaagctgtagtcatgttctgtatccggaatgtggtgatggttacataaacctatacaacgtgttataactcatagaactttgtaaaccaaaagagtcaattttactgtatgataagtttaaaaataaaattaattactcattgg

SEQ ID NO: 81299 - DNA, 1331 bp, Homo Sapiens
  misc_feature (974)..(1204): n is a, c, g, or t
ggaaacatggaattaaattttttcctagtgtggtaaaattttaatcagttaattatttttaattcagaggttctaaaagccactgaaaatcattaccactttatagttttatctaggccttgccattttgccttctttttggtagtagacaaggtgagcaactctattaaaatatacaggacaagttcataaaaacattttaggaataatgaacgttgccttttctcccaatctagtctttaccacttctgttaagacaattctttttaaagttcaccttttagtatattcaaaatttcttcaaaacctttagcagttctctaccaagtaagttcagaagccttagagttctaaaacgcaaaataataaaatgagagaatgctcatttcctgtttccgtagcacagaaggctattttgttataggcaaatttagttttaaacagttattatttgtattctctcatctaagcccaataatataggaccaaagcttttaagtggaaaattagttacaaataagtttctttttgctgtagactttaaaatgtagattagcaaatacagagttttatctcttgttcatgatagttcatgaacagacccagtgaaaggaagtgctgccatggtaacgtaaaccagactgttacttgagaccatactcaagatacttaactgccctgaaactgcacgttttcaataccagtttttccaatttgctatttcaaggaaatagcaactctactgtgatcaaaacaatttgcagtcccctcacaatagaatttgaaaagtagacttgaactaaacaatttctaggagcgtaatctcaggaattccaaggtagagcatggctagcattattaaaataattgtcttggtctgtgtatgaaaagtaatgctgcgtatcttttctatatgaaactgaattggctttggggcaaaagatgttgtaggtgctaacattttaattcttccnnnnnnnnnnnnnnnnnnnnnnnnnnnnnnnnnnnnnnnnnnnnnnnnnnnnnnnnnnnnnnnnnnnnnnnnnnnnnnnnnnnnnnnnnnnnnnnnnnnnnnnnnnnnnnnnnnnnnnnnnnnnnnnnnnnnnnnnnnnnnnnnnnnnnnnnnnnnnnnnnnnnnnnnnnnnnnnnnnnnnnnnnnnnnnnnnnnnnnnnnnnnnnnnnnnnnnnnnnnnnnnnnnnnnnntggtgctaacatttttttccttgtcatcaaaacacatttatcatttggtccaggtgactgaacatatagctaagttaagaagtttcatttaatccaaaaatacatttgtaaaacttgtcttttattg

SEQ ID NO: 81300 - DNA, 567 bp, Homo Sapiens
tttccatttaaatttatagagtctacggagaagctgggacaggaggaaaagcattaggcaaatacagtcagtttgttgtcatctgatgcaatactctggacacaaataaatgactctgcccattattcctcttgcttcatttgccctgaaacaaaaaggtgaatccactggaaaatgaacgaaaggtcaccctgttttacagcaatgtctggacatgctctgccagtaggttccaactactacatggtaatgtggtgatggtaccaagttactggaatccaaagtgagtccgtgatttgtcatggacataagtactggaatgatgttatggtctcagctgttgggggaaaatagttctttcacttgtgaggagaacatccaaaagaaagagctgcaatgctgcctgtgatccttcttctatgtacacatgagcaacgtcatactacaaaagaccatccatttggtcaaactatcttttttacacacattttgataatacaatatcttaggccttctagatatgctcagattcaaatgctatattcaaatgttggttttcctcgtgcc

SEQ ID NO: 81301 - DNA, 221 bp, Homo Sapiens
tcaactttgaaaagcaaacggttccaggctagagggccttacattgctcagctttgggtacatttttcaattaattaattgacatttatgttggctgtatttgctatggggaaaaaaaggtgacaataatttgaattcctcaagagagtttggcaagaagaaaaagctatgtgatgtggctgtacaaaggttttacattttgctctataaaaatatattac

SEQ ID NO: 81302 - DNA, 436 bp, Homo Sapiens
ggcaaaactctggaaatctacagatagtaccatctctgtgcacagaaagtgaaaattgtggtgtgcgggtgtcatttcagaggttacttagcatacctacttcctatcattcaaatcactctgtctgcactgcttatagtcttgaaggcttctgccttttgtaaaatcccataacattaatttatatacttttgctaaaggcttagaaaactgaaaagtatgtaaaatgagaggaaggtatatctgcatttgcttatataaacataaactatctctagaagaacacacacaacagacacacccactaacaacactgcctcctgagaaggaaactgaatggctcggatatggtgtcatcaattacatattttgaattttaaaccacatgtgaatgctccacttattcaaaaaatgcaggttattccagagttttgcc

SEQ ID NO: 81303 - DNA, 958 bp, Homo Sapiens
  misc_feature (634)..(659): n is a, c, g, or t
tattgggaaggaatggagaaagaatacgagtgggccaggtacgagggagttaaaggactttcttaaatagaaagagaagaatgattcaagagtcaccatggaggcggaatttataggaattcaaaattcaatgcatggggccaatatcaggatggaaaaaagaaccattcgtgactagattttggttctgagtaactggagatacatgtgtgtcatcataaagaacagaaaatatggcagagataggcttggtgagggaagaacatcagggtgaagagtgaagaaaattaaggtgtgatttgaatgtttctaaatattccaccagtaaacacctggtgtttggacacattgcacctgacatgggactgtgaaagcagcctttcatccaacccactctcatccctcctgacaaccatatggggctgattaatacagaatagtacagtgcacctggagtggggctttcaaggcaaaacacaaactggtttcccagtcagggctgtcaggctgactaatcttatattaatcacagtcaggccacataaggcagtcacccttttaatgatcctttaatcattacctttggttgaaattgctttcaaacatagccattatttccactagactgtaaggnnnnnnnnnnnnnnnnnnnnnnnnnnaaagatcacattatttttacctttttatctcctagagaatggtacagagaaaacttgtgtagatattgaagttcaataaacattttattatttaaataaatacagtgcagatttctggggcagccaaattatctaggacaagagttgtcaaactttttgtgtaaaaaacataataaatattttatattttcccagtcataatgtctctatctcaactactctgtccttgtagtatgaaaacagctatagataatacataatgaaattgatgtggctgtgtttcaataaaacttttattt

SEQ ID NO: 81304 - DNA, 705 bp, Homo Sapiens
tttcagggatatttatgtagtgacctgttatttaatttgtcaataatataaatctgttcaaagaaaaagaaattttaaataaactcttatgattgtctgtctcctgaaaattattccagaacttaaaaaaaagaagaaacaaaacagagtaagtacattagctttattcaacatagcatcttgtctagtagtaaactactaaaaacagtctcctgagtggaaaaaatataaatttttgtctatagcatcagcgttgtcctgcatgttctcattattttctccaaataaattggctcaatatgctgctaagtattaccatttatgtttattttgaagttctatatcttgtctttcctgtttcatctgtaaacaggcaattattgcctcagtgtgtattctgatacattttctctctaaatctattgcccaacatcttgcatataaaatctggcttttctctcatatatcaaaatcacaggtcacatagtctcagtgccaagagttataagaacaactgctttatttcactcctatctctgtgaatacaaaacttcaatctctaaagtattttctatctatttataacactatgttcctggtttatgattatattatttcattattagttcttaaaaacttaacaaggtgctgaataattttgtgaaatattccatggagaactaccattaaaatagtgattacttt

SEQ ID NO: 81305 - DNA, 1379 bp, Homo Sapiens
  misc_feature (185)..(259): n is a, c, g, or t
ttgatcctcataataaccttatgaggaaggtactattactttcatcatcctcattttatagatgatgaaactgagattaactaacttgctagaaagtggcagaacgaaggcctgaacccaggtggtctggatctagaacccatacttagaaccatacttagagctattctatgctgcctcctaannnnnnnnnnnnnnnnnnnnnnnnnnnnnnnnnnnnnnnnnnnnnnnnnnnnnnnnnnnnnnnnnnnnnnnnnnnaagcaagggattcagcaatatgttttctacaagaaacttgtgtaaaacagacactaaaaggttaaaaggcttgaaaaggatatagtgcaaatgtgaaccaaagaaagctcatgtagtaattttaaaacctgacaaaataaaacttaagatagaaagttcataagggaggtcataaatgtgcccaacaatacagctttaatatttattaagcagcagctaacagaaatttaggcagaaacagataaatcagaattatagttggagatttttaactggctcctctcagtatccaatagatcaagtagacagtagatacttcctctcctctcgcaacacacatacacacagaaaacaaatatacaaggtctgtacaatttaattaataaacttgagccattagatatttataactcatatacgtttccatcaaacagtgaatacatgtcctttctcttttcaggtacatgtgaaacattaaagtaaaaacataaactgtgtattagatcttaaagggaggctcaataaatttcacagtgcaataaaattagaagtaatgaataacagtatgtgtggtggacagattttaaggcccctatgatttccacctcctggtgtttacacccttatgtagttcccttcttcagatatgggtgggacctgtacctttcaaccaattatgatggttaattttatgtattattttgaataggtcagccatagggtatccagatatttggtcaaacattattctgggtatttctgtgagtgtgtttctggatgagattagcatttaaattggtggactgagtaaagcagctttccctccctaatgtatgtgggcctcatccaatcagttgaaggcctgaatagaacaaaaggctgactccacccacctagtaagaggattttcctgcctgatggccttagaactgggatattggctgtctgtctacagcatcctagtggtctttggacttgaactggaacattgacatttccttgttctacagcagcttctagcctttggacttaaattagaacactggttttgcagattttggacttgccagcctccataatcccatgagagtcaattcattataataaatctctttataat

SEQ ID NO: 81306 - DNA, 952 bp, Homo Sapiens
cggcacgaggggcaagagcggtaggactggagcctgaggggggcgctttggatctggggggcgccggagcccctgctggctggagcttccctgcttcagtcccaggcccatcactcccctccattcacacagcgttttctccaaattccagcagcatccggtgaggcccctgctgaccgaatgagtcacacgcaggctccagctcctgggaacccttagagacccttttccaggcccaagctgtggtcctgcctgggaccctgcccagcaaccccaccaggatgggtccctctgctctcttcagcccctgctgtgccaggatctggtcatctccatccacccacatgcatccctgtgggcgtccccagcacagcagcactgggccaaggagggtgcccaggatgggcacagcctggcctcagggcgcaggggactggagagcccccaggaagggcaccagccatgagatgctggcttccccgcatcgggggtacggcagcagacacccatcccagatcctgtcgaggtgaggcctgggcgagtggatggacgtcacacagagtgtgcagcatgcttcctgggggaaggccatcgaggccaaagaccctcacagataaagcggaaggtcatgtctctgcacacagtctcacccccgcggctcagagtgcccatcgcgggctcctgggcagtgtttatctggggccacgcccgctctgagcgccactggagtcacgattgcatctgaaggccacgttaagaagcgtcaccgtttcaacagcaccacgtcttccaattcgtgagcacaggacgtctttccttttatttagctctttaatttcttccagcaaagcgttgctgtctccagtgtacacatcttgcacctcccttggttgaatttttttccccagggattttattcttttgatgttattataaatggggttcttttctt

SEQ ID NO: 81307 - DNA, 1152 bp, Homo Sapiens
  misc_feature (144)..(172): n is a, c, g, or t
tcactctcatgagaacagcacgggaaaaacctgaccctgtgattcaattacctctcacctggtccctctcacgacacatggggattatgggagttataattcaagatgagttttgagtggggatacagccaaatcatatcagannnnnnnnnnnnnnnnnnnnnnnnnnnnnaccactttaaaaatgagatgtgtttcacaatcaatggcatatcctattttattaacagcattttgtgtcactcttaagactacataaaataacaagtgtctgatagttgacactttttagatttgatgaaatacagtcatgtttttgtttctgagctgactttgtttatctgaaaataaagcatgagggtgaggcaagtcctcagatctccttcctctctgagattctgagtcttgctttgctgaattgcacactccatcacctacttgcactagtggggttaatgaggagctggcttaaccttttaataccttacctctgatcccaatcttttcccagcctagtctagactcttctttctagaagaaagttttcaaggtttctgagaagttcaaggtattgggacacattcttcctgcagcactgattagctggatggtgtctgctcctaccaaaaccagaggacatctttcacagccacaagcataataattttctgtgacacatattttattattcatatgtagctccttgaagttactggtagttagggtgtggctgtaagtctgcaaagatgagcaaggatattgacaacatgcacgccctgtctctgagcagggaaggggtaaaaacactgaaattcctgagaatgctcagtggagcagtgctgcccacatcaccttcccatgaaactacagggacagaaggagcatgagctgaaaacagggccacatggctctgggattgcctgagcatctgcaagattgtggtctactgttggggagccctgatttttgccctaaacattggatttgttttgtttttgcaatgcaaaaagaaaatacctgtgataatacttacctttcactcatattcattcacttagttttgaaaccgctttctgtttctttcagaatccctttatttggcactgagttatgtatttgtatgctttgtaacaataaaataacttcagaaag

SEQ ID NO: 81308 - DNA, 605 bp, Homo Sapiens
aacaagacaacaacacagatttatttgatagcaacaaaataaaattttgtgtttaatgcaagttattataagtattgcaaaaaacaaatagtactttggaagaatataattgcagtctaaaatttaaaatatattaacacctggaatttaagtggaactccagaaaaacagaaataattatatcaaaacccaatataaaaatggacaaagactaggaaaagccaattataatgattattacagaagacaaattaaaatacatgtgaaatacaagtggtatcccctaaacttatcaaaaaataacaaaaatagaatatcagataatatcacatgttagaatatgagtagataaaaacttcacatactactgatagaaatattcaggtatagccattctggaaataaatctgagaagacctaatgaaattaaattaaatacagtacatactaaaactctttaattctactcgtgtggtagtcagggcagtgtttcctttgcagtagttgcataccctgaaatactccacagcaataatgaacgagaagtcaacgcagcaacttgaatatcttaaaaatacagtgttggccttttaaacaaggatgac

SEQ ID NO: 81309 - DNA, 859 bp, Homo Sapiens
aagtaaggggtgcagagcaggtgtttggatcatttacccttcgtcatctcctactgggggcctctcattgtactcgcaggctgtctctctgttgatcagggcaaaggcatacgtggatgtgaaaaagccccaacaaacagctcctctgagttcctgtgacaacctgcccggggtagatctgcgcggagtcagccctgtttatggagaggctgccagaccccacttttgcccaggccttcttgctcaggcaagcctgctgctaagctcttaggggggcagagtttgcttttggcatctctttctgcccacccttagccatcttcctcttgataccagccccttccaagaaccaagagccctccacctgatccctgggcccgactgtcttccaggccatggactgggcagaagtgaccaaatgtggaccctgctctgcaggacctccccacagggcatgtgggtggacaggctagaagtctgaattgagagttgggggctccgggggagtggtccatcctgagggaggtcatgagggtcagaaagacttgtcagagaagatggccctggggctgggtcatcagaggctgagctgctcagtggaaaccaagcatcgcaggcctcagtgctgtttggtggcaagtgcttctgcagggctggaggccctgtgtggggatgctggggtagggatcccaggaaatgagttgaggggtaggtgaggtggggagggttgtaatggctagagcaggggtgttcaatcttttggcttccctgagccacattggaagaagaataattgtcttgggccacacataaaatacagtaacactaatgacagctgatgagcaaataagcaaattgc

SEQ ID NO: 81310 - DNA, 521 bp, Homo Sapiens
  misc_feature (85)..(98): n is a, c, g, or t
gaggcaggagaattgcttgaacccaaaagacggaggttgcagtgagctgagattcagcctgggtaacagagtgagactcgcctcnnnnnnnnnnnnnngaaagaaagaaataccaccatgggctgaccccaaattctatagtaattccttgcatttctttagtgtgttcactcccagtctttgcagtttgtgtccctctcataaaccctatgaggtaaacagatgcacccactttagaggtgggagtcgtggagtcacacatctgaacgctagtgccatcagggatgttagcatccagtggcttttagttgaaccttttcatgttacagaagaaacaaacatccagtgaggaagagtggggcttgcagcgctgagacccccagctgcactgtgagagcccctggcagagaagcgtcctcatagctcatgaagacccaggcagttaatggttctttcctttcttggtaggaatttggtgcattgatgagcaattactctctccccccacccctcctcgtgcc

SEQ ID NO: 81311 - DNA, 1064 bp, Homo Sapiens
cggaacgaggtgaacttggtgttctccggcgcggccgaggtggcatcaccgccttgcggctgaggggtatcgatcatggatagcctgaagggttccagcgattctaggtttgctgccccaccgacaggtcgcaccctggtggctatcgaagcgcccggccttcggcctctcctgggggcaagctcccagcccccaatgcgagtcttgagggattggtgcgcggcgccgtctcccgtccgctgcgcgccgcacgtgcgcgcctacacatgcaccctgaatcggtctgctcggggtttctacaattcgacgttgcatctacaacgcgcccgcccgctaatgtctttgcctgccgacttggtcgaagcgctctctgtagccccgggctcagtgaagctcttcgtcgccacatcacagaaccctgacgtggaaggcgcgatgcgcaatttgtcggagttggcgtcaagaatggagcacgcgcgaaaggccggttgctggatcgaggcgatatcgcttcgcctgcaataccaggacatgtggctccggacctacttcgagaacagtggccccaaggaagagcgtcagcgcgagttcggccgcctgctgcgccagtgcttcgagcaagggctgcataaggcgctttacgaccgcctcgctaggttcaacaaggcacgcatccaggccatccatgggttcatggttggttcgattgcctatggtgatttgcagactgtcgtgaccgactcggacggcctatcggaggatcttgctgaattcgtcttactgaactcaggtcaggttgtcactcttcaggatttggaagggcgccacgccaatcgaggcgatcagatattccacttgccgagctgcatagagcaccttcgaggccgtgggccgatgctctgaatcatcacggcggctagacgcgttcgccgagtgtcaacacgatgcgtttccgggagaaattgcgcgcccccgcaaccaaatccagaaacccgccgagtagctgctactcggcgggttttgtcatttcggcggtgcgtcaccgctctgggtattgcggccgc

SEQ ID NO: 81312 - DNA, 530 bp, Homo Sapiens
  misc_feature (252)..(309): n is a, c, g, or t
tgagccaccgctcccggctgtcttagtgaatttcttgcacaaatcttgtactattccattttatcaataggtggtaaccatcttatcaataaggaacctattgctttacatctgtcccagcctcttgcccacagtagaatcccaatcaatgtttttgaacaggaaatacactttctaataagtatcaaactaataaggctgtgacccaatagacacgagagctgatccttctctgtcaatactcattgaatnnnnnnnnnnnnnnnnnnnnnnnnnnnnnnnnnnnnnnnnnnnnnnnnnnnnnnnnnnctaagtcagatgataaaatcacaacatttgctattaaaatataaatgctaacacttcacaaagttaaaagttacttgtttatttaccttatgtgtattaaattatcatttttgcccatacacacagtttttatactatattttcagaatgattcttctacagagaagaatctggcggcgtatagcaattatgttttagattcttccctcgtgccgaattct

SEQ ID NO: 81313 - DNA, 508 bp, Homo Sapiens
aacaaaacaatgctttatttatttctcttttacacaaaatccattgtgattctacaaggcaattgtcttccatgcagtgactcaggggcccaagaggtttcatctgaggttccttagttgtgatggcagaggaaagagaaaccgaagaacttcccatgggcttgtaggtactgcagcttggaaatgactcacaatgctttctctcaggactaatcacatggcctcgcctacaacaaaaaaactagcaaatgtgaggaagcacatggaatatttggtgagtgttattgtttctgccacatggcaggaagcagtctataggctaaataaataaatcagttacataccatattagaaagggatgagtgccatggaaaaagcagaggagggtaaggaggattggctgtgttgggggaagaagtggagggtggaatttttaaatcaggatagttgctgtggcctcaatgaggaaaggtggcattttgagaaaagccttcaaggacctcgtgcc

SEQ ID NO: 81314 - DNA, 728 bp, Homo Sapiens
  misc_feature (121)..(138): n is a, c, g, or t
acttatttatttatttatttgaaatggacttttactgtgtcgggctctgtccttccagagcaccccaagcctcttggcattcaacacaacagatttatttggcatctgctacgtgttaccnnnnnnnnnnnnnnnnnnaagaggtgaggtttcacaatgttgcccagcctccctcattctttttaacagctccgtaatattccattggtgaatgtccccatagtttatctattccagtataaggtggtctctagtttcccacaatcacagtgctgcagttaaacgtgggcactcatggccatgtcacactgtttggttcccagaagagacaagagttcattcttttactaattccaatgtttctgtaacagggtgttccaggctcccactggccgtgtgccaaagggcctgtttcctgtagcctctccagctttcagtattgccagacatctacatttccccccatctgaggagtgggatacagtaacactttgttttaacttgcattttctgattacaagtgacattaagaactttctatattttaaatatttagtcatttatatctcctttcctgtgagctgctcaatcattctatattgcaaacactttctcccgacgtgtcccttgtcctttaaccttatttgtagcacctatcatcagacagatattttaatctttttttcacttttataatttgtgtttatgccaaaaaacctcgtgccgat

SEQ ID NO: 81315 - DNA, 491 bp, Homo Sapiens
gagcgggatgctattaaatttaagaaaaaagaagagaacaaaaaagtcctcccatctttggcctcccaaagtactgagactacaaacatgagccatcttgcccagcccctagaacgtgttatcaaataaacaccgatgcaaccctcactcagctgagaagtaaaacattgccagccaatccctaaatgcttctgcttgccgcttcccaatcctaaccaatgccttctcctgacaattatgatggtcatgtctttgcatttctctaatgtttcccatcacgatcaaactagttttgttttgcctgtgtccaaactttgcataaatgagcagcatgtgtctggtggacctggcttcttccactcaacattatgataagaagattgaccatttggtgcccatagctattgctcttgcattttcattgctctatagattcttactcaacataccttaaaaatttttttattctgaaataagagcgggatgctatt

SEQ ID NO: 81316 - DNA, 1130 bp, Homo Sapiens
agacattctttctcctatataaggccaatcctgcctcctatagtgcctctgaaattttaatatgcatacaaatcacctggggatagtgttaaaatgcatattctgattcaggaggtctggagtggggaataacgttcttcatgtcttccaacaaaccagtgttggtttgggagcaatatttagagaaaacagattccatcctttctcacctcctcagagatcttttactctaagtcaacatttgttgcttctttatcagctgctccctcccccaacatacaacatatctgtctcttttattttaaaataaatgctcctttgttcctcttttagctaccgcccaatcatctaggctctctttggctccacagacaagtttctatgaagaagtcctatgtcaacggttccaaactttcttggctcaaagaatctttagtgtctcagtgatcttgcagggtaaacctcggccaaaagaagtatctaacaactgtagttgcctccgttaagcagtaagagccagcacttagtaagtattttaagttctaaaaactggatgcctgttgggcactgcatacttttcaaactttggactcagattgaacactgacagcctcatttcctgttccactgattttcaggcagtacttgctttttatcagagcaagcactgaaaatccagcttcccaaaggtatgacatcactgaaaggaatgcagtgatctaatacagcaatctaatgacgccggtgtatttcccttgaaatttaaaaatattccatggcacccttgcaagttagctacagtgctctgagatacattgatgaacaatgtgggatactgagttcaggtggctgtcagaacggcagcatccccattgcttgggaggttgttggaaatgtagaatctgggcatccatgccagacctactgattcagaatctccactttaacaagatctccaagtgatctcccagtgactcacagacacattaatgtagaccagaagtgctggtctaaggtccctgcttacgttttctcacataccactcacacccaacgcaccgctttctgactttgctcccacaactccagtgaaattaccccaggaaaagtcccaaattaccccactcctt

SEQ ID NO: 81317 - DNA, 663 bp, Homo Sapiens
gatggacttgcataaagcaatcattctcaactggagatgattttgtctctagaagatatttggcaatgtctggagacattttcccttgtcacaactgaggagcatgctactggcatctaagaggtagagggcaaagatggtgctaaatatcctatactgcacaagacaggcccccacaacaaatcacctgactgaaaaggtttgtattgccaaggctaagaaaccatttttaattttatgcctacaatggcataaaagaagaaaatcaacagagaaagatctttcagaactatcagattaatcaaaacataaatgcagagacagcagtatactagattctaattttgattgtgaaattggaaatctcaaactcttgagtcttcagaggacaagtctagattagttttctgaaacttaagtatcaatgactgaacaaaatatttctaaggacaaaaaagaattatgatatcctcacctagtcattcaacatgaagaccttattatacaatcttttacaacaagaatctgaaccaacttattttgctagaaggacttgtgatggtaatgttaatcttttatgatatttgtgccaaaaatttatttgaaatgattcatatgtggacacatgctgatggcagatacgcaaataaaggtggatgaaag

SEQ ID NO: 81318 - DNA, 524 bp, Homo Sapiens
gttattgtgaggtttaattatcatcatgaatatttagtgcttaacacaacacatggtacagtgcactcaacaaatgctaaatatcataaataacattatcaaggaaaatattttaagagctatttagaggaagaaactacctaagaaatgaacatattacatatgacatattagaaattagaacatattacctatgaaatatttccattcttcttaaacaggtagccttgtggaattgaatgctgacacccagctcaatctgaaggatgcctcctgagacacatgttacttcttatccagtgctgacctaaagtgatttccaattatttccaatctgtctttgggttcaaaatttccaataccctagcaaatttcacttgtcttgttgagtcagatatcctcttctgaagtaaacagagaacagagtcacaccaactacagacatggtgacagtaagcacagccatttgttgggagcaattcccagagaaaggagaatcactgtgactttatcttcacactcat

SEQ ID NO: 81319 - DNA, 428 bp, Homo Sapiens
ggcacgaggaacaatgaaatttataaaaatactcagaaataaatttataaatgagtggacaatttatcgattaataaaagtataaaactttactaaggcataagataaattttaaataagcttgaatggaaagactcaatactgtaaaaatgtctattctcctccaaatgtatctataaatacaaagtaatcacattcgaaattccaaagagagattgttaaacttgacaacgctaattccaaaatttaaatgaaaaagaaaatgtaggacttccacttcaaataatggcaaaccattttgctttaaaccgacctacacgcgcacctcagagacaaacaaagatggacacaatatttaaaagcaactttttggaactaaaggtagatctacacctcgatctagcaatcccactactggatatctaccc

SEQ ID NO: 81320 - DNA, 1026 bp, Homo Sapiens
tctcatgcgcccccagctgaggacacaggcgagcacgcccgctagaactccaaggtcagggttgacaagactgggaggcagcacacgggccgggggctgtgcagaggcccttctgggttcccaggggggtctcacggtggcagctggggaaccaagtgcccctggtactcgccgcagtcaggaggccatgcttgctaccacccagtcctgcctcctgcgcagcggtttccactgaagtcaccccttttattagagacctctgaaaacgtatctcccgtgtctctgttccaaagcacgtctttgtctgcactcctggggtcccagagggactagtgacacagtctgagtgtgctgtccctgtcacagcagcaggggctcagcagagaggaccctcccctcctgaatctgcctcgatccggaaaaggctcgcctggctcctcccatcccagctcccagccctcctcacaccagcagccccagaccttctgggcagcaagccagagacacattctcaggtgtcctgggattcagactcaacccggagggtcacggagtgggggcttccgtacagcagcctcaggcggcactcccagccatgactcctgggaacaagcctgggggtagggacccccgggcaccttttctgggcctgaccagttttctgttcatgctgaagctgctgcagcccctctggctcagtcctgccctctgcttcgcatctctctccgggcctcctccactgctcccgtttctcttttcagaacttaacagcatcagaacttccatgaaaaaaggccgttgacctctcagtctgcacagcagggttctagtggctgacggtggtgctcagagccacctgccctctggacctttgttctgggctgtgaaatgctcaaggacagggactgggtcagtcaccaactacctgggagtgttctgggtactgctgggtatagggctgcaaagaaaacagcacaagtgaaaaccagccctcactaccagggcctgtgttctaactgaagagag

SEQ ID NO: 81321 - DNA, 659 bp, Homo Sapiens
gcggccgcgagcatcacggcgccgcggtccttcaaggcagacagcatctgcgcgcgcaccgcatcgacgatgaccaggctgttctccgacgagcaactggtcgcgttgtcgaaggtcttggagcgcacgatgcggtcggccgccgcctgtacgtcggccgtctcgtcgacgatgcccgccacgttgcccgcgcccacgccgaaggccggcgtgccgctggcataggccgcgcgcacgttggcctgcgagccggtggccaccaccaggtcgcacaggcgcatcagctcggcggtcgatgccttgttgatcggttgcggcagcaactgcaccaggtcgcgcggcgcgccgatgcggtcgaactgctggtggatgaactcgatgagccgcgccgccgtcgaccagcccttgggcgagggcgcgacgatgaccgcgttgcgccccttcagcgcattgatgatcttgttggccggcgtggcgcccgggttggtcgagggcgtgacggcgcacaccacgcccacgggccgcgcgatctcgacgatgccacgcgccgggtcttgtgcgatcacgccgaccgagcgcgcgccgtgcaggtcgcgcagcaggccgaaggtcttgcggtggttcttgcgcaccttgtcctcgacgttgcccctcgtgcc

SEQ ID NO: 81322 - DNA, 687 bp, Homo Sapiens
tctacttcgcccgccagcaggtggccgagcgcctgacccaggttcgccagagcctgccggccggcgccgagccggcgatgggcccgatctcctcaggcctgggtgaggtcctgatgtggaccgtcgccttcgagcatccgggcggcaagggcgccaaggccaaggacggcgagcccggctggcagtccgacggggcctacctgaccccgacgggcgagcgcctcgccgacccgaccgcccaagcagcctatctgcgcgaagtgcaggactggatcgtccggccacagatgcgttcggtgcctggcgtcgccggcgtcgactccatcggcgggttcgagaagcagttcgtggttcaaccggacgccagccgcatggccgcctatggcgtgtcgttcagcgaactggccaccgcccttgaagcggccaacctcgcggtcggcgccaacttcgtcgagcggggaggggaggccttcctggtccgcgccgatgctcgcgtcaaatcggtcgacgagatcgcccgcgccactgtcgccaaccgcggcggcgtgcccgtgttcgtccgcgacgtcgccttggtccgcattggcggcgccctgcgtaccggtgcggcctcggagaacggcgaagaagtggtcgtcggtacggtgctgatgctgaccggcgaaaacagccgatcgtggcggccgc

SEQ ID NO: 81323 - DNA, 385 bp, Homo Sapiens
actcatttgattagtattaatatttatgtcagtaagccaggtgactgtgactgtctttggtaccatcctttttgaacagaaaggcaacatgtgggttggataatcacacttttaggtgaaactgacttgcttaaactgtaacagtcagtgctatttaagaattcaggataagcttagcctctagaggtcctcttcaacatttctgtcaaggatttggatgaatacaacaagatgctccatggaagagaaaatggataaatggatcccaccagttaagctcctattatgcttcagctgctttgtctataaaatatcgacttcacatcttgcctatctcaccaaggtggttgtaagaatcaaattaaatataatggatgtaaaagtg

SEQ ID NO: 81324 - DNA, 392 bp, Homo Sapiens
  misc_feature (184)..(242): n is a, c, g, or t
  misc_feature (245)..(253): n is a, c, g, or t
gctataaacctactcatagaattaaattagaaatagtaacaaagatctgggggatccccatacattttgaaactaaatagcacacttctaaatagcctatgatgaaagaagaaattaaaagaaaaattagaaaatattttgatctgaacgataattaaaatacaatacatcataatgggagctnnnnnnnnnnnnnnnnnnnnnnnnnnnnnnnnnnnnnnnnnnnnnnnnnnnnnnnnnnnccnnnnnnnnnctttcctgagggaaaaaaagcaatccatggtcagtatgatacgactaaagcagggcttaaaaggaaatttaaggttctagacgctaaacaagaaaaaggtttaaaataaattacctaagcttctaacttaagaagatag

SEQ ID NO: 81325 - DNA, 982 bp, Homo Sapiens
  misc_feature (103)..(275): n is a, c, g, or t
  misc_feature (912)..(926): n is a, c, g, or t
agtgtgatgagtcatcgacttaggctcttgctggccccagcttggtcaaaccagatgcctgtttttatcctggcagataatatgccagcaattctgaatcctnnnnnnnnnnnnnnnnnnnnnnnnnnnnnnnnnnnnnnnnnnnnnnnnnnnnnnnnnnnnnnnnnnnnnnnnnnnnnnnnnnnnnnnnnnnnnnnnnnnnnnnnnnnnnnnnnnnnnnnnnnnnnnnnnnnnnnnnnnnnnnnnnnnnnnnnnnnnnnnnnnnnnnnnnnnnnatcagtgttgaagctgtgcctgagaaatcccacatccccacaggataaagaaacccagagacccaggatgctccagtgacctgctgaggatcacacagcccatcatagcctttcaaatcccctgagagaccagctgctaagagatgatcctggtcaaacatcctggagtaacagaaagatccctgagcctcagcgggtacgggtggcggggcccctgatctttcaccgacttgctgtgtgaatgtgaaatgctaggaagaaaaagagatggtcaaatgaatgggttggccaaagcttaactaactagaagagaacaagcatgcgttaggcaccaactccatacccagcactttgtgtacttcccgtacttgataatgtcatcaggatgggaagcacttgaccttagcactggattgcccaagttcagagtttggcttctctactcactaaccatgtgatttggggtcaactattgcagccctctgtgccctggttccttcagccaacagcaattttgggccaatcactgtgcctgcctcattggattgagttacatgcattaatgtatgcaaagcacttagactaggacctggtatgtagaaagctctcaataactgttgggttttgctgttgttgnnnnnnnnnnnnnnnactgtcctctcatgtaatcctcctgacaatcctgcaagataaataagctccttttc

SEQ ID NO: 81326 - DNA, 157 bp, Homo Sapiens
gttagctgctagcaatgttcaggaaagggaatttaggtataattggtttatgtcaaagttatgaatatgcctgatatctttcttgggaggataaatgagatcgtgcacgtgaaatgccaggcacagtgctaggcatttcacgtgcacgcctcgttcc

SEQ ID NO: 81327 - DNA, 514 bp, Homo Sapiens
  misc_feature (57)..(88): n is a, c, g, or t
catgatctcaactcactgcaactccagcctgggcgacagagtgagactctgtctcgnnnnnnnnnnnnnnnnnnnnnnnnnnnnnnnnggcagttccaagattcctgtaactttcagattttcataagaataacacaatcattacatagtaacagcagcagccagggacatcatttaagcagtgctctgtgtgtgcctgcagctttctcaataatgccgttcatctccattaagggtgggaggatgaagacccgccactggcctgggtgtccctgctgaaaaatgtccaattcactcagccccagcatcaccccagggtgttcacacctgctgctggccactccagtactcatctgctcctgctggttttccacacccttttccaaagcccactaaacacgaaactttcaggacattgtagaaaaggaggaggaggtggtgcagagggcacgtgtgtgctctttactcgctgctgagtcctctgatgccaagcaaaggcaaagcgcctcgtgcc

SEQ ID NO: 81328 - DNA, 604 bp, Homo Sapiens
  misc_feature (127)..(214): n is a, c, g, or t
  misc_feature (348)..(377): n is a, c, g, or t
  misc_feature (396)..(456): n is a, c, g, or t
aacataatgttaggagaaagatccaagagagtacacatgttataattccacttttataaagttcaaaattaatctataccctaaagtgtgagttgtagttacccttaggtgggagtagtgactggannnnnnnnnnnnnnnnnnnnnnnnnnnnnnnnnnnnnnnnnnnnnnnnnnnnnnnnnnnnnnnnnnnnnnnnnnnnnnnnnnnnnnnncatttaggtaagtatgtaaggaagtacatgtaaattatacttaaagtttttaaaaattaagcttagccaagtatagataaaagtcacttctacctggaatgacagtacaactggatgaaggaaatcacatttcnnnnnnnnnnnnnnnnnnnnnnnnnnnnnnctttgagacagggatctgnnnnnnnnnnnnnnnnnnnnnnnnnnnnnnnnnnnnnnnnnnnnnnnnnnnnnnnnnnnnntgggctccagtgatcctccccaaagcacagggattaaaggcaggacccacctcaccctcagatctcacccagtaagaaatcacatttgcattaggccctcaaaggtgggcaagtcttcctaggtagagacagggaatgagcattctag

SEQ ID NO: 81329 - DNA, 930 bp, Homo Sapiens
gtcaagttgcacatgagaaaatagagcccatagccatatagtaagcaaaaaaattctgtttgagtattgacatgacagtttttgaaagttcaagcagaaaaccaattataatgagcactggaaagcccggagccctgctgttcaataaataaaaagtacaacaaactattttccaaaaaggttctagagagtttcttcttgtcccactacttacaatctgattacataaatagtctctatgtgctgttgaattgccaggcagctgtattaaagtacaaatcaaatcaagtcaggattagaaagtaaaagagcatggtttaaagtaatctatcccccaggaactgtgctcagattcatcaaacagagcttaaagtacagtatatcttatacccttgtgtttccatgctgcattgctgcaaaaccagttattatttttgatatccagaaaatgttgcttgttgcttgaagaaggctcacttgcttatttaaaggtactattcttatgtgccacttatttattacttcttttggttaagattcatggggaggacataagtactaaagactagtaggctttttattgatcatatcctatctggcttagctgtgaactgtcatgaatatttcttatagatagaatgactaatttattccagattttaggtaatatacaatatgatggtattaaagaaaagctataggtctttagatgctattggctaataaagtattatgtatacctgcccttataaatcctgctccatctaattatgaccgaaaaaaaacgatttaatcatttcaacttgtaattgtttttgatgaaaagctctatacgtagttgtcaatgtactcatcttagtcatcaattcttgtatagttataaaatttgttaccttaaagtagaatgaacataattaaatatttatagtg

SEQ ID NO: 81330 - DNA, 500 bp, Homo Sapiens
tattcccccaggcagcagttgaatcataaataatcaatacccaaatcagtgaggaagaagagagaattgtggctgtagtattcatatagttacgtgatttgggcagcaagtaacagaaaacctacactggctgggaaaaaaaaggatattaattgtgtcagcaggatatcccaagttatggaggatattaaggctgataaattcagggtctctgtgattcattaaggacccagttctgtccctcatgtactccttcagcatttaagtatggattccaaccacgcatcaggcactgtgcgaggcaacgcccgcctggtgtgctggcttttttgttacaccagctttcctcaaggacacaagatggtgcccttgatccagacatcacatccagattcagtctcattcagtagaagggaagacagctcttcctgtctctttttccctgaagtgtcctagctggcctctcctcttgtattattgaccagaattgtgtcatgtgt

SEQ ID NO: 81331 - DNA, 281 bp, Homo Sapiens
ccatcatgattcattttcattgcttttgtgtgctcttttgaaaaagtcttctttttcataatgaaaacatcttagtgctattaaaccaatgtttggtagatcagactgcaggtcacacatttaacagagttagagaaaaggacgacagccctacacatgtatgataaatttcctatatccaaaactgttcctggagtcagtaacccattttttaactaccgtatttcattgaatctaagatgctcttgaagataaaatgctccattattttagtattactg

SEQ ID NO: 81332 - DNA, 664 bp, Homo Sapiens
aaaaaaacaaattttatttttaaaaatacaggtgatcagaaataaagtagaatacagttaaaattatttcaagattaggctaaatagaaacataacctaggaactgaatcacactcttgtaacacacatgtacagacatatcacctgccaaaatttcaggtagactattaaactacgtttggttcaaccagaaatgtgcaaaacaggaaagtaattgaatttgttttaatcaagaaaatcttacttagcctccgcaactggaatccatgtgacaatgaagaaggaaagggacatgaattcaaacagctgacacaatgatcagcagcaactgacagcatctcatttgatatttgatataaagcactagatcaatatttgtgagatcaatgcaattttaatggtttttttcaagccggtatgaaagccaaattgtgacactctgtgctagggttatttttagaggtggttactccaggggatgatattaagtaatttactgatgcaaagcaaaagcaaaaatggggaggggggaggggaggaaccaacaaaaccaccacaacaaaccatcaatatttcttcagttgataaatcctgattatccaagtacccagagaaggtgtgaacatttattggaaaaaagccatttatcctcgtgccgaattct

SEQ ID NO: 81333 - DNA, 1215 bp, Homo Sapiens
  misc_feature (234)..(234): n is a, c, g, or t
  misc_feature (426)..(426): n is a, c, g, or t
gcagccagggcactcgtacacatcagcagcgctagcgcagccgcgataggcgtcatcggaaacatgaacggaacactctgaatgccagaagactggagagaaaatcaggccggcggaccgaggagggaagtcagccgacctgcaagcagatgcccgtggttaacgagcacgcattggccttatggggtgactggcagtaccgcgtcgaacactaccgggatcgtggttgtgtangagccacgctgagtggccgtaggcttggccgcggcgatgtgcatttccgcccctatacccggggtggagtcggcttcgttgaccacttcctgagggctgccgctcaagatcacaccattgaaggtggtggtgaccgggatgttttgcgcggcatcaccgttgaacagtacggccgggccaccttcgatgtangcagcaaccgaaccgttggtgttcttgacgtcgtaggtggccctcaacgaagcaagctcaccgctgaccaggttgtaggtcatggtttcgtcacgacccccagttcggatcacgcgagttgtgcgtggaacacggtggtcgggatgtttgcctggacattgacggtgtggcgggcttcaccggcagcagtagctgttaccgaggaagacagtgccagaacagccaggggaacagcgacagcaaacttcttgaacatgatcaatacctgtagttatcaacattgattgattcgtcgccaagcaacttctcaacaacgaataacgcagacggttaggtgaaccgcacaacgccaagcaatgatcaattcaaatcaacaaccggtatgcaggtcgcttcccacggcctagtagcctttagaaacaaggggcgaacgaaaagtatggcactttgccaaaactgtaaaaatagtcgtaagaatcagcctacttgaacataagtgtcataacgggaaggggctgtaagagcaatactacacgcacaagcgctgctataaagagcaacctgttaacgctcctgttcgagcacaaactctaattaaagttataactctaaatacttttatcgtccatgcccctcgaacgtgagcggcttgacgctgctcacgaccgttggtcgtctccgggctcaccggtcaccagtacagatatatcttaagttatatctaaataggacggaggacagaccatgcgacacgagcatcgcagtgaatttgaaaaacgcggcgaccgc

SEQ ID NO: 81334 - DNA, 1539 bp, Homo Sapiens
  misc_feature (57)..(75): n is a, c, g, or t
aattacagccattctagtgaatgtgaatccctgggtgacagagtgagacagtctctnnnnnnnnnnnnnnnnnnngcaaccctgagattcacattcactagaatggctgtaattaaaaagagaaataataataagtcttggtgaagatgtacagaaattacagaaccctcatacattgctggtgggaatgtaaaatggtgtagccacttcagaaaacagacggtcagttcctcaaaagatgaaacagctgctgtatgagttagcacttctaccccatgcccatagccattatttggcactaaaaagaaacgaaggacttatatatactaaacatggataaaccttgaaaacgttaagtgaaagaagccggtcacaaaagatcacatgatgattccattcatacgaaatgtccagaataggcagaaagattagtggttgcctaggctggctgtagatggaatggagtaactgctaatgggtgtagggttccttttcagggtgatgaaaatatcctacagttagcttgtggtgtaggctgcacaactcttgaatatattcaaatccactgaactgtacattttaaatgtaaggtatgaattgtatctcaataaagctgttattaaaaaactcttgaggtgtaggactgaaagtatactgacaccaggagataccctggaactttctcgaaaaatcctgcattatccctgagggttgttcaggtacgttcttcagatgtgtcatagtttgatagagaactcatcaaaaagatcaccactgggaatctagatctttgttgaaaagggaagagaaagagaagcttaatgagcacattgaagcacttaccagaaagaagagggaagacttctggatgaaacctctgtgagtaccttaacattcacatggaagtagtaaaaataagattctgggtgcagttctccaatgacaggaaaaaaaacaaagagaatttgaagaatacgtcagagacaaatacattacaaccaaaattgacttcaaggcacttttgaaggagatcaaatttataacaaaataatttagtgaaagtgaaagcttgtggaagatgttggaatcatccatcctgaaaattgaagtcttctgtttatcaacagaacagctaagaagctaatctaagaatgaccagcacctgaaagatgtagacaacattttgcagaatgataaatggtatccagtactggactgtgtctgagaggcatcaactgaatgtggatgttaatgacctggactgtcagggtccacctctacctcccagagcctcagagcccacaagacaaaataattctgaatactgttccatgggggtaatctactaattcaaaatgcctgcctgtgccaattttcaggtttttatgtagataagtattagttaacctgttgcaaaatgatctgacaaacagaagcatttgtgacgtttctgaacagagaacactttggaaatattttttgggggacatgattgatagaaacatgctatctttagtaaatttaaaattttgaaacccc

SEQ ID NO: 81335 - DNA, 716 bp, Homo Sapiens
ttttctctcaattatttgttgttgaatatcatttttgtctaaaaataacatgaattatacatacccaatagcagggtaaaaaaaatctgtttggtgctaatctctatgtgttagtccattaaaatacattattatataatcaatatacatattaagatgcaatatgagcccgttaatatgagaaacatagtaaaaatctttgtttttactttgcagcctgctgttctgttaatctaatgtatgtggtcccagagatacattaagaaacttatttaatagtcataatagtaacttttatgccatagtgaaagcatgtgcgatgacaaatctacttgaatttctaacaaaagaaattgaaatggtgctatttcaaagcatcatttatcctgagtgatagcgataggctatcacatactctctaatactgtgatgcagtgtttattctgggcaggagcttactcattctccctggttagatttaaatccatgactttttctgtaaacatcagtcacatcaccccattgtgtatctttctgagttttttgtcttctttactgtggttatcaactgtttactttggaatatttactttttgagcaccaagttgaattgtttacatgtgtctgtgtttatgcgttgagggattaatcttgccattagtataaatcatgggtggttaactatgccttaaaataaccttaaatatctttttttt

SEQ ID NO: 81336 - DNA, 1315 bp, Homo Sapiens
  misc_feature (968)..(1013): n is a, c, g, or t
  misc_feature (1018)..(1036): n is a, c, g, or t
  misc_feature (1046)..(1153): n is a, c, g, or t
  misc_feature (1223)..(1223): n is a, c, g, or t
ctgtctcttaaagtagttaacacagcactgggaagtcactctcctcattgctgaaactcactcacctgggcagtgggcaaagatggaagctgtttaactgtgtaaggcaatcctaccttagtcgcttttaagatggaaaaacaaggaatatcttacctagttaaaactgcagaagttgtattagatggaatgtaattaccagaagtgaagtgtgaccaggaagctaacacttttgctccagtgcacaatgctgtggggatcttaattccagtgactgtcctgcagccctaggtgcacatctcagactgttccagctctttaggcttctggcctcaaggttaggcagagccgcttcagctcagtgctagagggaagagtgccacctattgaattgtaggaattcttggagatgtgttgggactggtggagaaggctctcggaccacattcacgtttggtttgccatggtaactaatatatatatatctaaaagaaaacgaatatgttgactactcttgcttagaaaaacatcgacaaacgtctgtgtattttccccagctggagctgagcgtatgcctgtagtttagcctactgctacttgaaataagcatgctgctaaaaagactgaggcagatggtatttttaccacttcaggcaaaacatggcacctatggttcgactttctacaattttaattttttaacattttcaaaatggcttgtttaaatatctccgtcacagagacacagactttttcccagtttctttttaataattgcttcagatatatagatatgaataaccatcagttggtcaaaaccagactgttcagcattgtagagcctgccttctgttcattctttcaccagtgcctaggactgtgccgtaaatgagctttgacattcgtgctcattttgatacaaagacactaagtagtttataatagcttgcattatatttatctctagnnnnnnnnnnnnnnnnnnnnnnnnnnnnnnnnnnnnnnnnnnnnnncttcnnnnnnnnnnnnnnnnnnnagatataagnnnnnnnnnnnnnnnnnnnnnnnnnnnnnnnnnnnnnnnnnnnnnnnnnnnnnnnnnnnnnnnnnnnnnnnnnnnnnnnnnnnnnnnnnnnnnnnnnnnnnnnnnnnntgtctctgcactggtctttctctaggctttattgtgcatttcatatcatttgtctcatgactcaacacancaaaagggaggtttttgctggttttttaaatgtcctcttatgaggatcattctaagcacagagaaataattgctcatgcttaagcacttggt

SEQ ID NO: 81337 - DNA, 1024 bp, Homo Sapiens
  misc_feature (16)..(16): n is a, c, g, or t
  misc_feature (760)..(859): n is a, c, g, or t
acaaaaaaacccatanagctatagaccaaagtctcatagatttagatgcaaaatcctaaaattgaaaaaaacatctagccatatccataaactatatcatcaccaagagatgtttattagggcaatcaaaagatttattattttaaaaaaatcagtgtggacttccattcctctttcttttgattcccccctttgacttttcatgtatctctcctgccttccttccccagagtggaggagttagacttgcctcgtgggatgagaggagttgtggctttgtgtctgctggcaccaagagggctgagggtggggtgtggaagggacagggggaggagatgggcagcattgttgagagattggtaacactgagcaaataaatatgttgagaatgatgacagcaagatttctccattagagaaggtatttataaaaataggaatgaggagagctagaaaacctggagtgtggcattagaatagaactcatatcttttaaatatataggaacaaataaataaattgttgtgtgtgcacatatgcatatattttgtgattcattctaccgagaggacataaacacaatcacacctcagtaacagtaaacacaccaactgccaagttattatttcctaaatactatccacaaaaaaggggaccagggatgattcctagtcggagattgggagaaaaagaagatgagcctgaatcatttcatgtacctaacagaaagaaaatactctggctgggctcagtggctcatnnnnnnnnnnnnnnnnnnnnnnnnnnnnnnnnnnnnnnnnnnnnnnnnnnnnnnnnnnnnnnnnnnnnnnnnnnnnnnnnnnnnnnnnnnnnnnnnnnnnaaatacaaaaattagccaggcatggtggcatgcacctgtagtccgaggtactcaggaggcagagacgtgggaggatcgcttgagcctgggagattgaggctgcactgagctgtgatcgtgccactgtactctagcctggaagacagagtgagaccccatctcagg

SEQ ID NO: 81338 - DNA, 496 bp, Homo Sapiens
gcggccgcaaagacggcgagttcgagaccgtggtgccgcaacaaatcggagagtccgaggaagaactcgatgagcgtgtccgtcttggcgttgaagtcgcgcaggaccgaagaaaattgcggcaagacaaatgtgacaaagaagaccagcacaccgcccgcagcaaggaggacaaaggcgggatagtggagcgcatcggtgaccttacggcgcagcgcttcggcacgggcgcgctcgagtcccagagtttcaagaatttgatcgagcgtgccggacgactcgccgaccttgaccagtgctacatacatcggcggaaacagcgagggataacgcccgaccgcttcggcaaggctgtctcccgataggatcgccgtcctgattttccggatcaccggccgcagccgcccgacatccacgtcggttgcgagcagctcgagcgcatcgtcgagccgtgcacccgccttgagcagcagggagaggtcacgcgcctcgtgcc

SEQ ID NO: 81339 - DNA, 883 bp, Homo Sapiens
gcggccgcctgctcaccgctgcacagcggctgaaaaccacgcacgctaccgtggcccggcatatcgaggccatcgagaaaagcctcggcaccgcgctgttcgtgcagcatgcccagggttacgaactgacgccttccggtgaagccctgctcaagcacgccgaggccatggaaaacgtcgcgttgctggccgaagacgaactcacccattccgctgcgccgctgggcaagatccgccttggcgtggctgaggggttgggcgtgatgttcctcgccagccgcatgggcgggctgttcgagcgttatccagggctggaagtggaactggtggcggtgccgcgctttgtgagcattctcaaccgcgaagcggaaatcagcatccacctcgaacgccccagcgttgaccaactcgtcacgcgcaaactcaccgactaccgcctggcgctctacgccagccgggcttatcttgagcgcaacccgccgattgaaaaacgtgaagacctcgccgcccatgcatggatcgattacgtggatgacctgctgttcagccaggaactcaagttcctcagcagcttttgccgcaacccgaaagtggtgttccacagcaccagcgtgattgctcaacaccaggcggcgcgttcgggattgggcattgcggtgctgccgtgctttatggctgctggcgacccggacctggtgcctttgctgccggcagaaagcatccagcgcagctactggatcagctcgcgccgggagctgcacaagtcagtgcggttgcgggtgttgtgggattatgtggtggagttgtgtgcgcgggagcaaagcttgctgttaggcgaaacccactgatgaaaccggataaaaaatgtgggagctggcttgcc

SEQ ID NO: 81340 - DNA, 893 bp, Homo Sapiens
  misc_feature (121)..(131): n is a, c, g, or t
  misc_feature (748)..(748): n is a, c, g, or t
ggaaaatttgggaactatttatagataagaaatcaggccagtttggccttactgaatgtgactacatttgacatggagagaggtagtagagaatactattccaggaaaaggaatccatatnnnnnnnnnnncaaacacagaggctagaaagtctgaaaagtgtggagaacagaagaacgattaagtttggctgaatcatcaatttgtaaaaggaaataatagaaaataaattcagaaaagtcaactagcaccaaattgaagagggtcttcagtgacaggcaaaaaccaaacatttaattttgtagagagtcagtagctgtcaaagatttttgagtcaacgataaacattaggagagtttttctttcagaacattgatctgacagcaatgcacagagctgacaggagagcgaagctactggcatcagaacagttaggtagctgttgcagagatgagtgataatgagaatttgaacatgtggcaggaaagtggaaacagaaaaagacataaggaatatcataaaggcaaaatcaatacacgcacaacgttatagaaaacaaaatgtgcggtggaaggcatcaaaaatgaactcaaagttttgaagttagatgattgggagactggtgataataacattagtcatttgtagcccacaaattcacaagattaggacttcctcatagaatacgtggctagtatttcagcgactgaatgttaatacaaggtacctctataatacacttcacatntacatttaaacatacaagatcatcatgaaaaccatttcatagagctggaaaattgttgtattgactaagaatcatttcctcactgctcagaactatttgccacagagtagaaggctagggacaaacaaaatgggttcagggaatc

SEQ ID NO: 81341 - DNA, 891 bp, Homo Sapiens
  misc_feature (665)..(842): n is a, c, g, or t
aacaagagaaagtgcatgtacatgataatgttaaatgtccataatcacaaagagacaaagtgtaatctctgaatcctttagagaaagtaaaatcaagaattttgtgcactaatgcaagggggataagcaccctccagcttccagcaaagcaaagggagaaaatttcttctttcccacagtgcaggttgatgtgttagttccacatcactacattcacatttttttaaggcaagaaacttggaacagaaatgggtagagatgttttttccactgtattttgctcaagagtctcccacaaagtaagtgaagaaccagatcagggagagagagagaaagagaccttattagaacaaggcaactgagtacaaaaggggaaaaaataggagatggcaactggctcccaaagaatgcaaaatttctaaaagtaaaaagagggtcagaatctattagtattccactagtcatcttcctcttcaaccttcctccctcttccacatcaacaccatcttcatcttcttcccctctgccctcatcttcttcatcaaaatatgtttcaagtcttcttcatcatcattatgaacatcagcttcttctccttccccttctttatctatcatataagaagccaatctgcgctttaatagcaggtttttgttttgtttcannnnnnnnnnnnnnnnnnnnnnnnnnnnnnnnnnnnnnnnnnnnnnnnnnnnnnnnnnnnnnnnnnnnnnnnnnnnnnnnnnnnnnnnnnnnnnnnnnnnnnnnnnnnnnnnnnnnnnnnnnnnnnnnnnnnnnnnnnnnnnnnnnnnnnnnnnnnnnnnnnnnnnnnnnnnnnnnnncaatctcttccctgagtcccatttaacttcagtcaacactaaaaatggg

SEQ ID NO: 81342 - DNA, 621 bp, Homo Sapiens
gcggccgcagcagccatagcctttatggccacgaaactcgctaaattgatcctggcggcctgctgaaccttgttgagatcgacctcttgaatttccttgggcacatagttctcgtccagctgtataccgccgcgttccttcatgctggcgaccaggaaaaagtcggttgcacctgcggtgtactgagcgcaaaggatgtgtccaccggtcgataagacttgattaccggcttgctccaccaactggtccattgccaagtgggtcaagtcgataaatcgcgcttcatcatcttgtacttctacgaacgcggtgaagcgctctggaaacggtccctgacggtcatcattggcaaactggccgtagaccacgctgttgccttctttgccgatgaggccgtggataccattgaccagaaaatgcaacgcgggattttcagtatcgagcgccacatccttcttgaccacctcggagataacgctggtcttggccagcttcttgaagctgtgaataatggcagttttcagcgtaatcataggtcgaattccgttccgatagtatcaatatggaatcactgaaaatagcaccttacccagcaaacttcagggcttatctcctcgtgcc

SEQ ID NO: 81343 - DNA, 1379 bp, Homo Sapiens
  misc_feature (41)..(41): n is a, c, g, or t
  misc_feature (60)..(60): n is a, c, g, or t
  misc_feature (164)..(164): n is a, c, g, or t
  misc_feature (204)..(412): n is a, c, g, or t
  misc_feature (430)..(440): n is a, c, g, or t
ggactttggaacgccgcacgggcctttacgtctgcctttgntgctttgtcacatgtctcntgcgttccctgatcttgatacgtatacgctttgatgagtgtacgctccgcagccgaacgaccggcgcagcggtcaggagcgagaagcggagagcgccatacgcnaaacgcctctccccgcgcgtgccgattcataatgcagctnnnnnnnnnnnnnnnnnnnnnnnnnnnnnnnnnnnnnnnnnnnnnnnnnnnnnnnnnnnnnnnnnnnnnnnnnnnnnnnnnnnnnnnnnnnnnnnnnnnnnnnnnnnnnnnnnnnnnnnnnnnnnnnnnnnnnnnnnnnnnnnnnnnnnnnnnnnnnnnnnnnnnnnnnnnnnnnnnnnnnnnnnnnnnnnnnnnnnnnnnnnnnnnnnaagaattcggcacgaggnnnnnnnnnnncacaatgagtaatttaatgatagatatgatagtggtgatcaccattgccatgagtattccttcaacaaggaacaacacagagaacagttatacttattgggcatatttatcaatcttggctggcaataatgcctggatgtaatcactgtgtgacacagttacacatgctttctgctcttaatatttaccataataaatctgctcctataattgaggcaaagcaaaggcagctcaaaacctatttgtaaatagaattagacctggccagaaataatgaacgtacttgtttgggaagattgcattgcagaacaggcagaggtgctgcacaacgattcctatggaatcattattgattggtcccctaaggggatgtttagcttaaattacacctctcagtctgtgtgccacagccacactatgttcagctggtctaaacaaaacagtcagatggtagaaatggtaagaaatacagcaagagttcccattatctggaaacatggcggtatagtggcacctcaacctcaaatgatatggcccactgtagaagctaaacataaggatttgtggaaactattaatgtctgttaataagatcaaaatttgggaaagaataaaaaagcatctagaaagacactctacaaacttgtctttagatattgcaaaattaaaagaacaaatatttaaagcatcccaggcacacctgaccttaatgccaggaactggagtgcttgaaggagctgcagacagattagcagctagtaacccattaaaatggataaaaacacttggaagctctgtgatttcaatgatgattgtgcttttaatttgtgttgtttgtatagtctgcagatgcgggatcctgacttccgcgagaagtagctcaccatgacaaagctgccttggccttttattgctttgccaaataaaagaaagggaaaaa

SEQ ID NO: 81344 - DNA, 1056 bp, Homo Sapiens
  misc_feature (168)..(777): n is a, c, g, or t
  misc_feature (796)..(935): n is a, c, g, or t
tgttgttacgtttacatggtgtgcatgcatagtgttttccggttgatcagacatattcccgataggcccccgtcggctgacgggggtcgtcacacacccagctgagcgacgacctacaccgattggatcctacagctgagcttgagaagcccacgcttccgaaggagnnnnnnnnnnnnnnnnnnnnnnnnnnnnnnnnnnnnnnnnnnnnnnnnnnnnnnnnnnnnnnnnnnnnnnnnnnnnnnnnnnnnnnnnnnnnnnnnnnnnnnnnnnnnnnnnnnnnnnnnnnnnnnnnnnnnnnnnnnnnnnnnnnnnnnnnnnnnnnnnnnnnnnnnnnnnnnnnnnnnnnnnnnnnnnnnnnnnnnnnnnnnnnnnnnnnnnnnnnnnnnnnnnnnnnnnnnnnnnnnnnnnnnnnnnnnnnnnnnnnnnnnnnnnnnnnnnnnnnnnnnnnnnnnnnnnnnnnnnnnnnnnnnnnnnnnnnnnnnnnnnnnnnnnnnnnnnnnnnnnnnnnnnnnnnnnnnnnnnnnnnnnnnnnnnnnnnnnnnnnnnnnnnnnnnnnnnnnnnnnnnnnnnnnnnnnnnnnnnnnnnnnnnnnnnnnnnnnnnnnnnnnnnnnnnnnnnnnnnnnnnnnnnnnnnnnnnnnnnnnnnnnnnnnnnnnnnnnnnnnnnnnnnnnnnnnnnnnnnnnnnnnnnnnnnnnnnnnnnnnnnnnnnnnnnnnnnnnnnnnnnnnnnnnnnnnnnnnnnnnnnnnnnnnnnnnnnnnnnnnnnnnnnnnnnaagaacgcggctgtaggcnnnnnnnnnnnnnnnnnnnnnnnnnnnnnnnnnnnnnnnnnnnnnnnnnnnnnnnnnnnnnnnnnnnnnnnnnnnnnnnnnnnnnnnnnnnnnnnnnnnnnnnnnnnnnnnnnnnnnnnnnnnnnnnnnnnnnnnnnnnngacttttcagtgtaaaagataaatataaaatcaaagaagttaagcaatattaaaatttgagttggaattattacttataactcatgatgtacttttcttaaaataaataaataaaattaat

SEQ ID NO: 81345 - DNA, 1043 bp, Homo Sapiens
  misc_feature (181)..(261): n is a, c, g, or t
  misc_feature (264)..(681): n is a, c, g, or t
ccagcgtgtcgatagccacgtcggtaacgggtctcaacacccgctgacgacgctaccgactggtactacgctgacttggaagccacggtccgaagagaaagcgacagtatccgtagcgcaggtcgaacagagagcccgaggacttccaggggaaccctggttcttatagtctgtcggttcnnnnnnnnnnnnnnnnnnnnnnnnnnnnnnnnnnnnnnnnnnnnnnnnnnnnnnnnnnnnnnnnnnnnnnnnnnnnnnnnnttnnnnnnnnnnnnnnnnnnnnnnnnnnnnnnnnnnnnnnnnnnnnnnnnnnnnnnnnnnnnnnnnnnnnnnnnnnnnnnnnnnnnnnnnnnnnnnnnnnnnnnnnnnnnnnnnnnnnnnnnnnnnnnnnnnnnnnnnnnnnnnnnnnnnnnnnnnnnnnnnnnnnnnnnnnnnnnnnnnnnnnnnnnnnnnnnnnnnnnnnnnnnnnnnnnnnnnnnnnnnnnnnnnnnnnnnnnnnnnnnnnnnnnnnnnnnnnnnnnnnnnnnnnnnnnnnnnnnnnnnnnnnnnnnnnnnnnnnnnnnnnnnnnnnnnnnnnnnnnnnnnnnnnnnnnnnnnnnnnnnnnnnnnnnnnnnnnnnnnnnnnnnnnnnnnnnnnnnnnnnnnnnnnnnnnnnnnnnnnnnnnnnnnnnnnnnnnnnnnaagatttatagaccatttctgttggccaggacacagattttgagagctgtgtgtatatatatataatcatgtttgtatttttttcctgaaagttatcaattgcttttgtttaaaacagtttgttttagaggtggggtggggatgtatataacgaggaaaagttatatgtactttaaagtatgtcaagttcttactagtttcctgtactgaaggttcaattttttttatataagtttacttttcacctgctctattctttgtggggaaaaaatgcatctagaaaaacatagtttaaatactgtatataagataatgaaagttagtaacgtccattatttaataaagtttgtaaagtacaaggt

SEQ ID NO: 81346 - DNA, 763 bp, Homo Sapiens
  misc_feature (203)..(215): n is a, c, g, or t
  misc_feature (637)..(652): n is a, c, g, or t
ctgccacaggtgactcacctctcctcccttaaatctcgccttcccctcatgggctttctggcttccttagggtaccctagcatgccggagtctcttctggtccttgaactagggtcgccagagtccagggggcccagcgcaggggctgatgagaaggcactttcgtccgtgggagacccagcccccgcttcttttccgcatgnnnnnnnnnnnnnctgccgcaggtgcctcacctctcttccctcaaacctcaccttcccctcatgggccttctgcccgctttggggtacacctagtggccccgaggtgcactcaggcctagaaccagggtcgcctgggcccacggggcccagctcagggactgatgggaaggcactttctttccatgggagacccaggccccacttctccgtggcgcggtttctttttcttttctgacacaagtgtctcacctctcctccctcacagctcaccttcctctcatgggctttccaccgccttggggtacccctagtggcccgaggctctccctgagctcgaaccagggactctaggttccacggggcccagtgcaggggctgatgggaaggcactttcatccgtggggtacccaggccacacctctccgcggcggggnnnnnnnnnnnnnnnnctgtgacaggtgcctcacctctccttcctcaaaactcaccttcccctcacgggctttgtgtccccaaagtcccccttggggtgcacttgggcggccgaggcacctgtcaca

SEQ ID NO: 81347 - DNA, 1036 bp, Homo Sapiens
  misc_feature (50)..(50): n is a, c, g, or t
  misc_feature (122)..(123): n is a, c, g, or t
  misc_feature (982)..(990): n is a, c, g, or t
gcagcaatatgagtgtcatcatagcccccagttacatttgctccgctgtntgtttgaatgtgacgatacaattcacacagaacagtatgacagatcgaatttatagactcctataggattgnncctcggccagaattcgcacgagcttagacaaattctttgtatattctgtgtacatatagggaatacacataagcactttactgctgaggagaagcacgagtaactgagttatatgcctgaaccgtctgtttattttcacataacaccattttatgtgcaagaatgaataacagacaactatgtttattcagacttagatatctggcagatgtttcctccaaaatgaaagtgagtctgaaacatcaaggagaacaaatgacagtatttgttgccaatgataaaattccaacttccaagagaaaatgagaattttggaaaacttgtatctactaccatgggcttggcagctttcccatacttaaagattcttctgatgagatagtaacaaatatgattttttcacattgtatgttgaaatggtcaacatttggaataactgagtagctaattgaatcaatatttcctaaatgacaaatgcatgctggtataaaatcattcatggctaaaagattcacactccaaaagcaagatagattaatgaattttagtgtaatattatgaaagttcaccgacgtagtttcagatcccacactgcaattaactcgtaagaaattaccaatcgttgaattttggtgcagtgtcaacgatgaatatttgcaattatttgaaaagactattaaaataccttttcctgtctcccattgcatatttgtgtaaggctggattttcttcacataattccatgaaaacaacacattgcaacagattgaatacagatgcaaatagaatctggttttcttttagtaagttgaacattaaaaatttacgaacatgtaaagcaatgtcattcctcattaannnnnnnnngtttggaaagctatacttatttttcataaaaatatgttatttacgt

SEQ ID NO: 81348 - DNA, 354 bp, Homo Sapiens
agcctttcctcaggcagaattcatacccttacctcagcctacaacccccagcacacatgttacctaggggcaaattagtactttgccctcatgtcctcttcacaaagcactggggtagaagtccttcttccagggaccagcagcacccagcccctgcttccccaggctcctgccctgcacagggaccgctgccactgcccacccaaaagctgcttggggggtgttggggctggctcagctgagctcacacaggatcctctgatggccaaagtgctggagtggaaatcagagaccaagaagccaatccctgtgccagctgccctggttagggaaatacagaaactaaaaataaaa

SEQ ID NO: 81349 - DNA, 723 bp, Homo Sapiens
  misc_feature (45)..(45): n is a, c, g, or t
gtaataattcacagagccagctgaatagataccagagtttatttntacacaaatcagtctcccagccatggtccaggcttgagggtggagccctcacgagagacctcaccattttctacctagtatttccctgtctcctgtctatatcgcagagcattaaattgaagccaagggactgaaataagaaactccagagaacaacaagaggaactgaaattgcatggtcattagaaggcatcttaagaataactgtgtagcagagaatgaggactcatatcaaagtttgattcttttagtattggattttatgtaagtaaaatttttagtatagtcaaacaaatattatcgtcaatatattaatgttcatatttacattttcatcatgatgcagaagatgaaaacactaaacagactatttgctaatgctgaaaatctttagtatttaggtaagagttatattatacataaaataaaaataatataaactaagcataactgaaacgtgctttttaagaccttggttttgtttaaatctaaaaatcaaatacaaatgtaatataaagttcagtgtgtaactatgacaaaaaatattttgagtttaggaaataagctgtagtatctggaatttcaagaggtatatataatacattatgagaaggagtactttaaaggtcaaaagaagggaaaataataatttaaagctcaataaatgaattcaaatcc

SEQ ID NO: 81350 - DNA, 723 bp, Homo Sapiens
  misc_feature (23)..(24): n is a, c, g, or t
atccatagttaaagatgaccatnntgtgatctggacctcttattcctagacctggcatcctgcctcagcttgcttgaagcaattgtctcctttgagaacacatgaagaagccccttccctatcagaagctttttctgtcaacagcttttctttctagtcgtggaactcatcaccagtattttccaaaaaagaaagctaggggaatcacatttcagtctgaatgtggaaagacaacaaagaccataacttagagctaaatctgaatggcctggagcccctcagcctccctctcctggagtggtttacacagtccacaatctgcccctggtgacaggcatggcatgtttgtctttgttacagaaaacacttcccgagggagtcccaggcagagggatatccaccctgtgacatgcacagcatttctgagaggaaaagatagggacacctgaataaagtgtaggccatgggcccctgctaactctggcttgagtgcctgggcagtttccttggtccagcctctgagcagtaaagattcaactactttggagctgcaacaaacatgacttcaacagtctgttgggcagttggagggctctccatttgtatctaataagaggctgggttcttattaactccggtgatgtgttaatttttcaacctgacgttttctgctctaatagattcttgtaatgcttactaaattaaaggctgcattggaagagt

SEQ ID NO: 81351 - DNA, 1070 bp, Homo Sapiens
  misc_feature (117)..(173): n is a, c, g, or t
  misc_feature (576)..(576): n is a, c, g, or t
  misc_feature (583)..(583): n is a, c, g, or t
  misc_feature (653)..(653): n is a, c, g, or t
  misc_feature (770)..(770): n is a, c, g, or t
  misc_feature (852)..(869): n is a, c, g, or t
  misc_feature (970)..(986): n is a, c, g, or t
  misc_feature (1015)..(1015): n is a, c, g, or t
  misc_feature (1033)..(1033): n is a, c, g, or t
tccagatacaagcagagaaaaaggaggaaggggatgaggttatagaaaggcgagataaacagaagaggaagaacaagatagtagaaaataaagaacgggagaagggaaagataagcnnnnnnnnnnnnnnnnnnnnnnnnnnnnnnnnnnnnnnnnnnnnnnnnnnnnnnnnnaagcatgggtgaagagaataagtagagaagatcaaagacaaggtgaatactaaaacacgaacaatagagaatagaaagtaatatgaattaaaccaaatgtaggcaccagaagggttagaattgatagagcggaatcgtatgataggtgaaaggtgaacgggtaacaatgtaaaaataggaaagaggtatgacatgagtaagaagaagatgtagaatgaggatggagaatatacgcctggaggacaggaagtagaaacgaggttgatagcaatgatgaatgaagccaaagagcccatgaatgacaccatgataatgagaaatgtatagtgagaaagtaaatgacacaaatcctgaagatataatcagaaaatcatatgagtgatatgatgaagaacaaacagtnagcgttnaggaaggttagataagagagatggtgaaatccatgggggatagatttaacagatgaggaaatggatgaantggacaaagaagcagatattgacaaaaaggagaatttcagttacatcgaattcacagggatcatgaaacatggaatcaaagacaaagatgaatgaaagaaatttagttaaaatatanaacgttataaagtcggcctctagtttaaatgtcaaacccttcctccacaaagagagaaactgtgccatggctgttgtaggcnnnnnnnnnnnnnnnnnngcctgactgctctggataccattctcaccattcctgtttaacacagtactggaagtggtagccagagcagtcaggcaagagaaagaaataaaagacatccnnnnnnnnnnnnnnnnncgccaacagccgcgaccgcagacggtggncccttgtagtgacgggtnatttcgaacatggacactggccgatcgttaaccacca

SEQ ID NO: 81352 - DNA, 504 bp, Homo Sapiens
  misc_feature (230)..(231): n is a, c, g, or t
  misc_feature (234)..(234): n is a, c, g, or t
  misc_feature (238)..(239): n is a, c, g, or t
  misc_feature (248)..(362): n is a, c, g, or t
aaaactgcaagtggagaggtagcgaataatataatgactatcagtgacacttggagtccctgcctcaatttacgttaaagtgcccagcagttttccctattactgcttttggaccatcagtacaagtgtcaacacagtgaaaacagaaatggcatcttagtatcattataaaaatagtctccctctgcctcctgggtttgagcgattctcctgcctcagcctcccacgtnnagnctgnngggggtagnnnnnnnnnnnnnnnnnnnnnnnnnnnnnnnnnnnnnnnnnnnnnnnnnnnnnnnnnnnnnnnnnnnnnnnnnnnnnnnnnnnnnnnnnnnnnnnnnnnnnnnnnnnnnnnnnnngctacaggccggctcgttgccggaatttcttggggctcccaagggggcaaaattcccctaaagtggagtcggattaaaatccgtaatcaagtcaaaacctggttctccgggtggaaattggttatcccggttcaagattgcg

SEQ ID NO: 81353 - DNA, 1011 bp, Homo Sapiens
  misc_feature (56)..(56): n is a, c, g, or t
  misc_feature (72)..(72): n is a, c, g, or t
  misc_feature (81)..(81): n is a, c, g, or t
  misc_feature (145)..(145): n is a, c, g, or t
  misc_feature (159)..(159): n is a, c, g, or t
  misc_feature (175)..(175): n is a, c, g, or t
  misc_feature (180)..(181): n is a, c, g, or t
  misc_feature (199)..(199): n is a, c, g, or t
  misc_feature (241)..(241): n is a, c, g, or t
  misc_feature (261)..(263): n is a, c, g, or t
  misc_feature (282)..(282): n is a, c, g, or t
  misc_feature (330)..(330): n is a, c, g, or t
  misc_feature (597)..(606): n is a, c, g, or t
ttttttctccttttgcacagccgcctccctgatatgactatccatttcaggacacntgccatgtccctttcnatccacgtnagattcaagactgcagcaaaaaggcagcataggacctcttgagattctcatcttccctccagcnagtgaggaaactgncaaaaaatgtcagatnacatnntaagtactctgaaaaatnaccaaaaggcgtgcagccatctatgtagggttattttatttnatcgataaaatagctgatcnnntgtaaagaacagcatgcanttcccaacccaccccctccagctctgtagtagccttaaaaattaacanacctacatttgtgataaaaactaacagcctgagctggagctctttcaaagcctcatttccagaaagtcattattatttgacctatctggtggttccctagaagacaccacttgcaaagctgtctgtttctgacttgattcagagcttacccagcatgaaaagacttctcctggggctattgttgaaaataataattataggcaattgatgaactttgcagttgcccaaggtggtggctaacagttgggcaagaaatagacaaactgnnnnnnnnnnggaaaatctgggaagtgagatgtcaatggggagctttgaaaaaatccaacctatttctgagaatctagaaggccacacatattcccaggtctgagctccagaaatacctcagaaggcactgagctcatacttcttactgaccttcaggctctatgcaagcaggaagtgagggctactgcagagttgttaactgcccgactgagtgttgaaagcattctctaatgcatagaacctcaaaacaaaaactgggagatgactggttctgggcctttaaggaaatctctgtctggccattaactgaccactaagctaactgaggagagacttagtggccacacatggtagataatacagattttgcataattaattcagaaaagttaataataaactacaacaaactctg

SEQ ID NO: 81354 - DNA, 1038 bp, Homo Sapiens
  misc_feature (459)..(459): n is a, c, g, or t
  misc_feature (691)..(691): n is a, c, g, or t
  misc_feature (696)..(696): n is a, c, g, or t
  misc_feature (733)..(733): n is a, c, g, or t
  misc_feature (752)..(752): n is a, c, g, or t
  misc_feature (761)..(761): n is a, c, g, or t
  misc_feature (772)..(773): n is a, c, g, or t
  misc_feature (779)..(779): n is a, c, g, or t
  misc_feature (794)..(794): n is a, c, g, or t
  misc_feature (848)..(848): n is a, c, g, or t
  misc_feature (859)..(859): n is a, c, g, or t
  misc_feature (863)..(863): n is a, c, g, or t
  misc_feature (886)..(886): n is a, c, g, or t
  misc_feature (896)..(896): n is a, c, g, or t
  misc_feature (901)..(901): n is a, c, g, or t
  misc_feature (929)..(929): n is a, c, g, or t
ctccgggcccatttcagaagaaatttcagataaaccaccaacttgtcatatgaaattagattttttttacttgaaatcacaagtgtttaatgcagctttgatgctatgaaatatgtatttggtcttcatccctgtttcctggcatgcaactactaaaatccttgggatctccaatgtgaagtctttctgtatgttaatgagactgatggctggcagaccctaggcaacttcaggatgggggctggtcacgataaagaccaaggcatgattagaagattgggacttttggcacaaccccccatcctccagggataggaggggctaaaggttgagctgatcagcaatggccagtgatgtaatcaaccatgcctatgtaatgaagcctccattaaaaacccaaaaggacagggtttagggagctttccgacagctgaacacctgcgggctgctggacagtgngtggtgcatccagagagggcatgaaagctctgtgccccttcccctataccttgctctatgcatctcttcatctgtatcctttataataaagcagtaaatgttaagtgtttccctgagttcagcgagctgctctagcaaatgaagcccaaagagagggtcatgggaacctcaacttgaagctggtcagtcagaagttctggaggcccagacttgcaactggtgtctgaggganagggngcatcttgtgggaatgggagcctcaatctatgggatnctgaggctacccccatatntcttttaanaaaatgtattnnttcaantattttttccctacnatcccccactccttccccacttctacttagacctttagaaatacaaaaaccttntacccttcttnacanacctcctacagggcagttcactnttgtttaaanctcanagcaaacttctccacacggatgctccanggaaagcataattaacccaaagaggccctaagaatccccactgggagttcagcacttcaccatttgcagaaaacaaatgcgtggttaaaagaaagaagatatcactctg

SEQ ID NO: 81355 - DNA, 940 bp, Homo Sapiens
  misc_feature (62)..(62): n is a, c, g, or t
  misc_feature (78)..(78): n is a, c, g, or t
  misc_feature (80)..(81): n is a, c, g, or t
  misc_feature (86)..(88): n is a, c, g, or t
  misc_feature (119)..(119): n is a, c, g, or t
  misc_feature (135)..(135): n is a, c, g, or t
  misc_feature (215)..(215): n is a, c, g, or t
  misc_feature (402)..(411): n is a, c, g, or t
  misc_feature (560)..(588): n is a, c, g, or t
  misc_feature (604)..(612): n is a, c, g, or t
  misc_feature (694)..(702): n is a, c, g, or t
aaatgcattaaaataaacatatcagtagtttctatatgtatcaaaactgaaaaaatagtgtnccagctaaacatactntnntaatnnntattgaaagttgtcaaaatataatatatttnttgagaggcagtgtanatgatctaggaaaccctgggctgatagagtagaaaggaatatggctagaataacattgccaaacattaggctttatgttntgttatgtttgtgttttcgttgtataattatgaacatgcacaagtttctgcatgaaaagatattaatatattaatcacatgtatgtgccttttggttacatgcattaaatctaacagagttaaattatttcagtggctcttttggcctcttactaggggggatagtcttgtttctagcttaaacaannnnnnnnnngcacaaaatttcatttttaataaaagtggtatcttttgactgagttattgttttgaaaatggtatataggtttccagtaggtcaacaaccatatgtaaatggtttttataaatttctcaatttggggacaagattttttttgtggtctnnnnnnnnnnnnnnnnnnnnnnnnnnnnntatgtgtacatataannnnnnnnnctttgccacactggagcacaatgtttctatgtaaagaattattttcattctttatccaagagcaccaggctttgctcacttnnnnnnnnnttaagccacattaaggagtgagtcttcttttttacaataatgtaaaaattaaactgtttacatttttttaaagcattgtagtttttaaaaattaagctgttttgttttgtgttgttgaatttgaaagcctttgtaaatatcaatataatgtaccaatgaaataacatctggggcaatgaaaccctgatcatgttgttgatggttagcatatgtttctgaaaattaaatatgtattatt

SEQ ID NO: 81356 - DNA, 981 bp, Homo Sapiens
  misc_feature (115)..(115): n is a, c, g, or t
  misc_feature (159)..(160): n is a, c, g, or t
  misc_feature (167)..(167): n is a, c, g, or t
  misc_feature (178)..(178): n is a, c, g, or t
cgctgcgaccatattatgcctctagccccgttcatttgtcgctgttgtttgattgcgaacatcaccagacagttgctgtacgattatcgctccttaggattgcctcgagcagatncgcacgagccagatggagtattgccatttctgactgtgtacagnnaaggtcngatcagacccnaaagaggtctgatctcacgcacaaggagtcgggcgagccatagagtaagtgaagcaagtcatcagaaagcaaaggataaagatgcctactccataggcagagcagtggctttggctgctcagctgcttgtacttgtaacttcttggagtatatgctaaacaaagggattgattactccttgtttagcagttttctggggaaaggagtgggcaattcccagaactgagggttcctcccctttttagaccatatagggtgacttcctgatgttgccatggcatttgtaaactgtcatggcgctagtgggagtgtcttttagcatgctaatgcatgagcagtgaggatgacccgaggtcatttttgttaccatcttggttttggtgggttttggctggttttggccggcttctttaccacttctttttatcagcaaggtctttgtgacctgtacttagtgccgacttcctgtctcatcctgtgagtaagaatgcctaatctctcaggaatgcagcccagtaggtctcaaccttattttacccagcccccattcaagatggagtgactctggttcaaatgcctctgacacatgtgcctcatgtttgggcatgagacctcactgtgtaggtgcagagaagaccctgcctaaacattgcctacacgttgctcctttttcctgcctcaacttccttaaaatgacaagagcagagcccttttgggagctaacatcaggactccttttctgtactctgctccgttgtgctgctagagccacaagcctattaaactttgcctgaaataaaaaa

SEQ ID NO: 81357 - DNA, 966 bp, Homo Sapiens
  misc_feature (169)..(391): n is a, c, g, or t
  misc_feature (445)..(460): n is a, c, g, or t
  misc_feature (507)..(533): n is a, c, g, or t
tgaaaccgaacggctttacgtctgctttgtgctttgtcaattttctgctatcccgatcttggtacctatacgcttgatgagtatccgtcccgcaccgacgacgagccaggagtcatggcgagagcgaagacgcccatacgcaccgcctctcccgcgcggggccgatcannnnnnnnnnnnnnnnnnnnnnnnnnnnnnnnnnnnnnnnnnnnnnnnnnnnnnnnnnnnnnnnnnnnnnnnnnnnnnnnnnnnnnnnnnnnnnnnnnnnnnnnnnnnnnnnnnnnnnnnnnnnnnnnnnnnnnnnnnnnnnnnnnnnnnnnnnnnnnnnnnnnnnnnnnnnnnnnnnnnnnnnnnnnnnnnnnnnnnnnnnnnnnnnnnnnnnnnnnnnnnnaagaattcggcacgaggaccattctgatgttggagcggccgcggctgtaggccnnnnnnnnnnnnnnnnacaaactggcaagacgacataagcattgtcttatggtccttcagttnnnnnnnnnnnnnnnnnnnnnnnnnnntggacaaagacccattaatttcatggtggttgtagtgggttgaaaggtggccccctaaaatgtatgtccacccctggaaactggggatgtgaccttttttggggaaagggtcttttctaatgtgattaagttaaggattgcaaaatgagagcatcctggatttgggtggaccctaaatcgaatgttatgtgtactgagaagagaagggagaagacagaggagaatgccagatgaagacagaaacagagattgaagttatgtggccataattcaaggattgctggcaacaccagaagccaagagaaagatgaggaagaattctcccctagacctttcagaaggagcgtggcccagccaacaccctgacttcagacttctggcctccagaactgtgagaataaattcttactgttgtaatccacctgatatgtgg

SEQ ID NO: 81358 - DNA, 646 bp, Homo Sapiens
cggcacgaggtctggaagccccttttcttttctgtgagctcagggagcattctacatacctcagctgtgtctgctatcttttgcttaattatcaatctttccatataaacagtaaaggaccacagtttattcatcagattccccatccaaacctgcacctgcatacataaacgcactggataaatgtaccgcagtagacagaggctctccaggttgagagctccatgagggcaccaatttttgtctgtttagctgtgtcctcaaagcaaggaagggttgatccggtctagaaatcacctgcgcatgcttcccaggacacagagctgcatcgggtgtcacattcccactttggagcctacaggggaaactggctggtggcaaacagtccttggttccattttcacctcccttaaactcacctgtaaaacggcgtatgcaataatgctatactttcctttcagttgtaatactatgttactaatgtttctgtcatgagaacttgaggttcaagatccccttgcttttggtagctttccttttagaaaataactgaaatccaatccattcctctgtccctggaactggctgctgacaagtccaggcacttcacctttgtacttccccagaacaaaacaaaacaaaaaag

SEQ ID NO: 81359 - DNA, 641 bp, Homo Sapiens
tgctgggaaaaaaagaatactttaaaataaaccacaatcactgccatctatcagaaagagtaagagacctagacctttaagcaaaattttagtaatagtttcaacttccaggccctctgtatttttcagtgctaccatttcatcttcccccactttttatcattaatatcagaagcagcaagagatgtgtaagatgcaaatcatagagtacaaacaccaaactgcatttagctaagggctaaaggaatagcttaaaaggtacacagaatgccgctgtatatcagggaaaaaatgctgagcacccaaccctgttcacatcaaataagtcaaaatattacttgaagattagatatgatgccagaatacgcacattcttgggtcttgccattttcaacaccaatcctgagatcccctgtttttaaggattctatgttaaatttaatgaacagaaatggggtaatttatagattcaatctgcccaaaaagagaaaaacttaatactgatcttaatgacaacaatatgtcaaattttgcattaataaatggtgaccccctaggatgacttcatttaaaggtaccttgacaaagcaaacaaatggtgcattttcaaaagaaggaataaaaatagctttcattgagct

SEQ ID NO: 81360 - DNA, 115 bp, Homo Sapiens
aaacagacgggtctcactctatcaacccaggttagagtgtggtggcacaaccacagctcactgttaacctcaaactcctgggctcaagcaatcatcccaccacacccagctaatc

SEQ ID NO: 81361 - DNA, 667 bp, Homo Sapiens
atctggttgttagaaagtgtgtggcacttctcccttcgcccttgctctctctcctgcagccatgtaagatgtgccttgcttcccctttgccttctgccatgattgtaagtttcttgaggcctccccagccatgaggaactgtgacttaattaagcctcttcccattataaattacccagtcccaggtagttctttatagcagtgtgaaaatggactaatacacttaccaagggttcattttatttgttcccaaattctttataccagttgcaaatatcatcataattactgcatttcatattatgtaaaccagtgaaatatgagcataaaaagaaggtatggtttctataaaatctaagccacatacctggaaactcaataaaggccagtgactaaaatttttatggttagattaggtatgggaagattattgaaattaaaaagaaaaactggaaagatttgcacttagctttctttgcaatgtctaaaagttttggtgctctgttctatagaaactttacctggaaattgcagatgatatatttataagggctgtatatgcaacagaacccgtaagaaattaccatgagctaacaaacttgaagaaaagaccttagctttatgtcaaacaattggtgaataaatgcactaagttttaagtgaaaac

SEQ ID NO: 81362 - DNA, 1163 bp, Homo Sapiens
  misc_feature (9)..(17): n is a, c, g, or t
  misc_feature (63)..(237): n is a, c, g, or t
gagactttnnnnnnnnnctgtattgagatgcaattcacattcaccaattcactgttcaccagnnnnnnnnnnnnnnnnnnnnnnnnnnnnnnnnnnnnnnnnnnnnnnnnnnnnnnnnnnnnnnnnnnnnnnnnnnnnnnnnnnnnnnnnnnnnnnnnnnnnnnnnnnnnnnnnnnnnnnnnnnnnnnnnnnnnnnnnnnnnnnnnnnnnnnnnnnnnnnnnnnnnnnnnnnnnnnngttcacatccttggtctatctgcagggtcctgtcttgcaaggggctcacagttcaggtgcagagacaggaagagccatgtaatgacttcctgctctttttcttcactcaacagccaagacaatgcaaactccagtgaacattcccgtgcctgtgctccggctgccccggggccctgatggcttcagccgtggctttgcccctgatggacgcagagcccccttgaggccagaggttcctgaaatccaggagtgtcccatagctcaagaatccctggaatcccaggagcagcgggcacgagccgcccttcgggagcgttacctccgcagcctgctggccatggtgggtcatcaggtgagcttcacgttgcacgagggtgtgcgtgtggccgcccactttggagccaccgacctggatgtggccaacttctacgtgtcacagctgcagactcccataggtgtgcaagcagaggcgctgctccgatgtagtgacattatttcatataccttcaagccataaagatattgtgttcacttttctgcttgaggctaaggcactgtatcccaggcctcccaatgttcccgagccaggaactctgggccccatggagttatgagctcccttggaattttgagccaagctttaagcaagtctggactcctgagacctcctgggtctagtcagtaaaattctgcaactctaggaattctaagatcccattggaaggaatgctctacctcacagaactctgaaccctacagaaatatgggcctgctgccatttcctgaagaccggggcatcggggtggggtgataaaggatacaacctgcacagggggaagttattaaagaggctgcaaagtccagccaccctgaagatactccccagtgctcccctcctgctaaagaaccagttaccccaggaaaaa

SEQ ID NO: 81363 - DNA, 757 bp, Homo Sapiens
gagcagtgggctaccattattaagcacttagtgtttgcccagcatggtacaacaatctggtaggtgggtagtttatctccaatgacacatggggacaagaggataagttatcttgcccaaagtcacacagccagtgagtgttggaagctggattcaaacccagacgtcagattccagagtccattctcttcaaggctggacttgaccccaccctgacccagggcccagatttgagggctctctctgagcccacctgactttcctccagggtcaaggctggctgggtcccctggagccctctcctccacccccacacccagaggacaggctgcatcaggggtcttcccacccccaccccataccaaggctgctggagaggagcctggcccaaggtggcgctgcccctcttggacctccaagaatgccgcatggagcagcccctcagggctgtagtccctctacacctacattgggcccctccagcctggacccccacccctcccacttcctggcttcccatccttcaggtctcgcagaagcctcctcaacaccctccctgcttggtctctatccttcagaaccctcatcacaacctgtccttgcctctagaacggaagccccatagcagcagggaccacgtatctgttttagcttcagtttctagcccagtgcagcattgtgaaaatccttacgtatatttttaaaaagttttcgaattctacttttctttgctgacttggcatgtgctttctcctct

SEQ ID NO: 81364 - DNA, 492 bp, Homo Sapiens
atgcacagggctcaatgtttaatctgtccagcttcgtataccttataatcatcacagaagaaaggaggtatataaacattacttatctcacctctcatcatttccaaacaggagactgaggcagatttccattattactgaggttcccttacctacttctgtttaagaaacaaaacaactgtaccatagatcagtgctacaaatcgcaaataaatatgcagtgaggaggaaggcatagagagagagggtctggaggggagggggtgtaacaaagagactcccacaactggcttcctcttcaaaccccaaggaaagccttcttccatctgttcccctcaccacaggctgagcagaacaggtcagaagggtgaactggtaaaatggagagttcaggtccctacagtgctgctttttctcagagtcaagaattgtgaaaaagttacagggaattggtttgtcaagactgagcccattcaacaggaatggggtacc

SEQ ID NO: 81365 - DNA, 930 bp, Homo Sapiens
  misc_feature (77)..(111): n is a, c, g, or t
  misc_feature (369)..(413): n is a, c, g, or t
ttgtgatcactatagggcgctagctcggtcaagccgaacgacgagcgcagcgaggtagtgagcgaggaagcggccgnnnnnnnnnnnnnnnnnnnnnnnnnnnnnnnnnnncagtcgacggtaccggacatatgcccgggaattcggccattacggccgggggttacagatacagaggtggaaactgtagagccccctcctgttgagattgttacagatgaagttgcacctacatctgatgaacaacctcaggagtcgcaggctgacttggaaacttctgacaattctgatttggtcaccagttgatatgttgtctttgtagaaaagaattcaattctagacgaggtgttcgccgtcacattcgaaaannnnnnnnnnnnnnnnnnnnnnnnnnnnnnnnnnnnnnnnnnnnncgaaagaatccaaaccaatcctctaaaggacgcagtaagaatgttctagttccattaagtaggagttgtccagtatgttgtaaatcattttgctacaaaagcgaatgtaaggaggcattttgatgaagttcatagaggactaaggagggattcaattactcctgatatagcaacaaagcctgggcaacctttgttcctggattctatttctcctaaaaaatcttttaagactcgaaaacaaaagtcttcttcaaaggctgaatacaatttaactggcatgcaaatgcctccttgtgcaagaggaaatatagttcacaaataatgcttaaaagacattatgcaaattgtccacaagataactcctttctggaacaaactctaaaagagaaaaaggccctaataatactgccaacagttcagaaataaaagttaaagttgaaccagcagattctgtagaatcttcacccccttccattacccattctccacagaatgaattaaagggaacaaatcattc

SEQ ID NO: 81366 - DNA, 977 bp, Homo Sapiens
aaagcaggctggtacccggtccggaattcccgggatatcgtcgacccacgcgtccgcgatcctcagaatgcagatgtttatcaccaccgaggacagctgaaaatactccttgatcaagttgaagaagcagtggcagattttgatgaatgtattaggttaagacctgagtctgctctggcacaagcacagaaatgttttgcattgtaccgccaggcatatacgggaaacaactcttcacaaatccaagcagctatgaaaggttttgaagaggtcataaagaaatttccaaggtgtgccgaaggctatgcactatacgcccaggcattaacagatcaacaacagtttggtaaagctgatgaaatgtatgataaatgtattgatttggaaccagataatgctacaacatatgttcataaaggtttacttcaacttcagtggaagcaagatctggatagaggtttggaacttatcagcaaggctattgaaattgacaataaatgtgattttgcctatgaaaccatgggaactattgaagtacaaagaggaaacatggagaaagccattgacatgttcaacaaagctattaacctggccaaatcggaaatggagatggcccatctgtattcactttgcgatgccgcccatgcccagacagaagttgcaaagaaatacggattaaaaccaccaacattataaaacagggggaaagcagactgaccctctttttaaaagtttaccccctcttcaactgaaccctaaagacactgtcatgaactgtgttgaatggtggaaatcagtatttctgtttgtggtgttgttatttgttacatctgtttcatgtctaggtgttgtgggtgtggctgttgaaggaagtttgcagtcttgcagcttttattccctgtgcaacaaaagattagaacatgttaaagggatttttaaataaagttgcaaagagtacaaatgataattggccatgc

SEQ ID NO: 81367 - DNA, 667 bp, Homo Sapiens
  misc_feature (605)..(605): n is a, c, g, or t
aagcagtcacacaagtctaagccacatttatttgcacatgtatagtaatggccaacagatactccaagttcatacaaatttgtaaaacaacaaagttaataatcacttggtacacttgtgtgttatcttgcttacatattaaaacctagatgaacttccttcattttgtggacttccatacaatacttccttaaacaaaattcttgaaaacacatatcagcatgtttaagttagagccaacacaaagttaagacaagacacaaactcaaaaaccaagtttgaaagatacttttctacctccctcccctagaaagaagtgattttctttaacagatgtatgttatatcacacaagtaaccatgaagacaaaagaatgacgctcccatcatcaggaagaaaatgccaaccagatcatactgtttagttatctaccgaacatatggttaaaatatgagaaacgggggaaaatgcttagattaaaataacaagggagaatagaaaatagcaaatgattttaaagagaactgttccccctcaaagctgcaaagctctgactctgacaactaaaaactgtccaaggcaaataaaaacgaggaaaccttcanaaacattctaatcacgtgcagtatctagtgttaaaagctgaaaatgcctcgtgccgaattct

SEQ ID NO: 81368 - DNA, 913 bp, Homo Sapiens; identical to SEQ ID NO: 7668
  misc_feature (498)..(500): n is a, c, g, or t
  misc_feature (512)..(568): n is a, c, g, or t
  misc_feature (581)..(640): n is a, c, g, or t
  misc_feature (662)..(662): n is a, c, g, or t
  misc_feature (673)..(686): n is a, c, g, or t

SEQ ID NO: 81369 - DNA, 825 bp, Homo Sapiens
ggcctgggtggcgaattcggcacgagggcctgcgcctgcgcaggcccgctccccgagccctgccaaccatggtgaacttgggtctgtcccgggtggacgacgccgtggctgccaagcacccgggactcggggagtatgccgcatgccagtcacacgccttcatgaagggcgttttcaccttcgtcacaggcaccggcatggcctttggcttgcagatgttcattcagaggaagtttccataccctttgcagtggagcctcctagtggccgtggttgcaggctctgtggtcagctacggggtgacgagagtggagtcggagaaatgcaacaacctctggctcttcctggagaccgggcagctccccaaagacaggagcacagatcagagaagctaggagagctccagcaggggcacagaggattgggggcaggaggagtctggaacacagccttcatgccccctgaccccaggccgaccctccccacaccctagggtaccccagtcgtatcctctgtccgcatgtgtggccaggcctgacaaacacctgcagatggctgctgccccaacctgggacctgcccaggaggttggagcagaaagggctctccctggggtggtgtttctcctctagggtattgggatgcatgttctgcactgccagcagagagggtgtgtctgggggccaccacctatgggacacggggtcgaaggggcctgtacactctgtcatttcctttctagcccctgcatctccaacaagtccaaggtgacagctggtgctaggggcgtggggttaataaatggcttatccttctctccaaaaaa

SEQ ID NO: 81370 - DNA, 273 bp, Homo Sapiens
agttagaggtggaacattccttggaccaggtgttgtattgcaggaccccttcccccagcagccaagccccctcttctctccctcccgccctggctcagctcccgcggccccgcccgtcccccctcccaggactggtctgttgtcttttcatctgttcaagaggagattgaaactgaaaacaaaatgagaacaacaaaaaaaattgtatggcagtttttactttttatcgctcgtttttaacttcacaaataaatgataacaaaacctcaaaaa

SEQ ID NO: 81371 - DNA, 315 bp, Homo Sapiens
tacaagagaagagacgagatgtgtgtgtgtgtaggtattaaagatgtgttgttggtttccaaaaaggaacactggaaaataaattttgaatgtttatgttctcagaatcaggttgacagtcccttgctgacatggctttgctttgtgtaaatacagtggatctcaatcttcggggtgtgatgaatagcgaatcatctcaaatccttgagcactcagtctagtgaagatgttgtcattatgtacaatacataactagtttaattaactatgtgatgttaactattattaataaattttaacattttccaaaataaa

SEQ ID NO: 81372 - DNA, 332 bp, Homo Sapiens
atgaggcaccaaacccagcctcagctaggagatttgaagcaggagaataacaaggatgagatcctgtgtgctagaaggatgatcctggcagcactttttaggaaatatgccacatctcaccaaatctaagatgctatttgtcttaatccattttctgttgctgtaacagaataccacagactgggtaaattgtaaacaacagatgtttattcagctcacggttctggccaatggactcttgcaagaaaggcattaatccattcatgagagttacaccctcatgacccagtcacgtcttaaagaccccacctcttaataccgttacattggca

SEQ ID NO: 81373 - DNA, 1052 bp, Homo Sapiens
  misc_feature (28)..(28): n is a, c, g, or t
  misc_feature (39)..(39): n is a, c, g, or t
  misc_feature (73)..(73): n is a, c, g, or t
  misc_feature (84)..(84): n is a, c, g, or t
  misc_feature (143)..(143): n is a, c, g, or t
  misc_feature (152)..(684): n is a, c, g, or t
cgtcggtgacggggtgtcaacacccagntgacgacgctnacacgactggatactacgctgagtatgagaagcncacctcccgangggagaagcggacagtatccgtagcgcaggggtcgaaccagagagcgcacgaggagctnccagggaannnnnnnnnnnnnnnnnnnnnnnnnnnnnnnnnnnnnnnnnnnnnnnnnnnnnnnnnnnnnnnnnnnnnnnnnnnnnnnnnnnnnnnnnnnnnnnnnnnnnnnnnnnnnnnnnnnnnnnnnnnnnnnnnnnnnnnnnnnnnnnnnnnnnnnnnnnnnnnnnnnnnnnnnnnnnnnnnnnnnnnnnnnnnnnnnnnnnnnnnnnnnnnnnnnnnnnnnnnnnnnnnnnnnnnnnnnnnnnnnnnnnnnnnnnnnnnnnnnnnnnnnnnnnnnnnnnnnnnnnnnnnnnnnnnnnnnnnnnnnnnnnnnnnnnnnnnnnnnnnnnnnnnnnnnnnnnnnnnnnnnnnnnnnnnnnnnnnnnnnnnnnnnnnnnnnnnnnnnnnnnnnnnnnnnnnnnnnnnnnnnnnnnnnnnnnnnnnnnnnnnnnnnnnnnnnnnnnnnnnnnnnnnnnnnnnnnnnnnnnnnnnnnnnnnnnnnnnnnnnnnnnnnnnnnnnnnnnnnnnnnnnnnnnnnnnnnnnnnnnnnnnnnnnnnnnaagaattcggcacgagggggaaaccgtccagagcaaacgagaacagcagtgccacctcctgttaatttgctgcttaccgaagagacaagatcagaaacttgaagttagagacgaaaaaataatggaacacaggaaacaaagcttgtttcctatgcaacgcccagcctccttctccaatctcctgttcgctagtttggggcaaactcagcacctgcagagcccaatccctgctgccccaacctaaaggacaggaccaagtctctctgcccaggtgggccagagttagttcttactcacgctcccaaacatgggactctgtgctcacaggtaaccccaaacatcagagcaataaaaaccagggcaattcc

SEQ ID NO: 81374 - DNA, 1050 bp, Homo Sapiens
  misc_feature (982)..(1009): n is a, c, g, or t
gccacgctgatgcctctcgctgcagtgatccgccttgtccagagccaagtggccaggtatcccttccacaaggcaggccgcccacctacgtccgagcccagcgctacaagtactggttctcccagcctggggagcagggccagtggtggcggcgccagtgggtggaggagttcttcccatccgtgtccctgggggaccccacgctggagacgctgctcaggcagtttggactacaggagaaaagcccacctcgcacccgcagcgccaacagcaccctggcccaggccctccactggactcgctctcagctgtctcccctggaggcccccgccctgctctgggggctcctcatggccgtgggggctgtcagatttgtgcaggccctgctagcaccctgttctctccggtcctccccgctggcaccagtcagcggggagaagcgcaggccagcctcccagaaagactccggagctgcctccgaacaggccaccgcagcccccaacccctgctccagtagttcgaggaccacccggcgaaagaagtagctgtgttctcccagctgcacgtcctgagagggccaggtcgccgggagtgctctggcctccggcaggacaggacccagccactgtgccttagctgaccctgcagggccaggcacaggttggggggctgcccctggggtttgcagggtgctgcattgagggctccaggccccacccccacgccagccatgcccctccccaggactcccactattgcctctgtgattggcccaggaggaaaacacgaccaagctcaagacccttcccctgccctgggctgtgggggtctgagtctagagcccccaaccctaggccccgtgccagaggggaagaggctgactcccaggggaagaggggaagcactgtcatcttccacgtcatcttcacaccagcccatcctgccctttagatctgggcaccaataaaggcgtcttttgtgnnnnnnnnnnnnnnnnnnnnnnnnnnnnacctgagcaggcggccgcaagcttattccctttagtgaggt

SEQ ID NO: 81375 - DNA, 630 bp, Homo Sapiens
cccaccgagacgaaggtgttctgcggccacgtagcacacgcttagcaacatggagtttgcccagaaagtggagccctgcaacgaccacgtgagagccaagctgtcctgggctaagaagagggatgaggatgacgtgcccactgcgccgtcgactctgggcgaggagcgcctctacaaccccttcctgcgggtggcagaggagccggtgcgcaagttcacgggcaaggcggtccccgccgacgtcctggaggcgctatgcaaggagcgggcgcgcttcgaacaggcgggcgagccgcggcagccacaggcgcgggccctccttgcgctgcagtgggggctcctgagtgcagccccacacgactgagccacccagaccctcacagggctggggcctgcgtccctcctcgtgacctcggccagctggacccacatgagggccacctctggaaccttcttcgaggccctggccagccatctgcccagcctcggagggtgggcaacctggtgcttcccgggtggacacacaggaccactcagtggggcctgtgtgggcgccgagacctgggtgtctgggaagtggggcacacggggcctcccaactatgaataaagctttgaaaggccaaaaaaa

SEQ ID NO: 81376 - DNA, 775 bp, Homo Sapiens
aattcggcacgagggtcacatctgttggtgggaaaactaggtgaagtgcttctttaatatgcactgtcttgtcttcccacgcaagatgtgacaatgtttgagaaaaggtgtgtcatactcagtgacttcaatttgcaaatgtggggcctaaagaaagctctgcagctctgaacctctcactggccagagctcagcctattggtcccatccatgacgctgagacaaacagaaactggaagctgaagtcagtgtctctggtgcttagaaaccctgtggatttccctctgaaccaagatttttagtagtaaaataaacaactcatggacatctgtcagatgagaagttttggtcctgttagagaggagaaagactgtaatgaaactactagacccatttgggctaaagtttggcttttccttccttgagtcatagaacatatccatctcccaggaaatgtccttctctggcgtctgcttgcccttctgagtctgccttttttgcactgaacataagcactttatactaatgggtcacaaatcttgcagcccttaatttgggataagaccagattttcctgacattttcctctaactcattgaactatcaaattataggcaaccactgactagactgatatgagatgaggctaaaagcctttgaacaccacgctgtagtctccaacagaaaaacaccaccaaaacagatacccatgttgaggggttgaatgttttactacaaacaagccacaataaagtgtctatcaacatgaaaaaaa

SEQ ID NO: 81377 - DNA, 558 bp, Homo Sapiens
agccaagatgtactattcaactatgtgtttctgtttataaaaaacacataccatggaaccatggtgcttttgttcttagtttttgccgttagatcccttcaaactggaagttccttacaatatctttctcaggaaatattttgggaaatggggtaagagatggcaagtgtgagacgggctgtgtcagaggttgctacgtcatggatacagtgcagttccaagttgccataagtgtatgtacatatagttaataatgacactgttcatcaccattctaaaatactgttcttccaaccctatcttcaatgaccagtccagaaggggttaagctggattcatttgctctggcatgtgcattcccagcagggtgaagaaaggtttaaattaaagaatttattttctctctcccccttcctctttctcccagtctttgcataggagaatgttagacattcagaaattactgtttctgttttaaattgagtattgatttttttatattgactttgtattgagttctttttgaaagaataacaaaataaaatgcaggatctttgt

SEQ ID NO: 81378 - DNA, 631 bp, Homo Sapiens
cggcacgaggcgcacgaggattttatggaaaacatcaacatgtatatcagaagagtgtcatcagtttctttggaaaggctaccaattttactaagtgaaattgtaaaacatagtacatcagttaggactctgttggttgcatgtgaactattctaactagtttaagtcagaaaaaaaatttcttacaggctctatacctatcaaatctaggaggaatttagactacaggcattgctgaatctaaggactaaaactatatgagtaggatcttctccttccctagcagctcctggcttacattctcttaggttcatgcctgtgtctctgtggtttctgcagctgcctatgcatctcaggacccctgattgcccacatgcctacggtagtcctgagccattcaccatgactttggccatggctgagtactgcctattcctggagccagaagcagggcaactccatccaaaacatatggatagagtggggaatcagggtactattatcagaagcaagtatatatgaatattgggcagcaagataaacaataactctgcaacaagtatgttggtcaaaataaaattatgttttctctgctataaaagcaaatgttagtcatgagccaaatggtaaa

SEQ ID NO: 81379 - DNA, 1170 bp, Homo Sapiens
  misc_feature (62)..(62): n is a, c, g, or t
  misc_feature (278)..(278): n is a, c, g, or t
  misc_feature (328)..(328): n is a, c, g, or t
cagtcgacggtaccggacatatgcccgggaattcggccattacggccgggatggttgaattntgtgataatcccaaaactgcagctcatgtcaatgcttggcaagggaagaaggatcagacagctgctagtcttttaattaaatgtggagaaaggaggaaaaagaactaggagtaaaacgtgataaaaatgggaagatcatgatacaaaaaaacctctatttactagctttcaagaagagcaaaaaatcatcccactgcctgctaactgcccatctantgcggttatggatgtttctgagaatattagagcaaaaatttatgctatantgggcaaactagatttgaaaatttacctggcctatctgctgaagatttgtcacccttgtggtatcatacatagatatctgtgattttaaaatgggagaaatatggaatgaaatatatgaagaaataaaattagaaaaattaagaccagtcactacagataaaaaagctttggaagctattacaacagcatcagaaaatattggaaagatggttcttctctgcaaaggtgatataattgaaagccaagcatgcccaagacatgcaaaaatgaacaaaaagtatatgcaaaaatacagggccacgcacaagcaaagagagctggctaataaatcatgggaagatttcttggctagaacatcaaacgctaaaacgttaaagaaagcaaaaaggcttcaagaaaaagctatagaagcctccagataccataaacgaccacaaaatgcaatatttcaccaaacacatattaaaggccttaacacaacggtgccctctggtggagtagtaacagtggaaagcactcctgcccgattagtaggaggacctctggttgatacggatattgctcttaaaaaactgcccattcgaggaggagccttgcagagggtgaaagcagttaaaattgtggatgcaccaaaaaagagtattcctacgtaatatactatagagactttttgaaataaagtcagcttataattttttagctgaatatatctttatacatatgtaaagccaatattttagaataagtattttagtataaatattttagtaaaatactataaaaataaaaggacatataatttatttttatggaaaacatcaacatgtaatatcagaagagc

SEQ ID NO: 81380 - DNA, 752 bp, Homo Sapiens
  misc_feature (72)..(72): n is a, c, g, or t
  misc_feature (117)..(117): n is a, c, g, or t
gaatatctgcatatagtttgaaccatctgtgctctaatggcttcaataatgactctcgtcttagaaaggctntgaaatgacatccgtacaatattaatgtgttgatgtacattgtgngaccagtagagtatgatctgaccacagaaatctataaattctgtctataccactgggcctccctgtcctggggcctgccatctccgagaagaatcttgctctcatccaactctgcaaatcttcataacaactcgttcctctggaaccttctggagaccacaaacatctgcagactaaacctctccagtcctagtaaacaaccacatgtttgttgtcacttcggctggctctgagctcatttttttggcccctttttctagctttctttggctttatgcagttacagtgtcattaaggcccataatattccctgcagtaatttaaaacagccagattataccctgggattaactgagtggtttttgagacatttattgtggtattctcccaggaggtttgtattattgttgtaaaatgttacatcccaaactaaataacccttctgcagggagaagaaccagattgcactgacttcttaggatcattaagtggaaaggaaaagtttttcttagaaaacttatgggacccagtcacctgtatggaatgtatatctcagacaagatgagagaaacagccatgtttctgtcacattgtttactgtcatattaaagatatctagttttaaaataaaaaaa

SEQ ID NO: 81381 - DNA, 689 bp, Homo Sapiens
tagcctctttagtattagggggtgaggtgacattcctagactctacagtagcagtttggcatgttagtgacaggaaattgtgattccctatctccccctcctcctaccttttctgcctttgtgattccattgttcctatctcattgaggctttcccaggcattcgaatttagttagtaggtcatttctaatctctgggccttgtcttttctctctccgttcccctccttccctaccacatattttttgtttattctgaggtggtttgtttctgaaagttaatctaggtcaccttctatatcctgtgctttctagttggctttagacatcttgttctagcaacaatgatggtagcagctctctccctgaccttgccccatgtgctctccttctgtcaaggccatttgtgtgtgtactgcggcaggtgtgtgtgtggggggatgcgcccagactgttctcacaatgtcctcagtttttcaggttgtctgacagctttatgtacagcgtatttttagaaaaacttaaatatacttctttatttagggttttattctgatgagcaagtttgtgtgtatatgtgtgtatgagcatttgtatgtatatatacttatacagatctatattatatatacagtttttgtactatcatttaaaataaaaatgtttctcaataaaatgtcaaagccgacc

SEQ ID NO: 81382 - DNA, 1773 bp, Homo Sapiens
  misc_feature (73)..(73): n is a, c, g, or t
  misc_feature (78)..(621): n is a, c, g, or t
  misc_feature (640)..(657): n is a, c, g, or t
  misc_feature (1673)..(1707): n is a, c, g, or t
  misc_feature (1710)..(1710): n is a, c, g, or t
tcccgagggagaaggcggacagtatccggtagcgcaggggtcggaccagagagcgcacgaggagctccagggnggaannnnnnnnnnnnnnnnnnnnnnnnnnnnnnnnnnnnnnnnnnnnnnnnnnnnnnnnnnnnnnnnnnnnnnnnnnnnnnnnnnnnnnnnnnnnnnnnnnnnnnnnnnnnnnnnnnnnnnnnnnnnnnnnnnnnnnnnnnnnnnnnnnnnnnnnnnnnnnnnnnnnnnnnnnnnnnnnnnnnnnnnnnnnnnnnnnnnnnnnnnnnnnnnnnnnnnnnnnnnnnnnnnnnnnnnnnnnnnnnnnnnnnnnnnnnnnnnnnnnnnnnnnnnnnnnnnnnnnnnnnnnnnnnnnnnnnnnnnnnnnnnnnnnnnnnnnnnnnnnnnnnnnnnnnnnnnnnnnnnnnnnnnnnnnnnnnnnnnnnnnnnnnnnnnnnnnnnnnnnnnnnnnnnnnnnnnnnnnnnnnnnnnnnnnnnnnnnnnnnnnnnnnnnnnnnnnnnnnnnnnnnnnnnnnnnnnnnnnnnnnnnnnnnnnnnnnnnnnnnnnnnnnnnnnnnnnnnnnnnnnnnnnnnnnnnnnnnnnnnnnnnnnnnnnnnnnnnnnnnnnnnaagaattcggcacgaggcnnnnnnnnnnnnnnnnnngtaggtttatttttattcaaaaagttactgtctcaagacataaatacaaatcagaaaacagtacaattaggacaatagaatgtggaggacaacaggttagagtaatatataaaacatttttagctggttgaaaacaaagctgtaagaactgctttcacaaagaagtactcctttcaagagtgagaaaaaaaatcaacttaggtttaaaatcatatatacagtcctctcagcagttctagttaatgcagtggtgtgtaaaacaacataggcaatacttttgcacataacaatatttgttgatggaaaatctgttagacaagtctggattcatttgttattaaccatgacttaataaaataattgtatcatgatctttttagctaacctatggtttttggctaccacagcccaatgcttgatttctgactaaaaactgaaagccttttggtattcacccatctgaagatattcttgtattgcaagcatattaaggcatggaatgattaaaataatatacctcaagaactgagagacgactgacaatagatagatacacatgtaatataagttaatattttgttttaaacgatgtctagctgcctaagcctcgcaaaatgagttgatgtcaaaatggcaagtagccactttctgttttaaactaatttatttgtgaaaggacataaaatgaagtttaaagcttagctttcaaagaatattatgggttatgaattctattatcccatctaatttacatacagaggaaatgtactgtaacctgttagaagtatctttaacctgaagactgcttgcaaagacagatagataaaacaatataaaatacaaatttaaaaatcattttaaagcatgaacactcatgcttttctatttttaaacattgttaaactttcaatatatttctgaaacctcataattttaagttggaatttaaaagtaagaaaaaactacccggccgtaatggccgaattcccgggcatatgtccggtaccgtcgactgnnnnnnnnnnnnnnnnnnnnnnnnnnnnnnnnnnncgnccgcttcctcgctcaatactcgctgcgctcgtcgttcgcatcacgcgcagccccaataggtca

SEQ ID NO: 81383 - DNA, 415 bp, Homo Sapiens
ggatgagaaaaagaaaggaaagtacaacaaagaacatcaaccataaggaacaccatgacttctgatatttaatatcatggatcacagattgtaggagtcgagaaacagaataaaaagacaaggcccaggcccagtgagcttttgatgcttgaggctcctcatgcccttgctctcccactgacctcagtgctcagcactggctttcttctcctggtgatattttccatttatcttttggtgtaaacattttagagatgagagaagtagggagcttatcattatttagtctgatcagacaatatcttcacttttaagttatgttcagaatttcattgtcctgttctttttaagaatcatatgagattatttttgtgtatgtgaataaactatgaagcattttcttacaaaaaacttc

SEQ ID NO: 81384 - DNA, 813 bp, Homo Sapiens
tttaaatttttaatgaaagattttattcatctttgtagataacaagcactcaaaggttaatgagtgaaggagataaccatctcctccaaacaaagaggctcttaataacgcagaagcaaaaatctttccacttttagatgaaaacaaactaaaaaataacttcaggcttcagatatggaaataaagcaccatttttcaaatggtagacttggcttacttaaaataagtaaatagccccagactatctgaaaaagaaaaacatttcaatgccccttgtgagttctaattacatggctacatgttaaggaacatctcagatctctctctgaacctactagtaaacaaaaattatacagatatatatacaaatgtagtcttccatttcatttttcatttgcacaagcttccagctatttaaccaggtgacaaatcaaagtgacaagatgcactaatattcgtgagaactttaaattttaaaagctagtatttaattacccttagtgagctcatttacttacattaaaaattatgcgatcagtcatgatttttctttagaccatttaataatacacatggactaacatttatcatgctttgttcaggacctccttacaatcatatcccttgtatgacttactcttcacataatcccttgccagtaaaagtgaagaccgaagattgacctgacagacaggtccctttactaacctttgcaatcttgtaccacttcataaaataatgcttactctaaaccactacagactagtttggaaataaatggaccttttcctcagaaataatcaatctttcctg

SEQ ID NO: 81385 - DNA, 988 bp, Homo Sapiens
  misc_feature (157)..(169): n is a, c, g, or t
  misc_feature (177)..(306): n is a, c, g, or t
ggtgttgttttaagccccctcgggtcccccggggggtgtttttttggggggagtcccagcccatttttttgcccgggttttcttggagaacgattgggcccttttccttttccttgtgggggccgggccccaaaaaaaggttttaaaaaattttttnnnnnnnnnnnnnccgccccnnnnnnnnnnnnnnnnnnnnnnnnnnnnnnnnnnnnnnnnnnnnnnnnnnnnnnnnnnnnnnnnnnnnnnnnnnnnnnnnnnnnnnnnnnnnnnnnnnnnnnnnnnnnnnnnnnnnnnnnnnnnnnnnnngtacaacttaataatttaatgatttctgtactttcaagtttaagaataaaaggtgacagttaatgtttaaaactggaaaccagataatcacacaaaaatcacatttatttcaagagctcaaagtgcaaatacagcaagtcagttcacaaagtttcaagatacagtttttaatgacaatggaaatttgatatacaaaaatggaagggtaaatagaaataaagctcctcaatttttaaaaaaattcaagtaatttgaaaagcctttagactaaaatactccacttacatccattcagaaatgccagtactgcactgcaatcaagaaggactcttcaaagagagaatcagctcaaactggtcagctctagattagaatggaagttcttggtgccggcttttcttgatttggaagcttcagtcactcactgctatcaattgatgaggttcaatccatgatattttgatctttaggtgaattctaaaacatgtttaaagttaaaaaggccgggcgcagtggcttacacctgtaatcccagcctgttccagccatttttaatgactgtacagtattttggcttatgagtatatcaatatttgtaactgatcccctattttagacttttttaggtggcttctcatttttcatgaatcagagcacatagactgaaaaaccccgccttttt

SEQ ID NO: 81386 - DNA, 890 bp, Homo Sapiens
  misc_feature (832)..(832): n is a, c, g, or t
gggccagtggatggttttagttctttcagatgaactgccatttgtgtttcagctcacagttctttgctgggtaaaagaaatactttctgacagtcacctgagccttaaatgtaagtattacatgacatgcattctgtttcttccagagttctgtctgccacacgaaagagaatatttgcttacttgatagaactttggcattttcatcattcttttacttaaccaggcttatggcatgatctctggaacaaatttgtaggaaaaaaattactccaattgaatgactgatgtatgtaatcaacttcattgggctgcagtaaactagtggaaattagagagttgttttattggtgttttctactgtgagttaattaaaaattgtttttatttggggtcattatgtcacagtcttgagttaacaagatcttacgtgattggccttttctttgttttctcttaggagttgtgtctcgtgaatgacagtactaaagctattaacaaccaagagtttgacagagaactataagcctgttgtatctcctaaaagttgtcaactccccacccttggactttaaatgaaaattttattcagtccagctattcttacagtcccctaaggattttcatatatctatgtataggagataaaatttgctagtaacgatttttaaaaactgggctagtgaaacgaaagtacctctgaaagaaaccattttagcaaattatggttatatgttttaatttaatctacagaatgttttatagtaaaattctagcaccactaggataatcacataggcatgtacaatatatttatgcttggctgaaaagncaggatctggggataattaaaattgccacccaatttgggtaatgccaaccgccgggtt

SEQ ID NO: 81387 - DNA, 777 bp, Homo Sapiens
  misc_feature (134)..(134): n is a, c, g, or t
ccaaccatcttcctttacacgcttgagttatttgagtctgtatatctgtgcaattctcatcccagtgatccaacctcatatagtgttcaagccaaagaagatcctatattccacgaacaggagttcgaagttancaagaaatttggcctggttgtgaaatccgatacttagaagggggtcatattagtgcttatctttgtaaacaaggactcttcagacaagccatatatgatgcatttgaccgcttcctccataaatacgctaactagttggattattatatgtaaccagtgtggccatgatgtttcttacaaaagggagcttcatcctgtgatcatgtgaaggacaagcagacagcactaatatatctaatcgctatcaatttggtctggaattcattgttacacatcagttaactataaacttcgaatacatttgaataatttcaagataatatttgaagtaaataatgttaaagtgtttttactattgtttattggaatcccatatattcagtgtttagtctgttgttactgtttatgaaaaactaaatttttaatcatgaataatttattaaattaaataaatttattcatagaaacttttctgggttttagtaaaattgctaaatcaaaccaagattttaatatatcagcatttactttgtacccttataacatttcactcttgacttgatttgagaaacatgtttattttttgaatgttcttgtgttcaactaattttctgctgtggaaataaatacttatgatatataa

SEQ ID NO: 81388 - DNA, 477 bp, Homo Sapiens
  misc_feature (84)..(158): n is a, c, g, or t
gcacgaggcctgattggaatggattaaaaaaagaatgaaaaatgagaaaagagtaaatacagagaactcctttaagaaaaaaannnnnnnnnnnnnnnnnnnnnnnnnnnnnnnnnnnnnnnnnnnnnnnnnnnnnnnnnnnnnnnnnnnnnnnnnnntacagcttatttatatgctggtggaaataatccagttgagacagaagaactgatgggagacagagaagataactgtgagagcaaagctttgtgtaggcaacagagataggctgtaatgcacaagtggagtggttggccttagaagaagagacaggcggctgattattacagctctgagggcagagcatagggctgtagaagaacggagggttggggatttgttggtgggaagatgaaagagttttccgattacttcccagtgaattaagatctttggctgagaatgaagaagtcaaaagggaattggagactgatagtg

SEQ ID NO: 81389 - DNA, 858 bp, Homo Sapiens
atacaagctgggtgaccttttcctatctagaaagtgggagaagtagttcctgtcctcccttacagggctgctgagcaggcagaatgagatgatgggctgagagggcttggagaggacaaactgtgggtacaaaagtcttattgtcctggcccggattgctaaggagatggtggttaataatatgctgctatctcatgaggtaaatgcgtgatcacatagccaagagatgcctttttgttctaatgatcactgtaagaccttcttgagagacagtccaagtctctccagcacaatggaaaattgcattttctatgcacacattcgaggggaaagagacccctccaacgttcttctcagttttaccccaaagttgagttctgggtcaaaaatctctcaagcgtcctccacagctgacttccacagtcccctgtgtgtctctgcaaggaacacaaaggaagtgagatagtgggaagtctggggccatcttcggtcacgtgagaattccctctcagttagccggggcgtgcagccgcacagaaggaaggcagccacgcagctccagtccaggctgggagagagctttgtagatccatctcccactgagcaggcttccctcctgcaaggagagactctaccgataatgtgttaagatcagattaatgcaggaaatacacatgaaataaataataacagtgtaataacagtggctgtcattgcaatggttatttctgttaaaaatgtgagatctacactacggatttcttaggataattttgcccttacttaaaagaaactgacagatgtactttataaaaatgaaaataatttaacaaataaagaattggagaatattgactc

SEQ ID NO: 81390 - DNA, 821 bp, Homo Sapiens
  misc_feature (30)..(30): n is a, c, g, or t
  misc_feature (229)..(260): n is a, c, g, or t
gatcgtaaagtggcatttagctgagcatgnttccactaatcatgttattttctgagccagtatagaatagttaaggacaagggagccctgcttgcttctgtttgggcttagagtccaggcttggctactcattagctgtatgactcatggcaagttatttaaccttcctgatccccaaattctcatcaatacaatgaggttatgagagtagctacttcctaggaacatnnnnnnnnnnnnnnnnnnnnnnnnnnnnnnnncacgtaagatacttaccaaaatgacggctgtagttaaacgttagctgttatatttatctggcatataaaaccttctcaataaatgttagctcttacatttactcctctattagaccataagctgagtaagaggaaggccccagtcgtgtcatttgtgataactcatgcatagtaggtactcacacccacagacgactccggtctctcaagagacaagaaaactgattttttaccatctcggacggctacaaaagggtataataactcatgaaggcaaacagagacatttacaaatgggtagattaggactggacatggcattggagcatttgcgtagctgttatttctgtagcagataatggaaagtgaaaggggtgcacgtcagcgtctcttccacggtgagaaggaagtcactgttgcaagaagctaatgcgaaatcatttctctctgatttacctgaggaggttaacaaggacccatcaaaaccttccaggcttgatgccccatagtctgctggttaataaacttcactcatgcaaattctgtcccatccttaaaaaa

SEQ ID NO: 81391 - DNA, 1001 bp, Homo Sapiens
  misc_feature (43)..(77): n is a, c, g, or t
tacgaacgacgagcgcagcgagtattagcgaggaagcggccgnnnnnnnnnnnnnnnnnnnnnnnnnnnnnnnnnnncagtcgacggtaccggacatatgcccgggaattcggccattacggccgggatttacaactgggagaaatgtctatttaggtgtttacattaagcggtatgaaagttgttaccacataggcactggtacgaattctcaataagaatgcagtggaacagttaagtagaactgtaactacgttggcactggtacgaattctcagtgagaatgcaatgaaacagtcaactgcagtgtttctttttgatgtcttttattttacaactgggccaaaggcacattatgtatataattagtttatatttacacactagcatataggaaatatttctgcacttgaccctatttgaattctgagcattatttataagtataaaatgatgatatataagtgaattttgtgctcttgtttgtattttattaaggaaaatgaaaataatctggcatcagtttcattttgctaaatatctagtcttcttcaaacagtatcttggtgggtgacttggctacctgaaaaatcttaggaggaatagctcacaatacaataaatctgtagattctgcttagagcaaattatggtacttttattcagacttgtttcctttctagttaacagaaatagtgacatttagaggttttaatcagaagttaggtttttctgattcaggaacatcgtaggccagccatttgtaatttttaactttgagaaacaaattttgtgagaataggtagtgggttgctggtagttaattggatttaatatttgtattaaggattaactggaaaaaatgtgtctcagtgctaattcttggacctttaatacagtgtgcttatctgttacggcctccttttatctctcttctccaatattaaaaaaaatggaaatcaaattattatgctgaagggaaaaatatacctgtataagaaa

SEQ ID NO: 81392 - DNA, 492 bp, Homo Sapiens
agtcaagaagaccaaggataaggagaaggagaaggagaaagatgaccaaaaagtgaaatctgtcactgtgtaaaaagacagattttttaaattgacttaattactaagtcatctgtattaaattttgttataatgtaaagagattcaagccttgtaaataatgacatggaagaccctgtgctgcacttaaaatattgctgcttgattatttgatttttacatcagagctttataacacgaacttttgtacagaattgtgagttgtgaccatgtaacatgagaggttttgctagggcctattatttttaaccaccattaattagttggggtggagtttactgtaatgtgaaattttcacatttgaattttttaattgcctggcaaaagctgatataagttctaaaatatcagcagaatgatttgctgaattcattacaaccctgttatgtcactttttgattacaataaaagttttcagtaaacttttcaaaa

SEQ ID NO: 81393 - DNA, 490 bp, Homo Sapiens
ctgaggctcagccgacttgtcatcacttaaaacccaattcagagcggggggcactgccagtgaatagttcatcaccgactcagtttccccatgtgtatgctgtggtattggatcagcaacgagataagaagatctctcccatttccaagcgtctatgatgattctgaggcacaaggtcacatttgacagtactaggaaacccaggaaacaagaagcaaagatgacaaaggctgtgtctgcctgggcagacgatctatttggacaagataatagacccaggcatggacatgctctccaagaaagatgccctgacagctgctcacactgaagctgaatcgaacattccaatccttagaggttccagcgaagatcttgaagtctccctgagccattgacacaatggccatgccatcccagtgataaaacacaaattgtggccttgttttggacagaaataaagagcccagtttgttagtgatttactgataaa

SEQ ID NO: 81394 - DNA, 756 bp, Homo Sapiens
  misc_feature (33)..(33): n is a, c, g, or t
  misc_feature (516)..(540): n is a, c, g, or t
ctcggaccccgcggcggcgggcgtggatggtcnccactccagggcagcgacatccaggttcagtacgtgcagctggcgccagtgagtgaccacacggccggggcacagacggccgaagccctgcagcccacgctacagccggagatgcagctcgagcacggggccatccagattcagtgagcggtgcccatggcaccaggagcccctcgccggctccgcctacggcccggcccccacgcgccctgctctcacggcctcggcacaggcagcggctgcacgtgttctgctgaagtgcgtctgaaggccgctgcctccgcggggaacagcatcctatcaactgaaagagcagccgccgccgcccccagccggagacccctttcgtttgagtcctgctgttggtgtcggagcacgaggggaggcacggtgcggagagcgtcgcatatgcgcgggaaatcaagaactatgatatttttctgtttaaacagctttttttaatttgctatggtgtttataacnnnnnnnnnnnnnnnnnnnnnnnnntcccaggggagtagcaggagccctttgctgtgtgctctgtccagtgtcatgagacgggagccctttgctgtgtgctctgtccagtgtcatgaggcaggtgtttgcaaagccagctctcggttccgatggggtattgctgacctacttttctaggggaaatgctcttaaacactgtaattatgcatttctaatgaaataaaatgtatttatgaccac

SEQ ID NO: 81395 - DNA, 663 bp, Homo Sapiens
gtaaaataaattaaagtatatacaacttttaaaaagtgcaaccctggctaaattccactcctttggttaatactgaagataaaatataaacaaatgtcaactctgttataattaatacagatgttttactgtttatttctaattcaaacacttaagtagctttattgttaaactttgctatttaaaattggttataatttagattatgttcttataagattctatatttcctatctaaaatgttgttgtaattcaatttaaatgtgttcatgtacagtccccatcagtagcgtatagaacaccccactctcctttagtaaatgttgagaaaatgcctttgttgtcatgctccaaatcccacactgggctgccacctgggagttctggataccgaaaggttcctttcccagaggttctgctgttgccatcagaggaggatgaccgtgcttgaggaggaagaatgggttcaagatcatcatattcatcagaaggggacactaaatagaacccttaacctgttgtacttgccaaaattgagaatcagagatgtgtaaaatgcagcaaattaattataatgtaagttaagatttgctttttgccaagttgcaaagttgtatccacatcaggtcactgtaaaaatgtattatcttgtaaaacttatgt

SEQ ID NO: 81396 - DNA, 934 bp, Homo Sapiens
  misc_feature (579)..(598): n is a, c, g, or t
ataaacagtaaaacatctgtattaattataacagagttgacatttgtttatttctaattcaaacacttaagtagctttattgttaaactttgctatttaaaattggttataatttagattatgttcttataagattctatatttcctatctaaaatgttgttgtaattcaatttaaatgtgttcatgtacagtccccatcagtagcgtatagaacaccccactctcctttagtaaatgttgagaaaatgcctttgttgtcatgctccaaatcccacactgggctgccacctgggagttctggataccgaaaggttcctttcccagaggttctgctgttgccatcagaggaggatgaccgtgcttgaggaggaagaatgggttcaagatcatcatattcatcagaaggggacactaaatagaacccttaacctgttgtacttgccaaaattgagaatcagagatgtgtaaaatgcagcaaattaattataatgtaagttaagatttgctttttgccaagttgcaaagttgtatccacatcaggtcactgtaaaaatgtattatcttgtaaaacttatgtnnnnnnnnnnnnnnnnnnnnggcaaagatactaaaaattttaagtccgactttatttttcctacaagtgtttagaaatgcttctgggatttgctaatattatctgtccttgggaacagtattgaaaaaactgcttagtggtattacagctttagcaaacctacctcacagctgggatgagaggataaaatacaactaattttgtaccctatagtgcctagagcagtccaagtgctaaataaatatttactgattaaaaccaaactatagctactcgggaggctggaggaggatcgcttgagcccaggagtttgaggccattctgggcaatatagcaagaccctgtctcgaaaaaaa

SEQ ID NO: 81397 - DNA, 964 bp, Homo Sapiens
  misc_feature (168)..(168): n is a, c, g, or t
aaacaggataggtaatgcaacagagaattaacggtgcaacctaacaatgaaacgcatttgaggttcccgaatcagtgaaggctttgcaaaggttagatcactcttgggtggatgccgaagatagtgacagttgactgaaacctcttccccagacatttcatcactggntcctcatgtttcctagtgccaaaaataataatgtggacgtaacaataatctctgtacattgtaaaatgtctgtcctctgctacgacctgctccaagctagatcttgtcctgaagcaagtttctctatcggcaaagagtggatgtcagaggtggtaaaatggagttctagccctggtcagctttgcagatagctaagatcatggtatccaaagaacctgagcaaaagtacatggaaataacacctggtttatgcaaggaacgctttctgacacataaaaatgaagagtaactggtaggagagaataagcgtctttattcagatacacatcgcattcgggattttaaacatacctaatgacttttacaacaagaggacactgaggtacccagaaagagggtggaaaatcaggatgaagggagttactgctagcctgtcatgtaccatgcacacaacctatctttttaaataccagtggatttcctgtctggctcagggggcctgtctaggaagagattcaaggaaagtagatgggttagttccagggactggggctcaaaaatttaaagccacacgtaacgttagctctctcactcccacacacatttaagataaaggagatggcagtagtgtgctgcccagaggatggaatacgcagataactaggtttctatactggttctactcactagtctgatcttgggtaattttttgggtcattgttctgtaagggagggcaataataactacttggtcagggctgttgtgacaattcagcaataaaacatggtcaattgc

SEQ ID NO: 81398 - DNA, 934 bp, Homo Sapiens
  misc_feature (16)..(16): n is a, c, g, or t
aattccttgggatcangagtctctaaaggatcaaggtcctaggattcctgagcctgtgaagaatcaagctcctatggtcccagcacctgtcaaggatgaaggtcccatggtctcagcatctgtcaaggatcaaggtcccatggtctcagcacctgtcaaggatcaaggtcccatagtcccagcacctgtcaagggtgaaggtcccatagtcccagcacctgtcaaggatgaaggtcccatggtctcagcacctatcaaggatcaagatcccatggtcccagagcatccgaaggatgaaagtgccatggccacagcacccataaagaatcaaggttccatggtctctgagcctgtaaagaatcaaggtttagtggtctcagggccagtcaaggatcaagatgttgtagtcccagagcatgcaaaggttcacgattctgcagttgtggcacctgtaaagaatcaaggtcctgtggtccccgagtccgtgaagaatcaagaccccattctcccagtactagttaaggatcaaggccccacagtcctacagcctccaaagaatcaaggtcgtatagtccctgaacctctgaagaatcaagttcctatagtcccagtgcctctgaaggatcaagatcctctggtgccagtaccagcaaaggaccaaggtcctgcagtccctgaacctctgaagactcaaggtcccagggaccctcagctacctactgtctcacctctaccccgagtcatgatcccaactgccccccatacggaatacattgagagctccccttgacactcaccccttgacacaccaatgaaggagctgacagtgagagtgctcccctcccaggggcagtgaagacacatatttaatctgcatgaaacatgtacagtagtcttgctggaatctaataaaaatggtccctctggctcaaaa

SEQ ID NO: 81399 - DNA, 1738 bp, Homo Sapiens
  misc_feature (1599)..(1658): n is a, c, g, or t
tgtggaagtgaagagcatgcctatgtgtttaatatgcaaacaaatcgtgtctgtgttgaaagaatacaacctgaaacgccactatgaatcaaagcatagtaagagctacgaccagtacacagaacagactcgagatgccatcctcaacgaactgaaaaagggactcaaatgtcaatagggtttgttttgaaaagcgaattaacagaagtggcgcggcagtggtacgccgttccggaatcacgtgagaagaatgacctgggcattcagagcaacatcagatggcaagtttataaaggagcagagtgacgtgtcctgcacagaaacacatgactgttgagaccgttatttaagtctaacgggcatttgcgttgcacagtgagtgggagataactcgggggatttacaagtccagttgcttgaaagagtcaaattgattgtggccttttctttcgctgctcataaactattaccacccagttagctttatttatttgtggtgttaagaatcttgatgtgaccgaagaagtctgtggcatggtgcaaaggcaggcccaacactgggaaaggactaattttttttgtatattgagagaaaagtttcacatagactggccagagttccgaagcacaactacagacagcgtcatgacagggggacttggcaggacaccttgatccaaggcgacagcatttggcaaggacacggaagttgggtcgttgcatccatcatcaggagttgacttgttctgagcaactgaacagaacacaccgcgatgctctcgacacttccgctcctggacttcagtcacgagtgagttgatggtgacttgacctgagagatttcacagaagctctgtgacttggttgtggaagaaatctgaactgttcaagttaaccaacttggttcattttaaatcaggcaaaagccacagtgggttcccctgagaaggttagtcaaagacttctggtcaaggttatgaccgttctgaacactgaatatttctccgcaaggatgtccacaaacagctacttgaatgtatgatggtgtatgcttggtcctggggaatccaccggcaaggaaaaaaaaccttactctttcctgtgctgcagtcggctttcagaaatgaaagaggtggcccggactgtattcacctacgtcctggggttgaagaccaaattcccccaaaggctctcggaatccagactcatgagaaggaacagacactgtccagtttgcctttgttggcagatgtttcttgtgtgaatgcagaccataaatagtaattgaactacagtgcaatacggcgctggttcctaaatacaagtctgtgtgaagatggtgagattctacaactatctccagtagttgtcctgaatatctgtgtttgggagtacccacgcttgtgaacagctgttttccgttacgaacctgaatcaaattaaacatcgttcccagttgaaggattcaaggctgaattctaaactgcccgtccccaccgtgccacccgagggcctgacactgacatctcggtgtggaaaaagaagacgccagccttttggcttcaactcaaaggcgcaaaaagaattatgaaagagaannnnnnnnnnnnnnnnnnnnnnnnnnnnnnnnnnnnnnnnnnnnnnnnnnnnnnnnnnnnaatataaactccagtaacatccatgtttgtattatgttccatgcattcaccatagttgagtaaagatccgatttgatgat

SEQ ID NO: 81400 - DNA, 459 bp, Homo Sapiens
  misc_feature (336)..(375): n is a, c, g, or t
gtaattgaactacagtgcaatacggcgctggttcctaaatacaagtctgtgtgaagatggtgagattctacaactatctccagtagttgtcctgaatatctgtgtttgggagtacccacgcttgtgaacagctgttttccgttacgaacctgaatcaaattaaacatcgttcccagttgaaggattcaaggctgaattcctaaactgccccgtccccaccgtgccacccgaggcctgacactgacatctcggtgtggaagggaagacgccagccttttggcttcaactcaaaggcgcaaaaagaattatgaaagagaaaattttaataattaaatnnnnnnnnnnnnnnnnnnnnnnnnnnnnnnnnnnnnnnnnaaaaatataaactccagtaacatccatgtttgtattatgttccatgcattcaccatagttgagtaaagatccgatttgatgata

SEQ ID NO: 81401 - DNA, 1074 bp, Homo Sapiens
tttgtcctccaatcgcctcttccgacctgttgaccagggccagccggcagagggctgggctcgctcaacgaggctcctctcgcacctcctggagctttcaggcttctttccgttgcagagaagctttatgggccattcgttcggcatccccgggggcaggtgccgtgcgcggggaagaagaggatttgactgcggttctccacccccggcgcccacctccaccccggtgcgcgcgctcttccaggctcctgctggtcccacttgccaggagttaggtctcaggtcagcctgagctcctgagacgcccaggcccggaaagacacgtaggggaaaccatctgctcacttctgtcctgtccggaagggatccctttctgacgggaaagaaaggcggtgagtcctgtcctgttgagtaggcggaagagagatcaaagggaagacaagaaaaatcctgtgagttttcaggatctaaagttaccatgaggtcgacctaacctcctctggaggtcctcccggtcctcccgtggctgtcgaagctaaacaagcactggccttgagataagcaatgctgaagcacttgcagctcacctattaccataaactgactgagccctccctacacaagccgtaactactgctttgattggacaagagactgatttcagtagttttctcttgataagagaccactggccgtgggcgggttctggacagtttacagaagctatgcacttgattgcctttgtgtccctgcttcaccttttgaagcatagggcctaattataatgtatttaaatgttgtctccaccccaaagtgaacatgggttgcatgtaacaggcatgtttactcagcatgcatgcagcaggatcccttcacaaatattcagagctccccctattccctgttgaatatgtatatgtggccagccagatcaacgtaaatcactattcgccctcccctccctggaaacctacttttcgggtttcagcaggaagctatgcctcccagtctgtcagaatggccacttgcaggctgtaaccctttataaaaaaataaaatctcctttctaaattt

SEQ ID NO: 81402 - DNA, 2456 bp, Homo Sapiens
taggagctaaggaatagcgaggcccatgtgcgtggttaatcggcacgaggctcgtgccgaattgcacgaggtagagcgcgaggtgtacaagggccggttctcactttaccccttcctgtgcctgctggacgagcgcgaggtggtgcggatgctcctgcaggtcctgcaggcgctgcccgcccaaggtgagtccttcaccaccctggcccgggagctgagtgcgcgcactttcagccggcacgtggtgcagaggcagcgggtcagtggccaggtgcaggcgctgcagaaccactacaggaagtacctctgcttgctggcctccgacgccgaggtgcccgagccctgcctgccgcggcagtactgggaggcgctgggggcgcccgaggccctgcgggagcagccctggcccctgccagtgcagatggagctgggcaagctgctggcggagatgctggtgcaggctacgcagatgccatgcagcctggacaagccgcatcgttcctctcggcttgtccccgtgctctaccacgtgtattccttccgcaacgtccagcagtatcggcatcctgaagccgcagcccggcctacgtgcaggctgctggagaacggccgcggagccccacgctgaccttcgaggcggtggaatgtacccatgctttgccccccggtggccctggacatcgaccgcactctggtgccttcctgctcagaccccaccaagctgatgcgcacggtggaaggcgccacgcagcaccaggagctgctggaaacctgcccgcccaccgcgctgcatggcgcactggacgccctcacccaactgggcaactgcgcctggcgcgtcaacgggcgcgtgctggacctggtgctgcagctcttccaggccaagggctgcccccagctaggcgtgccggccccgccctccgaggcgccccagccgcccgaggcccacctgccgcacagcgccgcgcccgcccgcaaggccgagctgcgccgtgagctggcgcactgccagaaggtggcccgggagatgcacagcctgcgggcggaggcgctgtaccgcctctcgctggcgcagcacctgcgggaccgcgtcttctggctgccgcacaacatggacttccgcggccgcacctacccctgcccgccgcacttcaaccacctgggcagcgacgtggcgcgggccctgctggagttcgcccagggccgcccgctcggcccgcacggcctggattggctcaagatccacctggtcaatctcacggggttgaagaagcgggagccgctgcggaagcgcctggcctttgcggaggaggtgatggatgacatcctggactccgcggaccaacccctgacgggccgaaagtggtggatgggcgcggaggaaccctggcagacgctggcctgctgtatggaggtggcgaacgctgtgcgcgcctccgaccctgccgcctatgtctcccacctccccgtccatcaggacggctcttgcaacggcctgcagcattatgctgctctgggccgcgacagcgtgggcgccgcctccgtcaacctggagccctcggatgtgccgcaggacgtgtacagcggcgtggccgcgcaggtggaggtgttccgtaggcaggacgcccagcggggcatgcgggtggcacaggtgctggaaggtttcatcacccgcaaggtggtgaagcagacggtgatgacggtggtgtacggggtcacgcgctatggcgggcgcctgcagattgagaagcgcctccgggagctgagcgactttccccaggagttcgtgtgggaggcctctcactatctcgtacgccaggtcttcaagagtctacaggagatgttctcggggacccgggccatccagcactggctgaccgagagtgcccgcctcatctcccacatgggctctgtggtggagtgggtcacacccctgggcgtccccgtcatccagccgtatcgcctggactccaaggtcaagcaaataggaggtggaattcagagcatcacctacacccacaacggagacatcagccgaaagcccaacacacgtaagcagaagaacggcttcccgcccaacttcatccactcgctggactcctcccacatgatgctcaccgccctgcactgctacaggaagggcctgaccttcgtctctgtgcacgactgttactggactcacgcagctgatgtctccgtcatgaaccaggtgtgccgggagcagtttgtccgcttgcacagcgagcccatcctgcaggacctgtccagattcctggtcaagcggttctgctctgagccccagaagatcttggaggccagccagctgaaggagacactgcaggcggtgcccaagccaggggccttcgacctggagcaggtgaagcgttccacctacttcttcagctgacaccccgtgagccttgtcagtgtgtaaataaagctcttttgccaccccc

SEQ ID NO: 81403 - DNA, 457 bp, Homo Sapiens
ggctttggggtagagaagagaacactgtttatttttacacctcctgaattggtcaattctgagtacaaactcatcttaacaggaaatcgcaatgaaatatacacaccatgcacagtctatattactgtgggaatccagtaatacatgcaagacgtggggaaagaatcacaatgggatgaatatgaacttttccacagtgtttccttatagcctttgacttaacacgagtgcatcacttaccaccactatctcacaaatgttttacttgtgtcctgggcatgcaggtcagttggggtaaaatgtgaaatgacgcttcatagccattctcagacagtgactacaacttcaatttcccctactttccaaccaaacaattgagctgcttctgctataaaactaaatatatttctaaatacattttgttcaagggttgtgctgtattctttctcctcttgcc

SEQ ID NO: 81404 - DNA, 654 bp, Homo Sapiens
  misc_feature (452)..(469): n is a, c, g, or t
gggaatatggcggcgcccagtggcggtgtgaactgtgaggagttcgccgagttccaggaattactcaaggtgatgaggacaattgatgacagaatagtacatgaattaaacactacggttccaacagcttcctttgcagggaaaattgatgccagccaaacctgtaaacaactttatgagtctttgatggcagctcatgccagtagagacagagtcataaaaaactgtatagcccagacttcagcagtagtaaaaaacctccgagaagagagagaaaagaatttggacgatttaacgttattaaaacaacttagaaaagagcagacaaagttgaaatggatgcagtcagaactgaatgttgaagaagtggtaaatgacaggagctggaaggtgtttaatgaacgctgccgaattcacttcaagcctccaaagaatgaataaagagagattcnnnnnnnnnnnnnnnnnnaaggactgggtcatctcataagagctaagcatgacagatatcaacagggcgggctttctaggatgatttctgagccaacagtccaagaccttttgttgatttcagccccacttagccaagacctcaagtataaataattctgataattatggagaaatcaactgctattttatactgattctgtt

SEQ ID NO: 81405 - DNA, 904 bp, Homo Sapiens
tttgcacacctcctcttactattcctacttcctctcttcgatagctaccttatgctcaatatggctaatctttacccgccagcagcctacttgattgcgcatccattgaattgcaccattcgtcattcttctgatattgcagcttcttgtgttccgctatctcatcctcagtcttcgaccggtctcactccttctgacactcactattgcgcacctctgtcccaggtacatctagatatcagcaatcatacttttaccagtaggaaccctttcgtatattacctctaaaagggagatactgctatactgtcatctctaactgagctggacttgagtaataaaaatggcctgctactctgtttggaaaaataccatcttgcaactgtacaagaagctttacacaatttccttaaggctgaagaactatgccctggttattctaatcccaattacatgtacttagcataagtcgttatactgatcttgaggaaaaccagaatgctttgaagttctgtaatttggctttattgcttcctactgttaccaaagaggataaagaggcacagaaagagatgcaaaaaataatgacttccttgaagaggtaaataaacgaatttactcttcaacaaatcagatgtggtctaccaaaatttaaatgaatcaaagttgtgcttttattatccttcatttttgatgtaagggtattgtgcttagatttgaaggtaaagccatgtttctgcagaatgcattccactagtagcactacaaaattaattatgttatttggagaatctatatactataatgtcaatacataatctataaacatgtatgctttatatttttcttatcaataaactgcagccttaagaatatttctttaaataaaatatttaaatccaat

SEQ ID NO: 81406 - DNA, 608 bp, Homo Sapiens
  misc_feature (17)..(17): n is a, c, g, or t
cagtccgtaataattgntaaggtaacagcaaaaaaggtatatgctacaagccagcaaatttttggagcagttaaatcattgtggacaaaaagcagcaaagaagagtcactccctaaacctaaagaaaaaactaagctaggatcctcttccgaaatagaagtacctgcaaaaacaactcacgtcttgaaacactcagtgcccttgccaacagaactcagctctgaagcaaagaccaaatcagaatccacttcaggtgcaacccagtttatgcctgaccccaagctcatggatcacgggcagtcccacccagaagatatagatatgtacagcactagaagctgaagtagactgcatgcagagactacacagaaaactacaagatgtgtggcgttgcaaataatgatgaaaataaatcatgtaatgggtaactgatacatagagtattacctaaaccaagtttctcccttacatttccaaatatgccatttgataaattacataagtggttaacacacaaactgtgaatgcagtgtaaacaatattaaatgattgatgaggagacttaggtagaagtattagcttgcatttgatgacctttaagggcactt

SEQ ID NO: 81407 - DNA, 123 bp, Homo Sapiens
gcggccgcctactactactactatacggctgcgagaagacgacagaaggggcagaagaaccacatttttcatttatagatgtttgcatcctttgtattaaaattattttgaaggggttgcccc

SEQ ID NO: 81408 - DNA, 868 bp, Homo Sapiens
  misc_feature (669)..(680): n is a, c, g, or t
gcggccgccagccagctacccacctcctgccgtcccccctggaggacagcctcctgtgcccccgcccattcccccacccggcatgcctccagttggggggctggggcgggcagcctggatgagataacgtgagccttttttccctctttgtttttttaacaagattttctaatcgacttgcagagtagttgaagtgggtaagcagcagggtaccttgtataatgcacgacagttgcagtatgggaagaatggaccgggcccctgggataaaatcagagtggtcctcacacctagaggacggggacaaccagctttcagagtagcctcatcagtgcccttgcagtctgactgtgtacacttggttcagctaatgtctgagagtcctgcactgggttactttatactagtgaggacgttaaccagccatattggctcaataaatagcttcggtaaggagttaatttccttctagaaatcagtgcctatttttcctggaaactcaattttaaatagtccaattccatctgaagccaagctgttgtcattttcattcggtgacattctctcccatgacacccagaaggggcagaagaaccacatttttcatttatagatgtttgcatcctttgtattaaaattattttgaaggggttgcctcattggatggcnnnnnnnnnnnncctccagggagaaggggagaaatgtacttggaaattaatgtatgtttacatctctttgcaaattcctgtacatagagatatattttttaagtgtgaatgtaacaacatactgtgaattccatcttggttacaaatgagactccttcagtcagttatccaaataaaagcagttctgaaactaaaaaaaa

SEQ ID NO: 81409 - DNA, 484 bp, Homo Sapiens
tgcaaaagaatctacaaaactcttctaggtctcacaagcgaagtcagcaacaaacaactggaagataacattttttaaatgatggatagtagcaatcaagaaacataaaatacctaggaataaatttaatgacagatacacatgtttgctagactgacgactataaaacattggtgagagaaagaaaatctaaataaatggagagccataccattttcacagattgaaagattcaatattgtgaagatatcaattatcccttgtagtagtttcttatggttgtttaataatttaccaaaagtttagtcagttgaaataatacaaactccttattttacagctcggtagatcagggagtcagatgtgggtctcactgggctaacataaaggtgtcaagactctattccttctggaggctctggggaagaatccatttccttgtcttttccatcttctagaggccacccactctccttggctcatg

SEQ ID NO: 81410 - DNA, 732 bp, Homo Sapiens
actaatctttgctctttgcttgtttaacctccttgtaaagtttgtgtcttccagattacaataattccatgtaaagatgatgctggcacaaggctttcaacccatcccctcttctgacccagaagataaagacatcctacctttgagccttttagaacaggtatccagggattttacctctccagtgctaggcagggtctatgcccataacatcagcaggaagcagttacagaagatgaacctccgcccttctgcaagccccttaagattaaggaggagtatataatctctgatggggaaatgaggtaggagaccagaaggacttattttccattcccaaccccattgaacagagcaggatctggtcaaaacagggtgcagtggagaagcctgctgaaaccagcagatgatgatgaaagtgacctctagttgccctcactgcttatgagcataaagacactaccactgggaccatggccagtttacaaatgtcatggcaacacaccttggcaatggcctggaagttactttatatggttctggaaactccctgcccctttcccagaaagttctgaataacctacctcttaattggcatgcaattaaaagtggctctaaatacaactagctagtagcccacaggcacaaactctgggcacactgcctataggttagccctgctctgcaagaagtagcaccagttcaataaaagttgctttctctcaccaaaaa

SEQ ID NO: 81411 - DNA, 1247 bp, Homo Sapiens
  misc_feature (461)..(477): n is a, c, g, or t
cagtcgacggtaccggacatatgcccgggaattcggccattacggccgggacccctaagtctcctgtgccaagctgctccctgaaatggacttcttcatctgtacagattgtgtaaaccattctattgcttcttaataataggatttatattagtactcattaccatggacacaatgacataagtactctccacagtaaagcagacctttcacaacagtcactctgtgtcctaaaattttccaacatagatgtgatttatataactttgttgatacgtaaatgtcttggggtttacggaaattaactattatgttgcactaagatttgctgggagtggtaggtggacatatctatatatcaataaggactaaccgtctttttgtacataggagattgataatactgtattgttttaagcccacagtgttttactccactttcaaaaagatcaattggcacnnnnnnnnnnnnnnnnnaatggaaataagatttggtctctcattttaggttaaatgataactagaaagattaaactagacagatagtttaggtggagtatatttttaaaactcagaacatgtatattggtcctgtgttaccaagtttatatgtgacagttgaaaaagaaattcccttgaaatgatcatgaggttaaaattttcttcattaggggacttggagaaccagtagtcgtaagattagttgatagtttcactcccaagcaatgaattgcttctgtgtgtttccctgtaggactcaatagtaaatgctgtctgtcttacacatttataaggaccctgcaagacgacgacaaaggcctttggcctgtgctactaaacaagaagcctatgaaaaatttcttctttaaacttgttttttctctttccagtaagttcacatttggataattttaaaaagaaaagtaattacctttgtgtttccagaacactataattggggtgtatcttaattcagttaaatattattagtagacctggattttcccccttgaccccatcagtctataaaggttaaactgcaacttttatgaaatggtctttaatatttccacaataatcctgtgctatatttgttttaagaaacaaagtaactctatacacttcaagactttacaggattttttaaatcctgtattgttggatcaattaataaagatgcaaaaaaactttatagagatgtaaaaacaaaactataatggatctcctatttttctttaaataccaaa

SEQ ID NO: 81412 - DNA, 299 bp, Homo Sapiens
  misc_feature (113)..(178): n is a, c, g, or t
gcccttagtctaaaaaacttgttaatcttacatgttctcctgagagaagaaaaagccattcctttcaggttgtaaagtaccatgaaaaggtctttcaaaaatattcctatcannnnnnnnnnnnnnnnnnnnnnnnnnnnnnnnnnnnnnnnnnnnnnnnnnnnnnnnnnnnnnnnnntaaagtttctataaggtatgtttattcttaaggatatctactctaacacctgtaaatgtagggtgatcaattagtaaattaataaatctgaatcaattaataaatctgtttaaaattcaaa

SEQ ID NO: 81413 - DNA, 1061 bp, Homo Sapiens
  misc_feature (62)..(76): n is a, c, g, or t
  misc_feature (253)..(261): n is a, c, g, or t
  misc_feature (694)..(831): n is a, c, g, or t
gtgccatagccaaaattaaccctcaactaaagggaataagcttgcggccgcggctgtaggcnnnnnnnnnnnnnnngaattttaacattggttatttatttgtgtaatggccttacatgtggatattaacagtgtaaacaataccacatataaccatcaagataccttgattataatttataggactagaatgacagattcaggtggtttattaattacatttaaaaagttttctgaaaaaacttttgcaatnnnnnnnnntaaattgcccatcaataagtttgatatcttttaaaatgatttttggttatctgcacatgaagcaaacaaagtgtattccacaaaattctttaggcacagtctggtaagatagctgccagaaagaacagaaagagttgtcatttatctcttgtgagtacaatttctgaaagctgaatgagggcatctctttctggggatggtcgaagtttactgatctctcttattgcttcatggcagtactgctgggcgaggtaggttgtttgttgcacaccatcactctgtagtacatactgtcgagctctgtctacatctccaggcaaactgaaccgtcgcatgatcatagcattcatttctgggaactgctgacaggcacacaggacaggaccagtgggtaacccgagcttcagatcagcctcgtgccgaattcttggtnnnnnnnnnnnnnnnnnnnnnnnnnnnnnnnnnnnnnnnnnnnnnnnnnnnnnnnnnnnnnnnnnnnnnnnnnnnnnnnnnnnnnnnnnnnnnnnnnnnnnnnnnnnnnnnnnnnnnnnnnnnnnnnnnnnnnnnnnnttatgagtggctgagtcacattaattggtgcgctcactgccgctttccatcgggaactgtctgccactgattataatcgcaaccgcgggagaggggttgctatggtcccttcgctccccccatgatcctgccccgtcttcggtgcgggaggttcagtcatcaagggtatacgttccaaaggcaggaacgcagaacacatcttcaaggcaccaatgcaatacctaagcgcg

SEQ ID NO: 81414 - DNA, 520 bp, Homo Sapiens
tttttttagcctctaactagtcacatttactcttaagaaatgaaaggttttccaggagagaactgtgtacaaataaggtgactggagatgtgacctgatgtgtcacgaggcccttcggggcggcaggcgctatcgtgggcgtggtccttgcaccgtcccatcggccttgccttccagctccgtggcacggtttcctggtctttgggccagtgtgtaccttggagtgacttcctttctcaacttccactgcagtgtgtgtgccttctgctctgagagctgccttgtgacccgtgtgatagaaagcagggagtgagggtccccgcggacctggcccttccctccttcctcccccagaaagaggagttagagcaggggtgcgagagccgttcgctgtgggtttgtctttgaacaaacattaaggtgtcttgtttttgttctgggctgggggttggctgtagtcttaggtaactgaaagttcctactctcccttaaggtattaaatgactctttttccaaaaaa

SEQ ID NO: 81415 - DNA, 1409 bp, Homo Sapiens
  misc_feature (15)..(15): n is a, c, g, or t
  misc_feature (46)..(46): n is a, c, g, or t
  misc_feature (54)..(54): n is a, c, g, or t
  misc_feature (704)..(764): n is a, c, g, or t
  misc_feature (1050)..(1061): n is a, c, g, or t
  misc_feature (1357)..(1365): n is a, c, g, or t
ggattggctgtaatntgcctcgaagttcagcagttcatcttcatgngaaattgntgagcccccaccagggaaccggatgatgaaacagggatacctcacagcttggccatttgaggcaaaggcagcttcccgagctgatgctaaagaagacagactttcccttcctcccagcagcagcagtgcagagcccgcctggagggatgtgggggctgtgcagggtgcagcgctcaggtggatcctgggaagcagcctctggatgctgagtggagggagccactgagcacagcaaggcaccaaagcccctggagaaaccgccagggcgaggtgcgaccatcatcaggatcaaagcagacggggcgtgggtggggaaggggctctgggaccagacccccaacactactgcgtctttgtttctatcagtctttgtagaagcaggtggtggtggaaattccagcaggtgggtcccgcagaggccctgaggcctcacttttcggatcttctgtcccagatcctgctccctccctgctgagcctggggttcccctggcattggccccagccttctgaaagccggcgctgcagccagaggccgcacgctgcactgtcgcgacgcagagaggcttctgtgcaggctgggatcgggccccatgtctgtgctgtctagtttgtgttcaaaatgtcagaataaacacagaataaatgttnnnnnnnnnnnnnnnnnnnnnnnnnnnnnnnnnnnnnnnnnnnnnnnnnnnnnnnnnnnnngggggggcgcgcgcgcccccagaaattttcccccggggggcgcccacacacattatgccgccgccaccaccgcgtttttgtgtgtatcaacaaaggggggtgccccactaaatatagtggaggggctgttttttatataaaacgtagggcagcgagggcggcccgcgcggtttatatacacaaagcggcggtagaggaagcgggaaacacacagcgcagtgtaaacatgggagggaacaatctctttgtgagaagaagagagacggccctccatatcaatatgttnnnnnnnnnnnncgagagagaacaccaatagtggtgtgtcgcgaaaaaaacatctcctactcttagcgcgagagatatatatttcagggagactctcttactggaggcgggacatactaattcacagataactttctaacaggagggtactctatacgtggggggtgtgtgccacacaaacgcgacgggcgcgtcatgtatgtgtgcgccgagtgccggtggcgtgggtgagaggacacaatttgtgtgggtgcgctccatagcgcgtgagggtcttgttatgcttgtgattgatcagagagaaatcnnnnnnnnnatatcacacgcggggggggacacttgccggtgtcgttctaaacc

SEQ ID NO: 81416 - DNA, 1027 bp, Homo Sapiens
  misc_feature (771)..(771): n is a, c, g, or t
  misc_feature (842)..(842): n is a, c, g, or t
  misc_feature (901)..(901): n is a, c, g, or t
  misc_feature (992)..(992): n is a, c, g, or t
  misc_feature (1004)..(1004): n is a, c, g, or t
tttaaaaatagaaattattgctatattatgattgtaaaaatggaggcaataaagagttcagaaatatactcatttataatcaattaaatgatgagtcataatttgaaccctaattatcacattatgtagaaatcacaattcaggttttgtgtccccatttatatgttaaatagttcacatttaaaaaaacattttatcattacattatcaaatttgataaaatcttatgaaaacatctaagtattcaatataaatcatactgttaaaagtataaggtaacattaaaactgctgaggtgccagataagtattttctgttaaatatacacaatttaacatttaaaactacataaattaattcttgctaaaagttgattcagttttacaaaggcatactttgtgaaccatggtgaatttccccagcaccacttttttattccaaaactccttcgattaggtttaactttctcctgtcattcatatgtgaaaattacagaaggtttacaatacgtagtcttaatagtaacatgtttaaaaacctaagcaaagtgtacattaagttagctactactactcacttcttgattatcatcaaataaaaaataaatgaacacttcattcatttaagtctgaggaaaaaatagtgtaccttgcttaaataagaattccccagtaaagatattacgtaaaggatttctcatgttattttgttgagtaatttactttctctcattaaaactttttaaaagtctaaggaaggacatgtacttantatgccatattacgcaagtacagtattgttaataaagcagcccagtatagttgtaaacatcttaaatgtangtaaacaagacttggcatgtcttttctccccaaaacatgccattacaatgctctttccnatgaataattattcttcctagaaaagttttcaggtatattttaaatctataaaaaaaatacactgaaatatgtgaaccctcgtgcgattcntggctcgaaggncaattcctatatgagtcgtatat

SEQ ID NO: 81417 - DNA, 1009 bp, Homo Sapiens
  misc_feature (404)..(404): n is a, c, g, or t
gtccgaacacggggcttttccacgatcgtattgagagagggaatatcaaatcccagcatggagaagggagttgaagagagatgaggaaactctcccagcgattgtcctcctcagggatcagcataaacgacttcacaacactgtccttgaaggctgagcacatgttggtctgagcgaccggctgtggaccaggtggagggtaccatccgtgacttctcggaggagctggtgcagcagctgcccccccgggacgagctggagtttgagaagcaagtgaaaaactcctttatcacggtgcttattgaggttcagaacaagcagaaggagcagcgagaactgatgaaaaagaggcggaaagagaaagggctgagcctgcagagcagccggatagagaagggaaaccnagatgcctctcaagcgcttcagcatggaaggcatctccaacattctgcagagtggcatccgccagacctttggctcctcaggaactgacaaacagtatctgaacacagtcattccttacgagaagaaagcctctcctccctcagtggaagacctgcagatgctgacaaacattctctttgccatgaaggaggataatgagaaggtgcctactttgctaacggactacattttaaaagtgctctgccctacctaaccttgccctttggagcagcctcgctgcaggaggtcactgagcaagagtcattccatcacagggactgcatgagaccatgtaacctccgacatgtatttaaacgtgtatagcttaacctggattaaacacgagcaagcgcgcggggtcctttgccgttggcttctagtgctagtaatcattggatgcatgatggggcagggccggtgatggtgcctcccccttgctggtgtcaggagaggggaaggcagccgctttcaccgctcattatgtagtctggctacagccctcaaaaacagcttatactcttaagactaattttgaaataaaaccttcatttaattaataaaaaaa

SEQ ID NO: 81418 - DNA, 778 bp, Homo Sapiens
  misc_feature (111)..(112): n is a, c, g, or t
cgggaataacatgatactattcagaggagccagaagtaagttactttcatggattatttatgagagctaatttaaggatgatttttttctgattcaaaagtgaacttgatnntaaaaaccagtcaagagcaatcaaagcagcacatggtgttgtatacttcattagcaagtgagtttggtgttttataggtcacatatgtctgtatctacttagccagatgcttggcctggtgggaccagggctccacagaggccacaaaatgttgcaagtcatgatggatggaaatatgttctaacagcatctgcctctattcaatttaattcttatttctgtgttactcatgtacattggtctttctacatagttattctatcactggcaatatttgttctggtttagtgttctgtattttaaggtgtacgtatcatttctaattttaagttattttaaaaaaattcatcatatgaatgttcttggttcccattgtgacgattatttatttctgtaaaatttgtttagaagtacgtttttgcattattcatatgcttcccagagaagctcatttagttagaaaataaggcaagttttgaagcctgctaaatgaagagacttaagaaagcttaaggtacgcttgcttgtctttaaatcttcaatatgaaggactattaattccaagattaaaagttcatatataggctaaagatgtaactaggccatttgtatttgtattcccttttatttccaaaataaaatgaaaaatctttttttaataatttc

SEQ ID NO: 81419 - DNA, 1127 bp, Homo Sapiens
  misc_feature (52)..(221): n is a, c, g, or t
agctaggtacgaggctgggtggtgaattcggaacgaggctgtagtccctacnnnnnnnnnnnnnnnnnnnnnnnnnnnnnnnnnnnnnnnnnnnnnnnnnnnnnnnnnnnnnnnnnnnnnnnnnnnnnnnnnnnnnnnnnnnnnnnnnnnnnnnnnnnnnnnnnnnnnnnnnnnnnnnnnnnnnnnnnnnnnnnnnnnnnnnnnnnnnnnnnnnnnnnnnncaacaaaaaggaattaaggaggaagccacctggcttcctaagatagactttatggttaatgggatttattttagctggttaagtccaggacccctaccaggaagaactgaggtccatatttgaggttggtctcacccttttgcatgtggtcctactaataataattttgctgtaaagaagcctcaataaggagatggactgtgtgaaaagagatgagaaagcaggcctgtttgcaaggctggcccttggctggcatctgaaagcttggatttcaggagggttctcattactccctaaatgataagagtggctcactgtgcctaaactgttcgtacaaacaatgtgggttatgcccaacatctgctttccttctgggagtcagattttcatatgtgttaggcagaggatgaggtgagcagctcccaatgagaaccctgaacactgagtctgtaatgagcttcccttgtatacaacattgcacatgggttgtcacaactgattgctggaggaattgtgtcctatgtgactctgctgggagaggactgtgggaggcttacacctggtttccctggactttgtccatgcgcttttttcctttgctgattttgcttcctagcctttcgctgtagtaaaacatagccatgagtatgactacaggctgagtctgtgaatctcctagtacatcatcagactaggaggtggtggtgttggcaccccccagcacagggcacaagggagacttgcagggtgtttgtcatgttccctttctcaatctgggtgtggtttacagatttgttcagtttgtgaaaattcactgagctctatgaacaattataatatgtacatttttttctgtaagtgtattaaatttcaataaaaagaattcacactataggggtacaaaat

SEQ ID NO: 81420 - DNA, 765 bp, Homo Sapiens
  misc_feature (44)..(44): n is a, c, g, or t
  misc_feature (97)..(97): n is a, c, g, or t
  misc_feature (104)..(104): n is a, c, g, or t
  misc_feature (122)..(122): n is a, c, g, or t
  misc_feature (145)..(145): n is a, c, g, or t
atcacggtaaaggaaaaggggacctgagacgtacttgtaaaccncagaatgtcaagggtccctttcccagagcaacgtgcattcctgaagagtcacnttcattntggcaagaagactgtatnttcagaaaggtatcacacacttnctgactgcaacttctgtccctttgtttttgatgggcgtgctgtctgtcctatggagcctctgcagacttcgttctcgtgacccagtggcataccgtttggtgtctgatgtgtgcccagatcgttctgccacttgcactgtgcttgctcctaagcaaaagggaaaaggagcgcgcgtgatagaagaaaagcactgggagaactaacagaggagaaaggtgaaacacacacacattcttaaggcaataaaactagggggtgtatattatcttctggtgcatgttcttttctggaaaatatggtagctcgccaaccgcatctgctcatctgatattcaaacacacagtattcgtgaataagttgattctgtcccccacgtggactctgtgctcacccattgtctcattgccagtggtgtccaagggcccccgttgggacccacggctctcgtccctctgctccgtgtgtctcatgccagcagcacgtcgccatccgtcaccagaattagtcctcacagcctaggaccagttttgtatcaaactcgtctgatgttttgatgccatttgtcttttgtaaagttaattcattaaaagttttatgtactttgaaaaaagggaaaata

SEQ ID NO: 81421 - DNA, 504 bp, Homo Sapiens
taaaactctgatgattgcttgagcaacaggcaggttatctgcctggttgaattctggttgaaccgtgtattctaatatttctggttaagtggtgactgggtaaggaaaccacttggggtagcagttcaacaattcacttacgaatgtttataagctttccatttcctaggtaattttttaaaagccagtcaaaacaaaaactttactgaaaatggacagaaataggaaatggactttttccttactgtctatacctcctgaaccttggtattgtaaagatctggggacctctgggtctgttctgaccattccctagtctccatggccaagcactcaaggattgatggacaccacacaccagctatattcatttgccaagatcaacagctccttctccaaacaactcaagcccccaattcccatcgcattccatttgggtgagatgcaactaacagccccttcctggatgaaggagccaaagaataaagcttgcctagaggcatg

SEQ ID NO: 81422 - DNA, 626 bp, Homo Sapiens
gcctgcaaaagtgactaaggtgtatcctttactgataaagtaaggatgaaatgtggaaacatataattaaattataaattaccaagcttttgtgataattcatatgcttttaaatattttgaacctaagtgttaccctcaaaatgttttaaaatataaaaatcaagaaatagagcaagcaggaaatgggattttaaacattttgatttcaagaaatagaactatcttaaatatgatgctgaaacaatctgagaggcaggagataggactcaggcaacagagatccgaggaaatatatatgggcattttgtggttcatttttcttgtgtggcatgtggtacaactgaagcataaatctttttgatatcatctagttttgccagaggtatgggacagttcatattctgtccataagttcggctacttacataaactgaaatacaagtgcaactccaaacaggttttttcttttctggacaccatcatcaagcatggaagactggatctggaatttcccttcatatcttgccagttggcctcccagtttcttgcttatgttttctcctggtgtgttttcaacattgtaattgttttcaatcaactgtataagttttattttattcaaaa

SEQ ID NO: 81423 - DNA, 1034 bp, Homo Sapiens
  misc_feature (973)..(973): n is a, c, g, or t
  misc_feature (987)..(987): n is a, c, g, or t
  misc_feature (994)..(994): n is a, c, g, or t
tacagagtatctatcagtcagcgcttttttctaattgccaggtgaaatgtcttctcagttttttcatcagtacttgcagcttctcagataacagcaggaatgaggtggttttgaagccactaagccagctactccttgcatttaaagggttttcatcctttttcataagatcttcatatatcccttagggtttctctctaggtgtgtgaacatttgcctctggttgcttcagcacatcagctttctggggagagtcatgttgaaccaatgtgacttcgaattatactggtatcaccccctacttagcagttgccgatggactgatggacattacagaagcacacacaccttgcagcagaatggattatggttcatgatacgagttacacaagcgttttatttaagaaataaaggattagatttttaattcttttacctagtggtgtttcattttctgcctttgtaaaataaaaacaatgatttggttcactttgacgtttcttcagtgttgttcatgactgtggtgggcactggtactgctcgtctctaccaggttgatatcatactggactgaactggctctctgaaagtggcctttcctgcaaaggaagtagaaggctccaatgataagtgttactaggaccgccaatgccacaaaagcttcaaacaggttacttttagtttggatgctggagcctgggagaaaaacctcttcacaacgagctcctgtatagttttcaacgcaccttcccaggcttcaggtctcaacaaccttctaatgcagggaaaatctcatgcccaacttggaataagacaaagagaagccagcatcagttcacttcctacaaaatgggctgggaatagtaggtatcacataacaaagccccccattcaggcaaaacgacttgtgactgggaccacagggctcttcgtgatctgttggcatcttaatttgtaaatagtttcattcttnggtcaagagagtanggttganaaacagtaccaagaaatctcttgattataatttgggtttc

SEQ ID NO: 81424 - DNA, 607 bp, Homo Sapiens
ctaagttccagaataatagtgtcattattatagactatatgttttgaagtttgatattataatgggatattcattttttgttcttttcttgactcctttctcaagtgtgtgataaggtctgctgataaaatatttaaccccaagaaagtgaaaactaatataaaattagaaagacctatccaaattagacagtcaattccattaaaataagaagtgagaaaaacaatgttgggcattgaggtgtaaattttgcccagatgtatacccagtgtgaaatatcttctaataaaaatatatttggctcttatccctgcacatgtagaggcataaaaattggtaaacatgtcccgctgtgtagaactttaaaaaaaaggcatttttgaaagtgttgagtggcactgataactggtgaagcctacagccatccgcccaaaagtctgttctgatggcactgagttttcattgttctggatgtataagtctgtgtgtcaggtacagctgggcccagccagcttgagtcactcttgtacaagcttgtttttttctgtcttgtgaatgcacttgataatttaaaaataaaaatatctgtttctctgcagtttcagct

SEQ ID NO: 81425 - DNA, 593 bp, Homo Sapiens
ggcaagagggcagtacgggatctgataaggatctaggagaagggtctcatgcggaccctcacatgggcagaaaaatggtggtcattggccgacatcacagttttcctgtttcccacccagctaaaaaccgttgtttgctttaaattttcataaactggaatcctttcacccgctcctacagctaaccctcacaagcatgaagtgctgtggctgttccttatcctaatgatgcgcttttgtcccgtaaatgttaacactcatgaagcataccccggcctctcagttcttgagggcctccccaccgcagcagcaaggaaagctcacgaaccccaaacctggcaagtcacctgcagcccatggtgagctctgggaagtgtggttgaggccttggggtcactccttttttgcatgtgcaaatgtgctggtcacccttcaacgctcccagacggtcaggaaaactgttccaatcatgaaaaggggggatgattttgtaaaagtggcatttcctggtcagtggtggtcttcaaaacgacagctctgtatctgccatgtgaaaagaattaacaataaaagtgtgaagagcgattgtgagg

SEQ ID NO: 81426 - DNA, 1647 bp, Homo Sapiens
  misc_feature (750)..(880): n is a, c, g, or t
  misc_feature (909)..(932): n is a, c, g, or t
  misc_feature (968)..(983): n is a, c, g, or t
  misc_feature (996)..(1024): n is a, c, g, or t
  misc_feature (1052)..(1061): n is a, c, g, or t
  misc_feature (1114)..(1126): n is a, c, g, or t
  misc_feature (1238)..(1287): n is a, c, g, or t
ctgctccgcagtgcacagggcttccctctctcggggttggcttcttcccaggccttgcatgggccctgcccacaagcacaccctcaggccgagggtgcagactgatgctcttccctgatggagaccctgagatcttccccacccccaatcatgatgtcttcagtgtgggactggggtcctcttggttctgcctgcagcctgcctggctccgcccctagtgccccctcctcaccacactggccccaggtctcaggaggggtgtcctgggcagggaaggtcagtgtcactgatggtttgctgtttggaagccattggcagggctcccgtgcatgtggctgtgagggctgcacagtcctgccaaggggcttcctccttgtcaccccgaaccttgtaatcgtgtgctggcgtggcagccctggctaagttaatccccaccgctttcagtggtagaaagaattccctgagtgggccaggctggtgccctcctcctaccctggcttttctgagtgagctgcctggagccctcatcccctctcccaggctgggctggccctgggcggggccactgtgtgctggcccactgtgacctgacccgaccttgtgcagcccccctgccctggtgtcctgggttttcgtgatgatctttgctctgtttccagtggggtttgaagcagagttcagggaaccctgcccaaggtcctcctgttcagacattcctatgttgaataaagtatgtttgacttccccggnnnnnnnnnnnnnnnnnnnnnnnnnnnnnnnnnnnnnnnnnnnnnnnnnnnnnnnnnnnnnnnnnnnnnnnnnnnnnnnnnnnnnnnnnnnnnnnnnnnnnnnnnnnnnnnnnnnnnnnnnnnnnnnnnnnctctaaaaaattccccggggggggcccannnnnnnnnnnnnnnnnnnnnnnngaaaaagggggccccttggggggggctttttaattnnnnnnnnnnnnnnnnttttttcacaccnnnnnnnnnnnnnnnnnnnnnnnnnnnnncctttttggagaggaaaccctcttctcnnnnnnnnnnaggagttggggggcaccccccccgcccgcgagtgatatcccgcgcccgggggnnnnnnnnnnnnntctttttcggcggctggaggggggggcgcgacaaaccccgtcggtgttttgttttgtgtgtggagaaaaactttcccctcctccgcgcggactattctgtgcgcaaaaatannnnnnnnnnnnnnnnnnnnnnnnnnnnnnnnnnnnnnnnnnnnnnnnnnttcttaatagaagagcggaaggcgccgcggcgcttctttttttccgcgcgcccgccccacacccactcccgtctgtgttgttgagatgatagaacgaacaagacgccgcctccaaccttttgaggcggagtgtgttctccttcctgcctcaagaacacacacccaacaccgctgccctcgccggtcaagcgagcgcagaaagactagccagagcacgggtcgtggtcccgacctgcctcgctgcccgcgccggcgcacattagccctgccgcccaaaaaaagaaacgaatccacccaacttgacatcaataacaacagattctctgtgattatgcgtgcaaccgatctgcagcgggcgag

SEQ ID NO: 81427 - DNA, 442 bp, Homo Sapiens
ccatgtgtatattagctacagaagtcaagattccaaaaccaagaggcagacccaaaatggtaaaacagccctgtccttcagagagtgacatcattactgaagaggacaaaagtaagaaaaaggggcaagaggaaaaacaacctaaaaagcagcctaagaaggatgaagagggccagaaggaagaagataagccaagaaaagagccggataaaaaagaggggaagaaagaagttgaatcaaaaaggaaaaatttagctaaaacaggggttacttcaacctccgattctgaagaagaaggagatgatcaagaaggtgaaaagaagagaaaaggtgggaggaactttcagactgctcacagaaggaatatgctgaaaggccaacatgagaaagaagcagcagatcgaaaacgcaagcaagaggaacaaaaggaaactgaacattg

SEQ ID NO: 81428 - DNA, 1422 bp, Homo Sapiens
  misc_feature (1198)..(1215): n is a, c, g, or t
  misc_feature (1267)..(1267): n is a, c, g, or t
  misc_feature (1343)..(1343): n is a, c, g, or t
  misc_feature (1346)..(1346): n is a, c, g, or t
  misc_feature (1360)..(1360): n is a, c, g, or t
  misc_feature (1375)..(1375): n is a, c, g, or t
  misc_feature (1399)..(1400): n is a, c, g, or t
cagactgtcatcagagatgaatacttctactgtcaacagtgccaggaagaactgatggaaagccgcatgagaattgagagcctttcatcccagctttctaatctacagaaagagtctagagcatgttggaaaggattcaagaattagaggacttgcttgctaaagaaaaagacaactctcgtcgcatgctgacagacaaagagagagagatggcggaaataagggatcaaatgcagcaacagctgaatgactatgaacagcttcttgatgtaaagttagccctggacatggaaatcagtgcttacaggaaactcttagaaggcgaagaagagaggttgaagctgtctccaagcccttcttcccgtgtgacagtatcccgagcatcctcaagtcgtagtgtacgtacaactagaggaaagcggaagagggttgatgtggaagaatcagaggcgagtagtagtgttagcatctctcattccgcctcagccactggaaatgtttgcatcgaagaaattgatgttgatgggaaatttatccgcttgaagaacacttctgaacaggatcaaccaatgggaggctgggagatgatcagaaaaattggagacacatcagtcagttataaatatacctcaagatatgtgctgaaggcaggccagactgttacaatttgggctgcaaacgctggtgtcacagccagccccccaactgacctcatctggaagaaccagaactcgtggggcactggcgaacatgtgaaggttatattgaaaaattctcaggcagaggaggtcgctcaaaggaaggtacagtctttaaaacaaccatacctgaagaagaggaggaggacgaagaagcagctggagtggttgttgaggaagaacttttccaccagcagggaaccccaagagcatccaatagaagctgtgcaattatggaaaattttccactggcttcctcaaaataaagaagtatgggaatccttacctggatacagtgcagagccttctcagaagcacagaatattcttatatttcctttatgggaatttttaagctgccaatctgatggccttaatttcctttttgacactgaaagttttggcaaagagatcatggtccatacactttggttgcaggatgggaattattgacactggaacttaataactggggactggtccggaaggggttcctccaannnnnnnnnnnnnnnnnnggaatggggggggtgcgtcggcgcctgataagggtgcttagcgtacgacggngacgttcaaatgaacccacgggggccaccaggggccggacgtcggagagattggcccgtggtcaggagcgggcggngcngccgcaggggtgtngcggcgagtggcgtnaaacggggggccctcagggggggnngcgcggaagcggcagcgcttgc

SEQ ID NO: 81429 - DNA, 1328 bp, Homo Sapiens
cttggagatacgtgctacatcctttgttaaaagtctttttagtgatactaattctgtgttcagtgtgtgaaaagtaaaataccacaattttaaaagtctaattatttttaattttgtttaatgacagagatatagatcagctatcaggaagggacttctgccattcaaagaaaatgacaggaagtaacactgaggaaatagactcaagaatccgagatgcaggtaatgatagtgccagcactgctcctaggagcactgaggagtctctttctgaagatgtgttcacagaatcagaactttcccctatacgagaggagcttgtatcttcagatgaactgcgacaagataaatcttctggtgcgtcatcagaatctgtgcaaactgtcaatcaggctgaagtagaaagtctgacagtcaaatcagaatctactggtactcctggtcacttaagatctgatactgaacattctacaaatgaagttgggactttatgtcataaaactgatttaaataatcttgaaatggccattaaggaagatcagattgcagataactttcaaggaatatcaggtcctaaagaagacagcacaagtataaaaggtaattcagaccaggattcttttcttcatgagaattcgttacaccaagaagagagtcaaaaagaaaatatgccttgtggggaaacagcagaatttaaacaaaaagcaacagtgttaacaaaggaaaacaagggaaacgagcaaaatcaggactcacagacagaggcacgaagagctacgcaaactttggaaaaaccatactatgcaacaaactaaacagcaaagggaacaatattcaacaagtgtcacaaaaagaagctaagcataaaattacatctgctgatggacacatagaaagtaagtgttatagagtaaatgaagttagttcatccaattgtatggtgtctccgtctttcctcactgactcaaaagccgctgtaccttagggcaacctgaaggataagtgagtgacccttgaccggtgattctctggggacaagtatatacagtctccagtgtctactgtcttttcttatcccacaggtggattgtacacataatgagcatcattgctacccaccatgtttaaacattcttggctcactacatcgtatcattaaacaatttatttcttgagaaattgcacaaaagctgtataatacctttgatcactccattttctcttaaaaagtttttggtgtgttaccattaaaaatgtcttttttcatatataacattttaattgccaaagttgtaatcccatcttttataaaatgtacagttaaacct

SEQ ID NO: 81430 - DNA, 1010 bp, Homo Sapiens
  misc_feature (175)..(192): n is a, c, g, or t
  misc_feature (449)..(473): n is a, c, g, or t
ggaaagcacaaacttctgtaacgggtcgtgctcatgtctgttaataaagaaatccagatcccttcgggctgccgcctgccctgacccaggttcccaactcctcccacctccgaggccgcagcacctccttgccaccagggggcgtcctcaccctaattccaaggcccgccaggcnnnnnnnnnnnnnnnnnncggtgctaggggctaaggctcccaggggaagccgcttggcacctacaaccaccggagaagggttggtcttagacttagtgctgtacccttaggttctgttgtggcggaaacgcacgttgagggtccttcccgccaaggccccggcttgtctggtcacacagaaccctgggcgaaagcagccggtgcaccctccgcttgtaccaaaccagatcacacacctttattatcctcaaaatgtaacaaacgggataagaaannnnnnnnnnnnnnnnnnnnnnnnngcagtccagggaagcatttaaaaagccccgcagtcaggccaggagtcccgccggtgggccccggggcgccgggcccccctctatacggctgtagtcctcccgaacaaggggatggagaccggcagacgccaagctccgtgctccaggggctcgcggctgctgagctctgagtcggtccagctggggaagacccggcggccacggtcggcctgcaggcagagggctgggcagggcggcgcgggccgaggggcgctgggcaggtgcagcgccgaggtgtagccccggtccaggaagagcggcttgtagctgggaggcggctgctcctgcttctccgcgctgtcgcggcgactcaggaagggcgtgacgatcttgcggtagaggccgcgcgtgtccgtgagcacctcgctatagggcggcggcggctctgccatcagcaccgcctcttcgtaacacggtggtttggacatgtccgattccgctgcggagtgggaggcggtcggaggaggtgaggccgccggttcccagcctctcgcagag

SEQ ID NO: 81431 - DNA, 227 bp, Homo Sapiens
  misc_feature (128)..(136): n is a, c, g, or t
cacttgtttactaattatttacaaaacaccctttgttgacttttattttataaatgtgtaatgtattaaacgtctttaaatttttgttcaactgaaactacattaactttgatttgctttactgggannnnnnnnnaaagacactttttccatgtcagtgcgcagcacttaaccagtcgtttgtattccctttctttcaatccaataaacagaatgaatacctaaat

SEQ ID NO: 81432 - DNA, 2703 bp, Homo Sapiens
cagtcaaagccctctttgactacaaggcccagagggaggacgagctgaccttcatcaagagcgccatcatccaaaatgtggaaagcaagagggaggctggtggcgaggggactacggagggaagaagagctgtggttcccatcaaactacgtggaagagatggtcaaccccgtggccctggagccggagagggagcatttggacgagaacagccccctaggggacttgctgcggggggtcttggatgtgccggcttgtcagattgccatccgtcctgagggcaagaacaaccggctcttcgtcttctccatcagcatggcgtcggtggcccactggtccctggatgttgctgccgactcacaggaggagctgcaggactgggtgaaaaagatccgtgaagtggcccacacagcagacgccaggctcactgaagggaagataatggaacggaggaagaagattgccctggagctctctgaacttgtcgtctactgccggcctgttccctttgatgaagagaagattggcacagaacgtgcttgctaccgggacatgtcatccttcccggaaaccaaggctgagaaatacgtgaacaaggccaaaggcaagaagttccttcagtacaatcgactgcagctctcccgcatctaccccaagggccagcgactggattcctccaactacgatcctttgcccatgtggatctgtggcagtcagcttgtggccctcaacttccagacccctgacaagcctatgcagatgaaccaggccctcttcatgacgggcaggcactgtggctacgtgctgcagccaagcaccatgcgggatgaggccttcgacccctttgacaagagcagcctccgcgggctggagccatgtgccatctctattgaggtgctgggggcccgacatctgccaaagaatggccgaggcattgtgtgtccttttgtggagattgaggtggctggagctgagtatgacagcaccaagcagaagacagagtttgtggtggacaatggactcaaccctgtatggccagccaagcccttccacttccagatcagtaaccctgaatttgcctttctgcgcttcgtggtgtatgaggaagacatgtttagtgaccagaatttcctggctcaggctactttcccagtaaaaggcctgaagacaggatacagagcagtgcctttgaagaacaactacagtgaggacctggagttggcctccctgctgatcaagattgacattttccctgccaagcaggagaatggtgacctcagtcccttcagtggtacgtccctgcgggagcggggctcagatgcctcaggccagctgtttcatggccgagcccgggaaggctcctttgaatcccgctaccagcagccgtttgaggacttccgcatctcccaggagcatctcgcagaccattttgacagtcgagaaagaagggccccaagaaggactcgggtcaatggagacaaccgcctctagttgtaccccagcctcgttggagagcagcaggtgctgtgcgccttgtagaatgccgcgaactgggttctttggaagcagccccctgtggcggccttccgggtctcgcagcctgaagcctggattccagcagtgaatgctagacagaaaccaagccattaatgagatgttattactgttttgggcctccatgccccagctctggatgaaggcaaaaactgtactgtgtttcgcattaagcacacacatctggccctgacttctggagatggatccttccatcttgtggggccaggaccatggccgaagccccttggagagagaggctgcctcagccagtggcacaggagactccaaggagctactgacattcctaagagtggaggaggaggaggagccttgctgggccagggaaacaaagtttacattgtcctgtagctttaaaaccacagctgggcagggtgagaagctagatgcccctgcagtttggccctggagccagggcagaggaatgtagggcctgcatggagaagggttctgccctgcctgaggaggaggacacagcacaagggcacattggccatggctgggaacatgacccagcctgaaagatacaggggatcatgttaaaaatagcagtattatttttcgtctcaatgggattggaactaagtaattaactccccctgctcctcacccctgtagggaaaccttggaaaggagagtggcaggtgggctgcctgctgtgttaagaggacttagtttgtgaatgtaaggcactgtcaggaatggggggcgggccaggtgggaagagaagaaatagcagagcctattttggtgaggttttttgtttttaagtcaaagaagactcagtatgctttccctgaggaatgaaaaagggattgaggagttgcctgactcctgggtgggtggggtacaggcagttaggtgctgaatgaagctgccatccttgctgcagcttctaactggtaaaaagatccagggatggagatgggaaggttagaaaggcagccctcacctctgaggacagaggccggggtccaggcccgtgggcgcaaaggtgcctcatagcatagccagcattcagcacacacaaacctactgcccacatttgggctcagggttggccatttgctagttctgctgccctcttaagatctgactgccaaataaatcatcctcatgtcctttttc

SEQ ID NO: 81433 - DNA, 1343 bp, Homo Sapiens
  misc_feature (89)..(89): n is a, c, g, or t
  misc_feature (94)..(95): n is a, c, g, or t
  misc_feature (117)..(117): n is a, c, g, or t
  misc_feature (125)..(126): n is a, c, g, or t
  misc_feature (131)..(131): n is a, c, g, or t
  misc_feature (148)..(148): n is a, c, g, or t
  misc_feature (171)..(172): n is a, c, g, or t
  misc_feature (174)..(174): n is a, c, g, or t
  misc_feature (182)..(182): n is a, c, g, or t
  misc_feature (254)..(254): n is a, c, g, or t
  misc_feature (295)..(295): n is a, c, g, or t
  misc_feature (967)..(977): n is a, c, g, or t
gttcacgtcagacatgcgatgcgtacagacgtgtttcgtctttatttgaaggatgtttccaagagcttctgaaagattagagagatganggagnnccatcaaatggcgctgggcatncagcagcnngctcngggacggacctgctcanttcccagaagccaggactagacnntnggcttgcntgctatgaatattgagagagatttttaaaaaagatttgcatttgtccaaaatcatgtctctctgatcaaatntgttgtccagaaattcttcataccttttccacatccagatntcatgtgcgttcatggagaagatcacttgaggccatttggtacacatctctggaggctgagtcggttcatgaggtctcttatcaaaaatattactcagtttgcaagactgcattgtaactttaacatacactgtgactgacgtttctcaaagttcatattgtgtggctgatctgaagtcagtcggaatttgtaaacagggtagcaaacaagatatttttcttccatgtatacaataatttttgtaaaaagtgcaatttgcgttgcagcaatcagtgttaaatcatttgcataagatttaacagcattttttataatgaatgtaaacattttaacttaatggtacttaaaataatttaaaagaaaaatgttaacttagacattcttatgcttcttttacaactacatcccattttatatttccaattgttaaagaaaaatatttcaagaacaaatcttctctcaggaaaattgcctttctctatttgttaagaatttttatacaagaacaccaatataccccctttattttactgtggaatatgtgctggaaaaattgcaacaacactttactacctaacggatagcatttgtaaatactctaggtatctgtaaacactctgatgaagtctgtatagtgtgactaacccacaggcaggttggtttacattaannnnnnnnnnngaatgggatgtcctatggaaacctatttcaccagagttttaaaaataaaaagggtattgttttgtcttctgtacagtgagttccttcccttttcaaagctttctttttatgctgtatgtgactatagatattcatataaaacaagtgcacgtgaagtttgcaaaatgctttaaggccttcctttcaaagcataagtccttttggagccgttttgtaccttttataccttggcttaatttgaagttgacacatggggttaagttactactctccatgtgcattggggacagtttttataagtgggaaggactcagtattattatatttgagatgataagcattttgtttgggaacaatggcttaaaa

SEQ ID NO: 81434 - DNA, 372 bp, Homo Sapiens
cagaaagttctgtgggccagcactgctctagaatgaagcagtgccgtaggtgtccgaagatgcaagttctgattctaccttctcccttccacacaaacacattctcattctctcttcatccaatctgattctggtgagcaaggaatcccctcagatttaagtttattactctcccaaaggactattcctaaggttgtaggctcatagtaaataatgcacatagcttcaagaattctcaagaacccttgtagctgggaactgttttctagataagatcactaccttcaattgtttacaaggtggatatgggcaggcaacagatactttattttatattaagaaaaggtaggggttaaaaataaggcattgatg

SEQ ID NO: 81435 - DNA, 1267 bp, Homo Sapiens
  misc_feature (1001)..(1001): n is a, c, g, or t
gtcaataatcatgtagtacaatggcttggaattgtaaccactatggttattgattgtcctgtgttgtttcaggcatacttaggtatgtccctggggaaaaagaaaaccattcagctgagagttgctaaccatgttcttttggttagaaataatggttcattttttgcccctggttggaatagtctctaaaaggctctggtgactgaattgaacatgagtccgcatgctgttttctttcaaaaggtatcaaaacggaaagcctctctaaggggaagacctttcaactccattcagaagacaacatttagtaaggaggatggcggaggttactagtaattttcagatgtcttgggctttttctgccaacaaaacccaaaatcaaattagagttggtgaaagctttcttcagtgtttttagaagaggccatcttgaatctgtagaataccatttacacatcaacttcaccctatgctcatttcgtattttgagcttaaatggagtcctctgaagggggggtagtcgtgattctggtggcaaaactagaacttttaacttgtaaaatgaaaaatattaaatggacctttttgtcagttgaggatttagattgattcttttatctgaggagcgtatgttcctcagatgttgcgtagagacctttaggttttcatctactttaagattgctctcttggcaattaggggatttgggaaaagaagaaaaaaagatgccatgtgttgctagtacacagttataggatatggtttctaatggttgaattttgaggaactctccctaaagaatgagttttatatctcctcaaggaaatcatggaaaaatctgtttattcttcagtgagtccttttgaattaatgttcttaaatttttttctaagtctgtgtaagtgcttatgtataagtatataattgtataaatatttataaatatatttatataattacggtttcatttctaccttgagtcaaagttctgtctttagatntggtgactggagtaatacttacactttgggtgtttttcttaggttcttgagcttacttaaatagcagattctgatttttgaggtgaaagatggtttcatgttaattctcaaggtgcttctctgaacttggttacctaactgccgttgaaaatagagtgttaatgggacagggcctggggtaaaattgggggtgaaaagtcaatcaaaatatggggggacggaaaaaaagtggccttttgttagggccttttccaatatggccagtt

SEQ ID NO: 81436 - DNA, 1009 bp, Homo Sapiens
  misc_feature (25)..(25): n is a, c, g, or t
  misc_feature (610)..(649): n is a, c, g, or t
tctggcacgaggcggagctactagnttaattttcaggatgtctgggctttttctgccaacaaaacccaaaatcaaattagagttggtgaaagctttcttcagtgtttttagaagaggccatcttgaatctgtagaataccatttacacatcaacttcaccctatgctcatttcgtattttgagcttaaatggagtcctctgaagggggggtagtcgtgattctggtggcaaaactagaacttttaacttgtaaaatgaaaaatattaaatggacctttttgtcagttgaggatttagattgattcttttatctgaggagcgtatgttcctcagatgttgcgtagagacctttaggttttcatctactttaagattgctctcttggcaattaggggatttgggaaaagaagaaaaaaagatgccatgtgttgctagtacacagttataggatatggtttctaatggttgaatttgaggaactctccctaaagaatgagttttatatctcctcaaggaaatcatggaaaaatctgtttattcttcagtgagtccttttgaattaatgttcttaaatttttttctaagtctgtgtaagtgcttatgtataagnnnnnnnnnnnnnnnnnnnnnnnnnnnnnnnnnnnnnnnntacggtttcatttctaccttgagtcaaagttctgtctttagattggtgactgagtaatacttaaactttggtgttttttcttaggttctgagttactttatagcagttctgatttatgagtgaagatggtttccatgttaattctcaggtgctctcctgactggatacatactggcgttgaaataaagtggtactggcaagtgctgggttaacattgtggataacagccgaatcaaataggggcaggaaaaaggtggtctttgtgaggccattttcacagtatggcagcaggggaaatcgaaggggattatactgaaaggacagaaggggaggaattagaaggaaagattataagtgata

SEQ ID NO: 81437 - DNA, 464 bp, Homo Sapiens
ggcacgagggctaaacatctttcagtacaggtaagaagactggcatcacatctgggaagtgccttaacagatatctgaggagttactgcacattaagtcggtaacaacacacttcggtttcaaggcgtatgtaatcttcccttgatgctcttcaacagagacaaggttcctgtctgtagatcaaataaatcacagtattaggaaaaaaaataacagcaaatttggaagtacaatcaacttaaggagaagcaaaggaaaagacttagaaatgggacattattgtctacatctagaggatacatgtatctgaaagcttaagaaagcccttatcttaggaacttgaagctgaggataatctcaagttcacttagtgccagtcactttagtttttaaaaaaatttaacttaaaccccagcctaggcaacatggtgaaacccagtctctactaaaaatacaaaaattag

SEQ ID NO: 81438 - DNA, 1701 bp, Homo Sapiens
  misc_feature (991)..(1001): n is a, c, g, or t
  misc_feature (1260)..(1268): n is a, c, g, or t
  misc_feature (1406)..(1423): n is a, c, g, or t
  misc_feature (1481)..(1512): n is a, c, g, or t
tagggtgaaattttgagacctagactctgtaaaaataatcctagtcttcctccaggggtcagttcctcacagtggtctgtaccaaaacttgccaaattcctccatggccaagtgttaaaatctgtgtgtggaaaatagcgaattaacctaagacacagaaggcagactgggtgaggagacctagcatgccctattggcagtgctcaggagctgcatcccacttttccctgctctgaatcgaagtcctagttccttcctttgattctcctttggtaggtggaatcagttaatgttttgagaaacctgcctgggctctgcccttagtcatgacatctcgctgagccagacccactctgttccttggaacctagagctggagtgaggagtagaggtctccggctattccagaaagaaaagtgagccacatgcaggctgatgaatgccgacacttccagaatgtatagaaatagtccctgtcctggcctgccactgaccctgtctgtattttctcggaggttgtttttctccttctccttcccaggaaggtctttgtatgtcgaatccagtgcactcaagtttggccaagggactccacagcacccagaagactgcatgcctcaaggtttatgtcactcctctgctgggctgttcattgtcattgctgtgttcagggacctttggaaataaaacctgttctgtcccaaataaaaccagcctgtgatgttcaagggactggaataaagtggcttacgacctgaaggattctacagagtgctcaactgttcatacatcattcagagtgggagggagctgggggtgctgtcccatcccatctgtatgcccacggtggatttaataatatataatttataaatcatagcctatggagtggcccgtaaatcagttgactgtgtagctcttgcctggcattaaagcatgtttttggtctttcatgaatcacaactatgtcctacgtccgcccaacaaacgnnnnnnnnnnntcttgtcgggccgcctcggccctcaaataagcttttctcaaaaattaattttagagcgcgggcgcccctaaggaaaataaacatggataatgattgattttttaggccaaccctgggccctcaacgaaagttttcaaacccctccccttggcgccacccgcgccccgtgcaacgcaagcgcacctggggaccaatccccttctcgcctaaaaaaaccccgcgtctattggaaataaggccggcggtgtactcccccagnnnnnnnnnccccccgccgggtgtaaacccccaaggcttttcctaaaaaaattccaaagaaaggggttgcgtaggggccccttaggcggggttcttgtccaacatgggaagaccccaccgcccaagcccggaaattgaaatgaaatnnnnnnnnnnnnnnnnnnggggagccttcttcccacaccagtgtgggggcgttaattcttatataaacactttctnnnnnnnnnnnnnnnnnnnnnnnnnnnnnnnnacaaaaaagcggtgtgcgagtaaatcccgggaaaacccctctagcagggcaatatcaccgagccggagatagcccccccttgcgggggatatttatttggggcgccccgtgggtgagatataatacgggggcggaaaaaactcactgttcgcgccaaatattggggcccaccctggttatataactgcc

SEQ ID NO: 81439 - DNA, 916 bp, Homo Sapiens
  misc_feature (786)..(827): n is a, c, g, or t
gatatacattgtgtgaaaaaagaaaatggctaataaactgtattaaatcttaaacaatgtataaagattgtacttagccagttcaaagtgtatatttattcataatgaattataacagttatatttttgtgttttcttgtaaatgtttcttttcccttaaatacagataattcatttgtattgcttattttattatgagctacaacaaaaggacttcaggaacaagtaatgtattagtatggttcaagattgttgataggaactgtctcaaaaggatggtggttattttaaatataaatagctaatgggggtggtaggcctataaaattaaatgccttgtataaaatccaaaatgaatgcaaaattgttttcacttgtattgactttatgttgtatgattccaatctctgttctgtttggcacttgtatttaattcttcacctttgtaagacatttgtatattgtggatgtgttcattcaagctatttaatatctggcactgttaatacacagtactttattgtacagactgttttactgttttaattgtagttctgtgtactttttttggatggggctggcatgttttctttgtttcctggcaatacgacgtgggaatttcaatgcgttttgttgtagatgctaacgtgtcagaatcctttacattcaacttttctaagaaaagcattttcagtcttgtagtgtgtgcttacagtaactaattttgttgaaaatggtttcaagttattcaaatttgtacaggactgtaaagatttgttgacagcnnnnnnnnnnnnnnnnnnnnnnnnnnnnnnnnnnnnnnnnnntatatattaggatctgcaaacaatgaagaattatgtaatatattgtacaaatgtaagcaaaggctctgaaataaaataccatagtttgt

SEQ ID NO: 81440 - DNA, 284 bp, Homo Sapiens
  misc_feature (41)..(41): n is a, c, g, or t
  misc_feature (59)..(59): n is a, c, g, or t
gtccatccacatacagaaatgaaacctaaaattacctaaancttttagaaacaaaaatncaaggattgcacaaactatggcattttatttcagagcctttgccttacatttgtacaatatattacataattcttcattgtttgcagatcctaatatatactttatagcttttattctataagcttttttcttcaacattttgctgtcaacaaatctttacagtcctgtacaaatttgaataacttgaaaccattttcaacaaaattagttactgtaagcacaca

SEQ ID NO: 81441 - DNA, 719 bp, Homo Sapiens
  misc_feature (29)..(29): n is a, c, g, or t
atatttcttcttctgtattaattaatacntatgggtcatgaatccctgctcctttgacctttttaatagctcatgaatccatcccattgcctccccaactctgcccacacctgctgcaacactaatgccttgattttcctacctcagtctccttttctattaatccctcttttgcgtggctgcctgagtccactttctcaaacacaaacctcactatgcaactttggaatctctgtaggctcacctttgccatttcttaatattgcattctccaaattgctaatctctatccagtctcttgaactagacttggcacatggagattccgctcagaaagtgctcttcacacttctacctgcttgactaaccccagattatctttcaagactttaatctgatcttgtgtcttagagaagcccccatacctggtagagcatgtaccatcttacatgcttaaataactccacatttatttgtgtttattactctgtgttataaatatacatttgttggtctctctcttggattattttgtttctttgtcctgtaactaccactgaaagggtgcaatacagctttcttgaaatgtgtattgaacggatgaatgtataaataaaaattaaattttgtaaatttctgcttattcttagaaaaagaatctaaattgtgacaaatcagaattgaaaaaagtattctaataaagaaaaacaagcttttat

SEQ ID NO: 81442 - DNA, 700 bp, Homo Sapiens
  misc_feature (94)..(94): n is a, c, g, or t
  misc_feature (117)..(117): n is a, c, g, or t
  misc_feature (208)..(208): n is a, c, g, or t
agcctgggtgaagggggcatctgtgccaaagcaggaaggcacacaggcggattggaaggaatttctctcagcagcgtcaaatgcctgagggatntcgccctcgaccctctccatctntcatggtactctcattcacccccggctgcagctcctgcctctgtgctgacagctgtcacatcaatccagcccagacctccctcggcagctntagaccagcagatcccactgcctcctgacaacccctctggatgtcccacagttcctcagacttagcatcctttccaaatccatgcccccatctcatttccaaaaaagaaaaatcatagaggcctccccaatacaaatgcataggacatgggaaacaaggtttgaaaggatatccagaaaagcttagggatagccctggccttttggaggtgacttgggggtggtatgagaggccagagtcagcagtaacttctcctttcttccccacgaaggtgtggacttcttagcttcctgtccttttcgtaccatttgccaaattgaatttaaataattattactgtaattgcttacttattgtctgtctctcctggttgaagcttctcaagggcagggatcatgtctgtttcacttctgtatccttggcatctgtcatataatcagtatctgacatataataggtgcttaataaatatttgtttgaattaatgaaaaa

SEQ ID NO: 81443 - DNA, 705 bp, Homo Sapiens
  misc_feature (122)..(122): n is a, c, g, or t
taggatggcttgaggacttcttgatgggcatggacagcaccctggagccaagtgcaggagcaccactcgccatgtcctcaggcacaacccaactcagggccacagccaccaccctcatcctntgttgcctcctcatcatcctcccctgcttcatcctccctggcatctgaggagagtcctttagagtgacaggttaaagctgataccaaaaggctcctgtgagcacggtcttgatcaaactcgcccttctgtctggccagctgcccacgacctacggtgtatgtccagtggcctccagcagatcatgatgacatcatggacccaatagctcattcactgccttgattccttttgccaacaattttaccagcagttatacctaacatattatgcaattttctcttggtgctacctgatggaattcctgcacttaaagttctggctgactaaacaagatatatcattttctttcttctctttttgtttggaaaatcaagtacttctttgaatgatgatctctttcttgcaaatgatattgtcagtaaaataatcacgttagacttcagacctctggggattctttccgtgtcctgaaagagaatttttaaattatttaataagaaaaaatttatattaatgattgtttcctttagtaatttattgttctgtactgatatttaaataaagagttctatttcccaaaaa

SEQ ID NO: 81444 - DNA, 499 bp, Homo Sapiens
aagaattcggcacgagggcagtgaagataatctgctttaactacagacagcatggattcctggatctcaatactatgatagtcaacatgagttggattttatcttgcttggtttatatttgcttcgcgacctaatctaattttccattttttatacctagtctgtttcatcattataaactaagaataatgatagatgttggtgaagtgtatagagatctggaactgatagagagttaagaaagaactatgttgttgttatccttctaatcattcccttacatagacgcaaaatgcgtgggttactttacatggttcccatgcaactcaaagctaatgaacatgcggtaactaacatgaaagctattccctaaatctgtcaactattttaaacttcaagctctgaccaatcctgagctcagaaagctcaaaaatcaaatattgtgaacttttcaatgcaaatttgtatggtaaagaataaataacactatttcttggtt

SEQ ID NO: 81445 - DNA, 1157 bp, Homo Sapiens
tttgtatattcctgaacaattgtaggattcagtcccgtgaagcaggaagctcttgatctttcttcagttaataaagcatcaatttcatccaatgtgtttggaaggtcttggaaaaccatggggagtgaggagttgtgtccatttggaatggtgggtacttgtgtctggtattcttgaggaagagtctgctctgcacccaggttacatacttgcctagctcttttcataagttccttgcatttctgcaataatctctgtctattttcatccaattcaatgaaatgttgctctgtaagacggagttgtgaagatgcggccatataatctgattctaatttgttcttctcagagatcactgtagtattttggagaattaaatctactttttgtatatgcaaagaagtacaaatctttattaggtttgttaattcgggaacaagtttcgctttttgaacatttatttctttgattttggtacttgcttttcgctcttcctcttcaagattgcaagtatcctgttccatcagctttaaacttcctagtttggaactgattttttgttccagttgtcttttcttggtttttctctcaagaagctccttcttcttttgtctaagttcattgtctttgtgctccagatgtttgcttgtttcacgtaaggcaatcaaccctgaatccactgcttgcaattttctatgaatttcctttagctgttcttctaagtgtcttctctgctctaggtccacagtgacagtgagaaactgcgctacttttagagatgtgttactagaaataactttgtttgaataaaaagaagttttcaccacatacttttcttctgctgtataaatctgttttaatcgggtttcttgtattacccgttcaattctttctctggtcttttcagttcctacaggaacttcatgaatatgatactgacagctaaggtaactcattacaggatcaggtgcatcaaataattctctcaaataagagaaaaatccgtattgtttaagttcattcaaagatcttgaaggtgctttgtctgcatatgaactcttgggagcaataacagcatttactcttaattttttattgtcacgaacccccggccgtaatggccgaattcccgggcatatgtccggtaccgtcgactg

SEQ ID NO: 81446 - DNA, 690 bp, Homo Sapiens
  misc_feature (424)..(440): n is a, c, g, or t
aaaggaaatttggtcccgattaacaacctaataaagatttggacttccttgcaaaacaaaaagtaaacttaattctccaaaatactacagtgatctctgagaagaacaaattagaaacagaattatatggccgcatcttcacaactccgtcttacagagcaacatttcattgaattggatgaaaatagacagagattattgcagaaatgcaaggaacttatgaaaagagctaggcaagtatgtaacctgggtgcagagcagactcttcctcaagaataccagacagtaagtataaaaagtatataatgctacaattgccatatttaacatttttaagattatggaatcttagccattgtaacaggccgtgaaaaacatgatgtgtcgtaaaaaatagggagtttttccacatttttaaactgannnnnnnnnnnnnnnnnaaataatgttgcttaagagatcaatggtattggtactataacatttattcttccaatacaaatgccttttaatgggtacagttggaacatatatagtttttcatggaaacattgtaccagtaattggtatatcagaaataataaatagaatattttaaaaataaagggaaaatgaaaatgtttccctggaaattggggtgtttaattagggttcaatgagagctgaatatttaaggctaacatatgccaa

SEQ ID NO: 81447 - DNA, 464 bp, Homo Sapiens
aagtccacatcttcatgaaccctcagactctggagttgggtgtcggcttttttagccagcttttgtgggaattgcctttgacctattaaagaaggaaagtgggtaatggagtcccagccactcaagagactggatatcccccgagaatggcttgggttaccagctatggacccttggaagatgaatctaatccttctcactggtttttctttgcaaattcatttgcttttatttttctaataacaataaactctattttccatgttctcagggcccctgggtagacagacacagcttgatttcagagcagacataggcgaagaaaacatggcattgagtgtgctgagtccagacaaatgttatttatatacacatccaaatttgaagagaaaatgtatttctttaggtttcaaacactgtaatagatataaagcaaaaataaaaacctgttgcaaagttctaaa

SEQ ID NO: 81448 - DNA, 508 bp, Homo Sapiens
  misc_feature (130)..(130): n is a, c, g, or t
cccgtccagagcctgaagggcgaggatgctgaggaatccttggaggaggaggaggcgctggaccctctgggcattatgcgctccaagaagcccaagaaacatcccaaagtggccgtgaaagccaagcccntcccccggctcaccatctttgacgaggaggtggaccctgatgaggggctctttggcccgggcaggaagctgtctccacaggacccctcggaggacgtgtcatccatggaccccctgaagctatttgatgatcctgacctcggcgggccatccccctgggtgactccctcctgctgccggccgcctgtgagagtggagggcccacacccagcctcagccacagggacgcctccaaggaactgttcagacaaattcaaaaagagccgtaacactgggattagcttcttgagagcaggaaccacattcattctttgtgtctgccctgtgactatccagggagtagttggacttcctcataataaagaatgttctgatagcc

SEQ ID NO: 81449 - DNA, 1555 bp, Homo Sapiens
  misc_feature (1303)..(1303): n is a, c, g, or t
  misc_feature (1389)..(1389): n is a, c, g, or t
  misc_feature (1407)..(1408): n is a, c, g, or t
  misc_feature (1502)..(1502): n is a, c, g, or t
  misc_feature (1511)..(1511): n is a, c, g, or t
cgcccggagtccccgccgcgtcatgcagtccccggcggtgctcgtcacctccaggcgacttcagaatgcccacactggcctcgacctgactgtgccccagcaccaggaggtacggggcaagatgatgtctggacacgtggagtaccagatcctggtggtgacccgtctggctgcgttcaagtcggccaagcacaggcccgaggatgtcgtccagttcttggtctccaaaaagtacagcgagattgaggagttttaccagaaactgagcagtcgttatgcagcagccagcctccccccactacccaggaaggtcctgtttgttggggagtctgacatccgggagaggagagccgtgttcaatgagatcctgcgctgtgtctccaaggatgccgagttggcaggcagcccagagctgctagagttcttaggtaccagatccccagggctgcagggctcaccagcagagattcctctgtcctggatggcacagacagtcagacagggaatgatgaagaggctttcgacttttttgaggagcaagaccaagtggcagaagagggtccgcccgtccagagcctgaagggcgaggatgctgaggaatccttggaggaggaggaggcgctggaccctctgggcattatgcgctccaagaagcccaagaaacatcccaaagtggccgtgaaagccaagccctcgccccggctcaccatctttgacgaggaggtggaccctgatgaggggctctttggcccgggcaggaagctgtctccacaggacccctcggaggacgtgtcatccgtggaccccctgaagctatttgatgatcctgacctcggcggggccatccccctgggtgactccctcctgctgccggccgcctgtgagagtggagggcccacacccagcctcagccacagggacgcctccaaggaactgttcagagttgaagaggacttggaccagattctgaacctgggagctgagcccaaacccaagccccagcttaagcccaagccaccagtggcagctaagccggtgatacccagaaaaccagctgttccccccaaagcgggcccggctgaagctgtggctgggcagcagaagccgcaggagcagatccaagccatggacgagatggacatcttgcagtacatccaggaccacgatacaccagcccaggccgcccccagcctcttctgacccttccatgctgggccctggcccagcaggcctgtctgtggggacatcggtgtgaaggggaagggactgggcccctgcagggtcaaaaccctccccacccccnaggggaggccagggcagaagcctggggtcacagcacccagaaactgcatgggttcccatttttctccgggggctggtgggggccanaagtaaaaagcctttgcnnggcttgcggggaaccggctcctcacccctagggaagcaaaaaccccaatgggggtccttaatccccccgggggaacatttaaaagggaaagggnaaagggtgnttgggggaataccctttgcccaacccagaatgggccccaaccct

SEQ ID NO: 81450 - DNA, 701 bp, Homo Sapiens
  misc_feature (13)..(13): n is a, c, g, or t
acacaaagcaggngatatggagaggtgtctgcactagagtctggatggtgctactgacaacagtgagtgttcagggtgactgctagtgctgtgcagtgctgagcgccacattccatgggaccacgtgtcctttaataaacatattcagcgtgcgcttatggaactcatggcttctaaagcacaaggcgtatgtttcaagcatagtgctatccctgagcagcatttgtaagcctccagtctgcaacagtgggattacctaccaggctcagctgatggaccgggatgatattggaagagaggctgccagcctgaagacttacctggaaacattttctcgttggtctggttttaataaaatcaccagattccactagaaggaaaccaaagattacaaaggtccaaattaatatatgacaaagtagaaacggaaactgggaggaaatgaggtgaaacacaggggatgatgtattggaaatagggaatgaaaaccgtacagagtagaaacacctgaaagcagttctggaaactccacatgctcctgctgtaccaagacctggtcctatgtgtgctgaccttgttcttctgctcacatctgccacatctgcaaatgtggcaacattttagctgttttctattaacactgaagtactctgagagcttggaaattttcaagtgcaaaatcaggtccagagaacagtaaa

SEQ ID NO: 81451 - DNA, 742 bp, Homo Sapiens
  misc_feature (482)..(491): n is a, c, g, or t
ctttgataatcgttcattgtctctacattatagcaccataattttgttaaggcaacaaaattttttactgacttttgcacgttaaaaccacttataacctaaggaattttggttaggtaaagaattatatccatatgaataaacactgccaaaatatcctaaagtctatataaaaagtatgcattacaaattaatgagtgtaaattgtgagactactctcacacaatccctgaaatgattatttaaagactactcttaactattactgagatagtgcttggtccctgaatgatgtaatccttgtgcaaagacccctcaagatacgtcaaagcacaaaagataacagaggaaaggaaacaaacgtattacaacttctgatataaacattcctcataagtttggaatttttcataactcctggggtaaaagttcttagaatatgtcactttctgggaaatttaacagcaaaagttttagctacnnnnnnnnnnataatgcataagtgtacaaagttcaacatgtaacaaatataaagatgccaaagggtaaataaagcgatgcaaatttacataacaaagccatttgataaatgccactatcagctattactatatattccatcctataatctcataaatcaaagcttttaactgcctagactcatatgtgactgtattctttccaacatgcattctttcttcttccaggggttgttcaatacagcaggtatcctcgtgccgaa

SEQ ID NO: 81452 - DNA, 766 bp, Homo Sapiens
  misc_feature (17)..(17): n is a, c, g, or t
  misc_feature (56)..(56): n is a, c, g, or t
agactttcagtaactcntgtgtggcaaattttgacattcactctatccttcgtctntgtaaggacatatcaagacttagaaggctttgattacacatacggatggcatgagtcgtgatataaaatagtattgttttcacgtgtacttcgaagtcatctcatttgaaattaactgtcataattgactatttggaatattcaacctaaatactacccgctgctgtggtgacggggggtggaggaagcgtggtggaaccccaacacctagtgaggggtggctgattaataccacggctcacaacataacagagcggctcattccatgaacaaccccggggggatttcgaattctatcatctgggcaaaagatgtgatgagtgtaacttcctgttttctccaaactaaaacactacgcagattcctgtaccgctctgggacagaaatcctcagccagagcagaggccgtccccagagtccacactgtttcctgcataaagtgggttatctcagaagaaacatcccactggtctgtgtgatccttctattgaaatgtggtcttttatctacatctaagtatctctagaagtaatgcgtttgtatgtacttgtcactcagatatgtaatcccttaatttgtgcggggttttggggtgtgaaaaattcttggtttatatcctacacttttaaataacctcgtcaaaacttacatgtatttaacacctttttttgtgagcacatggtaaggttggaagtaaaaatggaaggttt

SEQ ID NO: 81453 - DNA, 575 bp, Homo Sapiens
cattgatactaaggattattctactcataggctttaccaagttttggagggagagaataagaaaaaagaattgtttctaactcatggaaaccttgaggaagtggctgagaaattgaaaccgaatatttctttagtacaagatcagttggcagtatctgctcaagaacattctttctttctgtccaaacggaataaggatgtggacatgctttgtgatactttgtatcaaggaggaaatcagcttttgcttagtgatcaggagttaacagagcagtttcataaagttgaatctcaactgaataagctaaatcatctcctcactgatattcttgctgatgtgaagacaaaaagaaaaactttggcaaataataaattacatcaaatggaaagagaattctatgtatattttttaaaagatgaagattatctgaaagatattgtggagaatttagaaactcaatcaaagattaaggctgttagtcttgaagattgaaaattactgaaaactgaatctttattacgtgtcctcttttatttattagaagactgtgtataataaacactactaaattttt

SEQ ID NO: 81454 - DNA, 762 bp, Homo Sapiens
  misc_feature (37)..(37): n is a, c, g, or t
ccaagctgacattgttagctcttcaggccactggttntggaggcagaagtccagagatactggctctgccaagctgtcgtactgggctgtggcacagccttcgagacaacacgggtgtatctctgatcctgccctacctaggcttcaaggggcttctgtctggagaaatgccctcaaagggtaaccagtaggtgtggcattgaattggccagtgttagcatctacagccatcaccgagatgagtccactgccgttgcctgcccgagggccccctaaggttatagacggtatcagcagggaggccgtcccgctggttttctaggagagcccacaggaggaagggagcctcttcaggggcactggaatcttttgtgccaggggcttcttttcatcagagccggggagtacattgcagtgacttcttaaacatttgtgtgggacagacgagcgtgagggaggttttaagccaggcacaaagttagtttccaatactagttaataaatctatttttcttcatttcctttttttgcacagaagctggtaatctaggacctacgtgtgaacaactttatatgaatattttttgtacttggtttacttgggttggtatgatacattatatttaagttccttgaacactgtggatcccctaatgtgtatgaatgactgaggctttgtaaattaagggacgtttgtgtgaataaagttatttgatggggtcaaaaaaccgcgccccaaaacatagaatacgcttgtcgggc

SEQ ID NO: 81455 - DNA, 701 bp, Homo Sapiens
tgtggcagtgccaccgggcaagcagacaacataattatttccagaaaacaacagaatgaacatcatcatgaatacatgaatcggctgtgatgtgtgaactgctaagggccaaatgaacgtttgcagagcagtgggcacaatgtttacaatgtatgtgtatgtcactttcggtacctgtgaatgcatggggacgtgctgaacccgaaaaaaagtgcctttccataaggactgcaatagagagggcaatttaccctggtggtacacggaacctagattcactcctgccatgccttgccaatagtaagctgcagggtggaacaagaaatcacttgctctgccagaccaaaaagaggcaatgggtgtgtcagctgggtagatacaaaccctgaaaagagaatccatgtgctactggcaggcaacattttttaaagctatatcagaaaccctcatatttggggtttcttttcaggaaacattcctgtggagggaaaacgaatatgaagataattttcagctaattatctgggtgacccagaatcgtgtatatggctataggatagacttcttaataatggcaagtgacgtggccctggggaaaggtgctttatgtaccgtgtgtgcgtgtatgtgtgtgtatctatacaagtttgtcagctttggcatgactgtttgtctcgaaaaccaataaactcaaagtttag

SEQ ID NO: 81456 - DNA, 724 bp, Homo Sapiens
  misc_feature (89)..(89): n is a, c, g, or t
  misc_feature (151)..(151): n is a, c, g, or t
ctccagaacattctcagagaatttacacgaactaaaacaggaatgaatgctctcagagactttttctcaggtaaatgtatttagtagtntgagtagttgatctgcaaaaactttaactttaattaactacatagatgaatattttttattntgaaatttgagaatgtcctaagaggatgtctacaggatatgaaactactgggtgcaggaaaattttttaaatgttagcaaattgtggcaagaggaaaacaaacagtggagaaaactgtggtagagaaagtaaagaaggggcaggagaaagctgtaattataacctgggcctgcctttgttctcatgaagccaggggcctctccatatcctatacttgctcttacgctaataacaaaccaaatgctgcaaaataaaagtaataatgacccaaactaatttaagtcttttgtttaaggagtaaatgagagaaacattttagcttcttaatcaaggagtgctataatttcaaggcatcttaatataattcacttaccctaaagcaattgtgcaataagcaaattataaaaggaaaacaacaaaggttaactttctacaggggccaatagacaagatctgtggagcacagcaattaaccttcacatactggagtcttgtttaaaaggccatcaaaaactcagattactgaaaatcacaaatgtcaccaacaaaaggaatgttgattagagtcaaaaa

SEQ ID NO: 81457 - DNA, 867 bp, Homo Sapiens
  misc_feature (63)..(63): n is a, c, g, or t
  misc_feature (458)..(488): n is a, c, g, or t
gatatgcatatttccgttgttcatgcaacaacaacacgggtatgggaacaagttgatgggaanaatgttagagaaggctaagacagttattcatgcctaaaataataattgatgcctttaggaaatatttttattttacataatgctgtcagctagtggccctatttcatactgagccaactgggaacaatacttgacttttacattactgaatcaaaaattccacatttaacattctagaatcattttctgaaattacatatgtttaagcctgactcaatgatatttaacattaccccagaactaaaagagtatgtatcctcaaccatcattggtatgctttgcccagtccttgcctagacctaataaaaatatgagatacacctaagtgggaaagaattcactaaatgccaacatggaaaaactaaaaggcattcgggttcaagttggtgtttggnnnnnnnnnnnnnnnnnnnnnnnnnnnnnnngcacatcagtcactatccataaaaaagaaacctacattattttaggtatttaggataatttaaggacatttatagattccttagtgaaccacaaatatttttctataaaatcaaaagcttatcataatgtggacataagaacaaaagtgttgtctgagtattactgaacacaattctatgcaaatctatttatttgataaaactgcattgttaagccaaagacactacctaaattcagccaaaagttaacagttctgaaattttctttgagaaaaagagtatgagtactatttttacatttaaaatgctcatatttcattgacaattcactatcttaagagaaatgtcctatacaaaaaacataaaaagtccatagccg

SEQ ID NO: 81458 - DNA, 653 bp, Homo Sapiens
ttcggcacgaggagaccaagcaaataggaattattttttgcggtggagaaacaagtgcctggggagaatatatgaccgaagattctgtagtttatgacttaaacaggcccagaatttagtttttcaaatcctagtagtgtgttttttctgtcttgccaaaaagcagcacacctcaaagaagggaaaaggtgtgaattgtgggtatattagggttattagtgcttccgagggaagataggcatcactacttcccagagatgcccctggaaatgatatagaggatgttgaagaattcaatgtgatgacggaatgaggcatttgtagtaatgctgagaacagaaaaatggactaagtggaaaatttgtaagcatgactttgaatgtagatttgttatgtgaacaaactacctagtttatttttagttcaatacaataattgttttaagaaaacatgaaataactactcaatataaaatgcattttaaaactgtaaataagtcaaaactttattctttttatcataatggtcactagctgagtcacaaatactagtacactcttctgagccatcttctttattcatatctacattgtgtggttaggcatctgttatgtggtgtcacatgataaaataaagaacttcttcccatacca

SEQ ID NO: 81459 - DNA, 685 bp, Homo Sapiens
  misc_feature (77)..(96): n is a, c, g, or t
gaggcagagtcttgctctttcgcccactgtactccagcactccagcctgggcgacagagtgagactctgtctctacnnnnnnnnnnnnnnnnnnnngtaacccaagggagggagctaccctctagtcgggcagctgatactgcttccttgcatggatacatgggagggagacgttatagattaagaaatgatagcaagataaacaaaatgatttgttgggtatcttttactttacatttgctatttacagaggagtgttgtatacatagatattattttatgtcacactgcttcaatgataactatatccatgtgtttgtatccatgtttttatccattcaactgtattaaaaggtgttgggacaggaaaaaaagttgtattactaagtacacacaaagaggttcttcaggtaaacttcaaagtattagataatactttaataacatgggcaaagaggatgcggcagagtaagaagtgatgaaaattatgcagcttcatgtttaaagtctgggctataagagtcctgagagaaggaaagtatagaagaaccttctgagttgaagggccaggactagagacatgagctcctcctttatggatatgacagattctaagccaagtagtgcttgctagcaagactgagatgtaaaataaaaaagtttcaagcaatatatttcccagctc

SEQ ID NO: 81460 - DNA, 565 bp, Homo Sapiens
  misc_feature (551)..(551): n is a, c, g, or t
ggtgccctggagaaaaggaaaagatagataatgctgtaaacgtgcgaacaagagacaacaaaattcatggagagattttagtaacttctgccattgataaactgaagaatctcaggaagacacggacactcaatgctgaggaggccttttgaagtccttccctgatatttgcttctgtgtaactttgttttgacccttaaaaatgtatttttcttaacatgttagtacttctacgactttggagccactgatgggtccactcatggcctcagctgagaaaggagacgatgaacgtgtagctgacatgcacgaagtttaatttactcatgtccacgggggacgtttagagggcacgtgggaaattttccagcaatcaatgccttgagaaacttaaatggggaaatattattcatcgagaaagtgaaacaaaacactaggaaatgattatgaaatgttagtgattttcaaaagatgggcttcaaataaaagtctgcagagttttttttaaataggagggaaaatcttattttctaatatgtctcaggtatttntatgacttctacta

SEQ ID NO: 81461 - DNA, 788 bp, Homo Sapiens
cagtcgacggtaccggacatatgcccgggaattcggccattacggccgggtgaaatcactgcttataaatgtgtgatttttttaaaacgaccaaaactgttctgaagaatgtacccaggtgccttttttgctaatttgatactataatagaatgagacataaaatgaattaatggaaacatatccacactgtactgtgatataggtactctgatttaaaactttggacatcctgtgatctgttttaaagttggggggtgggaaatttagctgactagggacaaacatgtaaacctattttcctatgaaaaaaattttaaatgtcccacttgaataacgtaattcttcatagtttttttaatctatggataaatggaaacctaattatttgtaatgaattatttagacagttctaagccctgtcttctgggagttatcaattttaaagagaacttttgtgcaattcaaatgaagtttttataagtaattgaaaatgacaacacaataacactttctgtataaaagtatatattttatgtgatttattcctactaaatgaaagtgcactactgcctcatgtaaagactcttgcacgcagagcctttaagtgactaaggaacaacatagatagtgagcatagtccccacctccacccctcacaatttatttgaatacttcaattgtgcctctcaattttttgtaatgctaaaaaatcagtatctagatggtttttaaatgtattctctggaaattgttttatgtaaaataaatgttacttaattccattaa

SEQ ID NO: 81462 - DNA, 1008 bp, Homo Sapiens
  misc_feature (43)..(43): n is a, c, g, or t
  misc_feature (65)..(65): n is a, c, g, or t
  misc_feature (103)..(103): n is a, c, g, or t
  misc_feature (105)..(584): n is a, c, g, or t
  misc_feature (615)..(655): n is a, c, g, or t
acagttccgtaacgcaggtcgaacagagagcgcagaggagctnccagggggacgcctgtatcttntagtctgtcggtttcccacctctgactgagcgtcgatntnnnnnnnnnnnnnnnnnnnnnnnnnnnnnnnnnnnnnnnnnnnnnnnnnnnnnnnnnnnnnnnnnnnnnnnnnnnnnnnnnnnnnnnnnnnnnnnnnnnnnnnnnnnnnnnnnnnnnnnnnnnnnnnnnnnnnnnnnnnnnnnnnnnnnnnnnnnnnnnnnnnnnnnnnnnnnnnnnnnnnnnnnnnnnnnnnnnnnnnnnnnnnnnnnnnnnnnnnnnnnnnnnnnnnnnnnnnnnnnnnnnnnnnnnnnnnnnnnnnnnnnnnnnnnnnnnnnnnnnnnnnnnnnnnnnnnnnnnnnnnnnnnnnnnnnnnnnnnnnnnnnnnnnnnnnnnnnnnnnnnnnnnnnnnnnnnnnnnnnnnnnnnnnnnnnnnnnnnnnnnnnnnnnnnnnnnnnnnnnnnnnnnnnnnnnnnnnnnnnnnnnnnnnnnnnnnnnnnnnnnnnnnnnnnnnnnnnnnnnnnnnnnnnnnnnnnnnnnnnnaagaattcggcacgaggcgcggctgtaggcnnnnnnnnnnnnnnnnnnnnnnnnnnnnnnnnnnnnnnnnncctgattacaaaagcaaaacctcattttttggtctttgaagaccatggagtatgacttctaagagcaaacattaacatcagatttgtatgtctcactacaaaaagaacccatcactgatgtaagacctactcatgatactgaagtagattttttaaattaaaaaataaaagtagtcatttaaaatggaggaattgtagatgagtatggaaaaatccattcacaaagttcactatttgcattttctaaaagaattttatgtaataaaatagaaaactaatgatttatagagatgtgcataaactcaagagaggaatatggaagggaaaactgtgttatattcccatttaaattt

SEQ ID NO: 81463 - DNA, 1303 bp, Homo Sapiens
  misc_feature (27)..(27): n is a, c, g, or t
  misc_feature (29)..(29): n is a, c, g, or t
  misc_feature (38)..(38): n is a, c, g, or t
  misc_feature (80)..(80): n is a, c, g, or t
  misc_feature (123)..(123): n is a, c, g, or t
  misc_feature (143)..(143): n is a, c, g, or t
  misc_feature (153)..(154): n is a, c, g, or t
  misc_feature (156)..(574): n is a, c, g, or t
  misc_feature (740)..(748): n is a, c, g, or t
tccgtagcgcaggtcgaacaggagacncngaaggactncaggggaacgcttgtatcttatgtcctgtcggttcgcacctntgactgagctcgatttgtgatctcgtcagggggcggactatgnaaaaacgccagcacgcgccnttttacgtcnntnnnnnnnnnnnnnnnnnnnnnnnnnnnnnnnnnnnnnnnnnnnnnnnnnnnnnnnnnnnnnnnnnnnnnnnnnnnnnnnnnnnnnnnnnnnnnnnnnnnnnnnnnnnnnnnnnnnnnnnnnnnnnnnnnnnnnnnnnnnnnnnnnnnnnnnnnnnnnnnnnnnnnnnnnnnnnnnnnnnnnnnnnnnnnnnnnnnnnnnnnnnnnnnnnnnnnnnnnnnnnnnnnnnnnnnnnnnnnnnnnnnnnnnnnnnnnnnnnnnnnnnnnnnnnnnnnnnnnnnnnnnnnnnnnnnnnnnnnnnnnnnnnnnnnnnnnnnnnnnnnnnnnnnnnnnnnnnnnnnnnnnnnnnnnnnnnnnnnnnnnnnnnnnnnnnnnnnnnnnnnnnnnnnnnnnnnnnnnnnnnnnnnnnnnnnnnnnnnnnaagaattcggcacgaggccgcggctgtaggcttttagtgacatttatgatgtttgtcttgtatgttaactgtccaacaaactgtgggtttattctaagtttacaattattgagaactgattgaggttaagatttcatgaagaaagcatgtattgtgtggaagtaannnnnnnnnaatttatactgacctacatttatacgaagaattctgtacatgttaaaagtaaggatgaccaaatgcaaatttaatgagtgggccaattaagaaagatacatatgcacttttactgtgtaacttttgtatgctgaatggtacatatatttttttgcttttgagggaattaataaggtataattaattgtgtcttaacttttcaaagaaatttttagatggaggcaactgggatgtttgtgataatagatgagaaagacatccttgattgtagttaaattggtttggattacagatattcattattgaattgactcctattttctcacactttggaaaagacacctgaacaataaatgaatcctggatagtctactctccttcaaacaattaactgatacttgcctttgggagatgcatacaaaaggagagaacccttagactatgtcaggtcacactaggaacctcccctcactccccgtttttcttcattgtgtttcagttactgtactaacattgtggatgatactgaaattctgcataatgtgaacaggataa

SEQ ID NO: 81464 - DNA, 484 bp, Homo Sapiens
  misc_feature (44)..(56): n is a, c, g, or t
agaatattgaggaaagaatattccctgcagaagccctgtgttgnnnnnnnnnnnnncgatttataaatagtttatcctgttcacattatgcagaatttcagtgtcgttaatccacaatgttagtacggtaacagaaacataaaggagaaaaaaggcaggtggggggaggttcatagtgtggcctgacatagtctaagggttctctcctgtagtatgcatctcctgcaggcaagtattaatatcacttcattgtttgaaggacagtacactatccaggattcatttattgttcaggtgtcttttctaaagtatgagaaaacaggaataaattcaataatgaatatctgcaattcaaaccaatttaactacaggtcagtggtgtctttcttatctattatcacaaacatcccagttgcctccatctaaaaatttctttcaaaagttaagacacaattaattatatcttattaattccctcaaaagc

SEQ ID NO: 81465 - DNA, 1035 bp, Homo Sapiens
gggggggcgcagccgcggtggctgggcgcggagtgtgcgtggcctgagccgtgcgggtgactgcttcagggcttctccgcgactggaccgggcgccgctcgaaagcacgccctccattcgcactgcttgttgggctcatcatgaagcgcttgggctccgtgcagcggaaaatgccgtgtgtgtttgtgacggaggtgaaagaggagccttcctccaaaagggagcatcagatcagccatacctctgggctcgactagatagaaaacccaacaaacaagctgaaaaaagatttaaaaattttctacattcaaaagaaaacccaaaagaatttttttggaacgttgaggaggacttcaaaccagctccggagtgctggataccagcaaaggagacagaacaaataaatgggaaccccagtgcctgatgaaaatggacacattcctggttgggtaccagtagagaaaaacaacaaacagtattgctggcattcctctgtagttaattatgaatttgaaattgccctggtactaaaacatcatcctgatgattctggacttttggaaattagtgcagtgccactttcagatctcttagaacaaacactggaactcataggaacaaatatcaatggaaacccatatgggttagggagcaagaaacatccattacatcttcttataccacatggagcatttcaaataagaaatctaccttcattgaagcacaatgatctcctgtcctggtttgaagattgcaaagagggtaaaattgaaggaatagtgtggcattgcagtgatggctgtttaataaaggtccatcgccatcatcttggcttatgctggccaattccagatacttacatgaattcaagaccagttattatcaacatgaacctgaacaaatgtgactctgcctttgatattaagtgtttgtttaatcattttttaaaaatagataatcagaaatttgttagactcaaagatataatatttgatgtataaaatgcaaataaaattagtttatcattatattcta

SEQ ID NO: 81466 - DNA, 707 bp, Homo Sapiens
  misc_feature (277)..(340): n is a, c, g, or t
agatccagcaatttgcggtttagatgaggcctgcatattccaaaagtcccagaatcatcaggatgatgttttagtaccagggcaatttcaaattcataattaactacagaggaatgccagcaatactgtttgttgtttttctctactggtacccaaccaggaatgtgtccattttcatcaggcactgggttcccatttatttgttctgtctcctttgctggtatccagcactccggagctggtttgaagtcctcctcaacgttccaaaaaaattctnnnnnnnnnnnnnnnnnnnnnnnnnnnnnnnnnnnnnnnnnnnnnnnnnnnnnnnnnnnnnnnntatctagtcgagcccaaaggtatggctgatctttataggtagtaacataacaacatgttccatccactttttctgttggaattgcactgtatatagtctgcatctaagtggccttgtgacttacagtttcagttgccaaaactttaaatggctgatgctcccttttggaggaaggctcctctttcacctccgtcacaaacacacacggcattttccgctgcacggagcccaagcgcttcatgatgagcccaacaagcagtgcgaatggagggcgtgctttcgagcggcgcccggtccagtcgcggagaagccctgaagcagtcacccgcacggctcaggccacgcacactccgcacgacagcccaac

SEQ ID NO: 81467 - DNA, 1221 bp, Homo Sapiens
  misc_feature (104)..(104): n is a, c, g, or t
  misc_feature (192)..(202): n is a, c, g, or t
  misc_feature (207)..(207): n is a, c, g, or t
  misc_feature (229)..(229): n is a, c, g, or t
  misc_feature (316)..(316): n is a, c, g, or t
  misc_feature (486)..(486): n is a, c, g, or t
  misc_feature (655)..(655): n is a, c, g, or t
  misc_feature (666)..(692): n is a, c, g, or t
  misc_feature (1029)..(1050): n is a, c, g, or t
  misc_feature (1095)..(1170): n is a, c, g, or t
ctgtcatcatggcaccccgtttacactttgctcggctgtatgtttgattttgacggatacattcacacagaacagttgacatgatacgaattatacgactcctntaggatttgccctcgagccaagaatcggcaggaggagtgtagtataatgtattttttaaagggaaacaaaccgacaacaaaaggaagnnnnnnnnnnngaccntccgtgaaaaattaatgctttntcgtaatgattctctatgctaatgctctctcgtctgtctgtctgtttgcccaatttccccccacccaccattgtgcgtttctgattnccaaatgtctccaactccctcacgaggtggggctcaggctggaggaggagggattaagatccccttgctccactaaggcccaagctctttctctcggcaccttttagacttgaatgggaggctgctaacccgccctctccagtccaccccggtaaaagagctgttccccnacccccagggagctcctgtccctgtcagcctttgctgtcccctgtccccaacggagactctgtcacccctgggctccccctgccatcgtgtgcttcacgtggccccatgcatgcccgcctctctgcatggtctcttgggaaaagagagatgtgtcgcctccgccagtcngaatggccttnnnnnnnnnnnnnnnnnnnnnnnnnnnatgtgaccactgcaacgaagacactccttctgtccccacctgctccgaagacaaaccaacctccgtttcttttataaacagtcggctttttcttaataagccctcactgtacagaacagcccgttgatggtttatttggggtccccctctccccccagcccttttttctgttggtttagcacaaatacttccctcctccggcacctccaaacctaccccacagtcagtgtacttgttttatatatatttaatcttattcaatggaaaccatgcttttgtcgttttatactttgctaggtagactttattacccccccactatgccctcatttttttnnnnnnnnnnnnnnnnnnnnnnctgggttccagtcttaattcattttccgtgccaggttttatttcnnnnnnnnnnnnnnnnnnnnnnnnnnnnnnnnnnnnnnnnnnnnnnnnnnnnnnnnnnnnnnnnnnnnnnnnnnnnccccctccggtcccatacttcacagcactctggtgcgggaagaagcaggag

SEQ ID NO: 81468 - DNA, 545 bp, Homo Sapiens
  misc_feature (160)..(181): n is a, c, g, or t
  misc_feature (226)..(300): n is a, c, g, or t
  misc_feature (354)..(415): n is a, c, g, or t
gcttctgcttcttccctcctccggcacctccaaacgtaccccacagtcagtgtacttgttttatatatatttaatcttattcaatggaaaccatgcttttgtcgttttatactttgctaggtagactttattacccccccactatgccctcatttttttnnnnnnnnnnnnnnnnnnnnnnctgggttccagtcttaattcattttccgtgccaggttttatttcnnnnnnnnnnnnnnnnnnnnnnnnnnnnnnnnnnnnnnnnnnnnnnnnnnnnnnnnnnnnnnnnnnnnnnnnnnncccccctccggtcccatacttcacagcactctggtgcgggaagaagcagaagcnnnnnnnnnnnnnnnnnnnnnnnnnnnnnnnnnnnnnnnnnnnnnnnnnnnnnnnnnnnnnngaagaaacaagacatgccacctttcccctcgcactgttgcttttcctgatggttaatactactgtcacgtagctgtgtacaaagagatgtgaaatactttcaggcaaaaataaactgtaagtgactcatc

SEQ ID NO: 81469 - DNA, 524 bp, Homo Sapiens
  misc_feature (138)..(159): n is a, c, g, or t
  misc_feature (204)..(279): n is a, c, g, or t
  misc_feature (332)..(393): n is a, c, g, or t
ggcacctccaaacctaccccacagtcagtgtacttgttttatatatatttaatcttattcaatggaaaccatgcttttgtcgttttatactttgctaggtagactttattacccccccactatgccctcatttttttnnnnnnnnnnnnnnnnnnnnnnctgggttccagtcttaattcattttccgtgccaggttttatttcnnnnnnnnnnnnnnnnnnnnnnnnnnnnnnnnnnnnnnnnnnnnnnnnnnnnnnnnnnnnnnnnnnnnnnnnnnnnccccctccggtcccatacttcacagcactctggtgcgggaagaagcagaagcnnnnnnnnnnnnnnnnnnnnnnnnnnnnnnnnnnnnnnnnnnnnnnnnnnnnnnnnnnnnnngaagaaacaagacatgccacctttcccctcgcactgttgcttttccctgatggttaatactactgtcacgtagctgtgtacaaagagatgtgaaatactttcaggcaaaaataaactgtaagtgactcatc

SEQ ID NO: 81470 - DNA, 462 bp, Homo Sapiens
  misc_feature (328)..(362): n is a, c, g, or t
accctttgtggattttctttgcctttgtgtttgatgccgtcgtgtgggaaaagtcaactccgatgccaccattgcgggccggacgaaggatgctttcttcctagaggctccgagctgagctgcgaactcgccccccgcccttgggacaagaagacccagtcacatcactgcacccgtcctgtgtcctcaccattgctatgcaaagtgattcttgttgtacataagatttaaataatgcacctggcgtgtagtactgtataaaccagtcagctgtcgggttagtggtagtattattgttatttttttaaaggaaacaaacagacaacgnnnnnnnnnnnnnnnnnnnnnnnnnnnnnnnnnnnacctggcgtgtagtactgtataaaccagtcagctgtcgggttagtggtagtattattgttatttttttaaaggaaacaaacagacaacaaaaagaagaaa

SEQ ID NO: 81471 - DNA, 369 bp, Homo Sapiens
  misc_feature (50)..(83): n is a, c, g, or t
gaccactaacccgacagctgactggtttatacagtactacacgccaggtnnnnnnnnnnnnnnnnnnnnnnnnnnnnnnnnnnacggtcaaagacttcataaataagaggcgggtcccagacccgcaatttgtcaacatgtcttaaataggtgcattatttaaatcttatgtacaacaagaatcactttgcatagcaatggtgaggacacaggacgggtgcagtgatgtgactgggtcttcttgtcccaagggcggggggcgagttcgcagctcagctcggagcctctaggaagaaagcatccttcgtccggcccgcaatggtggcatcggagttgacttttcccacacgacggcatcaaacacaaagg

SEQ ID NO: 81472 - DNA, 382 bp, Homo Sapiens
  misc_feature (13)..(13): n is a, c, g, or t
taccaataatccnaccactaacccgacagctgactggtttatacagtactacacgccaggtgggggcgggagggcggtggggtcgggcgggggggacggctcaaagacttcataaataagaggcgggtcccagacccgcaatttgtcaacatgtcttaaataggtgcattatttaaatcttatgtacaacaagaatcactttgcatagcaatggtgaggacacaggacgggtgcagtgatgtgactgggtcttcttgtcccaagggcggggggcgagttcgcagctcagctcggagcctctaggaagaaagcatccttcgtccggcccgcaatggtggcatcggagttgacttttcccacacgacggcatcaaacacaaagg

SEQ ID NO: 81473 - DNA, 501 bp, Homo Sapiens
  misc_feature (116)..(137): n is a, c, g, or t
  misc_feature (182)..(256): n is a, c, g, or t
  misc_feature (310)..(370): n is a, c, g, or t
ggcacgaggactttttttatatatatttaatcttattcaatggaaaccatgcttttgtcgttttatactttgctaggtagactttattacccccccactatgccctcatttttttnnnnnnnnnnnnnnnnnnnnnnctgggttccagtcttaattcattttccgtgccaggttttatttcnnnnnnnnnnnnnnnnnnnnnnnnnnnnnnnnnnnnnnnnnnnnnnnnnnnnnnnnnnnnnnnnnnnnnnnnnnncccccctccggtcccatacttcacagcactctggtgcgggaagaagcagaagcnnnnnnnnnnnnnnnnnnnnnnnnnnnnnnnnnnnnnnnnnnnnnnnnnnnnnnnnnnnnngaagaaacaagacatgccacctttcccctcgcactgttgcttttcctgatggttaatactactgtcacgtagctgtgtacaaagagatgtgaaatactttcaggcaaaaataaactgtaagtgactcaaaa

SEQ ID NO: 81474 - DNA, 388 bp, Homo Sapiens
  misc_feature (61)..(95): n is a, c, g, or t
aacaataatactaccactaacccgacagctgactggtttatacagtactacacgccaggtnnnnnnnnnnnnnnnnnnnnnnnnnnnnnnnnnnncggtcaaagacttcataaataagaggcgggtcccagacccgcaatttgtcaacatgtcttaaataggtgcattatttaaatcttatgtacaacaagaatcactttgcatagcaatggtgaggacacaggacgggtgcagtgatgtgactgggtcttcttgtcccaagggcggggggcgagttcgcagctcagctcggagcctctaggaagaaagcatccttcgtccggcccgcaatggtggcatcggagttgacttttcccacacgacggcatcaaacacaaaggcaaaaaaa

SEQ ID NO: 81475 - DNA, 546 bp, Homo Sapiens
  misc_feature (217)..(302): n is a, c, g, or t
  misc_feature (355)..(416): n is a, c, g, or t
tagcacaaatacttccctcctccggcacctccaaacctaccccacagtcagtgtacttgttttatatatatttaatcttattcaatggaaaccatgcttttgtcgttttatactttgctaggtagactttattacccccccactatgccctcatttttttaaaaaagtaataaaaatagaaactgggttccagtcttaattcattttccgtgccagnnnnnnnnnnnnnnnnnnnnnnnnnnnnnnnnnnnnnnnnnnnnnnnnnnnnnnnnnnnnnnnnnnnnnnnnnnnnnnnnnnnnnncctcctccggtcccatacttcacagcactctggtgcgggaagaagcagaagcnnnnnnnnnnnnnnnnnnnnnnnnnnnnnnnnnnnnnnnnnnnnnnnnnnnnnnnnnnnnnngaagaaacaagacatgccacctttcccctcgcactgttgcttttcctgatggttaatactactgtcacgtagctgtgtacaaagagatgtgaaatactttcaggcaaaaataaactgtaagtgactcatc

SEQ ID NO: 81476 - DNA, 527 bp, Homo Sapiens
  misc_feature (146)..(167): n is a, c, g, or t
  misc_feature (203)..(284): n is a, c, g, or t
  misc_feature (340)..(401): n is a, c, g, or t
ccttctccggcacctccaaacctaccccacagtcagtgtacttgtcttatatatatttaatcttattcaatggaaaccatgcttttgtcgttttatactttgctaggtagactttattacccccccactatgccctcatttttttnnnnnnnnnnnnnnnnnnnnnnctgggttccagtcttaattcattttccgtgccaggnnnnnnnnnnnnnnnnnnnnnnnnnnnnnnnnnnnnnnnnnnnnnnnnnnnnnnnnnnnnnnnnnnnnnnnnnnnnnnnnnnttctcccctccggtcccatacttcacagcactctggtgcgggaagaagcagaagcnnnnnnnnnnnnnnnnnnnnnnnnnnnnnnnnnnnnnnnnnnnnnnnnnnnnnnnnnnnnnngaagaaacaagacatgccacctttcccctcgcactgttgcttttcctgatggttaatactactgtcacgtagctgtgtacaaagagatgtgaaatactttcaggcaaaaataaactgtaagtgact

SEQ ID NO: 81477 - DNA, 761 bp, Homo Sapiens
cttaggcaaggggtccaggtcagagtttagagctttcaaatcccaacttgcccctggggattgcgcggctgatgtttagaacgcctagtcaagccaaccggctcgctcttgtttcagcaaaccctgacttacgtctcctatttgacttgaggcggcacagtggccaagtcgattggccgtggcaagtgaccctccctgtggctgaagtgttctgaggactggcgagagaggcgcgccatgcttgccccctgctcaggttgggagcttggctgcttccgtctctgtctccgtcaggtccgactgtgggctggcgctgggcgctgggcttgctgggcttgccaagccaggccgtacagctcaggtgggagcgagcgctggcccggatcggagactgaggtccctccgcctggcccggcgcgccgaactctgaaggagtggacactgcaggtgagcccgtttggtcggctgcgggcgcggctcccgtgccacctggccgtgaggcccctggaccccctcacctacccggatggcgaccgcgtgctggtcgcggtgtgcggcgtggagggcggcgtgcggggcctggacggcctgcaggtgaagtacgacgaggatctggaggagatggccattgtgtctgatactatccacccccaggcgtccgtggaggtttcgatatcaagtcatcaggctctggctgtgtaaaagttcaaagtattgagggtgatactttgcaaaattgaacagagcatgggactagtatc

SEQ ID NO: 81478 - DNA, 1911 bp, Homo Sapiens
  misc_feature (1732)..(1732): n is a, c, g, or t
  misc_feature (1854)..(1868): n is a, c, g, or t
ggaactagagctggtagacacgagcttctcagatggcagtggccagatcctccatctgtgagaatccgccacttgaagtggtttcctgagagtgttcacttggcagttgctgcgtttctcaagcccacctggcaaggtctcgccggacccttccctccaagtgcacttacttcttcatccccatgtacatctctaactttgaaattgtttacctctcctacaaaaatcttaccttttgacctgagcagagtagcaaagccctgttcactctgagggagcagctggcgtgttgaaggggaaaggccaggcacagcactgtcctcagaccacaccatatttggagcagaattgtgatacatgtcatctgtgtctattctggaaggttctttgttcatcactgtactcgcatcagcaaattttcagggtcctacctgtcactccaggctactgagctgaaccctcagaagctgaggtctccgagcatgctaagtaaccttttagaaaagctggaggcaaactgtcgaatgctagcaggctttatgaaaggaaacataaggagtttgtgtagtcagaacttgcttaaatttgcttcggaattaggcaccataaactttagttggagaatgggacttaaattttcacatatatgtatacttaattttcagcaattatgacacaataaaaagaatatgcaaatttattgttgtttcagaaggttttgcaggactgggaacgctttagtgtcatcaacagtaaacctcagatactgttctgcacagttcagaagtaccataccaggtattgtgagtggcaagaacgccaggagacagagatgcttctggtagatgagggccagagaaaccagctctcctccattttgacagcaatttctcactgtgaccatttggcctccattatggtttgagaggaatttcgtgagatcttgagaaatcaccatgattaggccaattgtcaatcagtatccagaaactagaaaggaacaatgagatacttgtttatggttctttagggcatatgtttgaaaaccctctcatctcagatctgtatagctggtgtgtgtttgtgtccataaatacacgtgcattgctgtcgtgcccattaagaaagggggagtaagtaaaagaggaatcgctcagatctttccttggatgaacagcagtggcgtggttggtgtgttgactgtgaacaggctgacttagctgttgatgtatactcagaacctccatctcctcccagaccctgcacttttccttctctgcagtctgattctctaatgactgtcactggacaaaccccagttttatgctcgcttagtaaaaataagtttaaacatttcatggtggttgacagaactttgtccccaaacatgcggattcaattccttaaaactcgttgaacgtttataccaaaggtcccgccccgcaggtgtgtatgtggtgcacagagggtgaggtttggagcatcgggcactgtgtgcattgctaaggggacatagtgagacaatgtgggatttaactaaaaacacatcaattgtgtgtcacattaccagtgttgtcaggtatttgttcttaattgttattgtaatatattttcagttgtttttctaatttaattctctccgtctgttgtctgactgtgaactgctaacagtgttaaacttgatgtaaataaatgaggcccttgaaagggactggttttctccggccttctnaaaccaagccaccccttgtcctcacccttggaatcccttcccgcgtgttgtggcaccccgacctgtttggcgcgcctccgggccttcgagaaaactttccctaaaccccttttgtttggcgnnnnnnnnnnnnnnntaggtaaggggacaatcgggtcacatactcgtttcctaaggca

SEQ ID NO: 81479 - DNA, 1123 bp, Homo Sapiens
  misc_feature (77)..(97): n is a, c, g, or t
  misc_feature (426)..(442): n is a, c, g, or t
  misc_feature (632)..(644): n is a, c, g, or t
  misc_feature (811)..(811): n is a, c, g, or t
  misc_feature (977)..(977): n is a, c, g, or t
ggttaaacgacgggccacgtgccatagccaaaattaaccctcactaaagggaaaaagcttgcggccgccgctcaggnnnnnnnnnnnnnnnnnnnnngaagcaaaggcaagcagcttttattgtgaagcaaaagtacacacaagagagaagtgtgggagtgcccctgagagcaagtcatgcaaaacaaagtttgggtttctaattgtatgggtgttcctttaataggggtaatcattaggtattctgggaaaagaggggatttcagggacccctgattaccacccctcctcccttatttgggtttgcctggaagagttacagacatgtcaccctgactggggttctggcagttttctcttttgttttgggttttctgttatcccacggtttctttgcctagttcccgttttagctgttgtttgggnnnnnnnnnnnnnnnnncagctgcaccaaaaccagggtgttgagattttccatcctcctgtgaccacccagtgctattcctgtctcatttggatctgtaaaactagaaaactagttatctgctcccaaacaaaaggttgggaaagacctaggataatagttatatgtatatgcattgtttcaaaaggggaggaaatggaaggggggnnnnnnnnnnnnntggaaccaccaatcccaagaaaatctgaaatctagtttggcaaatgccactgggagtcaagacatgggaatatcacatggttcaggactctgcccactggactctcctctgctctgagtcatccttcctttctcatgaaaggtagcaagggcttgcacctgtttccngcagccagtcccatgtatagaatattacaacctttaacttcacactttacatgcctacaccctttaacttcatactttcaaggtccctttagacccaaggtgagcatttcactggtataaattttcaagattttgtgagtctctgtacatcactgaatcactcgtngcgaatttctggctcgagggcaattcctaaatgagtctataaatcgtatcagtcaactgttctgtgtgaatgtatcgtcacatcaacaatacagcgaacatagtgaagcgggtgccatgatgacatcaatatgcttggccacgcgt

SEQ ID NO: 81480 - DNA, 1768 bp, Homo Sapiens
  misc_feature (16)..(16): n is a, c, g, or t
  misc_feature (294)..(294): n is a, c, g, or t
tttcgcacttttcccncggtggtgtctgtggatggcgggcccgtgagactcaaactctgtgacactgcgggacaggatgaattgacaagctgaggcttctctgctacaccaacacagacatcttcctgctctgcttcagtgtcgtgagcccctcatccttccagaacgtcagtgagaaatgggtgccggagattcgatgccactgtcccaaagcccccatcatcctagttggaacgcagtcggatctcagagaagatgtcaaagtcctcattgagttggacaaatgcaaagaanagccagtgcctgaagaggcggctaagctgtgcgccgaggaaatcaaagccgcctcctacatcgagtgttcagccttgactcaaaaaaacctcaaagaggtctttgatgcagccatcgtcgctggcattcaatactcggacactcagcaacagccaaagaagtctaaaagcaggactccagataaaatgaaaaacctctccaagtcctggtggaagaagtactgctgtttcgtatgatgctggcaagacacccagaaaggctattttcagatgaaatcgatattagaagctatattagctgaaacaactccttttactgcgtagaacctatatcgagagtgtgtgtatatgtattataggaggagctctcaattttatgtattctttctgcctttaattttcttgtttgtttgagcttagggatgagatacttatgcaagatatttttgaagtaaattaaacatttttcacatctctggaaatttagagttctagacctctggttaatttatatctaatatgaagaagacacctctaatctggatgttaagaatgaagttctgctacattataatgtacagaagagcaaaagggaggaacactatggttaaccctctcttgattaagggctacttaatgcacagtgcattatgtacacaggtcaaccatggtaacaatagttcttagctttgaaactccatgcaaaccatgccttttttttaaggagcaaaaatctgagaaaaaaagtgagagacctctgcctacaaaacttcaaaccagtcacttttgtcaattgctaatacccagttacttatgatttaaaaacaaccaacagaaaacatcccacagactgtatggcactctgtagtcaaaaaaggaaactttcttattgggacttttctttcttagtccagttgtgttgacacatatgaacacagacaaagtgctatgcggaggaaagcaagtgttggtcagtagtttcatgttttagggagtggttcctgtggagatcagaaagtgacatttgctttcggtactgtaatacatgcaccaaactgcctcaatcctaggtaacgagggcaacagggagcacctgtctggattgtttttaaacctccatactcaagctgtctcttcggcagggaggtgaatactcttgaaaggccaacagcaagtgtttgtgggacacaacacagataattttttcttaagtcgaccaagatgtacttctctgtgtgcacacccatgcacactcatgcacacagatacataggtctgtatggctgtatttgctgttgattcagactttcacaccattaatggggaaaagcgtggccacaaaaacagatgctaagaagcttggcttcctcttcttgttgacccttttttgaaccaacatcttttttattatattcagagtatgtttttaagtgtatcttaatatatacattttttaggacatcttaaatctaaac

SEQ ID NO: 81481 - DNA, 974 bp, Homo Sapiens
  misc_feature (17)..(17): n is a, c, g, or t
  misc_feature (44)..(44): n is a, c, g, or t
  misc_feature (55)..(55): n is a, c, g, or t
  misc_feature (82)..(82): n is a, c, g, or t
  misc_feature (95)..(95): n is a, c, g, or t
  misc_feature (104)..(105): n is a, c, g, or t
  misc_feature (109)..(109): n is a, c, g, or t
  misc_feature (127)..(127): n is a, c, g, or t
  misc_feature (130)..(130): n is a, c, g, or t
  misc_feature (137)..(137): n is a, c, g, or t
  misc_feature (161)..(162): n is a, c, g, or t
  misc_feature (179)..(179): n is a, c, g, or t
  misc_feature (249)..(249): n is a, c, g, or t
  misc_feature (383)..(396): n is a, c, g, or t
caggccttacccatagnttgtgaggacccagcccctagacctcntggaccgtgcntgaggcagagccctttccagacccccngccccggagcagntgaccagcnntccntttccagccccaggcgantgngtagccncaggtgccgtaaacaatgaccgcnntgtgtcagggtccccanttcaccatgtgcacaggaagcccagctcgggccatgcatctgatttgcaccagctcctgcccagcccacntgagaatgcagatgtgtgaatccagtggggaatgtgttcctgctccatgctcccaatttcagaacaaactgtgagctgagctacagctttctcattgatccccttctagtcttctgaacaaattagtctgtgannnnnnnnnnnnnnccatttattgctgacccttttggatttatgaggccgtgtgagaggaattatgtatctcacacacacgcatctggcatgacgataaatctccaccactgaagccccgcagatttgcagcgaatctgatggctcccaggctcgctgccacgtggttggtgctgacgtgcggcgcaatgcggtggcggctgcagtcacagctggaaccagcgtgactttccctgggagcccagcaggtgcctcgcgtcgctggcaggtggtagggtgcccttgaagggggctggtcgtgaggaacgaaggaaaacccgggccagggcttccaaggacagcggccctggagggggccggagccgtcaggttactctgagcaccggagaaaaagccgcttcagcagaggtgtaaacgcatttaatctcccaacaggacatatacagagcggagggctttggcattcagatatattgaccgggcaagatggtaatccaagtttcctccccttcaaggtctcctgctgtatttgcctgggctctgatctgtcgtcaccgcttgggccaataaatcttgataccagcctccagaaa

SEQ ID NO: 81482 - DNA, 1077 bp, Homo Sapiens
  misc_feature (87)..(570): n is a, c, g, or t
cgcaggtcgaacagagagccccgaagagttccaggggaacgcttgtatctatagtctgtcgggttcgcacctctgacggagcgtgannnnnnnnnnnnnnnnnnnnnnnnnnnnnnnnnnnnnnnnnnnnnnnnnnnnnnnnnnnnnnnnnnnnnnnnnnnnnnnnnnnnnnnnnnnnnnnnnnnnnnnnnnnnnnnnnnnnnnnnnnnnnnnnnnnnnnnnnnnnnnnnnnnnnnnnnnnnnnnnnnnnnnnnnnnnnnnnnnnnnnnnnnnnnnnnnnnnnnnnnnnnnnnnnnnnnnnnnnnnnnnnnnnnnnnnnnnnnnnnnnnnnnnnnnnnnnnnnnnnnnnnnnnnnnnnnnnnnnnnnnnnnnnnnnnnnnnnnnnnnnnnnnnnnnnnnnnnnnnnnnnnnnnnnnnnnnnnnnnnnnnnnnnnnnnnnnnnnnnnnnnnnnnnnnnnnnnnnnnnnnnnnnnnnnnnnnnnnnnnnnnnnnnnnnnnnnnnnnnnnnnnnnnnnnnnnnnnnnnnnnnnnnnnnnnnnnnnnnnnnnnnnnnnnnnnnnnnnnnnnnnnaagaattcggcacgaggcctaaactgtgcagaccttatggtttatgctaaacacttgccttgcttctggaggcctggaattttggtacctgctaggtaaagtgtgtctacgttaccatccgcaataaaaaccctgggtactgagtccgtgatgaacatccttggtagacaacatttcacatgtgttgttacaaattgtaggtggggaactaagagtgtcctgtgtgactcaaatgggagaagactcctggtttccctggacttagcttcatgtgccttttccctttgctgcttttctttgtattctttcaccatagtaagtcatagatgtgaatatgactatatctgagccctgtgagtccttctagtgaacaaccttgtggttgtcttgggcacttccaacacaacttgtcttggtgatatttggccagcaaatgtcaacattaccaaagaaaagttggaggtggatggctttcacaataaaatttatttaaagaactcaaaaaaa

SEQ ID NO: 81483 - DNA, 1431 bp, Homo Sapiens
  misc_feature (225)..(287): n is a, c, g, or t
ttaacaaatattaacgcttacaatttaggtgtttcttcctctctgctgtcccccttgtgtgtctggagctccggcgtgggatcccggatataggaatcaaggattttcttttgctttgtggccggattttgctactgcttgctcttcttactttaattatttctgtgactacctcatggcttaactcatttaaatctccccaagtttatctgaaggaagaagaannnnnnnnnnnnnnnnnnnnnnnnnnnnnnnnnnnnnnnnnnnnnnnnnnnnnnnnnnnnnnngccagcagatacatagagaatgttttaaaacctcaccaggaaatgaaattgagaaaactggaggagcgcttttatcaaatgacgggtgaagcctggaaattaagcagtggtcacaaacttgggggtgatgaaggtacaagtcagacatcttttgaaacatcaaacagagaagcagcaaagagccagaacttgcctaaacctttaactgaatttccgtctcctgctgaacagcccacatgcaaggagattcctgatttacctgaagaaccttctcaaacagcagaagaagtagttactgttgctctccgatgtcccagtgggaatgtcctgaggagaaggtttttgaagtcctacagctcacaggtcttatttgactggatgacgagaattgggtaccacatatctctatacagcctttctacttcctttcccagacggcctctggcagtggagggaggccagtcgctggaggacataggaataactgtggacactgtactcatcctggaggagaaggagcagaccaactaggaaagaagggagagctccctgtttgcatgaagtcagttatgctatgaccttctggcacaataaaggcttcactttcaaatcacaccataccttgattgagctcatggcagtaaactttgaacattgatatccatgggaataggattagaaaaggattgctttctatatataataatctgtggactgtgccattttacagtgtaccaaatgagaatgaggttgaaatgtatgcagtaaggtactcagtaattaattggtattttttcccagctgacatgatttctcagtgttagaaaacaaacccttagaactttcctttctgcctcttcaatccatcttaccacacaatatttcatgattcaaattcttcaaagtcttatacgcaggaatgtttattctgctgtatttctgtgaaattaaaaacttggaagaagcttcaaagctcttggaggctttaaagttctttctgttgggtgtgcattacagtttacttaactgatgtttgcgatttatataattttgccttgtattaaatgttacaaagttccaaatgaatcagtattttaaaaaataaaactatgaaagcattaaaatataggtgaatttttaaaaa

SEQ ID NO: 81484 - DNA, 672 bp, Homo Sapiens
agttatgacaaattttattgtatatattgcaccacattgaaaaaaaatcaacatcatgaatgagattaaaacaaaggtcattttaagagaatatttctcaggccaggaaagacctggttatagcctaattagtagtgatattaacagtaggggactagtcagcatggaaacttactcctaataaacagactcagaacagaagggacatatgcataaatcaggataccatctcattaatttacaaaggataatctttcttttcattgacaacacctacacccacctgttttccagtgttcttctctctaaacagcaaagccaaagcactctgcacaccaaatcacctgttcagaggtttatgcatgagcatatttcttttaggccgtggtgaagttgataaaccacccctgctttgtaacaaaattattttaaagtgactggaattatctagtccccagattgatcatctcccctggcaacgtgactctgttttttgtgtgtgtttccatgctgactagtcccctactgttaatatcactactaattaggctataaccaggtctttcctggcctgagaaatattctcttaaaatgacctttgttttaatctcattcatgatgttgattttttttcaatgtggtgcaatatatacaataaaatttgtcataact

SEQ ID NO: 81485 - DNA, 1027 bp, Homo Sapiens
  misc_feature (88)..(88): n is a, c, g, or t
  misc_feature (96)..(96): n is a, c, g, or t
  misc_feature (182)..(183): n is a, c, g, or t
  misc_feature (218)..(218): n is a, c, g, or t
  misc_feature (270)..(271): n is a, c, g, or t
  misc_feature (275)..(275): n is a, c, g, or t
  misc_feature (316)..(316): n is a, c, g, or t
gctatatatcttactgttagaaatatacatctgtagaccattatatgatatattgttcaagagcattatatcatatcatcacatattngtaaatgntcactgtattcattcagtgatgatcctgtgaggattatatcttctgtatatcaagttaagatttgtatctgattaatccactgatnntgcaggctcaaaaaactcagaaaccaccgcagaanccagcccctgcagttgtttctgtaactccagctgtcaagaatccattgttanngaanccagaaactaaactgaaacaagagacaacttttctagcgtntaagagaacagaagtcaagacatccacagttatttcaggaattcttctagtgccagcgtttcctcgtcagtaactagtggcttaactggatgggcagcttttgcagccaaaacttcctctgctggtccttcaacagcaaaattgagttcaacaacacaaaacaatactgggaaacctgctacttcgtcagctaaccagaaacctgtgggtttgactggtctggcaacatcatccaaaggtggaataggttccaaaataggttccaataacagcactacgcccactgtacctttaaaaccacctccacctctaaccttgggtaaaactggccttagtcgctcagttagttgtgacaatgtcagcaaagtaggtcttcctagtccaagtagtttagttccaggaagcagcagccaactaagtgggaatggaaatagtggaacatcaggacctagtggaagtactaccagcaaaactacttcagaatccagcagctctccctcagcatcccttaaaggcccaacttcacaagaatcacagctcaatgctatgaagcgattacagatggtcaagaagaaagctgcccaaaagaaactcaagaagtaatgtggccaagtaggtttttgtatcatattagcctaaagatgaaaggcttattattatgatataatctgtaatacactgtaatttaataaaagtcttcataatcaaaaa

SEQ ID NO: 81486 - DNA, 934 bp, Homo Sapiens
  misc_feature (902)..(902): n is a, c, g, or t
ggggtttccgaagggaccaccgggaacagacggatcggcagggcggggcggaacggcgtttgcaatggctgctactgtgaacttggaacttgatcccatttttttgaaagcactaggtttcttgcattcaaagagtaaagattctgctgaaaagctaaaagcactgcttgatgaatctttggctcggggcattgattccagttaccgtccatctcaaaaggatgtggagccacccaaaatttcaagcacaaaaaacatttccattaagcaagagcccaaaatatcatccagtcttccttctggtaataataatggcaaggtcctcacaactgaaaaggtaaagaaggaagctgaaaagagacctgctgataaaatgaaatcagacatcactgaaggagttgatattccaaagaaacctagattggagaaaccagaaacacagtcatctcccattactgtccaaagtagcaaggatttacctatggctgacctttccagttttgaggagaccagtgctgatgattttgccatggagatgggattggcctgcgttgtttgtaggcaaatgatggtggcatctggcaatcaattagtagaatgtcaggagtgccataatctctaccaccgagattgtcataaaccccaggtgacagacgaaggaagcgaatggaccctcgcctggtgtggtattgtgcccgatgtaccagacaaatgaaaagaatggctcaaaaaactcagaaaccaccgcagaaacagccccctgcagttgtttctgtaactccagctgtcaaagatccattgggttagaaaacagaaactaaactgaaacaagagacaccttttctagcgtttaagagaacagaagtcaagacatccacagttatttcaggaaaattctctantgccagcgttttcctctcagaaactaatggcc

SEQ ID NO: 81487 - DNA, 982 bp, Homo Sapiens
  misc_feature (15)..(15): n is a, c, g, or t
  misc_feature (45)..(45): n is a, c, g, or t
  misc_feature (96)..(96): n is a, c, g, or t
  misc_feature (126)..(126): n is a, c, g, or t
  misc_feature (155)..(155): n is a, c, g, or t
  misc_feature (229)..(229): n is a, c, g, or t
tagatttgcctgagnccagatcgcacgagagaatcatctacagtntgcatgctgagagagagaaaacaatttttgcagagatgtcatgtattattntgaagcttgtgatagattttctgccgcttntgacatcttgttattagaaaatgtatacntgaaacatgacatgaacatgagtagcaattacatggctgtatgtatataagagaatgacatactgtgctaatcnaacagtagattattcttttagcctgcacaacagttgatcttttggctatgacaatttgtatggagggtacgatctaagttaagtgtgtcaaaagcaaggcttaggatttgttatgggagtagaatatatattgaattttgtatgaagaactatttgtttaaattatatagctgggatattttgccactgttaaaatggattcagaagaggtcctagaaaagtaagattagtgacatgtgtgggtttatatttagatatttaaggtgcattttcatagtgtggtaagaccttaagtaaaaggcacaatgggtactacagaattaaaatgtaggtctaacataatgccagttccactttaactttgtttttgcatttgaagaatgtatgtagcactttcctatatatttgtcacacattgaaaactggactgggtataactatgttataggaaagtagaaattgtattctttattttccatctttgttttctgttctacaaagttgatgcttaagcatcaagctgattttattggtcatgagaacaaatggatgtgatcatgaaggaatcagattccctatgtaaagcagtttaaaatggaattcaatgttcagtgctcaggtatgtagtaagtactgtagtcctgtgggggcaaatgtgtagatatttttaaacattttgccataattgcacaattttttgcatttttacctgatgtcattgtttcttataataaaaccttttctgattgaaaa

SEQ ID NO: 81488 - DNA, 1559 bp, Homo Sapiens
  misc_feature (36)..(36): n is a, c, g, or t
  misc_feature (106)..(106): n is a, c, g, or t
  misc_feature (113)..(113): n is a, c, g, or t
  misc_feature (128)..(128): n is a, c, g, or t
  misc_feature (131)..(131): n is a, c, g, or t
  misc_feature (138)..(138): n is a, c, g, or t
  misc_feature (166)..(166): n is a, c, g, or t
  misc_feature (178)..(178): n is a, c, g, or t
  misc_feature (198)..(198): n is a, c, g, or t
  misc_feature (210)..(210): n is a, c, g, or t
  misc_feature (246)..(246): n is a, c, g, or t
  misc_feature (256)..(256): n is a, c, g, or t
  misc_feature (267)..(267): n is a, c, g, or t
  misc_feature (334)..(334): n is a, c, g, or t
  misc_feature (342)..(342): n is a, c, g, or t
  misc_feature (408)..(408): n is a, c, g, or t
  misc_feature (1466)..(1466): n is a, c, g, or t
gggcccagggacacatgggtgatttcccttgagacntgaatccaggcagcggtcagtgcaaattggacacgccgcagggacgtccgcacatcaccaagagtatacngcatccnatgggccatcctgcntangactcancaggaggagtccttccttcgtccctcantggattgagatngtgaggagtatgcggctccnaacatgtgcagntgctgatcggggacaagtcagacctcagcgagctcnggagtctccnttgcttgagcnacagagcttgcttagcactatgacatcttgtgtccattgagacgtctccaaggactcgagcaacgtngaggagcnttcctgaggtggccacgagctcatcatgcggcacggggccccttgttcagcgagaagacccgaccnacatccagctgaacagcaaggacatcggagaaggctggggctgcgggtgctgaccaggggccgggccggcagactgggggttccccacctccttgctctccccagcctgccaagcccagccctccagagccagccctcctgggtaccggcaactacagcagccgggtgaagctctggagctctgcatcctgtggcctggctgcgggatggaggctctccttgaggaaggggaagcaggataccctggcgggccaccctgccagccagcagctggccctccaccatcttcacattccaagactggcctgaacccgccggtgtgggccacagtgggaggggccagcagtcctccctgtcccatgcctgctggctctgaccgtttcctctcatgggtttgctttacctgtggcagcaggttgctgctttccagggatgtgtccagtgccctgggttcttcccggtcatcctggggctctgcacagagcagcagagctagagccatgagacccacagacttggtgcctgagcgcagctccagggaagccccagccccttccaggcggggaacctgcttcctgccttcactgcccccgcagcactcacagacatctccctggggtctggctcactgccttatcaggacctctgagttttctgactttctgtgtagcttctcattttcatcagcacagcatggggtcacggcccacagctaggtggggtcacggcccacagctaggtggggactgtctgctggctcagggcccagtgttttgccactcaggttgcaaaattagctaatccttcagtgccagcactcagaagtctggcaggtgggggaatgagatgagaaagtggacatttaaggtccaagtagaagcttgcatccttgaggctcagggatgagagggcaccgcaaggcacccagccttacccccaagcatgaatcctgccaccgagcgtgggtccagtctatggaacgagtctccagacaaaaggagaggcctggcggtctggcctgccattttatcctggacctactgctcactgactggccnaagtagagcaagtgggtaggattggaacactgtctctgcatgcttagtccatacaaaacggtagctgagcgtattctactcactttgcactcg

SEQ ID NO: 81489 - DNA, 1217 bp, Homo Sapiens
  misc_feature (52)..(52): n is a, c, g, or t
  misc_feature (59)..(59): n is a, c, g, or t
  misc_feature (85)..(86): n is a, c, g, or t
  misc_feature (95)..(95): n is a, c, g, or t
  misc_feature (139)..(139): n is a, c, g, or t
  misc_feature (142)..(142): n is a, c, g, or t
  misc_feature (188)..(188): n is a, c, g, or t
  misc_feature (217)..(217): n is a, c, g, or t
  misc_feature (221)..(222): n is a, c, g, or t
  misc_feature (1137)..(1137): n is a, c, g, or t
gactgtacgattatcgctccttaggattgcctgagccagaatcgcagagatntccacgntgccagatgcatgatccattcccganntgagagcantagagtgtcaacagtgtacttatctagacccagcgcagagtaantgnaagatcactgatctgaaaccaaaatggagaaatgatgatagactangatgctgagaggactattaaatgtttacnttgnngaatttatatacacgcagttctaatctctcagaaatccatgttgctttccatctctgtgtggatgaccatgtgaaatcgggaaacatcactgctcgtgatcctgccattatgggactccgaaatatactcaaagtttgctgtacccatgacatcacaacaataagcattcctctcttgctggtacatgatatgtcagaggaaatgactataccctggtgcttaaggagagcggaacttgtgttcaagtgtgtcaaaggtttcatgatggaaatggcttcatgggatggaggaatttctaggacagtgcaatttctagtaccacagagtatttctgaagaaatgttttatcaacttagtaacatgcttccccagatcttccgagtatcatcaacactcactctgacatccaagcactaaacccttatagattgacatgctggcagaagatgattgttaaactctccaggaacttgtgctatgctgggaatctgtcaagcaaaagatgcccagaaagagaacttgcagctcaatccacaaatcaagatacatgtgtgtgaaaccattccaaaaatttatatactgcacaaactggtgatcaacccctaacttaaacacttaaagtctctttatgaatttctctttttttcttctctgtgttacctgtgaatattagtaatctaaaactttttatttatcacacatggacacttgggaaaggaaacttgattatatttacatggaggcatttgactttttcaagaggcttgactcgtctcaggtgcaatccttaattaaacatacaaacaaaattttccttttactttctttgccaaaacaaaatgtaaaagcactgaaatatacattgcaagtacaaatttcctgtgaaaatctttttatagaaacacaaatgtatnagacaaatgtgcttgttcttttaaattctcctgtttcagaatctctttttaatctactcctaaggatgtacaagttagag

SEQ ID NO: 81490 - DNA, 2007 bp, Homo Sapiens
  misc_feature (114)..(114): n is a, c, g, or t
  misc_feature (196)..(196): n is a, c, g, or t
  misc_feature (373)..(373): n is a, c, g, or t
  misc_feature (1153)..(1189): n is a, c, g, or t
  misc_feature (1231)..(1810): n is a, c, g, or t
cttctgttgcacagtctgtcatccacatctgtataagccgagctcaagtacttccacagcatcacatgtgcgcatgaagtcatgagactgtacagatacagagtactgtgctcngatgcaaatcaaagagttgcacgatcatcagattgacgtatctactcagatctgtccactactcttgggcaggatttagtgntatgtccacaaagtaaatatgcaatgacagaataaaagctccatcccaagatctatgagctcgcagctggaggcactgctgttgtacagggtaaatactagaattgctttgcagaaaagttgctgcaaaagtggctgcactaacaggcttgccttttgtcactgctccgaataaatntgaagctctggctgctcatgacgctctggttgagctcagtggagccatgaacactactgcctgcagtctgatgaagatagcaaatgatattcgatttttgggttctggtcctcggtcaggtctgggagaattgatcttgcctgaaaatgaaccaggaagcagtatcatgccaggcaaggtgaaccctactcagtgtgaagcaatgaccatggttgcagcccaagtcatggggaaccatgttgctgtcactgtcggaggcagcaatggacattttgagttgaatgttttcaagccaatgatgattaaaaatgtgttacactcagccaggctgctgggggatgcttcagtttcctttacagaaaactgcgtggtgggaatccaggccaatacagaaaggatcaacaagctgatgaatgagtctctaatgttggtgacagctctcaatcctcatatagggtatgacaaggcagcaaagattgctaagacagcacacaaaaatggatcaaccttaaaggaaactgctatcgaacttggctatctcacagcagagcagtttgacgaatgggtaaaacctaaggacatgctgggtccaaagtgatttacataaatttataatgaaaataaacatgtataaaatttaaaaaaacagactcccatttcttaaaaacggataagtttgaaaggaaactgctattgaacttaagcatctctagcagagcaatttgatcagtatataaaaccctaggatgtgctaggtctaagatggattaaacaagtatnnnnnnnnnnnnnnnnnnnnnnnnnnnnnnnnnnnnngcctacagcagcggccgctccaaccctcgtgccgaattcttnnnnnnnnnnnnnnnnnnnnnnnnnnnnnnnnnnnnnnnnnnnnnnnnnnnnnnnnnnnnnnnnnnnnnnnnnnnnnnnnnnnnnnnnnnnnnnnnnnnnnnnnnnnnnnnnnnnnnnnnnnnnnnnnnnnnnnnnnnnnnnnnnnnnnnnnnnnnnnnnnnnnnnnnnnnnnnnnnnnnnnnnnnnnnnnnnnnnnnnnnnnnnnnnnnnnnnnnnnnnnnnnnnnnnnnnnnnnnnnnnnnnnnnnnnnnnnnnnnnnnnnnnnnnnnnnnnnnnnnnnnnnnnnnnnnnnnnnnnnnnnnnnnnnnnnnnnnnnnnnnnnnnnnnnnnnnnnnnnnnnnnnnnnnnnnnnnnnnnnnnnnnnnnnnnnnnnnnnnnnnnnnnnnnnnnnnnnnnnnnnnnnnnnnnnnnnnnnnnnnnnnnnnnnnnnnnnnnnnnnnnnnnnnnnnnnnnnnnnnnnnnnnnnnnnnnnnnnnnnnnnnnnnnnnnnnnnnnnnnnnnnnnnnnnnnnnnnnnnnnnnnnnnnnnnnnnnnnnnnnnnnnnnnnnnnnnnnnnnnnnnnnnnnnnnnnnnnnnnnngacctgtcgcttacggatacttgtcgcttctccttcgggagcgtggcgcttctcaactcagctgtagtactcagtcggggtggtcgtcgccaactgggtgtgttgagacccccgtcaccgacgcgggctttacgggtatatgtcggagtcaccggtacaatattactcatggaacatcatggtttagttatatgtag

SEQ ID NO: 81491 - DNA, 1704 bp, Homo Sapiens
tcgttgtcttcatctttttcttaccccctacaccgaaccacccacccgtagcgaggcctgggtggcgattccggcacgaggaattctacccaagctccctcagcaccatgtaccgagcacttcggctcctcgcgcgctcgcgtcccctcgtgcgggctccagccgcagccttagcttcggctcccggcttgggtggcgcggccgtgccctcgttttggcctccgaacgcggctcgaatggcaagccaaaattccttccggatagaatatgatacctttggtgaactaaaggtgccaaatgataagtattatggcgcccagaccgtgagatctacgatgaactttaagattggaggtgtgacagaacgcatgccaaccccagttattaaagcttttggcatcttgaagcgagcggccgctgaagtaaaccaggattatggtcttgatccaaagattgctaatgcaataatgaaggcagcagatgaggtagctgaaggtaaattaaatgatcattttcctctcgtggtatggcagactggatcaggaactcagacaaatatgaatgtaaatgaagtcattagcaatagagcaattgaaatgttaggaggtgaacttggcagcaagatacctgtgcatcccaacgatcatgttaataaaagccagagctcaaatgatacttttcccacagcaatgcacattgctgctgcaatagaagttcatgaagtactgttaccaggactacagaagttacatgatgctcttgatgcaaaatccaaagagtttgcacagatcatcaagattggacgtactcatactcaggatgctgttccacttactcttgggcaggaatttagtggttatgttcaacaagtaaaatatgcaatgacaagaataaaagctgccatgccaagaatctatgagctcgcagctggaggcactgctgttggtacaggtttaaatactagaattggctttgcagaaaaggttgctgcaaaagtggctgcacttacaggcttgccttttgtcactgctccgaataaatttgaagctctggctgctcatgacgctctggttgagctcagtggagccatgaacactactgcctgcagtctgatgaagatagcaaatgatattcgatttttgggttctggtcctcggtcaggtctgggagaaattgatcttgcctgaaaatgaacaagaaagcagtatcatgccaggcaaggtgaaccctactcagtgtgaagcaatgaccatggttgcagcccaagtcatggggaaccatgttgctgtcactgtcggaggcagcaatggacattttgagttgaatgttttcaagccaatgatgattaaaatgtgttacactcagccaggctgctgggggatgcttcagtttcctttacagaaaactggtgttgggaatccaggcatacagacaggatcaacagctgatgatgagtctctaatgtggtgacagtcccatctctatagggtatgaacaggcgcaaagatgtaagacgcacaaaatggtcactaaaggacgttcgaatggtactaagcgaacttgccacggttaaccggaccgggcaggtactaattcagaaaaatttatataaaagccctttaagagtggagagcggcactctcagaggttacgggtcgggacaaatataaacctcgggagctctctagattcaaaattaacaaa

SEQ ID NO: 81492 - DNA, 511 bp, Homo Sapiens
gcagatagaaacagctttattttttccattcaggcttttatcaaatagctttgttcaaaaagcatatacaagagcaaaaaataccacatgcagtcaaacttcttttgccttatagtcattggcattcttttagaaaagagtgtgcacttgaataacttctaattcaaacattttccaactgtttctacttcatttttcaagttagcaacgacagatacattttagttaactgtttcatattccttatctttattcatactgaaataatataaagcctataaaatcaaagcatatactgttcagaaatctggaaaggttcttttacataatagattctgacacgttaagaaactacacacaacaaatatttgcaaaatgaatgaaaaataggataaagctatttaaaagtcaacatagtaatatttatctaaataattttaatcaaatgtacaacatatttatctgatatcatctatcttttagaatacaaaaaagtgctcagattacattt

SEQ ID NO: 81493 - DNA, 812 bp, Homo Sapiens
  misc_feature (111)..(111): n is a, c, g, or t
  misc_feature (121)..(121): n is a, c, g, or t
  misc_feature (148)..(148): n is a, c, g, or t
  misc_feature (183)..(184): n is a, c, g, or t
  misc_feature (190)..(190): n is a, c, g, or t
  misc_feature (197)..(197): n is a, c, g, or t
  misc_feature (200)..(200): n is a, c, g, or t
  misc_feature (224)..(224): n is a, c, g, or t
  misc_feature (241)..(241): n is a, c, g, or t
  misc_feature (245)..(245): n is a, c, g, or t
  misc_feature (274)..(274): n is a, c, g, or t
  misc_feature (340)..(340): n is a, c, g, or t
gcgacgcagcatattgatgtcatctgcacccagctacatttgtccgctgttgtgttgattgagcgatacatcacacagaaacacttgactgatacgatttatagactcctntaggaattgncctcgagccagaatcgcacgaggactntaaattttgaataaagtatctaaactattaagtannggacantgaaaanacntgaaagacttagcataatgttatntatctgtctacaaactntgtntaaataccctttccaaagatatgtgtgtntatgtaattttccacggaataacattaatactctaggttgataaaccggtttcacattatttcatntgatcatcacaagagctttgtgaagtaagccgagaagttgttactggtatttaataatagcaatagaggagttaaagactttcccacagcttgcaggtcaagacaagaaattcaggtctcctaattctcagtggagctctatttctgttaacccaaattgctgctctgttttaggtctcaatttcatctgtaaaatgatactaatagtacttatcccattggatttttgttgagatttaaataaatagccaaaagccaatacataataaacactcaataaagattaaccataaggagagtcatgatctggttccaggaatacattgttagatgactgaaaaattgtattacttcaatgaaaatactataaataataacattttcatatattagttggttctcatgcatacataatctaattttatttgatcctcacaactgtttaagttttattaaatatacattatccctg

SEQ ID NO: 81494 - DNA, 1783 bp, Homo Sapiens
cacactcggccctgaacgcggagttgaatcagctggctgaagctgagtgcctctcttttcctttcttgggaacaggaaaggtgctgtggagaggaattggggcgggatcattcaggggaaggtgacagcagatggtgggaaggccggagtcagcaagccaagtgtcaggggcagagtgagcctcagaaaacagcagctgcccggtgccagagcaaggaaaggccagggaggctgggcggggcagtgtctgtgggacagagtggggcaagaacacacacggccgggcacagcctcttagccagctctccatgtcagtatgagcagtaaccagggaactgggcaattggcacatcagcctatcagaattcatgggaggttatttcttaagtgaaattctaaagagttaaaggatgaatttggacagtgatggaatggatgacatcatcagtcaagaatcctcattggatatggaggggaattataaaaaggcacagaaaaatgagagagagtctatcagacagaagttggcacttggaagcttctttgatgatggcccaggaatttataccagctgtagcaaaagtgggaagccaagcctttcctcccgactgcagagtgggatgaacttgcagatatgctttgtcaacgacagtggcagtgataaggacagtgatgctgatgacagtaagactgaaaccagcttggacacccccttgtctcccatgagcaaacagagttcttcctattctgatagagacactactgaagaggagtctgaatccttggatgacatggacttccttacaagggcaaaagaaattgcaagctgaagccaaaatggcccttgccatggccaaaccaatggccaaaatgcaagtagaagtggagaaacagaacaggaaaaagtctcccgtcgctgatcttctgccacacatgcctcatataagtgaatgcttgatgaaaagaagtttaaaaaccaccgacctgagagacatgactattgggcagctacaagtgatagtcaatgatctccattcccagatagaaagcttgaatgaagagttggtccagctgcttctcatccgagatgagctgcacacagagcaggatgccatgctggtggacattgaagacttgaccagacatgctgaaagtcagcagaagcacatggcagagaaaatgcctgcaaagtgaaaagaagccattcaaccagagaacaagctagaatttattttgcttctgtggttgtaaaaatgctgttgctaaaggtggcgcagaaacaaatatcagtgttagtcattgataatgtctgaagcttaatgtccagtgattggcctttgcttcttaatttattttaattttttacttgtgccacttaatatcaggcattttaataaaatattgttacaaaaaatgtacagtactgacaccaccacaaatcatggttaataaaagagagtagttttaactttatttttatttgtttagagattttaagttggaacagtattttcccattgactacttttcattcttcactgtagttttaaagaagaactgtaaatgacggtgctatacaagtcaaaaaatacatgcctgcctcgtagtgaagttgtagctctccgtaatatgtatattttactcagttttcaacattttgtgaatgttgactacctgaagttcctttttagatgtgctattaacattctgttggattcagagggttccttgaaagttttatgtataaatatgtaaaataaaaattaaaactttgtttcatatc

SEQ ID NO: 81495 - DNA, 1019 bp, Homo Sapiens
  misc_feature (58)..(58): n is a, c, g, or t
  misc_feature (78)..(78): n is a, c, g, or t
  misc_feature (147)..(147): n is a, c, g, or t
  misc_feature (172)..(807): n is a, c, g, or t
  misc_feature (838)..(855): n is a, c, g, or t
cttgttacgtgtgcccattcagattgagccgctactctgcttgtatctgtacatgctntgcatgcgtagtgttctacnggtgatcagcgtagtaccgatagccagcgtcggctaacggggtctcacacagccagctgagcgacgacnacaccgactggatactacgctgagnnnnnnnnnnnnnnnnnnnnnnnnnnnnnnnnnnnnnnnnnnnnnnnnnnnnnnnnnnnnnnnnnnnnnnnnnnnnnnnnnnnnnnnnnnnnnnnnnnnnnnnnnnnnnnnnnnnnnnnnnnnnnnnnnnnnnnnnnnnnnnnnnnnnnnnnnnnnnnnnnnnnnnnnnnnnnnnnnnnnnnnnnnnnnnnnnnnnnnnnnnnnnnnnnnnnnnnnnnnnnnnnnnnnnnnnnnnnnnnnnnnnnnnnnnnnnnnnnnnnnnnnnnnnnnnnnnnnnnnnnnnnnnnnnnnnnnnnnnnnnnnnnnnnnnnnnnnnnnnnnnnnnnnnnnnnnnnnnnnnnnnnnnnnnnnnnnnnnnnnnnnnnnnnnnnnnnnnnnnnnnnnnnnnnnnnnnnnnnnnnnnnnnnnnnnnnnnnnnnnnnnnnnnnnnnnnnnnnnnnnnnnnnnnnnnnnnnnnnnnnnnnnnnnnnnnnnnnnnnnnnnnnnnnnnnnnnnnnnnnnnnnnnnnnnnnnnnnnnnnnnnnnnnnnnnnnnnnnnnnnnnnnnnnnnnnnnnnnnnnnnnnnnnnnnnnnnnnnnnnnnnnnnnnnnnnnnnnnnnnnnnnnnnnnnnnnnnnnnnnnnnnnnnnnnnnnnnnaagaattcggcacgaggcgcggctgtaggcnnnnnnnnnnnnnnnnnnggaatgcttataagcctcctttacactgaataaggaagtagtttttgttttcttttgacctgtaaaatacctcacatggttgtttttacacatgaaagaaaaaggtatatgcgaacatacctgatatcaagaggagtatgcaccaaataaattttagctttgat

SEQ ID NO: 81496 - DNA, 314 bp, Homo Sapiens
aatgttgctttctggcctgcccccagcccccatcttttacctataaaaaccccaggctctgttggcagaggggtggcacagtggcagagtggagcagcagagaaggagaaaagagaagcagcagccaggtgtcggagagaagcagtttgacttcagagggatggcttgacagcgagacttcagagaagagttccgccagggacagctgaactctgggagaagactgcctttccactccatccctgttccagctccccatcctgctgagagccacttccactgctcagtaaaatcctccatattcaccacccttc

SEQ ID NO: 81497 - DNA, 943 bp, Homo Sapiens
  misc_feature (45)..(87): n is a, c, g, or t
  misc_feature (91)..(125): n is a, c, g, or t
  misc_feature (685)..(693): n is a, c, g, or t
tcgacatcacctaaataagcgagccgccttagacttccgtttcgnnnnnnnnnnnnnnnnnnnnnnnnnnnnnnnnnnnnnnnnnnnccgnnnnnnnnnnnnnnnnnnnnnnnnnnnnnnnnnnncagtcgacggtaccggacatatgcccgggaattcggccattacggccggggtgtgctctcagaggaaattaaacaaaatcaaaaacagaaacgtagatgggaaatctcaaaataactggagattaaacaaaacacttctagataccagatgggtcaaacgaagaagtctgaacagaaactttctaaccaatgttttgaactaaataaaaatgaaaatacaatgtatcaaaatttataggaagcagtgaaagtagtggttggagataaattataactattgaatgcctatattagaacgagattaaaaagatttaaaattcataatctaagtttccatcttaggaaactagagaagaaagatcagtgtaagcctaaagcaagcaaaaggatagaaataaaaattatagtagaaatcaataaaatagaaaacaagaaaccaatagaaaaattcagtgaagtaaaaatgtgctaatttgtgcagcagcaatagaaaaaagaaataaaaacagtactttcacaggtcagtaaaatgtataaacctctagctaagctaactaagnnnnnnnnncacagattgctgataacagaaatgagaaaggggtcatcactactgatcccaaggacattaaaaagataacaaaagaatattatgagcaactctgtacccacagatttgacagcttaggtgaaacagatcaatttcttgaaagacacaaacaaccaaaactcacacagggaaaagagatgatctgaataggcctatatctattatggaaattgataaattatggaagtcaataaacaaccttgcaaacaaa

SEQ ID NO: 81498 - DNA, 1041 bp, Homo Sapiens
  misc_feature (36)..(36): n is a, c, g, or t
  misc_feature (56)..(56): n is a, c, g, or t
  misc_feature (85)..(591): n is a, c, g, or t
ccgtagcgcaggtcgaacagagacgcacgagagctncaggggaaacgctggtatcntatagtccttccggttcgcacctctgacnnnnnnnnnnnnnnnnnnnnnnnnnnnnnnnnnnnnnnnnnnnnnnnnnnnnnnnnnnnnnnnnnnnnnnnnnnnnnnnnnnnnnnnnnnnnnnnnnnnnnnnnnnnnnnnnnnnnnnnnnnnnnnnnnnnnnnnnnnnnnnnnnnnnnnnnnnnnnnnnnnnnnnnnnnnnnnnnnnnnnnnnnnnnnnnnnnnnnnnnnnnnnnnnnnnnnnnnnnnnnnnnnnnnnnnnnnnnnnnnnnnnnnnnnnnnnnnnnnnnnnnnnnnnnnnnnnnnnnnnnnnnnnnnnnnnnnnnnnnnnnnnnnnnnnnnnnnnnnnnnnnnnnnnnnnnnnnnnnnnnnnnnnnnnnnnnnnnnnnnnnnnnnnnnnnnnnnnnnnnnnnnnnnnnnnnnnnnnnnnnnnnnnnnnnnnnnnnnnnnnnnnnnnnnnnnnnnnnnnnnnnnnnnnnnnnnnnnnnnnnnnnnnnnnnnnnnnnnnnnnnnnnnnnnnnnnnnnnnnnnnnnnnnaggccagaaaccactagatgttctattatcatagcttttgtagattggatggaagaataagtaggaagaaagagtattaatgtagctagtagggaccagtgttgctgcttgtggctgaggcagtaatgctaaggctttagctcttcaaaagcagaatgaaaaggcacaaaaagcacttcaagcttgtttctgtacccagttgtccctgtattgtctacataaaatcctgtttcctgctatctgtctgtgattcctgtttattacaaattcagtgtgtctgactgatattaaacactgatattaaaatttcaaacttcacttatctgtgctgttgtgaacaggcagctgatctggcagccctcgaatgggaaacaagtgcttctgttgagctgtagcatatataatataaatgtgcctatgtgtattaaaatgtcttctgtaaacaatgaa

SEQ ID NO: 81499 - DNA, 1049 bp, Homo Sapiens
aggacaaatttagagcttgccaagtttctgatcaagtttcatgaaaggaggaatgacaagattattgtctttgctgacaatgtgtttgccctaaaggaatatgccattcgactgaacaaaccctatatctacggacctacgtctcagggggaaaggatgcaaattctccagaatttcaagcacaaccccaaaattaacaccatcttcatatccaaggtaggtgacacttcgtttgatctgccggaagcaaatgtcctcattcagatctcatcccatggtggctccaggcgtcaggaagcccaaaggctagggcgggtgcttcgagctaaaaaagggatggttgcagaagagtacaatgccctttttctactcactggtatcccaggacacacaggaaatgcttactcaaccaagcggcagagattcttggtagatcaaggttatagcttcaaggtgatcacgaaactcgctggcatggaggaggaagacttggcgttttcgacaaaagaagagcaacagcagctcttacagaaagtcctggcagccactgacctggatgccgaggaggaggtggtggctggggaatttggctccagatccagccaggcatctcggcgctttggcaccatgagttctatgtctggggccgacgacactgtgtacatggagtaccactcatcgcggagcaaggcgcccagcaaacatgtacacccgctcttcaagcgctttaggaaatgatgcttaggcagggtacttcgttcaagaccggcgcttggcacccttgttggaaagggattttcagcataacattttccttccacctctttgaccttccctccagcgttggccaaattgtgctgaggaagatgcatcaagggcttggctgtgccttcataggtcatctagggttttataaaggaggaggagacaatattttttcaaactttttggggagtggggtcatttctgtatataaaaaatgttaatatttaaggtgtatttatgttaccgttctgaataaacagaatggaccattgaaccagtaaaaa

SEQ ID NO: 81500 - DNA, 796 bp, Homo Sapiens
  misc_feature (540)..(615): n is a, c, g, or t
tcccacaaggggaaacctggttacagcagctgatctgagatcctgttctctggccctttgtagacacccttcctcttcctcatttcttcctctttcttttccaagagtccccaaagctgtgtgcaacttctcacgatacctttaactactcccgacactgagttcaaacagtgtttgaactgtaagtaattctttatccactggcccctgagcatgcatgccaaatggtctgccagccgtggctttactactcccgtatgcttggtagagcaggccaaatgcagtactgccccacaccaagaaaagccccccttcttcaaccttcatcattccttcagctcccatctgcttctggcaccagaatagttgaaatctaaggaggctagaatagtgtattacaatttggggttctgaaaatatgattgccaaatttacatcctcatttcaaagcaagcacgctcccctctcaccctcaaacatagacgcagcaacatcaaccacaccaccagagcagcaatagcacagactaaatattaactnnnnnnnnnnnnnnnnnnnnnnnnnnnnnnnnnnnnnnnnnnnnnnnnnnnnnnnnnnnnnnnnnnnnnnnnnnnnatatttccatttctttatcccatttccccattctggtcctaagccccccgtaagttcctccagactcagtcgccattttcagcacttcgctgtctaccatgtaccatgtatcgatccacatctcattttctctgctttgaccctaattccatccatctggcatacacttactccagtcgcg

SEQ ID NO: 81501 - DNA, 1104 bp, Homo Sapiens
  misc_feature (31)..(31): n is a, c, g, or t
  misc_feature (40)..(40): n is a, c, g, or t
  misc_feature (62)..(62): n is a, c, g, or t
  misc_feature (75)..(76): n is a, c, g, or t
  misc_feature (99)..(652): n is a, c, g, or t
actgagtactacagcgtgactatgagaagcncacgcttcncgaaggagaaaggcggacagtnatccgtagcgcannggtcggaccagagagcgcacgannnnnnnnnnnnnnnnnnnnnnnnnnnnnnnnnnnnnnnnnnnnnnnnnnnnnnnnnnnnnnnnnnnnnnnnnnnnnnnnnnnnnnnnnnnnnnnnnnnnnnnnnnnnnnnnnnnnnnnnnnnnnnnnnnnnnnnnnnnnnnnnnnnnnnnnnnnnnnnnnnnnnnnnnnnnnnnnnnnnnnnnnnnnnnnnnnnnnnnnnnnnnnnnnnnnnnnnnnnnnnnnnnnnnnnnnnnnnnnnnnnnnnnnnnnnnnnnnnnnnnnnnnnnnnnnnnnnnnnnnnnnnnnnnnnnnnnnnnnnnnnnnnnnnnnnnnnnnnnnnnnnnnnnnnnnnnnnnnnnnnnnnnnnnnnnnnnnnnnnnnnnnnnnnnnnnnnnnnnnnnnnnnnnnnnnnnnnnnnnnnnnnnnnnnnnnnnnnnnnnnnnnnnnnnnnnnnnnnnnnnnnnnnnnnnnnnnnnnnnnnnnnnnnnnnnnnnnnnnnnnnnnnnnnnnnnnnnnnnnnnnnnnnnnnnnnnnnnnnnnnnnnnnnnnnnnnnnnnnnnnnnnnnnnnnnnnaagaattcggcacgaggaggatttgtccttgggcaatctcgagctgccgctttgcatcgcccagtgcggagaacaggtccagcttgattctcatctctgcacttaagctgttctccaggtgctgtgttttgtcttgcatggctgagagggctgacattaacacctcagtgtccttctcattttccttatatttccgaagctcctggacttttagttctagttctctgatttggtcttctttcaccttcatgtccatcgtgagcttcttgccctctgcttctagttctctgatccgattccgtaaggtttcggtgcattctcccctagatgcagcagcaaacgcaacagcccgggcagcagtggcttcttctaacttcttcctctttttctcttccattaactgtttctctacaaaacttcgggcttcctgctcagcttttagctttttctcc

SEQ ID NO: 81502 - DNA, 536 bp, Homo Sapiens
gcacgagggctggacctgttctccgcactgggcgatgcaaagcggcagctcgagattgcccaaggacaaatccttcagaaagatcaggaaatcaaggacctaaaacagaagatagccgaagtcatggccgtcatgcccagcataacatacagtgccgccaccagccccctgagccctgtttccccccactactcttccaaatttgtggagaccagcccctctggacttgaccccaatgcctctgtttaccagcccctgaagaaatgaaggccagctgtgtgttgtgcccaaaaatttggttaccggaaggcattgcaaaggagcgtctctggcagtcaagataaaaaaacagtttctattgtattttgtggaactgtatctgttgtcatttttaaaaaggggggaaaagataacatccaagtctgattagaactgcccatcagtttttcttgtaaatttttagaagacctcacagaactttacagtttatttttctcggccaacacattaaaaccattcttggatttcaagtaaaa

SEQ ID NO: 81503 - DNA, 826 bp, Homo Sapiens
  misc_feature (61)..(81): n is a, c, g, or t
cagtcgacggtaccggacatatgcccgggaattcggccattacggccgggggatctgctcnnnnnnnnnnnnnnnnnnnnntcgtctttctctgtctcggctgaggcagccatctttctcttgccgcgtgctggtgttggaggaccctccctgcttcagatttaccaacagcatgaatcaagaaaagttagccaaacttcaggctcaggtccggatagggggcaagggtacagctcgcagaaagaagaaggtggtacatagaacagccacagctgatgacaaaaagcttcagagttctctaaaaaaactggctgtgaataatatagctggtattgaagagtcttggacagtaaagcaccaaaaccagaagacattgatgaggaagatgatgatgttccagatcttgtagaaaattttgatgaggcatcaaagaatgaagctaactaaaagtttggttttcggaagctggcatggactagatttaacaaatcagctatgtggttccaaagttttacagacatggagaacatcacctgttactagttcagtaatataaatatctcgtatattaataatgctgtttgttcagcatttttcggtcatttgattttgcattctgcacttcctctccaggatatttttttggtcaaaatatgaagtattggtgcagtttgacggtgtaaggttttgattcctggttttaaggtaacgtaggggcataacggggtatgtatgtactggatggtgtggggggatgttgtgtattaccggggagagcaaattgggacaccagtctaattattcctcttcctcgcccagtagaatt

SEQ ID NO: 81504 - DNA, 865 bp, Homo Sapiens
ggggccgccgtcgtctttctctgtctcggctgaggcagccatctttctcttgccgcgtgctggtgttggaggaccctccctgcttcagatttaccaacagcatgaatcaagaaaagttagccaaacttcaggctcaggtccggatagggggcaagggtacagctcgcagaaagaagaaggtggtacatagaacagccacagctgatgacaaaaagcttcagagttctctaaaaaaactggctgtgaataatatagctggtattgaagaggtgaacatgattaaagatgatgggacagttattcatttcaacaatcccaaagtccaagcttccctttctgctaatacctttgcaattactggtcatgcagaagccaaaccaatcacagaaatgcttcctggaatattaagtcagcttggtgctgacagtttaacaagccttaggaagttagctgaacagttcccacggcaagtcttggacagtaaagcaccaaaaccagaagacattgatgaggaagatgatgatgttccagatcttgtagaaaattttgatgaggcatcaaagaatgaagctaactaaaagtttggtttttggaagctggcatggactagatttaacaaatcagctatgtggttccaaagttttacagacatggagaacatcacctgttactagttcagtaatataaatattttgtatattaataatgctgtttgttcagcatttttcggtcatttgattttgcattttgcacttcctcccaggatatttttttggtcaaaatatgaagtattggtgcagtttgagggtgttttgttttatgatttctggttagggatgcctgtcgggatcatctagatcgactc

SEQ ID NO: 81505 - DNA, 422 bp, Homo Sapiens
  misc_feature (112)..(125): n is a, c, g, or t
  misc_feature (198)..(210): n is a, c, g, or t
tttgttttttttactctagggaaaacactgacgaatggtcagagctcctatcctgatcttttcatcaaggcgcctttcctaataatatggttcaactgtgaatgtagaagtnnnnnnnnnnnnnnagaaaaagaaaactctggcgttagaggatatagaaaaatataagtacaattgttacaaataacgcagacttcnnnnnnnnnnnnntcacaacccaaactaaccgaaatttaaatgatcagaattggcagcacaaagaaaacgccctctcctgacttgtattgtggcagtctgaacgcccccagaaaattgtgccaaagagtttagaaaaataaatatacataaaagtaaacacatacacacataacagcaaacttcaggtaactattttgattgcaatcaggataacacgttcgcga

SEQ ID NO: 81506 - DNA, 445 bp, Homo Sapiens
  misc_feature (185)..(220): n is a, c, g, or t
actctagggaaaacactgacgaatggtcagagctcctatcctgatcttttcatcaaggcgcctttcctaataatatggttcaactgtgaatgtagaagtgaagaagaggggggagaaaaagaaaactctggcgttagaggatatagaaaaatataagtacaattgttacaaataacgcagacttnnnnnnnnnnnnnnnnnnnnnnnnnnnnnnnnnnnntttaaatgatcagaattggcagcacaaagaaaacgccctctcctgacttgtattgtggcagtctgaacgcccccagaaaattgtgccaaagagtttagaaaaataaatatacaataaaagtaaacacatacacacaaaacagcaaacttcaggtaactattttggattgcaaacaggataattaaatgttcaaacaatctgataaaataaccatttggaaacaaa

SEQ ID NO: 81507 - DNA, 390 bp, Homo Sapiens
  misc_feature (49)..(84): n is a, c, g, or t
gaggatatagaaaaatataagtacaattgttacaaataacgcagacttnnnnnnnnnnnnnnnnnnnnnnnnnnnnnnnnnnnntttaaatgatcagaattggcagcacaaagaaaacgccctctcctgacttgtattgtggcagtctgaacgcccccagaaaattgtgccaaagagtttagaaaaataaatatacaataaaagtaaacacatacacacaaaacagcaaacttcaggtaactattttggattgcaaacaggataaattaaatgttcaaacaatctgataaaataaccatttggaaactggtgggccttctggtgcttatattggattggactacaagtggggaatgggagctctgtggctgcacttcaaaagcaaccaac

SEQ ID NO: 81508 - DNA, 1022 bp, Homo Sapiens
  misc_feature (43)..(43): n is a, c, g, or t
  misc_feature (48)..(49): n is a, c, g, or t
  misc_feature (53)..(53): n is a, c, g, or t
  misc_feature (67)..(67): n is a, c, g, or t
  misc_feature (96)..(96): n is a, c, g, or t
  misc_feature (108)..(108): n is a, c, g, or t
  misc_feature (121)..(122): n is a, c, g, or t
  misc_feature (148)..(148): n is a, c, g, or t
  misc_feature (175)..(175): n is a, c, g, or t
  misc_feature (192)..(192): n is a, c, g, or t
  misc_feature (211)..(211): n is a, c, g, or t
ccagatcgccgaggttagcagatttaaatacagttgtggatanggttnntacntagtagtattgacntacttatgtaccatatctgtacctccatntgaaagtagagntgctagcagcaannggatatagagacttttcttgagcacntgttggatctgttttctcagcgcagcnttgacatgtgcaccctnttgtattaaacactgcaanggtgatgcaggggagcaggaaagccatcttaaactcactactgagtacgattcagtatgttcctgtggatgtctgctgtgactaatataagttcttgcagaatcagctacacttaattatgttgctgatagacaagcatccacgcttcagctggcactaagtgttttcattgtaggatcagcagcaggttaaagactgaacggttagtgaagacaaatgtcttaagaggctgcgatgtctaggttgggcttgtgacttcttagtggcctagccttcttgatggcaccttgaaagtgaacttctagaaatctacatttaaaaggcaaagctttaaaagcagagctagtctattctagttactgatgcaactaaaattctgtatttcttaagatggagccactgacgagatgtcacagtatagagcctgcagtctcaactcattgtgatcctaatggtctgggtgattggatggtttgagttgttagggattttgagtttttcattttattgcatatctgggttggatgttagactaaaggaaacccaggaatatttacctggtgttacatttaatatttaatgtaactggtctagcaacattaagggggatttctgaagccaactccggaggctgtgggctgcacattttgcactgtttttatatacttgtattcatatcctcttatcacctcagactcagacacaaggccttttacatggaaattttacaaattacttccatttatgtaaaataacgtcctgtgaccaagttgtttaaatggaaaataaagtgctttctttaaggaaaaaa

SEQ ID NO: 81509 - DNA, 1042 bp, Homo Sapiens
  misc_feature (76)..(76): n is a, c, g, or t
  misc_feature (182)..(182): n is a, c, g, or t
  misc_feature (184)..(184): n is a, c, g, or t
  misc_feature (207)..(207): n is a, c, g, or t
  misc_feature (232)..(232): n is a, c, g, or t
  misc_feature (242)..(659): n is a, c, g, or t
cgcccgtcgttacgggtgtcaacaccagtggcgagactacccgatggtactcgctgacttgggagccacgtccganggggaagcgacagtaccgtagcgcaggtcgaacagagaccacgaggagtccagggggaagcctgttcttatgtctgtcggttcgcccctctgactgagcgtcgatntntgatgctcgtcagggggcggacntatgaaaacgccagcacgcgccttntacgttcctnnnnnnnnnnnnnnnnnnnnnnnnnnnnnnnnnnnnnnnnnnnnnnnnnnnnnnnnnnnnnnnnnnnnnnnnnnnnnnnnnnnnnnnnnnnnnnnnnnnnnnnnnnnnnnnnnnnnnnnnnnnnnnnnnnnnnnnnnnnnnnnnnnnnnnnnnnnnnnnnnnnnnnnnnnnnnnnnnnnnnnnnnnnnnnnnnnnnnnnnnnnnnnnnnnnnnnnnnnnnnnnnnnnnnnnnnnnnnnnnnnnnnnnnnnnnnnnnnnnnnnnnnnnnnnnnnnnnnnnnnnnnnnnnnnnnnnnnnnnnnnnnnnnnnnnnnnnnnnnnnnnnnnnnnnnnnnnnnnnnnnnnnnnnnnnnnnnnnnnnnnnnnnnnnnnnnnnnnnnnnnnnnnnnnnnnnnnnnnnnnnnnnnnnnnnnnnnnnnaagaattcggcacgagggccatctcatatccatggttctagaagcatggtgagcacctcaatttgaataatcagtgccatgctttagctacctcttgactcactcgtttgtggcaggaaatgttcccaaattaatcagaagaattcagtgactaagaggatgtaatagtatatagcgcaggcactggaatcagctctgctgtgtgatcttggacaagctgcttctgttccgtttctcttatctggggcaatacctgtctgaatagagtgactgttgggacgaaataggttagtaaatatgtactgtaaggcattagaaccttgcctggcacatagtaagtgctcaataaacgctaggtcttgttaccttggcttcccgttaaa

SEQ ID NO: 81510 - DNA, 383 bp, Homo Sapiens
gcacacagtgctcagtccccgcaagcggtcacttctgttacctgtttgatctgctcttcaggagctgggtctccacctttttcaggaacacactgtgtgaaaagcaagccatgcttgtgtcgggaaagcccagtgggtccaatctatgtcatcaagttttagacttcagtccctctctctttttgtcttccccttttgcagacaccttggaagagcttaaggaaatagataaaggcatgtggaagaaactgcaggagaagtttgcccccaagggtcctgaggaggatcataaagcctgagctcaggccttacctcgtgcacatacctaggtgtggagtcttgtacattgccatcgtcaataaaactgccccagtttccccttg

SEQ ID NO: 81511 - DNA, 994 bp, Homo Sapiens
  misc_feature (513)..(518): n is a, c, g, or t
  misc_feature (521)..(574): n is a, c, g, or t
  misc_feature (859)..(906): n is a, c, g, or t
ggggccgactcctcccgctaaggcgggaacacgcggggcccaagatggcggccagccggtaccggcgttttcttaagctctgtgaggaatggccagtggacgagaccaaacggggccgggacttgggcgcttacctgcgacagcgggtagcacaggcctttcgggagggagagaatacccaggttgcagagcctgaggcctgtgatcagatgtacgagagcttagcgcgactccattcaaactactacaaacacaagtaccctcgccccagagacaccagcttcagtggcctgtcgttggaagagtacaagctgatcctgtccacagacaccttggaagagcttaaggaaatagataaaggcatgtggaagaaactgcaggagaagtttgcccccaagggtcctgaggaggatcataaggcctgagctcaggccttacctcgtgcacatacctaggtgtggagtcttgtacattgccatcgtcaataaaactgccccagtttccccttgaaannnnnnaannnnnnnnnnnnnnnnnnnnnnnnnnnnnnnnnnnnnnnnnnnnnnnnnnnnnngggggcggccgctcctaaagtatccccttcaagggggccccaaggcttacgccgtaaccccagccttttctttggtacaaaggtgggccccctatagggggagtcgcgtattaataaactctaggggccctgggcccgggcctttttaacaaccgcccgggaacttgggaaaaacctggctacctttggggaatctttgtgggaaaggaaccctttaacttccttgggggggtggaccataattgggacaaacacttcccttccggagaattttaaagtccctgnnnnnnnnnnnnnnnnnnnnnnnnnnnnnnnnnnnnnnnnnnnnnnnncaaacacggccaaatggctttggcgggcttgagaaaaattttgcctttccggagaggatggggtttcgtggaaaaatttattatcccc

SEQ ID NO: 81512 - DNA, 1159 bp, Homo Sapiens
  misc_feature (76)..(110): n is a, c, g, or t
atcactgactcctatgggcgctccgcgtatatcgaacgacgagcgcagcgagttatttgagcgaggaagcggccgnnnnnnnnnnnnnnnnnnnnnnnnnnnnnnnnnnncagtcgacggtaccggacatatgcccgggaattcggccattacggccgggtcatgtatttgaggaagagcagctgtctttttatatgtttttttgacaaatcatattgtattcttttgtacaaaaaagaactacttgtattctagaagaaatatgaaatgcttaatttataagcgggctggagattttttccaatattgttttctttgaaaatgaaaggggatcatctattttagttttggggtctgggaactttttgaaaatttaatttgtggaccaatgttttgtgaaagctaaagagggcaggggttaaaatagggcttgaatttctcattctgtatagaccagcaaacttccctgtgcaaggcaagtttacatcacaaatccaagaatgtttgcatcctaaatgctagtttgcttcagcccctagttaacctcaggacttggtttgcatataaaaggtagacagctgatatgttttcatgaataaatattgtcagccagaaaaggttggtgtcaggtaatgcatatatttttaagctttgtcttatatttatttttcatttagtttttattgggaatggttttcaaagaactctcagttctgcctaggtgtttttgggggagccctgttttccatagtgtaattccatttaagaggttgtctaaaagtctttttaattaatagaaagattttaatatccaagagtagtcaaattaaggatataaactttccacaccttcctgtcgtgacagataaaagcacagaaaggacaacccttgaaatcatgtaacgttggtcatttcaatattttgtacctgttttaaattctgttagtgtatttacttcattgtaaatatttttgagggtacctttgtattttgcttttgaccttggttctgtgatttggatgtcaacaacttccctaaaaagcaccagtgtgttaggttctaatgtcatgacccaatttgtgttattcatctttaatcctgttttcagtctctatgtgtacagcagtatttttaataaagaattacagagaaaaaaaa

SEQ ID NO: 81513 - DNA, 560 bp, Homo Sapiens
  misc_feature (260)..(304): n is a, c, g, or t
acaggtacaaaatattgaaatgaccaacgttacatgatttcaagggttgtcctttctgtgcttttatctgtcacgacaggaaggtgtggaaagtttatatcgtttatatccttaatctgactactcttggatattaaaatctttctattaattaaaaagacttttagacaacctcttaaatggaattacactatggaaaacagggctcccccaaaaacacctaggcagaactgagagttctttgaaaaccattcccaatnnnnnnnnnnnnnnnnnnnnnnnnnnnnnnnnnnnnnnnnnnnnntgcattacctgacaccaaccttttctggctgacaatatttattcatgaaaacatatcagctgtctaccttttatatgcaaaccaagtcctgaggttaactaggggctgaagcaaactagcatttaggatgcaaacattcttggatttgtgatgtaaacttgccttgcacagggaagtttgctggtctatacagaatgagaaattcaagccctattttaacccctgccctctttagctttcacaaaacattggtcca

SEQ ID NO: 81514 - DNA, 805 bp, Homo Sapiens
ggggtttctgctgatgtactccacggttctgtgcagctattacaattcagccctgacgacagcagtggttggagccatcaagaatgtatccgttgcctacattgggatattaatcggtggagactacattttctctttgttaaactttgtagggttaaatatttgcatggcagggggcttgagatattcctttttaacactgagcagccagttaaaacctaaacctgtgggtgaagaaaacatctgtttggatttgaagagctaaagagtctgcagcaggattggagactgacttgtgactgcgggctgggggggcattcccagtaggaatgtgaagccagaggtttcggattcgtgacatccaccccctgggcaagtgagagcatctgcaaaatgcaaagagaactacctcatatgcaggatgagccaatggcagtctcaagaaatgtactcgggcgacaccttacctgtggaaagcaaatcttttcaaaataagccactgggactcggtaggtggagccccagctgctcttctagggacctatggggccttcgtggcatctctgtgctgtgtgctggggaggaggttgatgtaatggtgactcttttctgatcagcaccttggccgtgattcccaaggtcccagccaaagcaaagggccagttgtttcagtttaaacagacatgtctttagtctaataaaattagttaactgccagtaaagttatttgttagctttgatgaaagctatgttggtatctttccctaatcatcaaagtaaataaaaaatcatttctatgtatgcc

SEQ ID NO: 81515 - DNA, 1194 bp, Homo Sapiens
  misc_feature (99)..(150): n is a, c, g, or t
  misc_feature (890)..(890): n is a, c, g, or t
gtctgcaaatgctgggcaggtcacaggccaccctgcaacccagcgattagactgggggagatagagcttattgggctgtttccctggttcatgtgaccnnnnnnnnnnnnnnnnnnnnnnnnnnnnnnnnnnnnnnnnnnnnnnnnnnnntgtcacaacagtgttccatgcttgcactcagaaaatggcagaacagttacaacaatgagaatctttatgcatatagctttgtgatcaatacaatccttcagaacaacaagagacaaacaaaggaatacaatgtcccaaacagctgcagtccacaggctgacattgctaactagatttagatcatctggaggcttttgtaagaggaactgaggtgcagaggcatcagaatgagttgattcccggcaaaagggctaagaggctacagacatatctaaaaatcaagaaaccactacttgttaagtacttctggtgtttgcatacagtgtccaatacatagggaagatagcaagtccatactggtctttgtacatgctgtgtggtagaggctactgcaggtttctttattttctaaagtaggcaaggctcataaattgaccaattcacattgtgattacttggtacaatgcatgcatgttattggtacacagagtgctttaataggaatctgttggattttcaaaattctgacaaggccatttttacctcagaggactattatcctttcacttattcattcattcaacagatacgtatcccaaactgtgtgttacctcatccatccccttctcaggaagaccaaccctggaaataggtgagaggagagtgttcacagggcacagcatgtgttgttgatactaagtttgtggacagcaatggtacaatcccaaggacttgtatangtggcctctacctcattaaccatttccttgaacccagaccatcatggagctaatgagctgattcaagagaggaaagacaattctccattcaagtcagactccctcaaggggaaatgactttctgactcactcgtgccgattcttgggctcgaaggcaaatccctaagtgagtctattaatccggatcagtcaagctggtcctgtgtaaatgtatcgctcaatccaccacatacagcggacataattaaaccgggggccatgatgacaccaataatggtgcccatgcgcttcatcggacttctgc

SEQ ID NO: 81516 - DNA, 670 bp, Homo Sapiens
attggatgacatctacaaggctgcggtagagcctcgacagaagagcagaaaaatgagttcaaggcagccttcgacatcttcgtgctgggcgctgaggatggctgcatcagcaccaaggagctgggcaaggtgatgaggatgctgggccagaaccccacccctgaggagctgcaggagatgatcgatgaggtggacgaggacggcagcggcacggtggactttgatgagttcctggtcatgatggttcggtgcatgaaggacgacagcaaagggaaatctgaggaggagctgtctgacctcttccgcatgtttgacaaaaatgctgatggctacatcgacctggatgagctgaagataatgctgcaggctacaggcgagaccatcacggaggacgacatcgaggagctcatgaaggacggagacaagaacaacgacggccgcatcgactatgatgagttcctggagttcatgaagggtgtggagtagatgctgaccttcacccagagctgcctatgcccagcctccaactccagctgagtcctggggttggggagggggtcggggtcccaggacctgagcctggccatgtcctcaaccccaaatcccccgactccctccccagatctgtcctgggggatgcaaataaagcctgctctcccaaggtaaaaaa

SEQ ID NO: 81517 - DNA, 1028 bp, Homo Sapiens
  misc_feature (71)..(71): n is a, c, g, or t
  misc_feature (122)..(122): n is a, c, g, or t
  misc_feature (186)..(186): n is a, c, g, or t
  misc_feature (203)..(203): n is a, c, g, or t
  misc_feature (215)..(215): n is a, c, g, or t
  misc_feature (219)..(219): n is a, c, g, or t
  misc_feature (340)..(340): n is a, c, g, or t
  misc_feature (383)..(383): n is a, c, g, or t
  misc_feature (385)..(385): n is a, c, g, or t
  misc_feature (399)..(399): n is a, c, g, or t
  misc_feature (425)..(433): n is a, c, g, or t
  misc_feature (504)..(551): n is a, c, g, or t
cgctccttctccgctgttttgtgaattggcgtacatccacagaacgttgactgtcgaatatcgatcattangattgcctgggccagatcgcaggagacccactccaagctctccctaacgcnacctcctaggcctgtgggactggggcctgatgccacccaaggctctcaaaacacgcagcccctncagccctgagcccgctntgccatcacctntgcntggacccgagatggctcctggccctggtccccagaagatgcagctaggcctcgccgccagaccagagaagggacaggtggctgggcagtcagggaaggaggtcgccccgaatctgacattntggagagattcctttcaccctcctgtcccccccacctcccttntntaattcttcttttntcaatgataaagtcttaaaacacagnnnnnnnnngacttcagagaattaggtagatgaagcactttatacagtatatatcttcagcttaaatttgttttgagtannnnnnnnnnnnnnnnnnnnnnnnnnnnnnnnnnnnnnnnnnnnnnnngtaaatgtttgaagcaaactaaaaagacgtgggcaatatttaccaaaacaaaacagaacccaaaaaattgtacatcttgatcttagcaaatatccttattgtagagacacttaataaagagatggtattttaatatctgcagttctgaggtagggtgtaacttagttctacattgtgatttaggaatttttaaacctttcttcttcaggggagaagtgacccaggcctcgagtttagtgctaaagccactagtgtacttatgctgtcacctaaccaccacatgcgacatggaggcagaggctaaatataggggctttcttaagaaagtgagaggaaattagcaagcattattagtgtttgactactgctatcaagtgaattcaaaggaaacaggtttttatgccatatttaagttacagaaaccaggcatgcttagaatagtttctaaggtgacagagtgagactccatctcaaaaa

SEQ ID NO: 81518 - DNA, 2159 bp, Homo Sapiens
tcagtagaggcgggtgtgtaatcggcacgaggatagttgtctaccgcaggggtcgggtcccctgactctcaccaggcctcggcccagaaagcgagcaaaggtcgaagaccaggagctgccaacccagcccgaggccccagacgagcaccaggacatggacgcagacccgggaggccctgagttcctgaagacgcccctggggggcagcttcctggtgtacgagtccttcctctaccggcgggagaaggcggctggggagaaggtgtattggacctgccgggaccaggcccgcatgggctgccgcagccgcgccatcacccaggccgacgggtgactgtcatgcgtggtcactgccacccgcccgacctgggaggcctggaggccctgaggcagcgggagaaacgccccaacacggcgcagcgggggagcccaggaggccccgagttcctgaagacgcccctggggggcagcttcctggtgtacgagtccttcctctaccggcgggagaaggcggccggggagaaggtgtattggacctgccgggaccaggcccgcatgggctgccgcagccgcgccatcacccagggccggcgggtcatggtcatgcgcaggcactgccacccaccggacctgggcggcctggaggccctgcggcagcgggagcacttccccaacctggcgcagtgggacagcccagatcctctccggcccctggagttcctgaggacttccctggggggcaggttcctggtgcacgagtccttcctctacaggaaggagaaggcggctggggagaaggtgtactggatgtgccgggaccaggctcggctgggctgccgcagccgcgccataacccagggccaccgcatcatggtcatgcgcagccactgccatcagcctgacctggcaggcctggaggccttgaggcaacgggagcggctccccaccacggcccagcaggaggacccagaaaagattcaagttcagctgtgcttcaagacgtgttctcctgaaagccagcagatttatggggacatcaaagacgtcagactggatggcgagtcccagtgaggcgatgtgggcagaggagctccgagccgcccacccaaggtggcttcacatccacacaggcacttcccatccacctaggtttggcttagcagaaacttcttttcattcttccaaagcatcgatggtcttcgcgtctcctcaggaggtctcccaggaggaattcttggatggtgtcctcatgtcggcggagaacagtgctcagagctggcacttgcagacgcagctgtcgtggggcagggcggtggcgccttcctgacctttggaagacatgacaaagctgcctggacacggacgcccctgctgtacggccacagcacccctgggtttgcagagcacgcagccttcctagggctttccacctggcgaggccccgctctgctcagcacggtgcaaagtgaatgctgctgtcttggagcctgggcacgtttggggaagttcctgcttcaaactgagctgccccgcataggccaggtcaacccacaccaatcttttctggacaggtgctgggtaggccttcctggtctctggccgcctgctgccagggtgtggccatccccagcaaccggagccggccaaaccagaggcctcgctccgcactccacactttcctttctgtgctccttccaagttaaattaaaccccctctccacgattcccacggcaggcgtcattcccgagatgggagccagtccaggggtcagcaggagccagcgctgggcacacgtgccctggctgaggccagcggcatcctgggtggcccaggtccatcctgggcagcaaaggcgtgtccccttctgtcagacagcttcacagagtgtggcttcaccagtcagagggagcagtccggagaggcaagatgaccccaccgggactgcagagcctcctccttactaacaaggacctgtccgcagccgcgaggtccttcactcccaccctgtaattgtggggggagtgccagcaacaggcctgtcccctggcaagttggccacggaacccaccatgcactgcaaggctgtgacagcctgggcacccctgcttctcctctgcttgtacggttcccccaataaatcctattttccatctcaaaa

SEQ ID NO: 81519 - DNA, 1691 bp, Homo Sapiens
  misc_feature (152)..(152): n is a, c, g, or t
  misc_feature (175)..(606): n is a, c, g, or t
ccaatggtccacggtgattggaagcccccttccgaggaaagcgacagtccgtagcgcagtcgacagggaccagaggactccagggaacctgtatctttgtctgtcggttcccactttgactgactcgatttttatgctctcagggggcgacntatgaaaacgccagcacgcgccnnnnnnnnnnnnnnnnnnnnnnnnnnnnnnnnnnnnnnnnnnnnnnnnnnnnnnnnnnnnnnnnnnnnnnnnnnnnnnnnnnnnnnnnnnnnnnnnnnnnnnnnnnnnnnnnnnnnnnnnnnnnnnnnnnnnnnnnnnnnnnnnnnnnnnnnnnnnnnnnnnnnnnnnnnnnnnnnnnnnnnnnnnnnnnnnnnnnnnnnnnnnnnnnnnnnnnnnnnnnnnnnnnnnnnnnnnnnnnnnnnnnnnnnnnnnnnnnnnnnnnnnnnnnnnnnnnnnnnnnnnnnnnnnnnnnnnnnnnnnnnnnnnnnnnnnnnnnnnnnnnnnnnnnnnnnnnnnnnnnnnnnnnnnnnnnnnnnnnnnnnnnnnnnnnnnnnnnnnnnnnnnnnnnnnnnnnnnnnnnnnnnnnnnnnnnnnnnnnnnnnnnnnnnnnnnaagaattcggcacgaggcagaaatgctttgttgaacacatcctttgtacgaagccattgccctgcaggcagcctgctccaattcgaggattttggattgtacctgacattctgggacccacgatgatctgcatcaccagtacctatgaatgcctcatatggccgttattaagtacagtccatccagcgtctcctcccctgctttgtactcgagaagatgttgaagtggcagagtctcccctccgtgttctggctgaaaccccagattcctttgaaaagcatattagaagcattttgcaacgtagtgttgccaatccagcatttttgaaagcttctgaaaaggacatagcccctcctcctgaagaatgccttcagctcctcagcagagccacccaggtgttcagagagcagtacattctcaaacaggacttggcaaaggaggagattcagcggagggtcaaattattatgtgaccaaaaaaagaaacaactagaagatctcagttattgtcgagaagagaggaaaagtctgcgggaaatggctgagcgtttagctgacaaatatgaggaagctaaagaaaaacaagaggatatcatgaacaggatgaaaaaactacttcacagttttcactctgagctcccagttctctctgatagtgagcgagacatgaagaaagaattacagctgatacctgatcaacttcgacatttgggcaatgccatcaaacaggttactatgaaaaaggattatcaacagcaaaagatggagaaggtgttgagtcttccaaaacccaccattattctcagtgcctaccagcgaaagtgcattcagtccatcctgaaagaggagggtgaacatataagggaaatggtgaagcaaatcaatgatatccgcaatcatgtaaacttctgacaccaccaggagctgactcacacctgaactgaacaccattgaaggcttaaacccatattgtaaaacaggtagaattatctaatttataaaaaggtgttttgatgacctttggtgtggttcatctttttaaatatgttgttttataataattgagtaaatgcttttatttaaaaa

SEQ ID NO: 81520 - DNA, 430 bp, Homo Sapiens
actcaatagggttcagggaggttctggcagtgtgcagtgtgaaataatcctgagtccttgctgaacacaactgtaggcttgagttataaagcacattccaaattttaaataaaagcatttactcaattattataaaacaacatatttaaaaagatgaaccacaccaaaggtcatcaaaacacctttttataaattagataattctacctgttttacaatatgggtttaagccttcaatggtgttcagttcaggtgtgagtcagctcctggtggtgtcagaagtttacatgattgcggatatcattgatttgcttcaccatttcccttatatgttcacccctgtaaaattgtaaagtcactcacttttggaattataataaaccatttatatggattcttaagaatttaaactggtaatgttgaaacatct

SEQ ID NO: 81521 - DNA, 977 bp, Homo Sapiens
  misc_feature (160)..(160): n is a, c, g, or t
  misc_feature (170)..(170): n is a, c, g, or t
  misc_feature (186)..(186): n is a, c, g, or t
  misc_feature (191)..(191): n is a, c, g, or t
  misc_feature (196)..(196): n is a, c, g, or t
  misc_feature (228)..(228): n is a, c, g, or t
  misc_feature (259)..(259): n is a, c, g, or t
  misc_feature (336)..(336): n is a, c, g, or t
ttcccagcgtgggttcacttgtacggaatgcgccacacgcagagagcgagacagcgcggtcccagcaccagccactgcccgcccattgcgaggtcagtgagtgacgtgactcgacgagacaggaggcacaggacgcgatgcccagcgcgtgagtttaccntcggggtgcntgttgccctccacagngaccnccgcntgcagacatcttcccaagccagctccactgcncagcccccaagaggcagctccagaagctgcncagggctccggacccccatcccatggtggcaggtgcagcggtggggagtggctctttctggactcccagtgcctttntgctggacactgtgtccttatggcttcactgcaggtaatgcctttcccttcaggaagccccagaacacccacaggtcttggtaacaaacgccaccttacactctgcaggctgcagcggcagctccagatggcctcctgagctggacgaccccaggtctccagacatctagggaccagagcaggtttgggaacacagagggaagacaggatgggagtgtagccacagaacccacctgcaccctgacaggcacaccccactgaagagcctgagtcccaggaggcctcctggaagcccaggactgcccacccaccacgctggtgcccaccgcctggccagccaagccctgccgatcagacatgtgggctccccgaagcccagccagagactgccgtgctgtgggtgccaccaggcccagggactgcagcctgagctccccgaggcccagggcagccgggtgaggactctgtcctgtgtcacctctctccaggtgtccagctgtctcatgcctttttgtcctgtcctcagctctccgtgtggtcagcgaaaccattgttttctgttaggactcagttgcaagaacagaaaccctgcccccacttaataataaaaaagaaagtttattgatgggtggttgcaaaac

SEQ ID NO: 81522 - DNA, 1123 bp, Homo Sapiens
  misc_feature (11)..(11): n is a, c, g, or t
  misc_feature (33)..(33): n is a, c, g, or t
  misc_feature (231)..(231): n is a, c, g, or t
  misc_feature (242)..(242): n is a, c, g, or t
  misc_feature (246)..(246): n is a, c, g, or t
  misc_feature (252)..(252): n is a, c, g, or t
  misc_feature (268)..(268): n is a, c, g, or t
  misc_feature (282)..(282): n is a, c, g, or t
  misc_feature (1033)..(1058): n is a, c, g, or t
gaacgtttacntgatagaattatcgactcactnaggaattgacctcgagccaagatccgccagagttggggtggccacagatgtccagagtgactgttcctcctcctagctatggggacccatcatgctttatcggttgatgcctgtggagaacaagaaccacgcagaaggacgtgtcaccctcctcaagatgcctgaaggaacgtcttgctgaggagcagaaggagacgnttccagattcnttcntcaatntcctggagcatcgctntagccccagtgatnccatgccttggcttatactatttttgaaaatatcaagatcttccactccaacgaggttatgagtcagttctatgcagtcttgatgggaaagcggagtgagaatgtgtatgtcacccagaaggagacagtagcccagctgctgaaggagatgacaaatgctgacagtcagaacgaggggctactaaccatggagcagttcaacactgtcctcaagagtaccttccctctcaagacagaagagcaaatccaggagctgatggaggcagggggctggcatcccagcagcagcaatgcagacttgctcaactaccgctcactgtttatggaggatgaggagggccagagtgagccctttgtgcaaaaactctgggaacaatacatggatgagaaggacgagtacttacagcagctaaagcaggagcttggcatagaactccatgaggaagtgactctgcccaagctgcgagggggcctgatgaccatcgaccccagcctggacaagcagacagtgaacacctacatgagccaggccttccagctccctgagtcggaaatgccagaggagggtgacgagaaggaagaagccgtggtggaaatcctccagactgccctggagcggcttcaggtgattgacatcaggcgtgtgggacctcgagagccagagcctgcaagctaggaacttgtgggcagcctgcgtactccagtcctgctaacccctagcttttaatataaaagtgtttgtctgaatccnnnnnnnnnnnnnnnnnnnnnnnnnncctgagcaggcggccgcaagcttattccctttagttgagggttaattttagcttggcactgcccg

SEQ ID NO: 81523 - DNA, 1180 bp, Homo Sapiens
  misc_feature (1085)..(1115): n is a, c, g, or t
ggcctgggtggcgaattcggcacgaggctggatccccgccagggtggcccagacgccagcccttccctgtgtggctgcactgaggtgggtgttgaagagccccctaggggacacacagcttccaggaggagggaatgtcctctaagcatgctcctggcctctcaaggtggcgcttgtctaattattcacttgggaagaatgactagctcagccagcggctctttctgctttgttctggcgactttcctgggcaggcctttccacctggggagctggctcatcctgcacagctgggccgtggtgggcctgtctgcttgattctggggttcagtgtaggtcagctgatggcgaaccatggtggtggtttggcttctgttcttattcttgagttttgataccacgcagaccttgggtggggagagcttcctgcacagctctaagcggcctgtggccttggaactgcctgcgtaagtaacggaggggctgctggtcctgttcaggcccgtgctggggacgccgcttagacaatgttgcccagagtcctgtttaccctcccagggttcattcttcccaagaactcaaattcctttctcattggagcctagtgaaaccaaatgaacgggacctgctggcctcaggaggcaggcagagtttaaaataaaactttctcatgatttcttgaacatctttccctgtttgtatatacactttgtgtttatttttcagtagctgcagtatattttttttcaatattcagtataatgcagtgtatttcatcatatgctgtatggagagtgggcagacttctgtggagggcccgatagtaaccatttgaagctttctggacctgtggtcttagtcccagcgattctgcagagcggccatcggcagcatgtcaaccatttgcatggctgggctccagggaaactactgacaacgacaggtggtgggccatagtttcctgacccctgtgctatgccagaatttctttttcctcttccctatgagtggacctaaatatgttaattccttttcacctttcaaaacggacagccccttgaacattaaaaactttgcagaccctnnnnnnnnnnnnnnnnnnnnnnnnnnnnnnncctgagcaggcggccgcaagcttattccctttagttgagggttaattttagcttggcactgcccg

SEQ ID NO: 81524 - DNA, 963 bp, Homo Sapiens
  misc_feature (128)..(128): n is a, c, g, or t
  misc_feature (179)..(179): n is a, c, g, or t
  misc_feature (232)..(232): n is a, c, g, or t
  misc_feature (238)..(238): n is a, c, g, or t
ctcgctgatgtttgatgtggcgtacatcaaccgacgttgactgtacgattatagatcattaggattgcctcggccagaatcgcagaggtgccgaagcgagtgagcaggacctgcactgacgtgagcgntgatggccctgccaagtggagaagcgaggggcctgcggacaagtgcgggcntgacagagccctggcccagagcagtccagcctcaacagcacccggacagaacntgcatntgcagaagctctgaccgcctgtgaacatgaccgccaagtactccaggaacggctggatgccgcccggcaggcattatctgaggcacggaagcagagcagctccctgggcgagcaggtgcagacgttgcgaggcgaggtggctgacctggaactgcagcgggtggaggccgagggccagctacaacagctacgggaggtgctgcggcagcggcaggagggtgaggctgcagccctgaacaccgtccagaagctgcaagacgagcggcggctgctgcaggagcgcctgggaagcctgcagcgcgccctggctcagctggaagctgagaagcgggaggtggagcgctcagccctgcggctggagaaggaccgtgtagccctcaggaggacgctggacaaggtggagcgggagaagcttcgtagccatgaggacacagtgcggctgagcgcagagaagggccgcttggaccgcaccctcacgggggctgagctggagctggcagaggcgcagaggcagatccagcagctggaggtctgaccccacccagtccgggaccctaacttcatccctagtatgagtgctcagcaattccagtggagctgatggcccagccagcccagggcccataaccccctcccccaggagccctgagccttccagtgacccagcgggccatggagggatgggttctccctaaggtgtacagaaaagacacgaaaggcctgtt

SEQ ID NO: 81525 - DNA, 988 bp, Homo Sapiens
  misc_feature (98)..(228): n is a, c, g, or t
  misc_feature (249)..(249): n is a, c, g, or t
  misc_feature (255)..(363): n is a, c, g, or t
  misc_feature (400)..(421): n is a, c, g, or t
cctgctatcccttgatttggataccgtatccccccttgatgagtgataccctcccccaccgaacaccgagccaggggtcatggcgggaaacggaagannnnnnnnnnnnnnnnnnnnnnnnnnnnnnnnnnnnnnnnnnnnnnnnnnnnnnnnnnnnnnnnnnnnnnnnnnnnnnnnnnnnnnnnnnnnnnnnnnnnnnnnnnnnnnnnnnnnnnnnnnnnnnnnnnncagccttacaacttatcgctncccgcnnnnnnnnnnnnnnnnnnnnnnnnnnnnnnnnnnnnnnnnnnnnnnnnnnnnnnnnnnnnnnnnnnnnnnnnnnnnnnnnnnnnnnnnnnnnnnnnnnnnnnnnnnnnnaagaattcggcacgagggcggccgcggctgtaggctnnnnnnnnnnnnnnnnnnnnnnttttaatttaaaaaggaaaatgggtggttgggagagaaactagaacagaagatgtgcaatagggctcagagcagccccaggaagtgggccatgtctgtggggagcagtggcttgctgagcccacctgctattgttctgcacgaggctgggcctgcctcactctccagggcctcatgccccattctgggcctgtggtgctcgtggctgaggctccacagggctgcaagtgccctgccaggctctaaggcccgaagaacaggtgatatcgggggcgctgcagagctgggctctagcaggacagttcttttgtagccaggggaccctagaagtggggtggggcggctccagggctttccagcataccctgcccctggatgggaaaggcagggtcagggcccactgagacccatgcagagtttccaggtgtgcactggaagtgaggtcacatgagcagcgtgggaagaagactctgtcaagactctcagaagaacctggagtaattgtgcctgaagctcagcgtgaagtctgaaatatgcaacagaagaaatatatctctatctctctaaa

SEQ ID NO: 81526 - DNA, 1128 bp, Homo Sapiens
  misc_feature (805)..(805): n is a, c, g, or t
  misc_feature (1061)..(1087): n is a, c, g, or t
cttgcacgtagtctcttacactagatgtgatctatttgcaatgtctgactctgtctctcccctgaatgtaattgtaggtcaccttagtattgtacaatattgaaaagacaccatgatgtattttctcttgttggcctggatgttataaagtggaacccaaccatcttggaattatcccataaaggctgatgttaacatatgaaaaagagtactgtctataacatgttcttcagtactttctaaatgctgtgtactgggtgtaaggtatttgtcatcccacattagtaaccccaataagccaagttgaaggtggattatagtaaatgtacaacttgcctcactaggcttcaagtaaaaagtttcctctcatctttgactgtaagatgtcaaagcgaggcagcctgcttgaacaggaaacaatacacaaaaggttccaactcgcatgagctacctccctcttttcataaagtatttttgacatatctgtcaacccacttgactgtgtgggtgcattgagaacacaaagtttcctagacacacaggagaagtagcttaaattcactaatattaatttaaaaagcagcatgaaccctctacttataaacaagggtttggtgtttttaaagtgtgtatacatacatacacatacacacatgcacatatgtcaaatataatttttttaaaaattgagtggcacatcaaagaaatgtgaaattaaaaagaattcttccaaaaagccagcttccattaaaatgggaattcagtatgcaccataccggaatgcatattaggtagaaccatacangaatttaggtggataagggcttagaaattttgagcaacaaaatttgtcacttgaccagattttatcttcaaaaactgtattctactccttctcctttgctgttgaggtaacttgcatattatatgtattctgtatactcagttcataaggttatttagcacaaagtatagcagcttcacctggagagctgcttttgctcagtaaattcaacttccatgttttatctttttttgttcaataaaaacatttaatgtcnnnnnnnnnnnnnnnnnnnnnnnnnnncctgagcaggcggccgcaagcttattccctcttagtgaggg

SEQ ID NO: 81527 - DNA, 723 bp, Homo Sapiens
  misc_feature (34)..(34): n is a, c, g, or t
  misc_feature (688)..(688): n is a, c, g, or t
gacacacttaacaagcgaatacatcacctgcttntaatgtctgatgtcttttctttaggacgtcagagcccaggccaccattccacttctgggctatgtggtggatgaaatgccaaggagcgcagacctgccacacagtttcaaactgacccagtctaagtccgtgcacagctttgctgcagacagtgaggaactgaagcagaagtggctgaaagtcatccttttagctgtcacaggtgagacaccaggtggtccaaatgagcatccagccaccttggatgatcatcctgaacctaagaaaaaatcagaatgctgaactcctccaggaccagccatggtgtggaggtctcaggacttacagctcaagacattcccagctcttcttacacatctgctagcactttatgttgaaaaatataggcccataaatgcatcttttgaggactattttcctatgtttatgtactcttagtgaaattagtgtgcagagtcattctaccgataaagttttgaaataatgtgaaaactggagcattttttgagctattccttgaatatgtgcttttttgtcttgaagaaatggtgtatcaattgattctgtcaccgtcaggttagaatgagcacttccatttaagaaatcctttcatgtcttcttctctttcacatgtaggacctggaacagtttganagatatacctccatgttgccaaaatagatccatgg
